(19) United States
(12) Patent Application Publication
(10) Pub. No.: US 2009/0005268 A1
(43) Pub. Date: Jan. 1, 2009

(54) Compositions and Methods for Cancer Diagnostics Comprising Pan-Cancer Markers

(75) Inventor: Kurt Berlin, Stahnsdorf (DE)

Correspondence Address: DAVIS WRIGHT TREMAINE, LLP/Seattle, 1201 Third Avenue, Suite 2200, SEATTLE, WA, 98101-3045, US

(73) Assignee: Epigenomics AG, Berlin (DE)

(21) Appl. No.: 11/996,267

(22) PCT Filed: Jul. 10, 2006
(86) PCT No.: PCT/EP06/07067

§ 371 Date: Jun. 16, 2008

(30) Foreign Application Priority Data
Jul. 18, 2005 (EP) PCT/EP2005/007830
Sep. 29, 2005 (EP) 05021331.3
Oct. 17, 2005 (EP) 05090289.9
Dec. 23, 2005 (EP) 05090346.7
Jun. 15, 2006 (EP) 06090110.5

(51) Int. Cl. C40B 50/06; G01N 33/53; C12Q 1/68

(52) U.S. Cl. 506/26; 435/7.1; 435/6

(57) ABSTRACT

The present invention relates to compositions and methods for cancer diagnostics, including but not limited to, so-called “pan cancer markers”. In particular, the present invention provides methods of identifying methylation patterns in genes associated with specific cancers, and their related uses. In another aspect, the present invention provides methods of selecting and combining useful sets of pan cancer markers.

### FIELD OF THE INVENTION

[0001] The present invention relates to compositions and methods for cancer diagnostics. In particular, the present invention provides methods of identifying methylation patterns in genes associated with specific cell proliferative disorders, including but not limited to cancers, and their related uses. In another aspect, the present invention provides methods of selecting and combining useful sets of markers.

### SEQUENCE LISTING

[0002] A Sequence Listing has been provided on compact disc (1 of 1) as a file, entitled seq-prot.txt and which is incorporated by reference herein in its entirety. For the purposes of the present invention, all references as cited herein are incorporated by reference in their entireties.

### BACKGROUND

[0003] Several diagnostic tests are used to rule out, confirm, characterize and/or monitor cancer. For many cancers, the most definitive way to do this is to take a small sample of the suspect tissue and look at it under a microscope i.e. a biopsy. However, many biopsies are invasive, unpleasant procedures with their own associated risks, such as pain, bleeding, infection, and tissue or organ damage. In addition, if a biopsy does not result in an accurate or large enough sample, a false negative or misdiagnosis can result, often requiring that the biopsy be repeated. Accordingly there exists a need in the art for improved methods to detect, characterize, and monitor specific types of cancer.

[0004] In order to do so, an important goal for many scientists involved in oncology research is the identification of specific and sensitive tumor markers. Commonly used markers for immunohistochemistry in tissues are e.g. cytokeratins (e.g., K19, K20). For high-throughput screening, circulating protein markers that are secreted or shed from the surface of tumor cells are particularly preferred. Carcinoembryonic antigen in colorectal cancer, CA 15-3 and HER-2/neu oncoprotein in breast cancer, PSA in prostate cancer and CA 125 in ovarian cancer all give an indication of the presence of a tumor and enable the detection of tumor cells, furthermore they are used to monitor therapy or recurrence of disease. Histological and immunohistochemical approaches are routinely implemented to identify nodal metastases for staging purposes.

[0005] The high rate of disease recurrence in node-negative patients raises the question if current protocols provide sufficient sensitivity and if other tissues (bone marrow, blood) should be examined to discover occult micrometastases. Molecular strategies for the detection of nucleic acid markers are of high interest due to their high sensitivity.

[0006] PCR-based techniques specifically amplify DNA sequences and provide a highly sensitive diagnostic platform minimizing the amount of starting material needed. Several genetic alterations acquired by neoplastic cells can be used for their identification. Cancer-specific transcribed gene products have been used to detect the presence of a low concentration of tumor cells.

[0007] Nucleic acid-based assays are currently being developed for detecting the presence or absence of known tumor marker proteins in blood or other bodily fluids, or of mRNAs of known tumor related genes. Such assays are distinguished from those based on screening DNA for mutations indicative of hereditary diseases, wherein not only mRNA but also genomic DNA can be analyzed, but wherein no information can be gathered on the actual condition of the patient.

[0008] For detection of acute disease status using marker gene approaches, the analyzed DNA must be derived from a diseased cell, such as a tumor cell. The detection of cancer specific alterations of genes involved in carcinogenesis (e.g., oncogene mutations or deletions, tumor suppressor gene mutations or deletions, or microsatellite alterations) facilitates determining the probability that a patient carries a tumor or not (e.g., WO 95/16792 or U.S. Pat. No. 5,952,170 to Stroun et al.). Kits, in some instances, have been developed that allow for efficient and accurate screening of multiple samples. Such kits are not only of interest for improved preventive medicine and early cancer detection, but also utility in monitoring a tumors progression/regression after therapy.

[0009] In contrast to DNA detection, however, RNA detection requires special treatment of clinical specimens to protect RNA material from degradation and reverse transcription prior to PCR amplification. Despite very promising studies, the success of PCR-based tests still seems to be hampered by the lack of specific markers with sufficient coverage in the tumor population and the required tissue processing protocols, which are often not compatible with established pathological assays.

[0010] In the past few years the detection of minimal residual disease in bone marrow has been shown to be able to provide a valuable new prognostic tool. Standardizations of protocols and procedures are needed in order to compare different studies and to evaluate new diagnostic approaches. Statistically significant data still has to be generated in order to answer the question whether detection of circulating tumor cells in the blood can predict relapse and survival. Technical considerations about blood processing and chosen tumor markers are needed to achieve necessary sensitivity and specificity for clinically relevant studies.

[0011] Technical advances have to be pursued in different tissue types to increase detection sensitivity. The establishment of specific detection strategies that use and find the appropriate markers is required for different tumor types, but also for different cancer subsets. Breast cancer is a good example of the heterogeneity of malignant diseases and demonstrates the inability of a single marker to detect all malignancies. The application of several, complementing markers might be necessary to successfully establish acceptable detection sensitivity throughout tumor populations. The design and implementation of multimarker assays requires careful technical considerations including innovative detection strategies (e.g., multicolor approaches) and particular emphasis on consistent specificity. The clinical application of new technologies that promise high sensitivity for the detection of circulating cancer cells still has to be conclusively demonstrated. Therefore, a standardization of protocols is required and most importantly highly specific tumor markers that detect heterogeneous tumor populations are needed.

[0012] Microarray-based expression profiling has emerged as a very powerful approach for broad evaluation of gene expression in various systems. However, this approach has its limitations, and one of the most important is the requirement of a certain minimal amount of mRNA: if it is below a certain level due to low promoter activity, short half-life of mRNA, or small amounts of starting material expression of the gene cannot be unambiguously detected. An additional concern is the stability of RNA, which in many cases is difficult to control (e.g., for surgically removed tissue samples), so that the absence of a signal for a certain gene might reflect artificially introduced degradation rather than genuine decrease in expression.

[0013] The genome contains approximately 40 million methylated cytosine (5-methylcytosine) bases, otherwise referred to herein as “fifth” bases, which are followed immediately by a guanine residue in the DNA sequence, with CpG dinucleotides comprising about 1.4% of the entire genome. An unusually high proportion of these bases is located in the regulatory and coding regions of genes. Methylation of cytosine residues in DNA is currently thought to play a direct role in controlling normal cellular development. Various studies have demonstrated that a close correlation exists between methylation and transcriptional inactivation. Regions of DNA that are actively engaged in transcription, however, lack 5-methylcytosine residues.

[0014] DNA is a much more stable milieu for analysis, and DNA methylation in regions with increased density of CpG dinucleotides (CpG islands) has been shown to correlate inversely with corresponding gene expression when such CpG islands are located in the promoter and/or the first exon of the gene. A number of techniques have been developed for methylation analysis; arguably the most popular of them-methylation-specific PCR or MSP-takes advantage of modification of unmethylated cytosines by bisulfite and alkali which results in their conversion to uracils, changing their partners from guanine to thymine. This change can be detected by PCR with primers that contain appropriate substitutions. A substantial amount of data on gene-specific methylation has been acquired using MSP.

[0015] Several markers have been described in the state of the art which are characteristic for the occurrence of cancer. GSTP1, for example, was described as a methylation related marker for prostate cancer, RASSF1A was described as a methylation related marker for breast cancer, APC was described as a marker for lung cancer (Usadel et al Cancer Research 6:371-375, 2002) etc. Nevertheless, these markers are not specific for the type of cancer for which they have been initially described. Indeed, GSTP1 is also methylated in liver cancer, and RASSF1A also in lung cancer and APC also in colon cancer (Hiltunen et al.). Thus, an analysis of body fluid samples would not provide a diagnosis that could determine which organ is afflicted with cancer.

[0016] Methylation patterns, comprising multiple CpG dinucleotides, also correlate with gene expression, as well as with the phenotype of many of the most important common and complex human diseases. Methylation positions have, for example, not only been identified that correlate with cancer, as has been corroborated by many publications, but also with diabetes type II, arteriosclerosis, rheumatoid arthritis, and disease of the CNS. Likewise, methylation at other positions correlates with age, gender, nutrition, drug use, and probably a whole range of other environmental influences. Methylation is the only flexible (reversible) genomic parameter under exogenous influence that can change genome function, and hence constitutes the main (and so far missing) link between the genetics of disease and the environmental components that are widely acknowledged to play a decisive role in the etiology of virtually all human pathologies that are the focus of current biomedical research.

[0017] Methylation plays a n important role in disease analysis because methylation positions vary as a function of a variety of different fundamental cellular processes. Additionally, however, many positions are methylated in a stochastic way, that does not contribute any relevant information.

[0018] Methylation content, levels, profiles and patterns. Genomic methylation can be characterized in distinguishable terms of methylation content, methylation level and methylation patterns. “Methylation content,” or “5-methylcytosine content,” as used herein refers to the total amount of 5-methylcytosine present in a DNA sample (i.e., a measure of base composition), and provides no information as to distribution of the fifth bases. Methylation content of the genome has been shown to differ, depending on the tissue source of the analyzed DNA (Ehrlich M, et al., Nucleic Acids Res. 10: 2709, 1982). However, while Ehrlich et al. showed tissue- and cell specific differences in methylation content among seven different normal human tissues and eight different types of homogeneous human cell populations, their analysis was neither specific with respect to particular genome regions, nor with respect to particular CpG positions. No genes or CpG positions were selected for the analysis, or identified by the analysis that could serve as markers for tissue or cell identification. Rather, only the level of the overall degree of genomic methylation (methylation content) was determined.

[0019] “Methylation level” or “methylation degree,” by contrast, refers to the average amount of methylation present at an individual CpG dinucleotide. Measurement of methylation levels at a plurality of different CpG dinucleotide positions creates either a methylation profile or a methylation pattern.

[0020] A methylation profile is created when average methylation levels of multiple CpGs (scattered throughout the genome) are collected. Each single CpG position is analyzed independently of the other CpGs in the genome, but is analyzed collectively across all homologous DNA molecules in a pool of differentially methylated DNA molecules (Huang et al., in The Epigenome, S. Beck and A. Olek, eds., Wiley-VCH Weinheim, p 58, 2003).

[0021] A methylation pattern, by contrast, is composed of the individual methylation levels of a number of CpG positions in proximity to each other. For example, a full methylation of 5-10 closely linked CpG positions may comprise a methylation pattern that, while rare, may be specific for a specific DNA source.

[0022] Prior art correlations involving DNA methylation. A correlation of individual gene methylation patterns with specific tissues has been suggested in the art (Grunau et al., Hut7l Mol. Gen. 9: 2651-2663, 2000). However, in this study, methylation patterns of only four specific genes were analyzed in tissues from only two different individuals, and the aim of the study was to analyze the correlation between known gene expression levels and their respective methylation patterns.

[0023] Adorjan et al. published data indicating that tissues such as prostate and kidney could be distinguished by means of methylation markers (Adorjan et al., Nuc. Acids Res. 30: e 21, 2002). This study identified tumor markers, based on analysis of a large number of individuals (relatively large number of samples). Several CpG positions were identified that could be utilized as markers in an appropriate methylation assay to differentiate between kidney and prostate tissue, regardless of the tissue status as being diseased or healthy. However both the Grunau et al., and Adorjan et al. studies offer only a very limited selection of markers to detect a very small proportion of the many known different cell types.

[0024] Likewise, patent application WO 03/025215 to Carroll et al., for example, provides a method for creating a map of the methylome (referred to as “a genomic methylation signature”), based on methylation profile analyses, and employing methylation-sensitive restriction enzyme digests and digest-dependant amplification steps. The method description alleges to combine methylation profiling with mapping. This attempt is, however, severely limited for at least three reasons. First, the prior art method provides only a ‘yes or no’ qualitative assessment of the methylation status (methylated or unmethylated) of a cytosine at a genomic CpG position in the genome of interest. Second, the method of Carroll et al. is labor intensive, not being adaptable for high throughput, because it requires a second labor intensive step; namely, after completing the process of restriction enzyme-based methylation analysis to identify a particular amplificate as a potential methylation marker, each of these amplified digestion dependent markers (amplificates) needs to be cloned and sequenced for mapping to the genome.

[0025] Third, there are no means described by Carroll et al. for utilizing the generated information in a tissue specific manner. Specifically, while Carroll et al. disclose that specific different tissues of mice have different “methylomes” (WO 03/025215, FIG. 6), and that two different human tissues, sperm cells and blood cells, could be correlated with differing amplification profiles (Id, FIGS. 4 and 10, where CpG positions were identified that were unmethylated in one scenario and methylated in the other), there is no means or enablement to support use of this information as a specific tissue marker.

[0026] Protein expression-based prior art approaches. Immunohistochemical assays are utilized as standard methods to determine a cell type or a tissue type of cellular origin in the context of an intact organism. Such methods are based on the detection of specific proteins. For example, the German Center for collection of microorganisms and cell cultures (DSMZ) routinely tests the expression of tissue markers on all arriving human cell lines with a panel of well-characterized monoclonal antibodies (mAbs) (Quentmeier H, et al., J Histochem. Cytochem. 49: 1369-1378, 2001). Generally, the expression pattern of histological markers reflects that of the originating cell type. However, expression of the proteins, carbohydrate or lipid structures that are detected by individual mAbs, is not always stable over a long period of time.

[0027] Likewise, immunophenotyping, which can be performed both to confirm the histological origin of a cell line, and to provide customers with useful information for scientific applications, is based on testing the stability and intensity of cell surface marker expression. Immunophenotyping typically includes a two-step staining procedure, wherein antigen-specific murine mAbs are added to the cells in the first step, followed by assessment of binding of the mAbs by an immunofluorescence technique using FITC-conjugated anti-mouse Ig secondary antisera. Distribution of antigens is analyzed by flow-cytometry and/or light microscopy.

[0028] Therefore the process of determining a cell type or tissue type using these expression-based methods is not trivial, but rather complex. The more marker proteins are known the more precisely a cell's status of origin can be determined. Without the use of molecular biology techniques, such as RNA-based cDNA/oligo-microarrays or a complex proteomics experiment, which enable the simultaneous view of a higher number of changes, the identification of a specific cell type would require a sequence of tedious and time-consuming assays to detect a rather complex protein expression pattern. Finally, proteomic approaches have not overcome basic difficulties, such as reaching sufficient sensitivity.

[0029] RNA expression-based prior art approaches. RNA-based techniques to analyze expression patterns are well-known and widely used. In particular, microarray-based expression analysis studies to differentiate cell types and organs have been described, and used to show that precise patterns of differentially expressed genes are specific for a particular cell type.

[0030] A system of cluster analysis for genome-wide expression data from DNA microarray hybridization is described by Eisen et al. Proc. Natl. Acad. Sci. USA. 95: 14863-8, 1998. Eisen et al. teach clustering of gene expression data groups together, especially data for genes of known similar function, and interpretation of the patterns found as an indicator of the status of cellular processes. However, the teachings of Eisen are in the context of yeast and, therefore, cannot be extended to identify tissue or organ markers useful in human beings or other more developmentally complex organisms and animals. Likewise such teachings cannot be extended into the area of human disease prognostics and diagnostics. Similarly, Ben-Dor et al. describe an expression-based approach for tissue classification in humans. However, as in nearly all related publications, the scope is limited to markers for the identification of tumors (Ben-Dor et al. J Comput Biol. 7: 559-83, 2000).

[0031] Likewise, Enard et al. recently published a comparative analysis of expression patterns within specific tissue samples across different species, teaching different mRNA and protein expression patterns between different individuals of one species (intra-specific variation), as well as between different species (inter-specific variation). Enard et al. did not however, teach or enable use of such expression levels for distinguishing between or among different tissues.

[0032] Lack of acceptance of prior art methods by regulatory agencies. Significantly, regulatory agencies are currently not willing to accept a technology platform relying on an expression microarray due to the above-described shortcomings.

[0033] U.S. Pat. No. 6,581,011 to Tissue Informatics Inc., teaches a tissue information database for profiling and classifying a broad range of normal tissues, and illustrates the need in the art for tools allowing classification of a tissue.

[0034] Hypermethylation of certain ‘tumor marker’ genes, especially of certain promoter regions thereof, is recognized as an important indicator of the presence or absence of a tumor. Significantly, however, such prior art methylation analyses are limited to those based on determination of the methylation status of known marker genes, and do not extent to genomic regions that have not been previously implicated based on function; ‘tumor marker’ genes are those genes known to play a role in the regulation of carcinogenesis, or are believed to determine the switching on and off of tumorigenesis.

[0035] Knowledge of the correlation of methylation of tumor marker genes and cancer is most advanced in the case of prostate cancer. For example, a method using DNA from a bodily fluid, and comprising the methylation analysis of the tumor marker gene GSTP1 as an predictive indicator of prostate cancer has been patented (U.S. Pat. No. 5,552,277).

[0036] Significantly, prior art tumor marker screening approaches are limited to certain types of diseases (e.g., cancer types). This is because they are limited to analysis of marker genes, or gene products which are highly specific for a kind of disease, mostly being cancer, when found in a specific kind of bodily fluid. For example, Usadel et al. teach detection of a tumor specific methylation in the promoter region of the adenomatous polyposis coli (APC) gene in serum samples of lung cancer patients, but that no methylated APC promoter DNA is detected in serum samples of healthy donors (Usadel et al. Cancer Research 6: 371-375, 2002). This marker thus qualifies as a reasonable indicator for lung cancer, and has utility for the screening of people diagnosed with lung cancer, or for monitoring of patients after surgical removal of a tumor for developing metastases in their lung.

[0037] WO 2005/019477, for example, further describes this particular problem: “Moreover the teachings of Usadel et al. are also limited by the fact that the epigenetic APC gene alterations are not specific for lung cancer, but are common in other cancer, for example, ingastrointestinal tumor development. Therefore, a blood screen with only APC as a tumor marker has limited diagnostic utility to indicate that the patient is developing a tumor, but not where that tumor would be located or derived from. Consequently, a physician would not be informed with respect to a more detailed diagnosis of an specific organ, or even with respect to treatment options of the respective medical condition; most of the available diagnostic or therapeutic measures will be organ- or tumor source-specific. This is particularly true where the lesion is small in size, and it will be extremely difficult to target further diagnostics and therapies. Given the nature of marker genes as previously implicated genes, prior art use of marker genes for early diagnosis has occurred where a specific medical condition is already in mind. For example, a physician suspicious of having a patient who developed a colon cancer, can have the patient's stool sample tested for the status of a cancer marker gene like K-ras. A patient suspected as having developed a prostate cancer, may have his ejaculate sample tested for a prostate cancer marker like GSTPi.”

[0038] Significantly, however, there is no prior art method described for efficient and effective generally screening of patients, or bodily fluids thereof where the patient has no specific prior indication or suspicion as to which organ or tissue might have developed a cell proliferative disease (e.g., an individual previously exposed to a high level of radiation).

[0039] Thus, there is a substantial need in the art including from the clinical perspective, to identify cell or tissue type and/or cell or tissue source. For example, there is a need in the art for efficient and effective typing of disseminated tumor cells, for determining the tissue of origin (i.e., the type of tissue or organ the tumor was derived from). No such tools or methods, apart from a few disclosed isolated markers, are available in the prior art. Likewise, no generally applicable prior art methods are available for determining the cell- or tissue-type from which a genomic DNA sample was derived. In addition, the nature of the disease of the organ remains open. In case of colon-specific markers, also an inflammation of the colon could be present, in this case a subsequent diagnosis for the determination of the particular disease of the organ has to follow.

### SUMMARY OF THE INVENTION

[0040] In one aspect thereof, the object according to the present invention is solved by a method for diagnosing a proliferative disease in a subject comprising: a) providing a biological sample from a subject, b) detecting the presence, absence, abundance and/or expression of one or more markers and determining therefrom upon the presence or absence of a proliferative disease; and c) detecting the presence, absence, abundance and/or expression of one or more cell- or tissue-markers and determining therefrom if said one or more cell- and/or tissue-markers are atypically present, absent or present at above normal levels within said sample; and d) determining the presence or absence of a cell proliferative disorder and location thereof based on the presence, absence, abundance and/or expression as detected in step b) and c). Preferred is a method according to the present invention, further comprising detecting the presence, absence, abundance and/or expression of one or more markers and determining therefrom characteristics of said cell proliferative disorder. Preferred is a method according to the present invention, wherein said proliferative disease is cancer, and in particular selected from soft tissue, skin, leukemia, renal, prostate, brain, bone, blood, lymphoid, stomach, head and neck, colon or breast cancer. Further preferred is a method according to the present invention, wherein said marker is indicative of more than one proliferative disease. Most preferred is a method according to the present invention, wherein said proliferative disease is cancer.

[0041] According to the invention, said detecting the expression of one or more marker that is specific for more than one proliferative disease comprises detecting the presence, absence, abundance and/or expression of physiological, genetic and/or cellular expression and/or cell count, preferably said detecting the expression comprises detecting the expression of protein, mRNA expression and/or the presence or absence of DNA methylation in one or more of said markers. Particularly, said detecting the expression of protein comprises marker-specific antibodies, ELISA, cell sorting techniques, Western blot, or the detection of labeled protein, and said measuring the mRNA expression comprises detection of labeled mRNA or Northern blot.

[0042] In another aspect thereof, the object according to the present invention is solved by a method for diagnosing a proliferative disease in a subject comprising the steps of: a) providing a biological sample from a subject, said biological sample comprising genomic DNA; b) detecting the level of DNA methylation in one or more markers and determining therefrom upon the presence or absence of a proliferative disease; and c) detecting the level of methylation of one or more markers and determining therefrom if said one or more cell- and/or tissue-markers are atypically present, absent or present at above normal levels within said sample; and d) determining the presence or absence of a cell proliferative disorder and location thereof, based on the level of DNA methylation as detected in step b) and c). Preferably, step b) further comprises comparing said methylation profile to one or more standard methylation profiles, wherein said standard methylation profiles are selected from the group consisting of methylation profiles of non cell proliferative disorder samples and methylation profiles of cell proliferative disorder samples. More preferably, said detecting the presence or absence of DNA methylation comprises the digestion of said genomic DNA with a methylation-sensitive restriction enzyme, followed by multiplexed amplification of gene-specific DNA fragments with CpG islands.

[0043] According to the present invention, preferred is a method, wherein the markers of step b) are selected from the group consisting of nucleic acid sequences according to any of SEQ ID NO: 100 to SEQ ID NO: 161. According to the present invention, preferred is a method, wherein the markers of step c) are selected from the group consisting of nucleic acid sequences according to any of SEQ ID NO: 1 to SEQ ID NO: 99 and SEQ ID NO: 844 to SEQ ID NO: 1255.

[0044] According to the present invention, preferred is a method according to the present invention, wherein said proliferative disease is selected from psoriasis or cancer, and in particular selected from soft tissue, skin, leukemia, renal, prostate, brain, bone, blood, lymphoid, stomach, head and neck, colon or breast cancer.

[0045] In another preferred aspect thereof, the object according to the present invention is solved by a method, wherein said characterizing of said cancer comprises detecting the presence or absence of chemotherapy resistant cancer.

[0046] In yet another preferred aspect thereof, the object according to the present invention is solved by a method, wherein said chemotherapy is a non-steroidal selective estrogen receptor modulator.

[0047] In yet another aspect preferred thereof, the object according to the present invention is solved by a method, wherein said characterizing cancer comprises determining a chance of disease-free survival, and/or monitoring disease progression in said subject.

[0048] In yet another preferred aspect thereof, the object according to the present invention is solved by a method, wherein said characterizing cancer comprises determining metastatic disease by identifying tissue markers in said sample that are foreign to the tissue from which said sample is taken from.

[0049] In yet another preferred aspect thereof, the object according to the present invention is solved by a method, wherein said characterizing cancer comprises determining relapse of the disease after complete resection of the tumor in said subject by identifying tissue markers and cancer markers in said sample that are identical to the removed tumor.

[0050] Further preferred is a method according to the present invention, wherein said biological sample is a biopsy sample or a blood sample. Even further preferred is a method according to the present invention, wherein said proliferative disease is in the early pre-clinical stage exhibiting no clinical symptoms.

[0051] Still further preferred is a method according to the present invention, wherein said detecting the presence or absence of DNA methylation comprises the digestion of said genomic DNA with a methylation-sensitive restriction enzyme followed by multiplexed amplification of gene-specific DNA fragments with CpG islands. Still further preferred is a method according to the present invention, wherein said detecting the presence or absence of DNA methylation comprises treatment of said genomic DNA with one or more reagents suitable to convert 5-position unmethylated cytosine bases to uracil or to another base that is detectably dissimilar to cytosine in terms of hybridization properties. Still further preferred is such a method according to the present invention, wherein said markers of step b) are selected from the group consisting of nucleic acid sequences according to any of SEQ ID NO: 100 to SEQ ID NO: 161, and SEQ ID NO: 360 to SEQ ID NO: 483, and SEQ ID NO: 682 to SEQ ID NO: 805. Still further preferred is such a method according to the present invention, wherein said markers of step c) are selected from the group consisting of the genomic nucleic acid sequences according to any of SEQ ID NO: 1 to SEQ ID NO: 99 or SEQ ID NO: 844 to SEQ ID NO: 1255, or their bisulfite converted variants according to SEQ ID NO: 162 to SEQ ID NO: 359, SEQ ID NO: 484 to SEQ ID NO: 681 and SEQ ID NO: 1256 to SEQ ID NO: 2903.

[0052] In yet another preferred aspect thereof, the object according to the present invention is solved by a method for generating a pan-cancer marker panel for the improved diagnosis and/or monitoring of a proliferative disease in a subject, comprising a) providing a biological sample from said subject suspected of or previously being diagnosed as having a proliferative disease, b) providing a first set of one or more markers indicative for proliferative disease, c) determining the presence, absence, abundance and/or expression of said one or more markers of step b); d) providing a first set of tissue markers, e) determining the expression of said one or more markers of step d), and f) generating a pan-cancer marker panel that is specific for said proliferative disease in said subject by selecting those markers that are differently expressed in said subject when compared to an expression profile of a healthy sample.

[0053] According to the invention, said detecting the presence, absence, abundance and/or expression of one or more marker that is specific for more than one proliferative disease comprises detecting the expression of physiological, genetic and/or cellular expression and/or cell count, preferably said detecting the expression comprises detecting the expression of protein, mRNA expression and/or the presence or absence of DNA methylation in one or more of said markers. Particularly, said detecting the expression of protein comprises marker-specific antibodies, ELISA, cell sorting techniques, Western blot, or the detection of labeled protein, and said measuring the mRNA expression comprises detection of labeled mRNA or Northern blot.

[0054] According to the present invention, preferred is a method, wherein said marker is indicative of more than one proliferative disease. According to the present invention, preferred is a method, wherein said markers of step b) are selected from the group consisting of nucleic acid sequences according to any of SEQ ID NO: 100 to SEQ ID NO: 161. According to the present invention, preferred is a method, wherein the markers of step c) are selected from the group consisting SEQ ID NO: 1 to SEQ ID NO: 99 and SEQ ID NO: 844 to SEQ ID NO: 1255.

[0055] According to the present invention, preferred is a method, wherein said proliferative disease is selected from psoriasis or cancer, in particular from soft tissue, skin, leukemia, renal, prostate, brain, bone, blood, lymphoid, stomach, head and neck, colon or breast cancer.

[0056] More preferred is a method according to the present invention, wherein the biological sample to be analyzed is a biopsy sample or a blood sample. Also preferred is a method according to the present invention, wherein said DNA methylation comprises CpG methylation and/or imprinting.

[0057] Most preferred is a method according to the present invention, wherein said proliferative disease is in the early pre-clinical stage exhibiting no clinical symptoms.

[0058] In yet another preferred aspect thereof, the object according to the present invention is solved by a method according to the present invention, wherein said detecting the presence or absence of DNA methylation comprises the digestion of said genomic DNA with a methylation-sensitive restriction enzyme, followed by multiplexed amplification of gene-specific DNA fragments with CpG islands.

[0059] In yet another preferred aspect thereof, the object according to the present invention is solved by an improved method for the treatment of a proliferative disease, comprising a method as describe hereinabove, and selecting a suitable treatment regimen for said proliferative disease to be treated. Again, said proliferative disease can be selected from soft tissue, skin, leukemia, renal, prostate, brain, bone, blood, lymphoid, stomach, head and neck, colon or breast cancer.

[0060] In yet another preferred aspect thereof, the object according to the present invention is solved by a kit for diagnosing a proliferative disease in a subject, wherein said kit comprises reagents for detecting the expression of one or more marker indicative for more than one proliferative disease; and reagents for localizing the proliferative disease and/or characterizing the type of proliferative disease by detecting specific tissue markers based on nucleic acid-analysis. Preferably, said kit further comprises instructions for using said kit for characterizing cancer in said subject. More preferably, in said kit said reagents comprise reagents for detecting the presence or absence of DNA methylation. Further preferred is a kit according to the present invention, wherein the markers are selected from the group consisting of nucleic acid sequences according to any of SEQ ID NO: 1 to SEQ ID NO: 161 and SEQ ID NO: 844 to SEQ ID NO: 2903, and chemically pretreated sequences thereof.

### DETAILED DESCRIPTION OF THE INVENTION

### Definitions

[0061] To facilitate an understanding of the present invention, a number of terms and phrases are defined below:

[0062] The term “epitope” as used herein refers to that portion of an antigen that makes contact with a particular antibody. When a protein or fragment of a protein is used to immunize a host animal, numerous regions of the protein may induce the production of antibodies which bind specifically to a given region or three-dimensional structure on the protein; these regions or structures are referred to as “antigenic determinants”. An antigenic determinant may compete with the intact antigen (i.e., the “immunogen” used to elicit the immune response) for binding to an antibody.

[0063] The terms “specific binding” or “specifically binding” when used in reference to the interaction of an antibody and a protein or peptide means that the interaction is dependent upon the presence of a particular structure (i.e., the antigenic determinant or epitope) on the protein; in other words the antibody is recognizing and binding to a specific protein structure rather than to proteins in general. For example, if an antibody is specific for epitope “A,” the presence of a protein containing epitope A (or free, unlabelled A) in a reaction containing labeled “A” and the antibody will reduce the amount of labeled A bound to the antibody.

[0064] As used herein, the terms “non-specific binding” and “background binding” when used in reference to the interaction of an antibody and a protein or peptide refer to an interaction that is not dependent on the presence of a particular structure (i.e., the antibody is binding to proteins in general rather that a particular structure such as an epitope).

[0065] As used herein, the term “subject suspected of having cancer” refers to a subject that presents one or more symptoms indicative of a cancer (e.g., a noticeable lump or mass). A subject suspected of having cancer may also have on or more risk factors. A subject suspected of having cancer has generally not been tested for cancer. However, a “subject suspected of having cancer” encompasses an individual who has received an initial diagnosis (e.g., a CT scan showing a mass) but for whom the sub-type or stage of cancer is not known. The term further includes people who once had cancer (e.g., an individual in remission).

[0066] As used herein, the term “subject at risk for cancer” refers to a subject with one or more risk factors for developing a specific cancer. Risk factors include, but are not limited to, genetic predisposition, environmental expose, pre-existing non cancer diseases, and lifestyle.

[0067] As used herein, the term “stage of cancer” refers to a numerical measurement of the level of advancement of a cancer. Criteria used to determine the stage of a cancer include, but are not limited to, the size of the tumour, whether the tumour has spread to other parts of the body and where the cancer has spread (e.g., within the same organ or region of the body or to another organ).

[0068] As used herein, the term “sub-type of cancer” refers to different types of cancer that effect the same organ (ductal cancer, lobular cancer, and inflammatory breast cancer are sub-types of breast cancer.

[0069] As used herein, the term “providing a prognosis” refers to providing information regarding the impact of the presence of cancer (e.g., as determined by the diagnostic methods of the present invention) on a subject's future health (e.g., expected morbidity or mortality).

[0070] As used herein, the term “subject diagnosed with a cancer” refers to a subject having cancerous cells. The cancer may be diagnosed using any suitable method, including but not limited to, the diagnostic methods of the present invention.

[0071] As used herein, the term “instructions for using said kit for detecting of a proliferative disease, in particular cancer, in said subject” includes instructions for using the reagents contained in the kit for the detection and characterization of a proliferative disease, in particular cancer, in a sample from a subject. In some embodiments, the instructions further comprise the statement of intended use required by the U.S. Food and Drug Administration (FDA) in labeling in vitro diagnostic products. The FDA classifies in vitro diagnostics as medical devices and required that they be approved through the 510(k) procedure. Information required in an application under 510(k) includes: 1) The in vitro diagnostic product name, including the trade or proprietary name, the common or usual name, and the classification name of the device; 2) The intended use of the product; 3) The establishment registration number, if applicable, of the owner or operator submitting the 510(k) submission; the class in which the in vitro diagnostic product was placed under section 513 of the FD&C Act, if known, its appropriate panel, or, if the owner or operator determines that the device has not been classified under such section, a statement of that determination and the basis for the determination that the in vitro diagnostic product is not so classified; 4) Proposed labels, labeling and advertisements sufficient to describe the in vitro diagnostic product, its intended use, and directions for use, including photographs or engineering drawings, where applicable; 5) A statement indicating that the device is similar to and/or different from other in vitro diagnostic products of comparable type in commercial distribution in the U.S., accompanied by data to support the statement; 6) A 510(k) summary of the safety and effectiveness data upon which the substantial equivalence determination is based; or a statement that the 510(k) safety and effectiveness information supporting the FDA finding of substantial equivalence will be made available to any person within 30 days of a written request; 7) A statement that the submitter believes, to the best of their knowledge, that all data and information submitted in the premarket notification are truthful and accurate and that no material fact has been omitted; and 8) Any additional information regarding the in vitro diagnostic product requested that is necessary for the FDA to make a substantial equivalency determination. Additional information is available at the Internet web page of the U.S. FDA.

[0072] As used herein, the term “detecting the presence or absence of DNA methylation” refers to the detection of DNA methylation in the promoter and/or regulatory regions of one or more genes (e.g., cancer markers of the present invention) of a genomic DNA sample. The detecting may be carried out using any suitable method, including, but not limited to, those disclosed herein.

[0073] As used herein, the term “detecting the presence or absence of chemotherapy resistant cancer” refers to detecting a DNA methylation pattern characteristic of a tumor that is likely to be resistant to chemotherapeutic agents (e.g., non-steroidal selective estrogen receptor modulators (SERMs)).

[0074] As used herein, the term “determining the chance of disease-free survival” refers to the determining the likelihood of a subject diagnosed with cancer surviving without the recurrence of cancer (e.g., metastatic cancer). In some embodiments, determining the chance of disease free survival comprises determining the DNA methylation pattern of the subject's genomic DNA.

[0075] As used herein, the term “determining the risk of developing metastatic disease” refers to likelihood of a subject diagnosed with cancer developing metastatic cancer. In some embodiments, determining the risk of developing metastatic disease comprises determining the DNA methylation pattern of the subject's genomic DNA.

[0076] As used herein, the term “monitoring disease progression in said subject” refers to the monitoring of any aspect of disease progression, including, but not limited to, the spread of cancer, the metastasis of cancer, and the development of a pre-cancerous lesion into cancer. In some embodiments, monitoring disease progression comprises determining the DNA methylation pattern of the subject's genomic DNA.

[0077] As used herein, the term “methylation profile” refers to a presentation of methylation status of one or more marker genes in a subject's genomic DNA. In some embodiments, the methylation profile is compared to a standard methylation profile comprising a methylation profile from a known type of sample (e.g., cancerous or non-cancerous samples or samples from different stages of cancer). In some embodiments, specific methylation profiles are generated using the methods of the present invention. The profile may be presented as a graphical representation (e.g., on paper or on a computer screen), a physical representation (e.g., a gel or array) or a digital representation stored in computer memory.

[0078] As used herein, the term “nucleic acid molecule” refers to any nucleic acid containing molecule including, but not limited to DNA or RNA. The term encompasses sequences that include any of the known base analogs of DNA and RNA including, but not limited to, 4-acetylcytosine, 8-hydroxy-N-6-methyladenosine, aziridinyl cytosine, pseudo isocytosine, 5-(carboxyhydroxylmethyl) uracil, 5-fluorouracil, 5-bromouracil, 5-carboxymethyl aminomethyl-2-thiouracil, 5-carboxymethyl aminomethyluracil, dihydrouracil, inosine, N6-isopentenyladenine, 1-methyladenine, 1-methylpseudouracil, 1-methylguanine, 1-methylinosine, 2,2-dimethylguanine, 2-methyladenine, 2-methylguanine, 3-methylcytosine, 5-methylcytosine, N6-methyladenine, 7-methylguanine, 5-methylaminomethyluracil, 5-methoxyaminomethyl-2-thiouracil, beta-D-mannosylqueosine, 5′-methoxycarbonyl methyluracil, 5-methoxyuracil, 2-methylthio-N6-isopentenyladenine, uracil-5-oxyacetic acid methylester, uracil-5-oxyacetic acid, oxybutoxosine, pseudouracil, queosine, 2-thiocytosine, 5-methyl-2-thiouracil, 2-thiouracil, 4-thiouracil, 5-methyluracil, N-uracil-5-oxyacetic acid methylester, uracil-5-oxyacetic acid, pseudouracil, queosine, 2-thiocytosine, and 2,6-diaminopurine.

[0079] The term “gene” refers to a nucleic acid (e.g., DNA) sequence that comprises coding sequences necessary for the production of a polypeptide, precursor, or RNA (e.g., rRNA, tRNA). The polypeptide can be encoded by a full length coding sequence or by any portion of the coding sequence so long as the desired activity or functional properties (e.g., enzymatic activity, ligand binding, signal transduction, immunogenicity, etc.) of the full-length or fragment are retained. The term also encompasses the coding region of a structural gene and the sequences located adjacent to the coding region on both the 5′ and 3′ ends for a distance of about 1 kb or more on either end such that the gene corresponds to the length of the full-length mRNA. Sequences located 5′ of the coding region and present on the mRNA are referred to as 5′ non-translated sequences. Sequences located 3′ or downstream of the coding region and present on the mRNA are referred to as 3′ non-translated sequences. The term “gene” encompasses both cDNA and genomic forms of a gene. A genomic form or clone of a gene contains the coding region interrupted with non-coding sequences termed “introns” or “intervening regions” or “intervening sequences.” Introns are segments of a gene that are transcribed into nuclear RNA (hnRNA); introns may contain regulatory elements such as enhancers. Introns are removed or “spliced out” from the nuclear or primary transcript; introns therefore are absent in the messenger RNA (mRNA) transcript. The mRNA functions during translation to specify the sequence or order of amino acids in a nascent polypeptide.

[0080] As used herein, the term “gene expression” refers to the process of converting genetic information encoded in a gene into RNA (e.g., mRNA, rRNA, tRNA, or snRNA) through “transcription” of the gene (i.e., via the enzymatic action of an RNA polymerase), and for protein encoding genes, into protein through “translation” of mRNA. Gene expression can be regulated at many stages in the process. “Up-regulation” or “activation” refers to regulation that increases the production of gene expression products (i.e., RNA or protein), while “down-regulation” or “repression” refers to regulation that decrease production. Molecules (e.g., transcription factors) that are involved in up-regulation or down-regulation are often called “activators” and “repressors,” respectively.

[0081] In addition to containing introns, genomic forms of a gene may also include sequences located on both the 5′ and 3′ end of the sequences that are present on the RNA transcript. These sequences are referred to as “flanking” sequences or regions (these flanking sequences are located 5′ or 3′ to the non-translated sequences present on the mRNA transcript). The 5′ flanking region may contain regulatory sequences such as promoters and enhancers that control or influence the transcription of the gene. The 3′ flanking region may contain sequences that direct the termination of transcription, post-transcriptional cleavage and polyadenylation.

[0082] As used herein, the terms “nucleic acid molecule encoding,” “DNA sequence encoding,” and “DNA encoding” refer to the order or sequence of deoxyribonucleotides along a strand of deoxyribonucleic acid. The order of these deoxyribonucleotides determines the order of amino acids along the polypeptide (protein) chain. The DNA sequence thus codes for the amino acid sequence.

[0083] DNA molecules are said to have “5′ ends” and “3′ ends” because mononucleotides are reacted to make oligonucleotides or polynucleotides in a manner such that the 5′ phosphate of one mononucleotide pentose ring is attached to the 3′ oxygen of its neighbour in one direction via a phosphodiester linkage. Therefore, an end of an oligonucleotide or polynucleotide is referred to as the “5′ end” if its 5′ phosphate is not linked to the 3′ oxygen of a mononucleotide pentose ring and as the “3′ end” if its 3′ oxygen is not linked to a 5′ phosphate of a subsequent mononucleotide pentose ring. As used herein, a nucleic acid sequence, even if internal to a larger oligonucleotide or polynucleotide, also may be said to have 5′ and 3′ ends. In either a linear or circular DNA molecule, discrete elements are referred to as being “upstream” or 5′ of the “downstream” or 3′ elements. This terminology reflects the fact that transcription proceeds in a 5′ to 3′ fashion along the DNA strand. The promoter and enhancer elements that direct transcription of a linked gene are generally located 5′ or upstream of the coding region. However, enhancer elements can exert their effect even when located 3′ of the promoter element or the coding region. Transcription termination and polyadenylation signals are located 3′ or downstream of the coding region.

[0084] As used herein, the terms “an oligonucleotide having a nucleotide sequence encoding a gene” and “polynucleotide having a nucleotide sequence encoding a gene,” means a nucleic acid sequence comprising the coding region of a gene or in other words the nucleic acid sequence that encodes a gene product. The coding region may be present in a cDNA, genomic DNA or RNA form. When present in a DNA form, the oligonucleotide or polynucleotide may be single-stranded (i.e., the sense strand) or double-stranded. Suitable control elements such as enhancers/promoters, splice junctions, polyadenylation signals, etc. may be placed in close proximity to the coding region of the gene if needed to permit proper initiation of transcription and/or correct processing of the primary RNA transcript. Alternatively, the coding region utilized in the expression vectors of the present invention may contain endogenous enhancers/promoters, splice junctions, intervening sequences, polyadenylation signals, etc. or a combination of both endogenous and exogenous control elements.

[0085] As used herein, the term “oligonucleotide,” refers to a short length of single-stranded polynucleotide chain. Oligonucleotides are typically less than 200 residues long (e.g., between 15 and 100), however, as used herein, the term is also intended to encompass longer polynucleotide chains. Oligonucleotides are often referred to by their length. For example a 24 residue oligonucleotide is referred to as a “24-mer”. Oligonucleotides can form secondary and tertiary structures by self-hybridizing or by hybridizing to other polynucleotides. Such structures can include, but are not limited to, duplexes, hairpins, cruciforms, bends, and triplexes.

[0086] As used herein, the term “regulatory element” refers to a genetic element that controls some aspect of the expression of nucleic acid sequences. For example, a promoter is a regulatory element that facilitates the initiation of transcription of an operably linked coding region. Other regulatory elements are splicing signals, polyadenylation signals, termination signals, etc. (defined infra).

[0087] Transcriptional control signals in eukaryotes comprise “promoter” and “enhancer” elements. Promoters and enhancers consist of short arrays of DNA sequences that interact specifically with cellular proteins involved in transcription (T. Maniatis et al., Science 236:1237 [1987]). Promoter and enhancer elements have been isolated from a variety of eukaryotic sources including genes in yeast, insect and mammalian cells, and viruses (analogous control elements, i.e., promoters, are also found in prokaryote). The selection of a particular promoter and enhancer depends on what cell type is to be used to express the protein of interest. Some eukaryotic promoters and enhancers have a broad host range while others are functional in a limited subset of cell types (for review see, Voss et al., Trends Biochem. Sci., 11:287 [1986]; and T. Maniatis et al., supra). For example, the SV40 early gene enhancer is very active in a wide variety of cell types from many mammalian species and has been widely used for the expression of proteins in mammalian cells (Dijkema et al., EMBO J. 4:761 [1985]). Two other examples of promoter/enhancer elements active in a broad range of mammalian cell types are those from the human elongation factor 1[alpha] gene (Uetsuki et al., J. Biol. Chem., 264:5791 [1989]; Kim et al., Gene 91:217 [1990]; and Mizushima and Nagata, Nuc. Acids. Res., 18:5322 [1990]) and the long terminal repeats of the Rous sarcoma virus (Gorman et al., Proc. Natl, Acad. Sci. USA 79:6777 [1982]) and the human cytomegalovirus (Boshart et al., Cell 41:521 [1985]). Some promoter elements serve to direct gene expression in a tissue-specific manner.

[0088] As used herein, the term “promoter/enhancer” denotes a segment of DNA which contains sequences capable of providing both promoter and enhancer functions (i.e., the functions provided by a promoter element and an enhancer element, see above for a discussion of these functions). For example, the long terminal repeats of retroviruses contain both promoter and enhancer functions. The enhancer/promoter may be “endogenous” or “exogenous” or “heterologous.” An “endogenous” enhancer/promoter is one that is naturally linked with a given gene in the genome. An “exogenous” or “heterologous” enhancer/promoter is one that is placed in juxtaposition to a gene by means of genetic manipulation (i.e., molecular biological techniques such as cloning and recombination) such that transcription of that gene is directed by the linked enhancer/promoter.

[0089] As used herein, the terms “complementary” or “complementarity” are used in reference to polynucleotides (i.e., a sequence of nucleotides) related by the base-pairing rules. For example, for the sequence “A-G-T,” is complementary to the sequence “T-C-A.” Complementarity may be “partial,” in which only some of the nucleic acids' bases are matched according to the base pairing rules. Or, there may be “complete” or “total” complementarity between the nucleic acids. The degree of complementarity between nucleic acid strands has significant effects on the efficiency and strength of hybridization between nucleic acid strands. This is of particular importance in amplification reactions, as well as detection methods that depend upon binding between nucleic acids.

[0090] The term “homology” refers to a degree of complementarity. There may be partial homology or complete homology (i.e., identity). A partially complementary sequence is a nucleic acid molecule that at least partially inhibits a completely complementary nucleic acid molecule from hybridizing to a target nucleic acid is “substantially homologous.” The inhibition of hybridization of the completely complementary sequence to the target sequence may be examined using a hybridization assay (Southern or Northern blot, solution hybridization and the like) under conditions of low stringency. A substantially homologous sequence or probe will compete for and inhibit the binding (i.e., the hybridization) of a completely homologous nucleic acid molecule to a target under conditions of low stringency. This is not to say that conditions of low stringency are such that non-specific binding is permitted; low stringency conditions require that the binding of two sequences to one another be a specific (i.e., selective) interaction. The absence of non-specific binding may be tested by the use of a second target that is substantially non-complementary (e.g., less than about 30% identity); in the absence of non-specific binding the probe will not hybridize to the second non-complementary target.

[0091] When used in reference to a double-stranded nucleic acid sequence such as a cDNA or genomic clone, the term “substantially homologous” refers to any probe that can hybridize to either or both strands of the double-stranded nucleic acid sequence under conditions of low stringency as described below.

[0092] A gene may produce multiple RNA species that are generated by differential splicing of the primary RNA transcript. cDNAs that are splice variants of the same gene will contain regions of sequence identity or complete homology (representing the presence of the same exon or portion of the same exon on both cDNAs) and regions of complete non-identity (for example, representing the presence of exon “A” on cDNA 1 wherein cDNA 2 contains exon “B” instead). Because the two cDNAs contain regions of sequence identity they will both hybridize to a probe derived from the entire gene or portions of the gene containing sequences found on both cDNAs; the two splice variants are therefore substantially homologous to such a probe and to each other.

[0093] When used in reference to a single-stranded nucleic acid sequence, the term “substantially homologous” refers to any probe that can hybridize (i.e., it is the complement of) the single-stranded nucleic acid sequence under conditions of low stringency as described above.

[0094] As used herein, the term “hybridization” is used in reference to the pairing of complementary nucleic acids. Hybridization and the strength of hybridization (i.e., the strength of the association between the nucleic acids) is impacted by such factors as the degree of complementary between the nucleic acids, stringency of the conditions involved, the Tm of the formed hybrid, and the G:C ratio within the nucleic acids. A single molecule that contains pairing of complementary nucleic acids within its structure is said to be “self-hybridized.”

[0095] As used herein, the term “Tm” is used in reference to the “melting temperature.” The melting temperature is the temperature at which a population of double-stranded nucleic acid molecules becomes half dissociated into single strands. The equation for calculating the Tm of nucleic acids is well known in the art. As indicated by standard references, a simple estimate of the Tm value may be calculated by the equation: Tm=81.5+0.41(% G+C), when a nucleic acid is in aqueous solution at 1 M NaCl (See e.g., Anderson and Young, Quantitative Filter Hybridization, in Nucleic Acid Hybridization [1985]). Other references include more sophisticated computations that take structural as well as sequence characteristics into account for the calculation of Tm.

[0096] As used herein the term “stringency” is used in reference to the conditions of temperature, ionic strength, and the presence of other compounds such as organic solvents, under which nucleic acid hybridizations are conducted. With “high stringency” conditions, nucleic acid base pairing will occur only between nucleic acid fragments that have a high frequency of complementary base sequences. Thus, conditions of “weak” or “low” stringency are often required with nucleic acids that are derived from organisms that are genetically diverse, as the frequency of complementary sequences is usually less.

[0097] “High stringency conditions” when used in reference to nucleic acid hybridization comprise conditions equivalent to binding or hybridization at 42° C. in a solution consisting of 5* SSPE (43.8 g/l NaCl, 6.9 g/l NaH2PO4 H2O and 1.85 g/l EDTA, pH adjusted to 7.4 with NaOH), 0.5% SDS, 5* Denhardt's reagent and 100 μg/ml denatured salmon sperm DNA followed by washing in a solution comprising 0.1* SSPE, 1.0% SDS at 42° C. when a probe of about 500 nucleotides in length is employed.

[0098] “Medium stringency conditions” when used in reference to nucleic acid hybridization comprise conditions equivalent to binding or hybridization at 42° C. in a solution consisting of 5* SSPE (43.8 g/l NaCl, 6.9 g/l NaH2PO4 H2O and 1.85 g/l EDTA, pH adjusted to 7.4 with NaOH), 0.5% SDS, 5* Denhardt's reagent and 100 μg/ml denatured salmon sperm DNA followed by washing in a solution comprising 1.0* SSPE, 1.0% SDS at 42° C. when a probe of about 500 nucleotides in length is employed.

[0099] “Low stringency conditions” comprise conditions equivalent to binding or hybridization at 42° C. in a solution consisting of 5* SSPE (43.8 g/l NaCl, 6.9 g/l NaH2PO4 H2O and 1.85 g/l EDTA, pH adjusted to 7.4 with NaOH), 0.1% SDS, 5* Denhardt's reagent [50* Denhardt's contains per 500 ml: 5 g Ficoll (Type 400, Pharamcia), 5 g BSA (Fraction V; Sigma)] and 100 [mu]g/ml denatured salmon sperm DNA followed by washing in a solution comprising 5* SSPE, 0.1% SDS at 42° C. when a probe of about 500 nucleotides in length is employed.

[0100] It is well known in the art that numerous equivalent conditions may be employed to provide low stringency conditions; factors such as the length and nature (DNA, RNA, base composition) of the probe and nature of the target (DNA, RNA, base composition, present in solution or immobilized, etc.) and the concentration of the salts and other components (e.g., the presence or absence of formamide, dextran sulfate, polyethylene glycol) are considered and the hybridization solution may be varied to generate conditions of low stringency hybridization different from, but equivalent to, the above listed conditions. In addition, conditions that promote hybridization under conditions of high stringency (e.g., increasing the temperature of the hybridization and/or wash steps, the use of formamide in the hybridization solution, etc.) are known in the art (see definition above for “stringency”).

[0101] “Amplification” is a specific case of nucleic acid replication characterised by template specificity. Template specificity (affinity for a nucleic acid template) is independent of fidelity of replication (i.e., synthesis of a polynucleotide sequence) and nucleotide (ribo- or deoxyribo-) specificity. Template specificity is frequently described in terms of “target” specificity. Target sequences are sequences that are preferentially amplified, and many amplification techniques are specifically adapted to ensure preferential and specific amplification of said sequences.

[0102] Template specificity is achieved in most amplification techniques by the choice of amplification enzyme. Preferred are amplification enzymes that under suitable conditions will only amplify specific nucleic acid sequences in a heterogeneous mixture of nucleic acids. For example, in the case of Qβ replicase, MDV-1 RNA is the specific template for the replicase (Kacian et al., Proc. Natl. Acad. Sci. USA 69:3038 [1972]). Other nucleic acids will not be replicated by this amplification enzyme. Similarly, in the case of T7 RNA polymerase, this amplification enzyme has a stringent specificity for its own promoters (Chamberlin et al., Nature 228:227 [1970]). In the case of T4 DNA ligase, the enzyme will not ligate the two oligonucleotides or polynucleotides, where there is a mismatch between the oligonucleotide or polynucleotide substrate and the template at the ligation junction (Wu and Wallace, Genomics 4:560 [1989]). Finally, Taq and Pfu polymerases, by virtue of their ability to function at high temperature, are found to display high specificity for the sequences bounded and thus defined by the primers; the high temperature results in thermodynamic conditions that favor primer hybridization with the target sequences and not hybridization with non-target sequences (H. A. Erlich (ed.), PCR Technology, Stockton Press [1989]).

[0103] The term “isolated” when used in relation to a nucleic acid, as in “an isolated oligonucleotide” or “isolated polynucleotide” refers to a nucleic acid sequence that is identified and separated from at least one component or contaminant with which it is ordinarily associated in its natural source. Isolated nucleic acid is such present in a form or setting that is different from that in which it is found in nature. In contrast, non-isolated nucleic acids as nucleic acids such as DNA and RNA found in the state they exist in nature. For example, a given DNA sequence (e.g., a gene) is found on the host cell chromosome in proximity to neighbouring genes; RNA sequences, such as a specific mRNA sequence encoding a specific protein, are found in the cell as a mixture with numerous other mRNAs that encode a multitude of proteins. However, isolated nucleic acid encoding a given protein includes, by way of example, such nucleic acid in cells ordinarily expressing the given protein where the nucleic acid is in a chromosomal location different from that of natural cells, or is otherwise flanked by a different nucleic acid sequence than that found in nature. The isolated nucleic acid, oligonucleotide, or polynucleotide may be present in single-stranded or double-stranded form. When an isolated nucleic acid, oligonucleotide or polynucleotide is to be utilized to express a protein, the oligonucleotide or polynucleotide will contain at a minimum the sense or coding strand (i.e., the oligonucleotide or polynucleotide may be single-stranded), but may contain both the sense and anti-sense strands (i.e., the oligonucleotide or polynucleotide may be double-stranded).

[0104] As used herein, the term “purified” or “to purify” refers to the removal of components (e.g., contaminants) from a sample. For example, antibodies are purified by removal of contaminating non-immunoglobulin proteins; they are also purified by the removal of immunoglobulin that does not bind to the target molecule. The removal of non-immunoglobulin proteins and/or the removal of immunoglobulins that do not bind to the target molecule results in an increase in the percent of target-reactive immunoglobulins in the sample. In another example, recombinant polypeptides are expressed in bacterial host cells and the polypeptides are purified by the removal of host cell proteins; the percent of recombinant polypeptides is thereby increased in the sample.

[0105] The term “Southern blot,” refers to the analysis of DNA on agarose or acrylamide gels to fractionate the DNA according to size followed by transfer of the DNA from the gel to a solid support, such as nitrocellulose or a nylon membrane. The immobilized DNA is then probed with a labeled probe to detect DNA species complementary to the probe used. The DNA may be cleaved with restriction enzymes prior to electrophoresis. Following electrophoresis, the DNA may be partially depurinated and denatured prior to or during transfer to the solid support. Southern blots are a standard tool of molecular biologists (J. Sambrook et al., Molecular Cloning: A Laboratory Manual, Cold Spring Harbor Press, NY, pp 9.31-9.58 [1989]).

[0106] The term “Northern blot,” as used herein refers to the analysis of RNA by electrophoresis of RNA on agarose gels to fractionate the RNA according to size followed by transfer of the RNA from the gel to a solid support, such as nitrocellulose or a nylon membrane. The immobilized RNA is then probed with a labeled probe to detect RNA species complementary to the probe used. Northern blots are a standard tool of molecular biologists (J. Sambrook, et al., supra, pp 7.39-7.52 [1989]).

[0107] The term “Western blot” refers to the analysis of protein(s) (or polypeptides) immobilized onto a support such as nitrocellulose or a membrane. The proteins are run on acrylamide gels to separate the proteins, followed by transfer of the protein from the gel to a solid support, such as nitrocellulose or a nylon membrane. The immobilized proteins are then exposed to antibodies with reactivity against an antigen of interest. The binding of the antibodies may be detected by various methods, including the use of radiolabeled antibodies.

[0108] The terms “overexpression” and “overexpressing” and grammatical equivalents, if used in reference to levels of mRNA to indicate a level of expression approximately 3-fold higher (or greater) than that observed in a given tissue in a control or non-transgenic animal. Levels of mRNA are measured using any of a number of techniques known to those skilled in the art including, but not limited to Northern blot analysis. Appropriate controls are included on the Northern blot to control for differences in the amount of RNA loaded from each tissue analyzed (e.g., the amount of 28S rRNA, an abundant RNA transcript present at essentially the same amount in all tissues, present in each sample can be used as a means of normalizing or standardizing the mRNA-specific signal observed on Northern blots). The amount of mRNA present in the band corresponding in size to the correctly spliced transgene RNA is quantified; other minor species of RNA which hybridize to the transgene probe are not considered in the quantification of the expression of the transgenic mRNA.

[0109] As used herein, the term “sample” is used in its broadest sense. In one sense, it is meant to include a specimen or culture obtained from any source, as well as biological and environmental samples. Biological samples may be obtained from animals (including humans) and encompass fluids, solids, tissues, and gases. Biological samples include blood products, such as plasma, serum and the like. Environmental samples include environmental material such as surface matter, soil, water, crystals and industrial samples. Such examples are not however to be construed as limiting the sample types applicable to the present invention.

[0110] The term “tissue” in this context is meant to describe a group or layer of cells that are structurally and/or functionally similar and that work together to perform a specific function.

[0111] The term “oligomer” encompasses oligonucleotides, PNA-oligomers and DNA oligomers, and is used whenever a term is needed to describe the alternative use of an oligonucleotide or a PNA-oligomer or DNA-oligomer, which cannot be described as oligonucleotide. Said oligomer can be modified as it is commonly known and described in the art. The term “oligomer” also encompasses oligomers carrying at least one detectable label, and preferably fluorescence labels are understood to be encompassed. It is however also understood that the label can be of any kind that is known and described in the art.

[0112] The term “Observed/Expected Ratio” (“O/E Ratio”) refers to the frequency of CpG dinucleotides within a particular DNA sequence, and corresponds to the [number of CpG sites/(number of C bases×number of G bases)]×band length for each fragment.

[0113] The term “CpG island” refers to a contiguous region of genomic DNA that satisfies the criteria of (1) having a frequency of CpG dinucleotides corresponding to an “Observed/Expected Ratio”>0.6, and (2) having a “GC Content”>0.5. CpG islands are typically, but not always, between about 0.2 to about 1 kb in length, and may be as large as about 3 kb in length.

[0114] The term “methylation state” or “methylation status” or “methylation level” refers to the presence or absence of 5-methylcytosine (“5-mCyt”) at one or a plurality of CpG dinucleotides within a DNA sequence.

[0115] Methylation states or methylation levels at one or more CpG methylation sites within a single allele's DNA sequence include “unmethylated,” “fully-methylated” and “hemi-methylated.” The term “hemi-methylation” or “hemimethylation” refers to the methylation state of a CpG methylation site, where only one strand's cytosine of the CpG dinucleotide sequence is methylated. The term “hypermethylation” refers to the average methylation state corresponding to an increased presence of 5-mCyt at one or a plurality of CpG dinucleotides within a DNA sequence of a test DNA sample, relative to the amount of 5-mCyt found at corresponding CpG dinucleotides within a normal control DNA sample. The term “hypomethylation” refers to the average methylation state corresponding to a decreased presence of 5-mCyt at one or a plurality of CpG dinucleotides within a DNA sequence of a test DNA sample, relative to the amount of 5-mCyt found at corresponding CpG dinucleotides within a normal control DNA sample.

[0116] The term “microarray” refers broadly to both “DNA microarrays” and “DNA chip (s),” and encompasses all art-recognized solid supports, and all art-recognized methods for affixing nucleic acid molecules thereto or for synthesis of nucleic acids thereon.

[0117] “Genetic parameters” as used herein are mutations and polymorphisms of genes and sequences further required for gene regulation. Exemplary mutations are, in particular, insertions, deletions, point mutations, inversions and polymorphisms and, particularly preferred, SNPs (single nucleotide polymorphisms).

[0118] “Epigenetic parameters” are, in particular, cytosine methylations. Further epigenetic parameters include, for example, the acetylation of histones which, however, cannot be directly analyzed using the described method but which, in turn, correlate with the DNA methylation.

[0119] The term “bisulfite reagent” refers to a reagent comprising bisulfite, sulfite, hydrogen sulfite or combinations thereof, useful as disclosed herein to distinguish between methylated and unmethylated CpG dinucleotide sequences.

[0120] The term “Methylation assay” refers to any assay for determining the methylation state or methylation level of one or more CpG dinucleotide sequences within a sequence of DNA.

[0121] The term “MS AP-PCR” (Methylation-Sensitive Arbitrarily-Primed Polymerase Chain Reaction) refers to the art-recognized technology that allows for a global scan of the genome using CG-rich primers to focus on the regions most likely to contain CpG dinucleotides, and described by Gonzalgo et al., Cancer Research 57: 594-599, 1997.

[0122] The term “MethyLight” refers to the art-recognized fluorescence-based real-time PCR technique described by Eads et al., Cancer Res. 59: 2302-2306, 1999.

[0123] The term “HeavyMethyl” assay, in the embodiment thereof implemented herein, refers to a HeavyMethyl/MethyLight assay, which is a variation of the MethyLight assay, wherein the MethyLight assay is combined with methylation specific blocking probes covering CpG positions between the amplification primers.

[0124] The term “Ms-SNuPE” (Methylation-sensitive Single Nucleotide Primer Extension) refers to the art-recognized assay described by Gonzalgo & Jones, Nucleic Acids Res. 25: 2529-2531, 1997.

[0125] The term “MSP” (Methylation-specific PCR) refers to the art-recognized methylation assay described by Herman et al. Proc. Natl. Acad. Sci. USA 93: 9821-9826, 1996, and by U.S. Pat. No. 5,786,146.

[0126] The term “COBRA” (Combined Bisulfite Restriction Analysis) refers to the art-recognized methylation assay described by Xiong & Laird, Nucleic Acids Res. 25: 2532-2534, 1997.

[0127] The term “MCA” (Methylated CpG Island Amplification) refers to the methylation assay described by Toyota et al., Cancer Res. 59: 2307-12, 1999, and in WO 00/26401A1.

[0128] With respect to the dinucleotide designations within the phrase “CpG, tpG and Cpa” a small “t” is used to indicate a thymine at a cytosine position, whenever the cytosine was transformed to uracil by pretreatment, whereas, a capital “T” is used to indicate a thymine position that was a thymine prior to pretreatment). Likewise, a small “a” is used to indicate the adenine corresponding to such a small “t” located at a cytosine position, whereas a capital “A” is used to indicate an adenine that was adenine prior to pretreatment.

[0129] In the context of the present invention, the term “marker” refers to a distinguishing of a characteristic that may be detectable if present in blood, serum or other bodily fluids, or preferably in cell and/or tissues that is reflective of the presence of a particular condition (in particular a disease). The characteristic may be a phenotypical characteristic, such as cell count, cell shape, viability, presence/absence of circulating tumor cells and/or a physiological characteristic, such as a protein, an enzyme, an RNA molecule or a DNA molecule. The term may alternately refer to a specific characteristic of said substance, such as, but not limited to, a specific methylation pattern, making the characteristic distinguishable from otherwise identical characteristics. Examples for markers are “pan-cancer markers” and “cell- or tissue-markers”, as described below. Preferred markers can be identified from tables 1 and 2, herein below.

[0130] The term “pan-cancer marker” refers to a distinguishing or characteristic substance (such as a marker) that may be detectable if present in blood, serum or other bodily fluids, or preferably in tissues that is reflective of the presence of proliferative disease. Pan-cancer markers are characterized by the fact that they reflect the possibility of the presence of more than one proliferative diseases in organs or tissues of the patient and/or subject. Thus, pan-cancer markers are not specific for a single proliferative disease being present in an organ or tissue, but are specific for more than one proliferative disease for said subject. The substance may, for example, be cell count, presence/absence of circulating tumor cells, a protein, an enzyme, an RNA molecule or a DNA molecule that is suitable to used as a marker. The term may alternately refer to a specific characteristic of said substance, such as, but not limited to, a specific methylation pattern, making the substance distinguishable from otherwise identical substances. A high level of a tumor marker may indicate that cancer is developing in the body. Typically, this substance is derived from the tumor itself. Examples of pan-cancer tumor markers include, but are not limited to CEA (ovarian, lung, breast, pancreas, and gastrointestinal tract cancers), and GSTPi (liver and prostate cancer). Further markers can be identified from table 2, herein below.

[0131] The term “cell- or tissue-marker” refers to a distinguishing or characteristic substance of a specific cell type or tissue that may be detectable if present in blood or other bodily fluids, but preferably in cells of specific tissues. The substance may for example be a protein, an enzyme, a RNA molecule or a DNA molecule. The term may alternately refer to a specific characteristic of said substance, such as but not limited to a specific methylation pattern, making the substance distinguishable from otherwise identical substances. A high level of a tissue marker found in a cell may mean said cell is a cell of that respective tissue. A high level of a cell- or tissue-marker found in a bodily fluid may mean that a respective type of tissue is either spreading cells that contain said marker into the bodily fluid, or is spreading the marker itself into the blood or other bodily fluids. Further markers can be identified from table 1, herein below.

[0132] The term “nucleic acid-analysis” refers to an analysis of the presence and/or expression of a marker that is based, at least in part, on an analysis of nucleic acid molecule(s) that is (are) specific for said marker. One preferred example of nucleic acid-analysis would be methylation analysis of the DNA of the particular marker.

[0133] The term “localizing the proliferative disease” refers to an analysis of a marker that may be found in a sample, wherein said marker is known to be expressed in one or more cells of specific tissues. A high level of a tissue marker found in a cell means that this said cell is a cell of that respective tissue. This information (or an information derived from several markers) is used in order to localize the proliferative disease inside the body of the patient as being found in one or several particular tissue(s).

[0134] The term “ESME” refers to a novel and particularly preferred software program that considers or accounts for the unequal distribution of bases in bisulfite converted DNA and normalizes the sequence traces (electropherograms) to allow for quantitation of methylation signals within the sequence traces. Additionally, it calculates a bisulfite conversion rate, by comparing signal intensities of thymines at specific positions, based on the information about the corresponding untreated DNA sequence (see U.S. publication number 2004-0023279, and EP 1 369 493 (in German), both incorporated by reference herein in their entirety).

[0135] Unless defined otherwise, all technical and scientific terms used herein have the same meaning as commonly understood by one of ordinary skill in the art to which the invention pertains. Although any methods and materials similar or equivalent to those described herein can be used for testing of the present invention, the preferred materials and methods are described herein. All documents cited herein are thereby incorporated by reference.

[0136] In one—and the major—aspect thereof, the present invention provides a particular method for diagnosing a proliferative disease in a subject. The method generally comprises the steps of: providing a biological sample from a subject, detecting the presence, absence, abundance and/or expression of one or more markers that indicate proliferative disease in said sample; and localizing the proliferative disease and/or characterizing the type of proliferative disease by detecting specific tissue markers wherein the detection of said tissue markers is based on nucleic acid-analysis.

[0137] The particular advantage of the solution according to the present invention is based—first—on the use of markers for the diagnosis that are not specific for one type of proliferative disease (for example, cancer) which sometimes (and also herein) are designated as “pan-cancer markers”. Those markers can, for example, exhibit a change in methylation in nearly all types of cancers (or are, for example, overexpressed), or combinations of those markers can be (specifically and preferably) combined into a pan-cancer panel and used in order to efficiently and sensitively detect any proliferative disease (cancerous disease), or at least many different proliferative diseases (cancerous diseases). This needs not to limited to a methylation analysis, but can also be combined with the analysis of other markers. Second, for a localisation of the cancer/determination of the type of cancer a detection of specific tissue markers based on nucleic acid-analysis is performed, and the two results of the marker analyses are combined in order to provide a localisation of the cancer/determination of the type of cancer (characterisation thereof).

[0138] The analysis of the pan-cancer markers has the advantage that they can be very sensitive and specific for a kind of “cancer-yes/no” information, but at the same time need not to give a clear indication about the localisation of the cancer (e.g. need not to be tissue- and/or cell-specific). Thus, this allows for a simplified generation of qualitative and improved diagnostic marker panels for proliferative diseases, since very sensitive and very tissue-specific markers can be combined in such a diagnostic marker panel. Nevertheless, the present method according to the invention, in particular in embodiments for following-up (monitoring) of once identified proliferative diseases, can also include a quantitative analysis of the expression and/or the methylation of a marker or markers as employed (see below).

[0139] US 2004/0137474 describes detecting the presence or absence of DNA methylation in DAPK, GSTP, p15, MDR1, Progesterone Receptor, Calcitonin, RIZ, and RARbeta genes, thereby characterizing cancer in a subject to be diagnosed. Furthermore, detecting the presence or absence of DNA methylation in one or more genes selected from the group consisting of S100, SRBC, BRCA, HIN1, Cyclin D2, TMS1, HIC-1, hMLH1E-cadherin, 14-3-3sigma, and MDGI is described.

[0140] Regarding the tissue- and/or cell-specific markers, many of such markers are known from the state of the art and are given herein below in Table 2.

[0141] Particular preferred are markers for the determination of the tissue(s) that—similarly to preferred pan-cancer markers—rely on an analysis of methylation of particular genes, as described, for example, in WO 2005-019477 “Methods and compositions for differentiating tissues or cell types using epigenetic markers”. Nevertheless, other expression markers can be also used as, for example described in Li-Li Hsiao et al. (A Compendium of Gene Expression in Normal Human Tissues Reveals Tissue-Selective Genes and Distinct Expression Patterns of Housekeeping Genes Physiol. Genomics (Oct. 2, 2001)), Butte et al. (Further defining housekeeping, or “maintenance,” genes Focus on “A compendium of gene expression in normal human tissues” Physiol. Genomics 7: 95-96, 2001), and the HuGE Index: Human Gene Expression Index at http://www.hugeindex.org.

[0142] US 2005-048480 describes a method for selecting a gene used as an index of cancer classification, comprising the following steps of: (1) determining expression levels in cancer samples to be tested for at least one of genes each of which expression is altered specifically during cell proliferation, and then comparing the determined expression levels with an expression level of the genes in a control sample, thereby evaluating alterations in expression levels of the genes, wherein the control sample is a normal tissue, or a cancer sample with low malignancy; (2) classifying the cancer samples to be tested into plural numbers of types, based on alterations in expression levels of the genes evaluated in the above step (1) and pathological findings for the cancer samples to be tested; and (3) examining alterations in expressions for plural numbers of genes in each of the cancer samples to be tested classified in the above step (2), to select a gene, wherein expression of said gene is altered independently to genes each of which expression is altered specifically during cell proliferation and expression level of said gene is specifically altered depending on every type of cancer samples to be tested. Preferably, in the step (1), expression levels of genes selected from the group consisting of CDC6 gene and E2F family genes are determined on the basis of levels of mRNAs transcribed from the genes. Nevertheless, US 2005-048480 describes that the expression level shall be used in order to identify the type of cancer, which renders the analysis rather complicated. Tissue identification is not described.

[0143] In addition to the advantages as described above, the method according to the present invention can be flexibly used, for example, in several different preferred aspects as follows:
[0144] Marker-panels (pan-cancer panels can be combined and provided that in their particular combination of pan-cancer and tissue markers readily and quickly lead to the desired result, e.g. the early pre-clinical diagnosis of certain types of cancer, preferably even before clinical symptoms become evident. Further laborious examinations for the determination of the localisation of the cancer/determination of the type of cancer (characterisation thereof) can be avoided. In addition, an earlier therapy of a cancer usually leads to a higher likelihood of a successful outcome of the therapy.
[0145] The method according to the present invention can be used in detecting the presence or absence of chemotherapy-resistant cancer. This method can be performed by monitoring the markers of a pan-cancer panel in order to detect if a particular cancer in a particular tissue is still present or not, or whether the quantitative amount of cancer marker versus tissue marker is changing over the time of an anti-cancer treatment. A quantification can be achieved by, e.g. measuring signal intensity in an ELISA or employing real-time methylation analysis, such as, for example, MethyLight®. In yet another preferred aspect thereof, said chemotherapy is a nonsteroidal selective estrogen receptor modulator.
[0146] The method according to the present invention can be used in characterizing cancer comprising determining a chance of disease-free survival, and/or monitoring disease progression in said subject. This method can be performed by monitoring the markers of a pan-cancer panel in order to detect if a particular cancer in a particular tissue is still absent or not, or whether the quantitative amount of cancer marker versus tissue marker is changing over the time of an anti-cancer treatment. Usually, the longer the markers of a particular pan-cancer panel are absent or even only partially absent, the higher a chance of disease-free survival will be. Similarly, the method according to the present invention can be used in characterizing cancer comprising determining relapse of the disease after complete resection of the tumor in said subject by identifying tissue markers and cancer markers in said sample that are identical to the removed tumor.
[0147] The method according to the present invention can be used in characterizing cancer comprising determining metastatic disease by identifying tissue markers in a particular sample that are foreign to the tissue from which said sample is taken from. A foreign tissue marker indicates that the cells of the sample are derived from a foreign origin, i.e. are stemming from metastases.
[0148] The method according to the present invention can be used in an improved method for treatment of a proliferative disease, wherein after the analysis of the markers as described hereinabove, a suitable treatment regimen for said proliferative disease to be treated is selected and applied. As will be readily understood, this method can also be employed in the context of all aspects of the general method according to the present invention as described above, i.e. in connection with these. Another aspect of the present invention is therefore related to an improved method of treatment of a proliferative disease, comprising any of the above methods according to the aspects of the present invention, either alone or in a combination.

[0149] Preferred is a method according to the present invention, wherein said proliferative disease is cancer, and in particular selected from soft tissue, skin, leukemia, renal, prostate, brain, bone, blood, lymphoid, stomach, head and neck, colon or breast cancer, preferably prostate or breast cancer.

[0150] The four terms that apply to the fields of overall genome-wide analysis of all biological processes are called: Proteomics, Transcriptomics, Epigenomics (or Methylomics) and Genomics. Methods and techniques that can be used for studying expression or studying the modifications responsible for expression on all of these levels are well described in the literature and therefore known to a person skilled in the art. They are described in text books of molecular biology and in a large number of scientific journals.

[0151] According to the invention, detecting the presence, absence, abundance and/or expression of one or more marker that is specific for more than one proliferative disease as well as the detection of the presence of the expression of tissue markers comprises detecting the expression of physiological, genetic and/or cellular expression and/or cell count, preferably said detecting the expression comprises detecting the expression of protein, mRNA expression and/or the presence or absence of DNA methylation in one or more of said markers. Particularly, said detecting the expression of protein comprises marker-specific antibodies, ELISA, cell sorting techniques, Western blot, or the detection of labeled protein, and said measuring the mRNA expression comprises detection of labeled mRNA or Northern blot. In general, the expression of a marker, such as a gene, or rather the protein encoded by the gene, can be studied in particular on five different levels: firstly, protein expression levels can be determined directly, secondly, mRNA transcription levels can be determined, thirdly, epigenetic modifications, such as gene's DNA methylation profile or the gene's histone profile; can be analysed, as methylation is often correlated with inhibited protein expression, fourth, the gene itself may be analysed for genetic modifications such as mutations, deletions, polymorphisms etc. influencing the expression of the gene product, and fifth, the expression can be detected indirectly, such as, for example, by a change in the cell count of cells that occurs in response to a change in the presence, absence, abundance and/or expression of said marker for proliferative disease.

[0152] To detect the levels of mRNA encoding a marker, a sample is obtained from a patient. Said obtaining of a sample is not meant to be retrieving of a sample, as in performing a biopsy, but rather directed to the availability of an isolated biological material representing a specific tissue, relevant for the intended use. The sample can be a tumour tissue sample from the surgically removed tumour, a biopsy sample as taken by a surgeon and provided to the analyst or a sample of blood, plasma, serum or the like. The sample may be treated to extract the nucleic acids contained therein. The resulting nucleic acid from the sample is subjected to gel electrophoresis or other separation techniques. Detection involves contacting the nucleic acids and in particular the mRNA of the sample with a DNA sequence serving as a probe to form hybrid duplexes. The stringency of hybridisation is determined by a number of factors during hybridisation and during the washing procedure, including temperature, ionic strength, length of time and concentration of formamide. These factors are outlined in, for example, Sambrook et al. (Molecular Cloning: A Laboratory Manual, 2nd ed., 1989). Detection of the resulting duplex is usually accomplished by the use of labelled probes. Alternatively, the probe may be unlabeled, but may be detectable by specific binding with a ligand which is labelled, either directly or indirectly. Suitable labels and methods for labelling probes and ligands are known in the art, and include, for example, radioactive labels which may be incorporated by known methods (e.g., nick translation or kinasing), biotin, fluorescent groups, chemiluminescent groups (e.g., dioxetanes, particularly triggered dioxetanes), enzymes, antibodies, and the like.

[0153] In order to increase the sensitivity of the detection in a sample of mRNA encoding a marker, the technique of reverse transcription/polymerisation chain reaction can be used to amplify cDNA transcribed from mRNA encoding said marker. The method of reverse transcription/PCR is well known in the art. The reverse transcription/PCR method can be performed as follows. Total cellular RNA is isolated by, for example, the standard guanidium isothiocyanate method and the total RNA is reverse transcribed. The reverse transcription method involves synthesis of DNA on a template of RNA using a reverse transcriptase enzyme and a 3′ end primer. Typically, the primer contains an oligo(dT) sequence. The cDNA thus produced is then amplified using the PCR method and marker-specific primers. (Belyavsky et al, Nucl Acid Res 17:2919-2932, 1989; Krug and Berger, Methods in Enzymology, Academic Press, N.Y., Vol. 152, pp. 316-325, 1987 which are specifically incorporated by reference)

[0154] The analysis of protein expression is prior art. It usually requires an antibody specific for the gene product of interest. Appropriate include but are not limited to ELISA or immunohistochemistry.

[0155] Thus, any method known in the art for detecting proteins can be used. Such methods include, but are not limited to immunodiffusion, immunoelectrophoresis, immunochemical methods, binder-ligand assays, immunohistochemical techniques, agglutination and complement assays. (for example see Basic and Clinical Immunology, Sites and Terr, eds., Appleton & Lange, Norwalk, Conn. pp 217-262, 1991 which is incorporated by reference). Preferred are binder-ligand immunoassay methods including reacting antibodies with an epitope or epitopes of the marker and competitively displacing a labelled marker protein or derivative thereof.

[0156] Certain embodiments of the present invention comprise the use of antibodies specific to the polypeptide markers. In certain embodiments production of monoclonal or polyclonal antibodies can be induced by the use of the marker polypeptide as antigen. Such antibodies may in turn be used to detect expressed proteins. The levels of such proteins present in the peripheral blood of a patient may be quantified by conventional methods. Antibody-protein binding may be detected and quantified by a variety of means known in the art, such as labelling with fluorescent or radioactive ligands. The invention further comprises kits for performing the above-mentioned procedures, wherein such kits comprise antibodies specific for the marker polypeptides.

[0157] Numerous competitive and non-competitive protein binding immunoassays are well known in the art. Antibodies employed in such assays may be unlabeled, for example as used in agglutination tests, or labelled for use a wide variety of assay methods. Labels that can be used include radionuclides, enzymes, fluorescers, chemiluminescers, enzyme substrates or co-factors, enzyme inhibitors, particles, dyes and the like for use in radioimmunoassay (RIA), enzyme immunoassays, e.g., enzyme-linked immunosorbent assay (ELISA), fluorescent immunoassays and the like. Polyclonal or monoclonal antibodies to markers or an epitope thereof can be made for use in immunoassays by any of a number of methods known in the art. One approach for preparing antibodies to a protein is the selection and preparation of an amino acid sequence of all or part of the protein of a marker, chemically synthesising the sequence and injecting it into an appropriate animal, usually a rabbit or a mouse (Milstein and Kohler Nature 256:495-497, 1975; Gulfre and Milstein, Methods in Enzymology: Immunochemical Techniques 73:1-46, Langone and Banatis eds., Academic Press, 1981 which are incorporated by reference). Methods for preparation of a marker or an epitope thereof include, but are not limited to chemical synthesis, recombinant DNA techniques or isolation from biological samples.

[0158] A less established area in this context is the field of epigenomics or epigenetics, i.e. the field concerned with analysis of DNA methylation patterns. Methylation of DNA can play an important role in the control of gene expression in mammalian cells. DNA methyltransferases are involved in DNA methylation and catalyse the transfer of a methyl group from S-adenosylmethionine to cytosine residues to form 5-methylcytosine, a modified base that is found mostly at CpG sites in the genome. The presence of methylated CpG islands in the promoter region of genes can suppress their expression. This process may be due to the presence of 5-methylcytosine, which apparently interferes with the binding of transcription factors or other DNA-binding proteins to block transcription. In different types of tumours, aberrant or accidental methylation of CpG islands in the promoter region has been observed for many cancer-related genes, resulting in the silencing of their expression. Such genes include tumour suppressor genes, genes that suppress metastasis and angiogenesis, and genes that repair DNA (Momparler and Bovenzi (2000) J. Cell Physiol. 183:145-54).

[0159] Thus, in another and preferred aspect thereof, the object according to the present invention is solved by a method for diagnosing a proliferative disease in a subject comprising the steps of:

a) providing a biological sample from a subject, said biological sample comprising genomic DNA;
b) detecting the level of DNA methylation in one or more markers and determining therefrom upon the presence or absence of a proliferative disease; and c) detecting the level of methylation of one or more markers and determining therefrom if said one or more cell- and/or tissue-markers are atypically present, absent or present at above normal levels within said sample; and d) determining the presence or absence of a cell proliferative disorder and location thereof, based on the level of DNA methylation as detected in step b) and c). Preferably, step b) further comprises comparing said methylation profile to one or more standard methylation profiles, wherein said standard methylation profiles are selected from the group consisting of methylation profiles of non proliferative disease samples and methylation profiles of proliferative disease samples. More preferably, said detecting the presence or absence of DNA methylation comprises the digestion of said genomic DNA with a methylation-sensitive restriction enzyme, followed by multiplexed amplification of gene-specific DNA fragments with CpG islands.

[0160] According to the present invention, preferred is a method, wherein said marker that is specific for more than one proliferative disease is selected from the group consisting the genes according to Table 1 and/or nucleic acid sequences thereof according to any of SEQ ID NO: 100 to 161. According to the present invention, preferred is a method, wherein said tissue- and/or cell-specific marker is selected from the group consisting of nucleic acid sequences according to any of SEQ ID NO: 1 to 99. According to the present invention, further preferred is a method, wherein said tissue- and/or cell-specific marker is selected from the group consisting of nucleic acid sequences according to any of SEQ ID NO: 844 to SEQ ID NO: 1255. According to the present invention, preferred is a method, wherein said proliferative disease is selected from psoriasis or cancer, in particular from soft tissue, skin, leukemia, renal, prostate, brain, bone, blood, lymphoid, stomach, head and neck, colon or breast cancer. Further preferred is a method according to the present invention, wherein said biological sample is a biopsy sample or a blood sample.

[0161] Even further preferred is a method according to the present invention, wherein said DNA methylation comprises CpG methylation and/or imprinting. Still further preferred is a method according to the present invention, wherein said proliferative disease is in the early pre-clinical stage exhibiting no clinical symptoms. Still further preferred is a method according to the present invention, wherein said detecting the presence or absence of DNA methylation comprises the digestion of said genomic DNA with a methylation-sensitive restriction enzyme followed by multiplexed amplification of gene-specific DNA fragments with CpG islands.

[0162] The disclosed invention provides treated nucleic acids, derived from genomic SEQ ID NO: 1 to SEQ ID NO: 161 and SEQ ID NO: 844 to SEQ ID NO: 1255, wherein the treatment is suitable to convert at least one unmethylated cytosine base of the genomic DNA sequence to uracil or another base that is detectably dissimilar to cytosine in terms of hybridization. The genomic sequences in question may comprise one, or more, consecutive or random methylated CpG positions. Said treatment preferably comprises use of a reagent selected from the group consisting of bisulfite, hydrogen sulfite, disulfite, and combinations thereof. In a preferred embodiment of the invention, the objective comprises analysis of a non-naturally occurring modified nucleic acid comprising a sequence of at least 16 contiguous nucleotide bases in length of a sequence selected from the group consisting of SEQ ID NO: 162 TO SEQ ID NO: 805 and SEQ ID NO: 1256 to SEQ ID NO: 2903, wherein said sequence comprises at least one CpG, TpA or CpA dinucleotide and sequences complementary thereto. The sequences of SEQ ID NO: 162 TO SEQ ID NO: 805 provide non-naturally occurring modified versions of the nucleic acid according to SEQ ID NO: 1 TO SEQ ID NO: 161, SEQ ID NO: 1256 to SEQ ID NO: 2903 provide non-naturally occurring modified versions of the nucleic acid according to SEQ ID NO: 844 TO SEQ ID NO: 1255, wherein the modification of each genomic sequence results in the synthesis of a nucleic acid having a sequence that is unique and distinct from said genomic sequence as follows. For each sense strand genomic DNA, e.g., SEQ ID NO: 1, four converted versions are disclosed. A first version wherein “C” is converted to “T,” but “CpG” remains “CpG” (i.e., corresponds to case where, for the genomic sequence, all “C” residues of CpG dinucleotide sequences are methylated and are thus not converted); a second version discloses the complement of the disclosed genomic DNA sequence (i.e. antisense strand), wherein “C” is converted to “T,” but “CpG” remains “CpG” (i.e., corresponds to case where, for all “C” residues of CpG dinucleotide sequences are methylated and are thus not converted). The ‘upmethylated’ converted sequences of SEQ ID NO: 1 to SEQ ID NO: 161 correspond to SEQ ID NO: 162 to SEQ ID NO: 483. The ‘upmethylated’ converted sequences of SEQ ID NO: 844 to SEQ ID NO: 1255 correspond to SEQ ID NO: 1256 to SEQ ID NO: 2079. A third chemically converted version of each genomic sequences is provided, wherein “C” is converted to “T” for all “C” residues, including those of “CpG” dinucleotide sequences (i.e., corresponds to case where, for the genomic sequences, all “C” residues of CpG dinucleotide sequences are unmethylated); a final chemically converted version of each sequence, discloses the complement of the disclosed genomic DNA sequence (i.e. antisense strand), wherein “C” is converted to “T” for all “C” residues, including those of “CpG” dinucleotide sequences (i.e., corresponds to case where, for the complement (antisense strand) of each genomic sequence, all “C” residues of CpG dinucleotide sequences are unmethylated). The ‘downmethylated’ converted sequences of SEQ ID NO: 1 to SEQ ID NO: 161 correspond to SEQ ID NO: 484 to SEQ ID NO: 805. The ‘downmethylated’ converted sequences of SEQ ID NO: 844 to SEQ ID NO: 1253 correspond to SEQ ID NO: 2080 to SEQ ID NO: 2903.

[0163] The described invention further discloses oligonucleotides or oligomers for detecting the cytosine methylation state within pretreated DNA of the markers, according to SEQ ID NO: 162 to SEQ ID NO: 805 and SEQ ID NO: 1256 to SEQ ID NO: 2903. Said oligonucleotides or oligomers comprise a nucleic acid sequence having a length of at least nine (9) nucleotides which hybridise, under moderately stringent or stringent conditions (as defined herein above), to a pretreated nucleic acid sequence according to SEQ ID NO: 162 to SEQ ID NO: 805 and SEQ ID NO: 1256 to SEQ ID NO: 2903 and/or sequences complementary thereto. The hybridising portion of the hybridising nucleic acids is typically at least 9, 15, 20, 25, 30 or 35 nucleotides in length. However, longer molecules have inventive utility, and are thus within the scope of the present invention. Particularly preferred is a nucleic acid molecule that hybridize under moderately stringent and/or stringent hybridization conditions to all or a portion of the sequences SEQ ID NO: 162 to SEQ ID NO: 805 and SEQ ID NO: 1256 to SEQ ID NO: 2903 but not SEQ ID NO: 1 to SEQ ID NO: 161, SEQ ID NO: 844 to SEQ ID NO: 1255 or other human genomic DNA.

[0164] Hybridising nucleic acids of the type described herein can be used, for example, as a primer (e.g., a PCR primer), or a diagnostic and/or prognostic probe or primer. Preferably, hybridisation of the oligonucleotide probe to a nucleic acid sample is performed under stringent conditions and the probe is 100% identical to the target sequence. Nucleic acid duplex or hybrid stability is expressed as the melting temperature or Tm, which is the temperature at which a probe dissociates from a target DNA. This melting temperature is used to define the required stringency conditions.

[0165] For target sequences that are related and substantially identical to the corresponding sequence of SEQ ID NO: 162 to SEQ ID NO: 805 or SEQ ID NO: 1256 to SEQ ID NO: 2903, rather than identical, it is useful to first establish the lowest temperature at which only homologous hybridisation occurs with a particular concentration of salt (e.g., SSC or SSPE). Then, assuming that 1% mismatching results in a 1° C. decrease in the Tm, the temperature of the final wash in the hybridisation reaction is reduced accordingly (for example, if sequences having >95% identity with the probe are sought, the final wash temperature is decreased by 5° C.). In practice, the change in Tm can be between 0.5° C. and 1.5° C. per 1% mismatch.

[0166] Examples of inventive oligonucleotides of length X (in nucleotides), as indicated by polynucleotide positions with reference to, e.g., SEQ ID NOs: 162 to 805, include those corresponding to sets of consecutively overlapping oligonucleotides of length X, where the oligonucleotides within each consecutively overlapping set (corresponding to a given X value) are defined as the finite set of Z oligonucleotides from nucleotide positions:
[0167] n to (n+(X−1));
[0168] where n=1, 2, 3, . . . (Y−(X−1));
[0169] where Y equals the length (nucleotides or base pairs) of SEQ ID NO: 1;
[0170] where X equals the common length (in nucleotides) of each oligonucleotide in the set (e.g., X=20 for a set of consecutively overlapping 20-mers); and
[0171] where the number (Z) of consecutively overlapping oligomers of length X for a given SEQ ID NO of length Y is equal to Y−(X−1). For example Z=1,123−19=1,104 for either sense or antisense sets of SEQ ID NO: 1, where X=20.

[0172] Preferably, the set is limited to those oligomers that comprise at least one CpG, Cpa or tpG dinucleotide, wherein ‘Cpa’ is indicating that said Cpa hybridises to a position (tpG) which was a CpG prior to bisulfite conversion and is a TpG now; and wherein ‘tpG’ is indicating that said tpG hybridises to a position (Cpa) which is the complementary to a position (tpG) which was a CpG prior to bisulfite conversion and is a TpG now.

[0173] The present invention encompasses, for each of SEQ ID NO: 1 to SEQ ID NO: 161 and or SEQ ID NO: 844 to SEQ ID NO: 1255 after chemical pre-treatment, and SEQ ID NO: 162 to SEQ ID NO: 805 and or SEQ ID NO: 1256 to SEQ ID NO: 2903 (sense and antisense), the use of multiple consecutively overlapping sets of oligonucleotides or modified oligonucleotides of length X, where, e.g., X=9, 10, 17, 20, 22, 23, 25, 27, 30 or 35 nucleotides.

[0174] The oligonucleotides or oligomers according to the present invention constitute effective tools useful to ascertain genetic and epigenetic parameters of the genomic sequence corresponding to SEQ ID NO: 1 to SEQ ID NO: 161 and SEQ ID NO: 844 to SEQ ID NO: 1255 after chemical pre-treatment, and SEQ ID NO: 162 to 805 and SEQ ID NO: 1256 to SEQ ID NO: 2903. Preferably, said oligomers comprise at least one Cp, tpG or Cpa dinucleotide. Thus, in a preferred aspect thereof, the present invention does not relate to oligomers or other nucleic acids that are identical to the chromosomal and chemically untreated DNA sequences of the markers according to SEQ ID NO: 1 to SEQ ID NO: 161 and SEQ ID NO: 844 to SEQ ID NO: 1255.

[0175] Particularly preferred oligonucleotides or oligomers used to the present invention are those in which the cytosine of the CpG dinucleotide (or of the corresponding converted TpG or CpA dinucleotide) sequences is within the middle third of the oligonucleotide; that is, where the oligonucleotide is, for example, 13 bases in length, the CpG, TpG or CpA dinucleotide is positioned within the fifth to ninth nucleotide from the 5′-end.

[0176] The oligonucleotides used in this invention can also be modified by chemically linking the oligonucleotide to one or more moieties or conjugates to enhance the activity, stability or detection of the oligonucleotide. Such moieties or conjugates include chromophores, fluorophors, lipids such as cholesterol, cholic acid, thioether, aliphatic chains, phospholipids, polyamines, polyethylene glycol (PEG), palmityl moieties, and others as disclosed in, for example, U.S. Pat. Nos. 5,514,758, 5,565,552, 5,567,810, 5,574,142, 5,585,481, 5,587,371, 5,597,696 and 5,958,773. The probes may also exist in the form of a PNA (peptide nucleic acid) which has particularly preferred pairing properties. Thus, the oligonucleotide may include other appended groups such as peptides, and may include hybridisation-triggered cleavage agents (Krol et al., BioTechniques 6:958-976, 1988) or intercalating agents (Zon, Pharm. Res. 5:539-549, 1988). To this end, the oligonucleotide may be conjugated to another molecule, e.g., a chromophore, fluorophor, peptide, hybridisation-triggered cross-linking agent, transport agent, hybridisation-triggered cleavage agent, etc.

[0177] The oligonucleotide may also comprise at least one art-recognised modified sugar and/or base moiety, or may comprise a modified backbone or non-natural internucleoside linkage.

[0178] The oligomers used in the present invention are normally used in so called “sets” which contain at least one oligomer for analysis of each of the CpG dinucleotides of a genomic sequence comprising SEQ ID NO: 1 to 161 and SEQ ID NO: 844 to SEQ ID NO: 1255 and sequences complementary thereto or to their corresponding CG, tG or Ca dinucleotide within the pretreated nucleic acids according to SEQ ID NO: 162 to SEQ ID NO: 805 and SEQ ID NO: 1256 to SEQ ID NO: 2903 and sequences complementary thereto, wherein a ‘t’ indicates a nucleotide which converted from a cytosine into a thymine and wherein ‘a’ indicates the complementary nucleotide to such a converted thymine. Preferred is a set which contains at least one oligomer for each of the CpG dinucleotides within the respective marker and it's promoter and regulatory elements in both the pretreated and genomic versions of said gene. However, it is anticipated that for economic or other factors it may be preferable to analyse a limited selection of the CpG dinucleotides within said sequences and the contents of the set of oligonucleotides should be altered accordingly. Therefore, the present invention moreover relates to a set of at least 3 n (oligonucleotides and/or PNA-oligomers) used for detecting the cytosine methylation state in genomic DNA (SEQ ID NO: 1 to SEQ ID NO: 161 and SEQ ID NO: 844 to SEQ ID NO: 1255 and sequences complementary thereto) and sequences complementary thereto). These probes enable the detection of the expression of the markers that are specific for cell proliferative disorders. The set of oligomers may also be used for detecting single nucleotide polymorphisms (SNPs) in genomic DNA (SEQ ID NO: 1 to SEQ ID NO: 161 and SEQ ID NO: 844 to SEQ ID NO: 1255, and sequences complementary thereto).

[0179] Moreover, the present invention includes the use of a set of at least two oligonucleotides which can be used as so-called “primer oligonucleotides” for amplifying DNA sequences of one of SEQ ID NO: 1 to SEQ ID NO: 805 and SEQ ID NO: 844 to SEQ ID NO: 2903 and sequences complementary thereto, or segments thereof.

[0180] In the case of the sets of oligonucleotides according to the present invention, it is preferred that at least one and more preferably all members of the set of oligonucleotides is bound to a solid phase.

[0181] According to the present invention, it is preferred that an arrangement of different oligonucleotides and/or PNA-oligomers (a so-called “array”) made available by the present invention is present in a manner that it is likewise bound to a solid phase. This array of different oligonucleotide- and/or PNA-oligomer sequences can be characterised in that it is arranged on the solid phase in the form of a rectangular or hexagonal lattice. The solid phase surface is preferably composed of silicon, glass, polystyrene, aluminium, steel, iron, copper, nickel, silver, or gold. However, nitrocellulose as well as plastics such as nylon which can exist in the form of pellets or also as resin matrices may also be used.

[0182] A further subject matter of the present invention relates to a DNA chip for the analysis of cell proliferative disorders. DNA chips are known, for example, in U.S. Pat. No. 5,837,832.

[0183] As above, the present invention includes detecting the presence or absence of DNA methylation in one or more marker gene (i.e. and preferably the promoter and regulatory elements). Most preferably the assay according to the following method is used in order to detect methylation within the markers wherein said methylated nucleic acids are present in a solution further comprising an excess of background DNA, wherein the background DNA is present in between 100 to 1000 times the concentration of the DNA to be detected. Said method comprising contacting a nucleic acid sample obtained from said subject with at least one reagent or a series of reagents, wherein said reagent or series of reagents, distinguishes between methylated and non-methylated CpG dinucleotides within the marker.

[0184] Preferably, said method comprises the following steps: In the first step, a sample of the tissue to be analysed is obtained. The source may be any suitable source, preferably, the source of the sample is selected from the group consisting of histological slides, biopsies, paraffin-embedded tissue, bodily fluids, plasma, serum, stool, urine, blood, nipple aspirate and combinations thereof. Preferably, the source is tumour tissue, biopsies, serum, urine, blood or nipple aspirate. The most preferred source, is the tumour sample, surgically removed from the patient or a biopsy sample of said patient.

[0185] The DNA is then isolated from the sample. Extraction may be by means that are standard to one skilled in the art, including the use of detergent lysates, sonification and vortexing with glass beads. Once the nucleic acids have been extracted, the genomic double stranded DNA is used in the analysis.

[0186] In the second step of the method, the genomic DNA sample is treated in such a manner that cytosine bases which are unmethylated at the 5′-position are converted to uracil, thymine, or another base which is dissimilar to cytosine in terms of hybridisation behaviour. This will be understood as ‘pretreatment’ herein.

[0187] The above described pretreatment of genomic DNA is preferably carried out with bisulfite (hydrogen sulfite, disulfite) and subsequent alkaline hydrolysis which results in a conversion of non-methylated cytosine nucleobases to uracil or to another base which is dissimilar to cytosine in terms of base pairing behaviour. Enclosing the DNA to be analysed in an agarose matrix, thereby preventing the diffusion and renaturation of the DNA (bisulfite only reacts with single-stranded DNA), and replacing all precipitation and purification steps with fast dialysis (Olek A, et al., A modified and improved method for bisulfite based cytosine methylation analysis, Nucleic Acids Res. 24:5064-6, 1996) is one preferred example how to perform said pretreatment. It is further preferred that the bisulfite treatment is carried out in the presence of a radical scavenger or DNA denaturing agent.

[0188] The bisulfite-mediated conversion of the genomic sequences into ‘bisulfite sequences’ may take place in any standard, art-recognized format. This includes, but is not limited to modification within agarose gel or in denaturing solvents. The nucleic acid may be, but is not required to be, concentrated and/or otherwise conditioned before the said nucleic acid sample is pretreated with said agent. The pretreatment with bisulfite can be performed within the sample or after the nucleic acids are isolated. Preferably, pretreatment with bisulfite is performed after DNA isolation, or after isolation and purification of the nucleic acids.

[0189] The double-stranded DNA is preferentially denatured prior to pretreatment with bisulfite.

[0190] The bisulfite conversion thus consists of two important steps, the sulfonation of the cytosine, and the subsequent deamination thereof. The equilibra of the reaction are on the correct side at two different temperatures for each stage of the reaction. The temperatures and length at which each stage is carried out may be varied according to the specific requirements of the situation.

[0191] Preferably, sodium bisulfite is used as described in WO 02/072880. Particularly preferred, is the so called agarose-bead method, wherein the DNA is enclosed in a matrix of agarose, thereby preventing the diffusion and renaturation of the DNA (bisulfite only reacts with single-stranded DNA), and replacing all precipitation and purification steps with fast dialysis (Olek et al., Nucleic Acids Res. 24: 5064-5066, 1996). It is further preferred that the bisulfite pretreatment is carried out in the presence of a radical scavenger or DNA denaturing agent, such as oligoethylenglycoldialkylether or preferably Dioxan. The DNA may then be amplified without need for further purification steps.

[0192] Said chemical conversion, however, may also take place in any format standard in the art. This includes, but is not limited to modification within agarose gel, in denaturing solvents or within capillaries.

[0193] Generally, the bisulfite pretreatment transforms unmethylated cytosine bases, whereas methylated cytosine bases remain unchanged. In a 100% successful bisulfite pretreatment, a complete conversion of all unmethylated cytosine bases into uracil bases takes place. During subsequent hybridization steps, uracil bases behave as thymine bases, in that they form WatsonCrick base pairs with adenine bases. Only cytosine bases that are located in a CpG position (i.e., in a 5′-CG-3′dinucleotide), are known to be possibly methylated (known to be normally methylatable in vivo). Therefore all other cytosines, not located in a CpG position, are unmethylated and are thus transformed into uracils that will pair with adenine during amplification cycles, and as such will appear as thymine bases in an amplified product (e.g., in a PCR product). Whenever a bisulfite-treated nucleic acid is amplified and/or sequence analyzed, the positions that appear as thymines in the sequence can either indicate a true thymine position or a (transformed or converted) cytosine position. These can only be distinguished by comparing the bisulfite sequence data with the untreated genomic sequence data that is already known.

[0194] However, cytosines in CpG positions must be regarded as potentially methylated, more precisely as potentially differentially methylated. Significantly, a 100% cytosine or 100% thymine signal at a CpG position will be rare, because biological samples always contain some kind of background DNA. Therefore, according to the inventive methods, the ratio of thymine to cytosine appearing at a specific CpG position is determined as accurately as possible. This is enabled, for example, by using the sequencing evaluation software tool ESME, which takes into account the falsification or bias of this ratio caused by incomplete conversion (see herein below, and application EP 02 090 203, incorporated herein by reference.

[0195] In the third step of the method, fragments of the pretreated DNA are amplified. Wherein the source of the DNA is free DNA from serum, or DNA extracted from paraffin it is particularly preferred that the size of the amplificate fragment is between 100 and 200 base pairs in length, and wherein said DNA source is extracted from cellular sources (e.g. tissues, biopsies, cell lines) it is preferred that the amplificate is between 100 and 350 base pairs in length. It is particularly preferred that said amplificates comprise at least one 20 base pair sequence comprising at least three CpG dinucleotides. Said amplification is carried out using sets of primer oligonucleotides according to the present invention, and a preferably heat-stable polymerase. The amplification of several DNA segments can be carried out simultaneously in one and the same reaction vessel, in one embodiment of the method preferably six or more fragments are amplified simultaneously. Typically, the amplification is carried out using a polymerase chain reaction (PCR) and a set of primer oligonucleotides that includes at least two oligonucleotides whose sequences are each reverse complementary, identical, or hybridise under stringent or highly stringent conditions to an at least 18-base-pair long segment of the base sequences of SEQ ID NO: 1 to SEQ ID NO: 161 and SEQ ID NO: 844 to SEQ ID NO: 1255 after chemical pre-treatment, and SEQ ID NO: 162 to SEQ ID NO: 805 and SEQ ID NO: 1256 to SEQ ID NO: 2903 and sequences complementary thereto.

[0196] In an alternate embodiment of the method, the methylation status of preselected CpG positions within the nucleic acid sequences comprising SEQ ID NO: 1 to SEQ ID NO: 161 and SEQ ID NO: 844 to SEQ ID NO: 1255 after methylation specific conversion may be detected by use of methylation-specific primer oligonucleotides. This technique (MSP) has been described in U.S. Pat. No. 6,265,171 to Herman. The use of methylation status specific primers for the amplification of bisulfite treated DNA allows the differentiation between methylated and unmethylated nucleic acids. MSP primers pairs contain at least one primer which hybridises to a bisulfite treated CpG dinucleotide. Therefore, the sequence of said primers comprises at least one CpG, TpG or CpA dinucleotide. MSP primers specific for non-methylated DNA contain a “T” at the 3′ position of the C position in the CpG. Preferably, therefore, the base sequence of said primers is required to comprise a sequence having a length of at least 18 nucleotides which hybridises to a pretreated nucleic acid sequence according to SEQ ID NO: 162 to SEQ ID NO: 805 and SEQ ID NO: 1256 to SEQ ID NO: 2903 and sequences complementary thereto, wherein the base sequence of said oligomers comprises at least one CpG, tpG or Cpa dinucleotide. In this embodiment of the method according to the invention it is particularly preferred that the MSP primers comprise between 2 and 4 CpG, tpG or Cpa dinucleotides. It is further preferred that said dinucleotides are located within the 3′ half of the primer e.g. wherein a primer is 18 bases in length the specified dinucleotides are located within the first 9 bases form the 3′ end of the molecule. In addition to the CpG, tpG or Cpa dinucleotides it is further preferred that said primers should further comprise several bisulfite converted bases (i.e. cytosine converted to thymine, or on the hybridising strand, guanine converted to adenosine). In a further preferred embodiment said primers are designed so as to comprise no more than 2 cytosine or guanine bases.

[0197] The fragments obtained by means of the amplification can carry a directly or indirectly detectable label. Preferred are labels in the form of fluorescence labels, radionuclides, or detachable molecule fragments having a typical mass which can be detected in a mass spectrometer. Where said labels are mass labels, it is preferred that the labelled amplificates have a single positive or negative net charge, allowing for better detectability in the mass spectrometer. The detection may be carried out and visualised by means of, e.g., matrix assisted laser desorption/ionisation mass spectrometry (MALDI) or using electron spray mass spectrometry (ESI).

[0198] Matrix Assisted Laser Desorption/Ionization Mass Spectrometry (MALDI-TOF) is a very efficient development for the analysis of biomolecules (Karas & Hillenkamp, Anal Chem., 60:2299-301, 1988). An analyte is embedded in a light-absorbing matrix. The matrix is evaporated by a short laser pulse thus transporting the analyte molecule into the vapour phase in an unfragmented manner. The analyte is ionised by collisions with matrix molecules. An applied voltage accelerates the ions into a field-free flight tube. Due to their different masses, the ions are accelerated at different rates. Smaller ions reach the detector sooner than bigger ones. MALDI-TOF spectrometry is well suited to the analysis of peptides and proteins. The analysis of nucleic acids is somewhat more difficult (Gut & Beck, Current Innovations and Future Trends, 1:147-57, 1995). The sensitivity with respect to nucleic acid analysis is approximately 100-times less than for peptides, and decreases disproportionally with increasing fragment size. Moreover, for nucleic acids having a multiply negatively charged backbone, the ionisation process via the matrix is considerably less efficient. In MALDI-TOF spectrometry, the selection of the matrix plays an eminently important role. For the desorption of peptides, several very efficient matrixes have been found which produce a very fine crystallisation. There are now several responsive matrixes for DNA, however, the difference in sensitivity between peptides and nucleic acids has not been reduced. This difference in sensitivity can be reduced, however, by chemically modifying the DNA in such a manner that it becomes more similar to a peptide. For example, phosphorothioate nucleic acids, in which the usual phosphates of the backbone are substituted with thiophosphates, can be converted into a charge-neutral DNA using simple alkylation chemistry (Gut & Beck, Nucleic Acids Res. 23: 1367-73, 1995). The coupling of a charge tag to this modified DNA results in an increase in MALDI-TOF sensitivity to the same level as that found for peptides. A further advantage of charge tagging is the increased stability of the analysis against impurities, which makes the detection of unmodified substrates considerably more difficult.

[0199] In a particularly preferred embodiment of the method the amplification of step three is carried out in the presence of at least one species of blocker oligonucleotides. The use of such blocker oligonucleotides has been described by Yu et al., BioTechniques 23:714-720, 1997. The use of blocking oligonucleotides enables the improved specificity of the amplification of a subpopulation of nucleic acids. Blocking probes hybridised to a nucleic acid suppress, or hinder the polymerase mediated amplification of said nucleic acid. In one embodiment of the method blocking oligonucleotides are designed so as to hybridise to background DNA. In a further embodiment of the method said oligonucleotides are designed so as to hinder or suppress the amplification of unmethylated nucleic acids as opposed to methylated nucleic acids or vice versa.

[0200] Blocking probe oligonucleotides are hybridised to the bisulfite treated nucleic acid concurrently with the PCR primers. PCR amplification of the nucleic acid is terminated at the 5′ position of the blocking probe, such that amplification of a nucleic acid is suppressed where the complementary sequence to the blocking probe is present. The probes may be designed to hybridise to the bisulfite treated nucleic acid in a methylation status specific manner. For example, for detection of methylated nucleic acids within a population of unmethylated nucleic acids, suppression of the amplification of nucleic acids which are unmethylated at the position in question would be carried out by the use of blocking probes comprising a ‘TpG’ at the position in question, as opposed to a ‘CpG.’ In one embodiment of the method the sequence of said blocking oligonucleotides should be identical or complementary to molecule is complementary or identical to a sequence at least 18 base pairs in length selected from the group consisting of SEQ ID NO: 1 to SEQ ID NO: 161 and SEQ ID NO: 844 to SEQ ID NO: 1255 after chemical pre-treatment, and SEQ ID NO: 162 to SEQ ID NO: 805 and SEQ ID NO: 1256 to SEQ ID NO: 2903, preferably comprising one or more CpG, TpG or CpA dinucleotides.

[0201] For PCR methods using blocker oligonucleotides, efficient disruption of polymerase-mediated amplification requires that blocker oligonucleotides not be elongated by the polymerase. Preferably, this is achieved through the use of blockers that are 3′-deoxyoligonucleotides, or oligonucleotides derivatised at the 3′ position with other than a “free” hydroxyl group. For example, 3′-O-acetyl oligonucleotides are representative of a preferred class of blocker molecule.

[0202] Additionally, polymerase-mediated decomposition of the blocker oligonucleotides should be precluded. Preferably, such preclusion comprises either use of a polymerase lacking 5′-3′ exonuclease activity, or use of modified blocker oligonucleotides having, for example, thioate bridges at the 5′-termini thereof that render the blocker molecule nuclease-resistant. Particular applications may not require such 5′ modifications of the blocker. For example, if the blocker- and primer-binding sites overlap, thereby precluding binding of the primer (e.g., with excess blocker), degradation of the blocker oligonucleotide will be substantially precluded. This is because the polymerase will not extend the primer toward, and through (in the 5′-3′ direction) the blocker—a process that normally results in degradation of the hybridised blocker oligonucleotide.

[0203] A particularly preferred blocker/PCR embodiment, for purposes of the present invention and as implemented herein, comprises the use of peptide nucleic acid (PNA) oligomers as blocking oligonucleotides. Such PNA blocker oligomers are ideally suited, because they are neither decomposed nor extended by the polymerase.

[0204] In one embodiment of the method, the binding site of the blocking oligonucleotide is identical to, or overlaps with that of the primer and thereby hinders the hybridisation of the primer to its binding site. In a further preferred embodiment of the method, two or more such blocking oligonucleotides are used. In a particularly preferred embodiment, the hybridisation of one of the blocking oligonucleotides hinders the hybridisation of a forward primer, and the hybridisation of another of the probe (blocker) oligonucleotides hinders the hybridisation of a reverse primer that binds to the amplificate product of said forward primer.

[0205] In an alternative embodiment of the method, the blocking oligonucleotide hybridises to a location between the reverse and forward primer positions of the treated background DNA, thereby hindering the elongation of the primer oligonucleotides.

[0206] It is particularly preferred that the blocking oligonucleotides are present in at least 5 times the concentration of the primers.

[0207] In the fourth step of the method, the amplificates obtained during the third step of the method are analysed in order to ascertain the methylation status of the CpG dinucleotides prior to the treatment.

[0208] In embodiments where the amplificates were obtained by means of MSP amplification and/or blocking oligonucleotides, the presence or absence of an amplificate is in itself indicative of the methylation state of the CpG positions covered by the primers and or blocking oligonucleotide, according to the base sequences thereof. All possible known molecular biological methods may be used for this detection, including, but not limited to gel electrophoresis, sequencing, liquid chromatography, hybridisations, real time PCR analysis or combinations thereof. This step of the method further acts as a qualitative control of the preceding steps.

[0209] In the fourth step of the method amplificates obtained by means of both standard and methylation specific PCR are further analysed in order to determine the CpG methylation status of the genomic DNA isolated in the first step of the method. This may be carried out by means of hybridisation-based methods such as, but not limited to, array technology and probe based technologies as well as by means of techniques such as sequencing and template directed extension.

[0210] In one embodiment of the method, the amplificates synthesised in step three are subsequently hybridised to an array or a set of oligonucleotides and/or PNA probes. In this context, the hybridisation takes place in the following manner: the set of probes used during the hybridisation is preferably composed of at least two oligonucleotides or PNA-oligomers; in the process, the amplificates serve as probes which hybridise to oligonucleotides previously bonded to a solid phase; the non-hybridised fragments are subsequently removed; said oligonucleotides contain at least one base sequence having a length of at least 9 nucleotides which is reverse complementary or identical to a segment of the base sequences specified in the SEQ ID NO: 1 to SEQ ID NO: 161 and SEQ ID NO: 844 to SEQ ID NO: 1255 after chemical pre-treatment, and SEQ ID NO: 162 to SEQ ID NO: 805 and SEQ ID NO: 1256 to SEQ ID NO: 2903; and the segment comprises at least one CpG, TpG or CpA dinucleotide.

[0211] In a preferred embodiment, said dinucleotide is present in the central third of the oligomer. Said oligonucleotide may also be present in the form of peptide nucleic acids. The non-hybridised amplificates are then removed. The hybridised amplificates are detected. In this context, it is preferred that labels attached to the amplificates are identifiable at each position of the solid phase at which an oligonucleotide sequence is located.

[0212] In yet a further embodiment of the method, the genomic methylation status of the CpG positions may be ascertained by means of oligonucleotide probes that are hybridised to the bisulfite treated DNA concurrently with the PCR amplification primers (wherein said primers may either be methylation specific or standard).

[0213] A particularly preferred embodiment of this method is the use of fluorescence-based Real Time Quantitative PCR (Heid et al., Genome Res. 6:986-994, 1996; also see U.S. Pat. No. 6,331,393). There are two preferred embodiments of utilising this method. One embodiment, known as the TaqMan™ assay employs a dual-labelled fluorescent oligonucleotide probe. The TaqMan™ PCR reaction employs the use of a non-extendible interrogating oligonucleotide, called a TaqMan™ probe, which is designed to hybridise to a CpG-rich sequence located between the forward and reverse amplification primers. The TaqMan™ probe further comprises a fluorescent “reporter moiety” and a “quencher moiety” covalently bound to linker moieties (e.g., phosphoramidites) attached to the nucleotides of the TaqMan™ oligonucleotide. Hybridised probes are displaced and broken down by the polymerase of the amplification reaction thereby leading to an increase in fluorescence. For analysis of methylation within nucleic acids subsequent to bisulfite treatment, it is required that the probe be methylation specific, as described in U.S. Pat. No. 6,331,393, (hereby incorporated by reference in its entirety) also known as the MethyLight assay. The second preferred embodiment of this MethyLight technology is the use of dual-probe technology (Lightcycler®), each probe carrying donor or recipient fluorescent moieties, hybridisation of two probes in proximity to each other is indicated by an increase or fluorescent amplification primers. Both these techniques may be adapted in a manner suitable for use with bisulfite treated DNA, and moreover for methylation analysis within CpG dinucleotides.

[0214] Also any combination of these probes or combinations of these probes with other known probes may be used.

[0215] In a further preferred embodiment of the method, the fourth step of the method comprises the use of template-directed oligonucleotide extension, such as MS-SNuPE as described by Gonzalgo & Jones, Nucleic Acids Res. 25:2529-2531, 1997. In said embodiment it is preferred that the methylation specific single nucleotide extension primer (MS-SNuPE primer) is identical or complementary to a sequence at least nine but preferably no more than twenty five nucleotides in length of one or more of the sequences taken from the group of SEQ ID NO: 1 to SEQ ID NO: 161 and SEQ ID NO: 844 to SEQ ID NO: 1255 after chemical pre-treatment, and SEQ ID NO: 162 to SEQ ID NO: 805 and SEQ ID NO: 1256 to SEQ ID NO: 2903. However it is preferred to use fluorescently labelled nucleotides, instead of radiolabelled nucleotides.

[0216] In yet a further embodiment of the method, the fourth step of the method comprises sequencing and subsequent sequence analysis of the amplificate generated in the third step of the method (Sanger F., et al., Proc Natl Acad Sci USA 74:5463-5467, 1977).

[0217] Additional embodiments of the invention provide a method for the analysis of the methylation status of genomic DNA according to the markers used in the invention without the need for pretreatment.

[0218] In the first step of such additional embodiments, the genomic DNA sample is isolated from tissue or cellular sources. Preferably, such sources include cell lines, histological slides, biopsy tissue, body fluids, or breast tumour tissue embedded in paraffin. Extraction may be by means that are standard to one skilled in the art, including but not limited to the use of detergent lysates, sonification and vortexing with glass beads. Once the nucleic acids have been extracted, the genomic double-stranded DNA is used in the analysis.

[0219] In a preferred embodiment, the DNA may be cleaved prior to the treatment, and this may be by any means standard in the state of the art, but preferably with methylation-sensitive restriction endonucleases.

[0220] In the second step, the DNA is then digested with one or more methylation sensitive restriction enzymes. The digestion is carried out such that hydrolysis of the DNA at the restriction site is informative of the methylation status of a specific CpG dinucleotide.

[0221] In the third step, which is optional but a preferred embodiment, the restriction fragments are amplified. This is preferably carried out using a polymerase chain reaction, and said amplificates may carry suitable detectable labels as discussed above, namely fluorophore labels, radionuclides and mass labels.

[0222] In the final step the amplificates are detected. The detection may be by any means standard in the art, for example, but not limited to, gel electrophoresis analysis, hybridisation analysis, incorporation of detectable tags within the PCR products, DNA array analysis, MALDI or ESI analysis.

[0223] In yet another preferred aspect thereof, the object according to the present invention is solved by a method for generating a pan-cancer marker panel of proliferative disease markers and, in particular pan-cancer markers, together with tissue- and/or cell-specific markers for the improved diagnosis of a proliferative disease in a subject. The method comprises a) providing a biological sample from said subject suspected of or previously being diagnosed as having a proliferative disease, b) providing a first set of one or more markers indicative for proliferative disease (e.g. pan-cancer markers), c) determining the presence, absence, abundance and/or expression of said one or more markers of step b); d) providing a first set of cell- and/or tissue markers, e) determining the expression of said one or more markers of step d), and f) generating a pan-cancer marker panel of proliferative disease markers and, in particular pan-cancer markers being specific for said proliferative disease in said subject by selecting those tissue- and/or cell-specific markers and proliferative disease markers and, in particular pan-cancer markers that are differently present, absent, abundant and/or expressed in said subject when compared to a respective profile of a non proliferative-disease (e.g. non-cancerous) sample. In one particularly preferred embodiment of the method, said marker is indicative for more than one proliferative disease. Preferably, said biological sample is a biopsy sample or a blood sample.

[0224] Preferred is a method, wherein said detecting the expression of one or more markers comprises measuring cell count, the expression of protein, mRNA expression and/or the presence or absence or the level of DNA methylation in one or more of said markers. According to a preferred aspect of the inventive method, the markers of step b) are selected from the group consisting of nucleic acid sequences according to any of SEQ ID NO: 100 to SEQ ID NO: 161, whilst the tissue- and/or cell-specific markers of step c) are selected from the group consisting of nucleic acid sequences according to any of SEQ ID NO: 1 to SEQ ID NO: 99, or more preferably from the group consisting SEQ ID NO: 844 to SEQ ID NO: 1255. Thus, in preferred embodiments of the inventive method, these sets or groups of markers form the basis for particular sets of markers that are actually selected into a panel.

[0225] Further preferred is a method, wherein said measuring the expression of protein comprises marker-specific antibodies, ELISA, cell sorting techniques, Western blot, mRNA expression or the detection of labeled protein. In another preferred embodiment of the method, said measuring the mRNA expression comprises detection of labeled mRNA or Northern blot. Further preferred is a method, wherein said detecting of the expression is qualitative or additionally quantitative.

[0226] As a non-limiting but preferred example, for the actual generation of a marker panel of proliferative disease markers, first, a database or other type of listing of a set of one or more of the proliferative disease markers, e.g. all of those as given herein, is generated. Then, the expression of these markers is detected in a sample that is taken from the subject suspected of having a proliferative disease or being diagnosed with suffering from a particular proliferative disease. Detecting the expression of said one or more markers indicative for proliferative disease can be performed as described above and can comprise measuring the expression of protein, mRNA expression and/or the presence or absence of DNA methylation in one or more of said markers. In one embodiment, this analysis is then compared with the result(s) of an expression profile of a non proliferative-disease (e.g. non-cancerous) sample (in the following, “blank-sample”), in other embodiments, this comparison is performed after the subsequent analysis of the cell- and/or tissue-markers. For statistical reasons, the comparison can also be done with several analyses in parallel using sample derived either from the same patient or other non-diseased patients.

[0227] In one preferred embodiment, markers that differ in their expression (i.e. are expressed either higher or lower or are present or absent when compared to the blank sample) and/or their level of methylation are then selected into a pan-cancer panel and stored in a database or a listing. This pan-cancer panel can then be used in later diagnoses of similar or identical proliferative diseases in many patients or as a “personalized” pan-cancer panel for an individual patient, e.g. for follow-up analyses.

[0228] Further preferred is a method, wherein a pan-cancer panel is selected, whereby the markers are selected from the group consisting of nucleic acid sequences according to any of SEQ ID NO: 100 to SEQ ID NO: 161 and wherein at least one (more preferably a plurality) marker is selected from the group consisting of nucleic acid sequences according to any of SEQ ID NO: 1 to SEQ ID NO: 99 or more preferably SEQ ID NO: 844 to SEQ ID NO: 1255.

[0229] Preferred is a selection into a pan-cancer panel, wherein the proliferative disease is selected from soft tissue, skin, leukemia, renal, prostate, brain, bone, blood, lymphoid, stomach, head and neck, colon or breast cancer.

[0230] Further preferred is a method, wherein said DNA methylation that is detected and/or analyzed comprises CpG methylation and/or imprinting. In another aspect of the method according to the present invention, said detecting the presence or absence of DNA methylation comprises the digestion of said genomic DNA with a methylation-sensitive restriction enzyme followed by multiplexed amplification of gene-specific DNA fragments with CpG islands.

[0231] Further preferred is a method, wherein said proliferative disease is in the early pre-clinical stage exhibiting no clinical symptoms, i.e. in cases, where a common physiological diagnosis, such as a visual diagnosis or inspection, would not detect an existing proliferative disease.

[0232] Another aspect of the method according to the present invention then relates to an improved method for the treatment of a proliferative disease, comprising a method as described above, and selecting a suitable treatment regimen for said proliferative disease to be treated. The treatment regimen can also be adapted to the changes in said proliferative disease status of the patient that have been identified using the method according to the invention. The selection or adaptation is commonly made by the attending physician and can include further clinical parameters that are related to the disease and/or the patient(s) to be treated. Preferably, said proliferative disease is cancer.

[0233] In another aspect of the present invention, the methods of the invention can be performed manually or partially or fully automated, such as on a computer and/or a suitable robot. Accordingly, also encompassed by the present invention is a suitable computer program product, e.g. a software, for performing the method according to the present invention when run on a computer, which can be present on a suitable data carrier.

[0234] In one embodiment of the method according to the invention, the generating a pan-cancer marker panel comprises the use of ESME. ESME calculates methylation levels at particular CpG positions by comparing signal intensities, and correcting for incomplete bisulphite conversion. ESME scores all cytosines (=methylated C) and C to T transitions (=non-methylated C) in bisulphite sequence traces, and furthermore calculates the % of methylation for all CpG sites. It allows the analysis of DNA mixtures both in individual cells as well as of DNA mixtures from a plurality of cells. The method can be applied to any bisulfite-pretreated nucleic acid for which the genomic nucleotide sequence of the corresponding DNA region not treated with bisulfite is known, and for which a sequence electropherogram (trace) can also be generated.

[0235] ESME utilizes the electropherograms for standardizing the average signal intensity of at least one base type (C, T, A or G) against the average signal intensity which is obtained for one or more of the remaining base types. Preferably, the cytosine signal intensities are standardized relative to the thymine signal intensities, and the ratio of the average signal intensity of cytosine to that of thymine is determined.

[0236] The average of a signal intensity is calculated by taking into account the signal intensities of several bases, which are present in a randomly defined region of the amplificate. The average of a plurality of positions of this base type is determined within an arbitrarily defined region of the amplificate. This region can comprise the entire amplificate, or a portion thereof. Significantly, such averaging leads to mathematically reasonable and/or statistically reliable values.

[0237] Additionally, a basic feature of ESME comprises calculation of a ‘conversion rate’ (fcon) of the conversion of cytosine to uracil (as a consequence of bisulfite treatment), based upon the standardized signal intensities. This is characterized as the ratio of at least one signal intensity standardized at positions which modify their hybridization behaviour due to the pretreatment, to at least one other signal intensity. Preferably, it is the ratio of unmethylated cytosine bases, whose hybridization behaviour was modified (into the hybridization behaviour of thymine) by bisulfite treatment, to all unmethylated cytosine bases, independent of whether their hybridization behaviour was modified or not, within a defined sequence region. The region to be considered can comprise the length of the total amplificate, or only a part of it, and both the sense sequence or its inversely-complementary sequence can be utilized therefore.

[0238] The calculation of standardizing factors, for standardizing signal intensities, as well as the calculation of a conversion rate are based on accurate knowledge of signal intensities. Preferably, such knowledge is as accurate as possible. An electropherogram represents a curve that reflects the number of detected signals per unit of time, which in turn reflects the spatial distance between two bases (as an inherent characteristic of the sequencing method). Therefore, the signal intensity and thus the number of molecules that bear that signal can be calculated by the area under the peak (i.e., under the local maximum of this curve). The considered area is best described by integrating this curve. Such area measurements are determined by the integration limits X1 and X2; X1, lying to the left of the local maximum, and by X2, lying to the right of the local maximum. Another basic feature of ESME is that it affords the determination of the actual methylation number fMET, (“actual” as in significantly closer to reality than assuming the conversion rate is, e.g., 95%). Both, the standardized signal intensities as well as the conversion rates fcon (obtained by considering said standardized signal intensities) are used for calculation of the actual degree (level) of methylation of a cytosine position in question.

[0239] According to a preferred embodiment, the % methylation levels are calculated by ESME, or an equivalent thereof, for all CpG positions representing the genome, and the information is linked to corresponding positions in the latest assembly of the human genome sequence, and be sorted according to tissue and disease state. In preferred embodiments, this information is made available for further research. In a particularly preferred embodiment, the information is utilized directly to provide specific markers for DNA derived from specific cell or tissue types.

[0240] The methylation data, including the quantitative aspects thereof, is easily presented in a user friendly two-dimensional display, allowing for immediate identification of differentiating patterns. For example, the location of a CpG position within the genome is displayed along one axis, whereas the sample type is displayed along the other axis. When grouping the phenotypically distinct sample types side-by-side, methylation differences can be displayed in the field created by the two axes.

[0241] An additional aspect of the present invention is a kit for diagnosing a proliferative disease in a subject, comprising reagents for detecting the expression of one or more proliferative disease markers; and reagents for localizing the proliferative disease and/or characterizing the type of proliferative disease by detecting specific cell- and/or tissue-markers based on nucleic acid-analysis. Preferably, the kit further comprising instructions for using said kit for characterizing cancer in said subject, as detailed below. Preferably, said reagents comprise reagents for detecting the presence or absence of DNA methylation in markers, as also detailed below. Further preferred is a kit according to the present invention, wherein the markers are selected from the group consisting of nucleic acid sequences according to any of SEQ ID NO: 1 to SEQ ID NO: 161 or SEQ ID NO: 844 to SEQ ID NO: 2903, and chemically pretreated sequences thereof.

[0242] A representative kit may comprise one or more nucleic acid segments as described above that selectively hybridise to marker mRNA and a container for each of the one or more nucleic acid segments. In certain embodiments the nucleic acid segments may be combined in a single tube. In further embodiments, the nucleic acid segments may also include a pair of primers for amplifying the target mRNA. Such kits may also include any buffers, solutions, solvents, enzymes, nucleotides, or other components for hybridisation, amplification or detection reactions. Preferred kit components include reagents for reverse transcription-PCR, in situ hybridisation, Northern analysis and/or RPA.

[0243] Said kit may further comprise instructions for carrying out and evaluating the described method. In a further preferred embodiment, said kit may further comprise standard reagents for performing a CpG position-specific methylation analysis, wherein said analysis comprises one or more of the following techniques: MS-SNuPE, MSP, MethyLight™, HeavyMethyl™, COBRA, and nucleic acid sequencing. However, a kit along the lines of the present invention can also contain only part of the aforementioned components.

[0244] Typical reagents (e.g., as might be found in a typical COBRA-based kit) for COBRA analysis may include, but are not limited to: PCR primers for specific gene (or methylation-altered DNA sequence or CpG island); restriction enzyme and appropriate buffer; gene-hybridisation oligo; control hybridisation oligo; kinase labelling kit for oligo probe; and radioactive nucleotides. Additionally, bisulfite conversion reagents may include: DNA denaturation buffer; sulfonation buffer; DNA recovery reagents or kits (e.g., precipitation, ultrafiltration, affinity column); desulfonation buffer; and DNA recovery components.

[0245] Typical reagents (e.g., as might be found in a typical MethyLight®-based kit) for MethyLight® analysis may include, but are not limited to: PCR primers for specific gene (or methylation-altered DNA sequence or CpG island); TaqMan® probes; optimised PCR buffers and deoxynucleotides; and Taq polymerase.

[0246] Typical reagents (e.g., as might be found in a typical Ms-SNuPE-based kit) for Ms-SNuPE analysis may include, but are not limited to: PCR primers for specific gene (or methylation-altered DNA sequence or CpG island); optimised PCR buffers and deoxynucleotides; gel extraction kit; positive control primers; Ms-SNuPE primers for specific gene; reaction buffer (for the Ms-SNuPE reaction); and radioactive nucleotides. Additionally, bisulfite conversion reagents may include: DNA denaturation buffer; sulfonation buffer; DNA recovery regents or kit (e.g., precipitation, ultrafiltration, affinity column); desulfonation buffer; and DNA recovery components.

[0247] Typical reagents (e.g., as might be found in a typical MSP-based kit) for MSP analysis may include, but are not limited to: methylated and unmethylated PCR primers for specific gene (or methylation-altered DNA sequence or CpG island), optimised PCR buffers and deoxynucleotides, and specific probes.

[0248] It should be understood that the features of the invention as disclosed and described herein can be used not only in the respective combination as indicated but also in a singular fashion without departing from the intended scope of the present invention.

[0249] The invention will now be described in more detail by reference to the following Sequence listing, and the Examples. The following examples are provided for illustrative purposes only and are not intended to limit the invention.

TABLE 1
Proliferative disease markers according to the present invention

| | | Methylated | Methylated | | Unmethylated |
|---|---|---|---|---|---|
| | Genomic | converted | converted | Unmethylated | converted |
| | sequence | sense | antisense | converted | antisense |
| | SEQ ID | strand SEQ | strand SEQ | sense strand | strand SEQ |
| Gene name | NO: | ID NO: | ID NO: | SEQ ID NO: | ID NO: |
| VIAAT | 100 | 360 | 361 | 682 | 683 |
| HS3ST2 | 101 | 362 | 363 | 684 | 685 |
| UCN | 102 | 364 | 365 | 686 | 687 |
| TMEFF2 | 103 | 366 | 367 | 688 | 689 |
| Not applicable | 104 | 368 | 369 | 690 | 691 |
| Not applicable | 105 | 370 | 371 | 692 | 693 |
| SIX6 | 106 | 372 | 373 | 694 | 695 |
| LIM/HOMEOBOX | | | | | |
| PROTEIN LHX9 | 107 | 374 | 375 | 696 | 697 |
| Not applicable | 108 | 376 | 377 | 698 | 699 |
| PROSTAGLANDIN | | | | | |
| E2 RECEPTOR | 109 | 378 | 379 | 700 | 701 |
| ORPHAN | | | | | |
| NUCLEAR | | | | | |
| RECEPTOR NR5A2 | 110 | 380 | 381 | 702 | 703 |
| HOMEOBOX | | | | | |
| PROTEIN GSH-2 | 111 | 382 | 383 | 704 | 705 |
| HISTONE H4 | 112 | 384 | 385 | 706 | 707 |
| Not applicable | 113 | 386 | 387 | 708 | 709 |
| MUC5B | 114 | 388 | 389 | 710 | 711 |
| SASH1 | 115 | 390 | 391 | 712 | 713 |
| S100A7 | 116 | 392 | 393 | 714 | 715 |
| BCL11B | 117 | 394 | 395 | 716 | 717 |
| Not applicable | 118 | 396 | 397 | 718 | 719 |
| MGC34831 | 119 | 398 | 399 | 720 | 721 |
| Not applicable | 120 | 400 | 401 | 722 | 723 |
| Not applicable | 121 | 402 | 403 | 724 | 725 |
| Not applicable | 122 | 404 | 405 | 726 | 727 |
| Not applicable | 123 | 406 | 407 | 728 | 729 |
| PRDM6 | 124 | 408 | 409 | 730 | 731 |
| DKK3 | 125 | 410 | 411 | 732 | 733 |
| GIRK2 | 126 | 412 | 413 | 734 | 735 |
| Not applicable | 127 | 414 | 415 | 736 | 737 |
| Not applicable | 128 | 416 | 417 | 738 | 739 |
| Not applicable | 129 | 418 | 419 | 740 | 741 |
| GS1 | 130 | 420 | 421 | 742 | 743 |
| Not applicable | 131 | 422 | 423 | 744 | 745 |
| DDX51 | 132 | 424 | 425 | 746 | 747 |
| Not applicable | 133 | 426 | 427 | 748 | 749 |
| Not applicable | 134 | 428 | 429 | 750 | 751 |
| Not applicable | 135 | 430 | 431 | 752 | 753 |
| APC | 136 | 432 | 433 | 754 | 755 |
| CDKN2A | 137 | 434 | 435 | 756 | 757 |
| CD44 | 138 | 436 | 437 | 758 | 759 |
| DAPK1 | 139 | 438 | 439 | 760 | 761 |
| EYA4 | 140 | 440 | 441 | 762 | 763 |
| GSTP1 | 141 | 442 | 443 | 764 | 765 |
| MLH1 | 142 | 444 | 445 | 766 | 767 |
| PGR | 143 | 446 | 447 | 768 | 769 |
| SERPINB5 | 144 | 448 | 449 | 770 | 771 |
| RARB | 145 | 450 | 451 | 772 | 773 |
| SOD2 | 146 | 452 | 453 | 774 | 775 |
| TERT | 147 | 454 | 455 | 776 | 777 |
| TGFBR2 | 148 | 456 | 457 | 778 | 779 |
| TP73 | 149 | 458 | 459 | 780 | 781 |
| NME1 | 150 | 460 | 461 | 782 | 783 |
| Not applicable | 151 | 462 | 463 | 784 | 785 |
| ESR1 | 152 | 464 | 465 | 786 | 787 |
| CASP8 | 153 | 466 | 467 | 788 | 789 |
| FABP3 | 154 | 468 | 469 | 790 | 791 |
| RARA | 155 | 470 | 471 | 792 | 793 |
| ESR2 | 156 | 472 | 473 | 794 | 795 |
| Not applicable | 157 | 474 | 475 | 796 | 797 |
| SNCG | 158 | 476 | 477 | 798 | 799 |
| SLC19A1 | 159 | 478 | 479 | 800 | 801 |
| GJB2 | 160 | 480 | 481 | 802 | 803 |
| MCT1 | 161 | 482 | 483 | 804 | 805 |

TABLE 2
Tissue/cell specific markers according to the present invention

| | | | | Unmethylated | | | | |
|---|---|---|---|---|---|---|---|---|
| Genomic | Methylated converted | Methylated converted | Unmethylated | converted | | | | |
| sequence | sense | antisense | converted | antisense | | | | |
| SEQ ID | strand SEQ | strand SEQ | sense strand | strand SEQ | | | | |
| NO: | ID NO: | ID NO: | SEQ ID NO: | ID NO: | Gene name | | Ensembl ID | Methylation profile |
| 1 | 162 | 163 | 484 | 485 | SLC7A4 | solute carrier family 7 | ENSG00000099960 | Methylated in Melanocytes |
| | | | | | | (cationic amino acid | | |
| | | | | | | transporter, y+ system), | | |
| | | | | | | member 4 | | |
| 2 | 164 | 165 | 486 | 487 | CTA-373H7.4 | | OTTHUMG00000030780 | Methylated in CD4/CD8 |
| 3 | 166 | 167 | 488 | 489 | RP1-47A17.8 | | OTTHUMG00000030878 | Unmethylated in fibroblasts |
| 4 | 168 | 169 | 490 | 491 | RP4-539M6.7 | | OTTHUMG00000030918 | Unmethylated in |
| | | | | | | | | Keratinocyctes |
| 5 | 170 | 171 | 492 | 493 | CTA-243E7.3 | | OTTHUMG00000030167 | Methylated in Melanocytes |
| 6 | 172 | 173 | 494 | 495 | OSM | Oncostatin M | ENSG00000099985 | Unmethylated in CD4/CD8 |
| 7 | 174 | 175 | 496 | 497 | CTA-299D3.6 | | OTTHUMG00000030140 | Unmethylated in Melanocytes |
| 8 | 176 | 177 | 498 | 499 | CTA-941F9.6 | | OTTHUMG00000030231 | Unmethylated in |
| | | | | | | | | Keratinocyctes |
| 9 | 178 | 179 | 500 | 501 | SUSD2 | | ENSG00000099994 | Methylated in CD4/CD8 |
| 10 | 180 | 181 | 502 | 503 | CTA-503F6.1 | | OTTHUMG00000030870 | Methylated in CD4/CD8 |
| 11 | 182 | 183 | 504 | 505 | PIK4CA | Phosphatidylinositol 4- | ENSG00000133511 | Methylated in CD4/CD8 |
| | | | | | | kinase alpha (EC 2.7.1.67) | | |
| | | | | | | (PI4-kinase) (PtdIns-4- | | |
| | | | | | | kinase) (PI4K-alpha). | | |
| 12 | 184 | 185 | 506 | 507 | A4GALT | Lactosylceramide 4-alpha- | ENSG00000128274 | Methylated in CD4/CD8 |
| | | | | | | galactosyltransferase (EC | | |
| | | | | | | 2.4.1.228) | | |
| 13 | 186 | 187 | 508 | 509 | Q7Z2M6_HUMAN | | ENSG00000188078 | Methylated in CD4/CD8 |
| 14 | 188 | 189 | 510 | 511 | SS3R | Somatostatin receptor type 3 | ENSG00000183473 | Methylated in CD4/CD8 |
| 15 | 190 | 191 | 512 | 513 | GAR22/GAS2L1 | GAS-2 related protein on | ENSG00000185340 | Unmethylated in Melanocytes |
| | | | | | | chromosome 22 (GAR22 | | |
| | | | | | | protein) | | |
| 16 | 192 | 193 | 514 | 515 | BAIAP2L2 | BAI1-associated protein 2- | ENSG00000128298 | Methylated in CD4/CD8 |
| | | | | | | like 2 | | |
| 17 | 194 | 195 | 516 | 517 | SOX10 | SRY (sex determining | OTTHUMG00000030073 | Unmethylated in Melanocytes |
| | | | | | | region Y)-box 10 | | |
| 18 | 196 | 197 | 518 | 519 | PARVG | Gamma-parvin. | ENSG00000138964 | Unmethylated in CD4/CD8 |
| 19 | 198 | 199 | 520 | 521 | CELSR1 | cadherin, EGF LAG seven- | OTTHUMG00000030722 | Unmethylated in CD4/CD8 |
| | | | | | | pass G-type receptor 1 | | |
| 20 | 200 | 201 | 522 | 523 | SMTN | Smoothelin | ENSG00000183963 | Unmethylated in fibroblasts |
| 21 | 202 | 203 | 524 | 525 | GRAP2 | GRB2-related adaptor | OTTHUMG00000030700 | Unmethylated in |
| | | | | | | protein 2 | | Keratinocyctes |
| 22 | 204 | 205 | 526 | 527 | NP_073622.2 ( | CAP-binding protein | ENSG00000186976 | Unmethylated in |
| | | | | | | complex interacting protein | | Keratinocyctes |
| | | | | | | 1 isoform a | | |
| 23 | 206 | 207 | 528 | 529 | SAM50_HUMAN | SAM50-like protein CGI- | ENSG00000100347 | Unmethylated in Cd4/CD8 |
| | | | | | | 51 | | |
| 24 | 208 | 209 | 530 | 531 | RP3-509I19.3 | | OTTHUMG00000015679 | Keratinocyctes |
| 26 | 212 | 213 | 534 | 535 | | | | Unmethylated in fibroblasts |
| 27 | 214 | 215 | 536 | 537 | MOG | Myelin-oligodendrocyte | ENSG00000137345 | Unmethylated in |
| | | | | | | glycoprotein precursor. | | Keratinocyctes |
| 28 | 216 | 217 | 538 | 539 | RP11-417E7.1 | | OTTHUMG00000016054 | Unmethylated in fibroblasts |
| 29 | 218 | 219 | 540 | 541 | CMAH/ | cytidine monophosphate- | OTTHUMG00000016099/ | Unmethylated in |
| | | | | | RP11-191A15.4 | N-acetylneuraminic acid | OTTHUMG00000014386 | Keratinocyctes |
| | | | | | | hydroxylase (CMP-N- | | |
| | | | | | | acetylneuraminate | | |
| | | | | | | monooxygenase) | | |
| 30 | 220 | 221 | 542 | 543 | PKHD1 | Polycystic kidney and | ENSG00000170927 | Unmethylated in |
| | | | | | | hepatic disease 1 precursor | | Keratinocyctes |
| | | | | | | (Fibrocystin) (Polyductin) | | |
| | | | | | | (Tigmin | | |
| 31 | 222 | 223 | 544 | 545 | RP11-411K7.1 | | OTTHUMG00000014887 | Unmethylated in |
| | | | | | | | | Keratinocyctes |
| 32 | 224 | 225 | 546 | 547 | SLC22A1 | solute carrier family 22 | OTTHUMG00000015947 | Unmethylated in liver |
| | | | | | | (organic cation | | |
| | | | | | | transporter), member 1 | | |
| 33 | 226 | 227 | 548 | 549 | PLG | Plasminogen precursor (EC | ENSG00000122194 | Unmethylated in liver |
| | | | | | | 3.4.21.7) [Contains: | | |
| | | | | | | Angiostatin] | | |
| 34 | 228 | 229 | 550 | 551 | RP1-32B1.4 | | OTTHUMG00000015628 | Unmethylated in |
| | | | | | | | | Keratinocyctes |
| 35 | 230 | 231 | 552 | 553 | RP11-203H2.1 | | OTTHUMG00000014222 | Unmethylated in |
| | | | | | | | | Keratinocyctes |
| 36 | 232 | 233 | 554 | 555 | TGM3 | Protein-glutamine | ENSG00000125780 | Unmethylated in |
| | | | | | | glutamyltransferase E | | Keratinocyctes |
| | | | | | | precurso | | |
| 37 | 234 | 235 | 556 | 557 | RASSF2 | Ras association | OTTHUMG00000031790 | Unmethylated in fibroblasts |
| | | | | | | (RalGDS/AF-6) domain | | |
| | | | | | | family 2 | | |
| 38 | 236 | 237 | 558 | 559 | | | | Unmethylated in fibroblasts |
| 39 | 238 | 239 | 560 | 561 | | | | Methylated in CD4/CD8 |
| 40 | 240 | 241 | 562 | 563 | | | | Unmethylated in |
| | | | | | | | | Keratinocyctes |
| 41 | 242 | 243 | 564 | 565 | | | | Unmethylated in CD4/CD8 |
| 42 | 244 | 245 | 566 | 567 | | | | Unmethylated in fibroblasts |
| 43 | 246 | 247 | 568 | 569 | | | | Unmethylated in |
| | | | | | | | | Keratinocyctes |
| 44 | 248 | 249 | 570 | 571 | | | | Unmethylated in fibroblasts |
| 45 | 250 | 251 | 572 | 573 | | | | Unmethylated in |
| | | | | | | | | Keratinocyctes |
| 46 | 252 | 253 | 574 | 575 | | | | Unmethylated in |
| | | | | | | | | Keratinocyctes |
| 47 | 254 | 255 | 576 | 577 | | | | Unmethylated in CD4/CD8 |
| 48 | 256 | 257 | 578 | 579 | | | | Unmethylated in |
| | | | | | | | | Keratinocyctes |
| 49 | 258 | 259 | 580 | 581 | | | | Unmethylated in fibroblasts |
| 50 | 260 | 261 | 582 | 583 | | | | Unmethylated in fibroblasts |
| 51 | 262 | 263 | 584 | 585 | | | | Unmethylated in heart muscle |
| 52 | 264 | 265 | 586 | 587 | | | | Unmethylated in Melanocytes |
| 53 | 266 | 267 | 588 | 589 | | | | Unmethylated in liver |
| 54 | 268 | 269 | 590 | 591 | | | | Methylated in CD4/CD8 |
| 55 | 270 | 271 | 592 | 593 | | | | Unmethylated in skeletal |
| | | | | | | | | muscle |
| 56 | 272 | 273 | 594 | 595 | | | | Unmethylated in |
| | | | | | | | | Keratinocyctes |
| 57 | 274 | 275 | 596 | 597 | C20orf102 | | ENSG00000132821 | Unmethylated in |
| | | | | | | | | Keratinocyctes |
| 58 | 276 | 277 | 598 | 599 | | | | Unmethylated in fibroblasts |
| 59 | 278 | 279 | 600 | 601 | | | | Methylated in Keratinocyctes |
| 60 | 280 | 281 | 602 | 603 | | | | Methylated in CD4/CD8 |
| 61 | 282 | 283 | 604 | 605 | | | | Unmethylated in |
| | | | | | | | | Keratinocyctes |
| 62 | 284 | 285 | 606 | 607 | | | | Unmethylated in skeletal |
| | | | | | | | | muscle |
| 63 | 286 | 287 | 608 | 609 | | | | Unmethylated in Melanocytes |
| 64 | 288 | 289 | 610 | 611 | | | | Unmethylated in fibroblasts |
| 65 | 290 | 291 | 612 | 613 | | | | Unmethylated in skeletal |
| | | | | | | | | muscle |
| 66 | 292 | 293 | 614 | 615 | | | | Unmethylated in fibroblasts |
| 67 | 294 | 295 | 616 | 617 | | | | Unmethylated in Melanocytes |
| 68 | 296 | 297 | 618 | 619 | | | | Unmethylated in fibroblasts |
| 69 | 298 | 299 | 620 | 621 | | | | Unmethylated in fibroblasts |
| 70 | 300 | 301 | 622 | 623 | | | | Unmethylated in Melanocytes |
| 71 | 302 | 303 | 624 | 625 | SULF2 | Extracellular sulfatase | ENSG00000196562 | Unmethylated in fibroblasts |
| | | | | | | Sulf-2 precursor | | |
| 72 | 304 | 305 | 626 | 627 | RP11-290F20.1 | | OTTHUMG00000032719 | Unmethylated in fibroblasts |
| 73 | 306 | 307 | 628 | 629 | C20orf94 | chromosome 20 open | OTTHUMG00000031873 | Unmethylated in CD4 |
| | | | | | | reading frame 94 | | |
| 74 | 308 | 309 | 630 | 631 | C20orf82 | chromosome 20 open | OTTHUMG00000031902 | Unmethylated in fibroblasts |
| | | | | | | reading frame 82 | | |
| 75 | 310 | 311 | 632 | 633 | PCSK2 | proprotein convertase | OTTHUMG00000031941 | Unmethylated in fibroblasts |
| | | | | | | subtilisin/kexin type 2 | | |
| 76 | 312 | 313 | 634 | 635 | PCSK2 | proprotein convertase | OTTHUMT00000078120 | Unmethylated in Melanocytes |
| | | | | | | subtilisin/kexin type 2 | | |
| 77 | 314 | 315 | 636 | 637 | SNX5 | sorting nexin 5 | OTTHUMG00000031953 | Methylated in fibroblasts |
| 78 | 316 | 317 | 638 | 639 | SLC24A3 | solute carrier family 24 | OTTHUMG00000031993 | Unmethylated in skeletal |
| | | | | | | (sodium/potassium/calcium | | muscle |
| | | | | | | exchanger), member 3 | | |
| 79 | 318 | 319 | 640 | 641 | SLC24A3 | solute carrier family 24 | OTTHUMG00000031993 | Unmethylated in skeletal |
| | | | | | | (sodium/potassium/calcium | | muscle |
| | | | | | | exchanger), member 3 | | |
| 80 | 320 | 321 | 642 | 643 | CT026_HUMAN | | ENSG00000089101 | Unmethylated in fibroblasts |
| 81 | 322 | 323 | 644 | 645 | CT026_HUMAN | | ENSG00000089101 | Unmethylated in fibroblasts |
| 82 | 324 | 325 | 646 | 647 | Q9ULE8_HUMAN | | ENSG00000188559 | Unmethylated in |
| | | | | | | | | Keratinocyctes |
| 83 | 326 | 327 | 648 | 649 | Q9ULE8_HUMAN | | ENSG00000188559 | Unmethylated in liver |
| 84 | 328 | 329 | 650 | 651 | Q9ULE8_HUMAN | | ENSG00000188559 | Unmethylated in liver |
| 85 | 330 | 331 | 652 | 653 | Q9ULE8_HUMAN | | ENSG00000188559 | Unmethylated in |
| | | | | | | | | Keratinocyctes |
| 86 | 332 | 333 | 654 | 655 | Q9ULE8_HUMAN | | ENSG00000188559 | Unmethylated in |
| | | | | | | | | Keratinocyctes |
| 87 | 334 | 335 | 656 | 657 | PLAGL2 | Zinc finger protein | ENSG00000126003 | Unmethylated in skeletal |
| | | | | | | PLAGL2 (Pleiomorphic | | muscle |
| | | | | | | adenoma-like protein 2 | | |
| 88 | 336 | 337 | 658 | 659 | CT112_HUMAN | | ENSG00000197183 | Unmethylated in Melanocytes |
| 89 | 338 | 339 | 660 | 661 | PTPRT | protein tyrosine | OTTHUMG00000033040 | Unmethylated in Melanocytes |
| | | | | | | phosphatase, receptor type, T | | |
| 90 | 340 | 341 | 662 | 663 | SDC4 | Syndecan 4 | ENSG00000124145 | Methylated in CD4/CD8 |
| 91 | 342 | 343 | 664 | 665 | CDH22 | cadherin like 22 | OTTHUMG00000033073 | Methylated in Keratinocyctes |
| 92 | 344 | 345 | 666 | 667 | EYA2 | Eyes absent homolog 2 | ENSG00000064655 | Unmethylated in skeletal |
| | | | | | | | | muscle |
| 93 | 346 | 347 | 668 | 669 | SULF2 | Sulfatase2 | ENSG00000196562 | Unmethylated in CD4/CD8 |
| 94 | 348 | 349 | 670 | 671 | KCNB1 | potassium voltage-gated | OTTHUMG00000033051 | Methylated in liver |
| | | | | | | channel, Shab-related | | |
| | | | | | | subfamily, member 1 | | |
| 95 | 350 | 351 | 672 | 673 | BCAS4 | Breast carcinoma amplified | ENSG00000124243 | Methylated in melanocytes |
| | | | | | | sequence 4 | | |
| 96 | 352 | 353 | 674 | 675 | NFATC2 | nuclear factor of activated | OTTHUMG00000032747 | Unmethylated in CD4/CD8 |
| | | | | | | T-cells, | | |
| 97 | 354 | 355 | 676 | 677 | NFATC2 | nuclear factor of activated | OTTHUMG00000032747 | Unmethylated in CD4/CD8 |
| | | | | | | T-cells, | | |
| 98 | 356 | 357 | 678 | 679 | NP_775915.1 | | ENSG00000176659 | Unmethylated in skeletal |
| | | | | | | | | Muscle |
| 99 | 358 | 359 | 680 | 681 | BMP7 | bone morphogenetic | OTTHUMG00000032812 | Methylated in liver |
| | | | | | | protein 7 | | |

| | | | | | | | |
|---|---|---|---|---|---|---|---|
| 844 | 1256 | 1257 | 2080 | 2081 | FLOT1, flotillin 1, ENSG00000137312 | ENSG00000137312 | See tables 3 & 4 |
| 845 | 1258 | 1259 | 2082 | 2083 | C6orf25, chromosome 6 open reading frame | ENSG00000096148 | See tables 3 & 4 |
| | | | | | 25, ENSG00000096148 | | |
| 846 | 1260 | 1261 | 2084 | 2085 | VARS, valyl-tRNA synthetase, | ENSG00000096171 | See tables 3 & 4 |
| | | | | | ENSG00000096171 | | |
| 847 | 1262 | 1263 | 2086 | 2087 | major histocompatibility complex, class II, | OTTHUMG00000031076 | See tables 3 & 4 |
| | | | | | DP beta 1, OTTHUMG00000031076, HLA- | | |
| | | | | | DPB1 | | |
| 848 | 1264 | 1265 | 2088 | 2089 | HLA-DRB5, major histocompatibility | OTTHUMG00000031027 | See tables 3 & 4 |
| | | | | | complex, class II, DR beta 5, | | |
| | | | | | OTTHUMG00000031027 | | |
| 849 | 1266 | 1267 | 2090 | 2091 | COL11A2, collagen, type XI, alpha 2, | OTTHUMG00000031036 | See tables 3 & 4 |
| | | | | | OTTHUMG00000031036 | | |
| 850 | 1268 | 1269 | 2092 | 2093 | PRAME, Melanoma antigen preferentially | ENSG00000185686 | See tables 3 & 4 |
| | | | | | expressed in tumors (Preferentially expressed | | |
| | | | | | antigen of melanoma) (OPA-interacting | | |
| | | | | | protein 4) (OIP4), ENSG00000185686 | | |
| 851 | 1270 | 1271 | 2094 | 2095 | ZNRF3 protein (Fragment), | ENSG00000183579 | See tables 3 & 4 |
| | | | | | ENSG00000183579, ZNRF3 zinc and ring | | |
| | | | | | finger 3 (ZNRF3) | | |
| 852 | 1272 | 1273 | 2096 | 2097 | AP000357.2 (Vega gene ID), Pseudogene | OTTHUMG00000030571 | See tables 3 & 4 |
| 853 | 1274 | 1275 | 2098 | 2099 | AP000357.3 (Vega gene ID), Pseudogene | OTTHUMG00000030574 | See tables 3 & 4 |
| 854 | 1276 | 1277 | 2100 | 2101 | solute carrier family 7 (cationic amino acid | OTTHUMG00000030129 | See tables 3 & 4 |
| | | | | | transporter, y+ system), member 4, | | |
| | | | | | OTTHUMG00000030129, | | |
| 855 | 1278 | 1279 | 2102 | 2103 | Myosin-18B (Myosin XVIIIb), | ENSG00000133454 | See tables 3 & 4 |
| | | | | | ENSG00000133454, MYO18B | | |
| 856 | 1280 | 1281 | 2104 | 2105 | Q6ICL0_HUMAN (Predicted | ENSG00000184004 | See tables 3 & 4 |
| | | | | | UniProt/TrEMBL ID), hypothetical protein | | |
| | | | | | FLJ3257; ENSG00000184004 | | |
| 857 | 1282 | 1283 | 2106 | 2107 | FBLN1; fibulin 1; ENSG00000077942 | ENSG00000077942 | See tables 3 & 4 |
| 858 | 1284 | 1285 | 2108 | 2109 | CYP2D6; cytochrome P450, family 2, | ENSG00000100197 | See tables 3 & 4 |
| | | | | | subfamily D, polypeptide 6; | | |
| | | | | | ENSG00000100197 | | |
| 859 | 1286 | 1287 | 2110 | 2111 | AC008132.9 (Vega gene ID); Pseudogene; | OTTHUMG00000030688 | See tables 3 & 4 |
| | | | | | OTTHUMG00000030688 | | |
| 860 | 1288 | 1289 | 2112 | 2113 | glycoprotein Ib (platelet), beta polypeptide, | OTTHUMT00000075045 | See tables 3 & 4 |
| 861 | 1290 | 1291 | 2114 | 2115 | no gene associated | | See tables 3 & 4 |
| 862 | 1292 | 1293 | 2116 | 2117 | AC006548.8 (Vega gene ID) | OTTHUMG00000030274 | See tables 3 & 4 |
| 863 | 1294 | 1295 | 2118 | 2119 | OTTHUMG00000030650, AC005399.2, | OTTHUMG00000030650 | See tables 3 & 4 |
| | | | | | putativer processed transcribed | | |
| 864 | 1296 | 1297 | 2120 | 2121 | topoisomerase (DNA) III beta, | OTTHUMG00000030764 | See tables 3 & 4 |
| | | | | | OTTHUMG00000030764, TOP3B ( | | |
| 865 | 1298 | 1299 | 2122 | 2123 | no gene associated | | See tables 3 & 4 |
| 866 | 1300 | 1301 | 2124 | 2125 | KB-1269D1.3 (Vega gene ID); Pseudogene; | OTTHUMG00000030694 | See tables 3 & 4 |
| 867 | 1302 | 1303 | 2126 | 2127 | GPR24; G protein-coupled receptor 24; | ENSG00000128285 | See tables 3 & 4 |
| | | | | | ENSG00000128285 | | |
| 868 | 1304 | 1305 | 2128 | 2129 | GAL3ST1; galactose-3-O-sulfotransferase 1; | ENSG00000128242 | See tables 3 & 4 |
| | | | | | ENSG00000128242 | | |
| 869 | 1306 | 1307 | 2130 | 2131 | Cat eye syndrome critical region protein 5 | ENSG00000069998 | See tables 3 & 4 |
| | | | | | precursor, | | |
| 870 | 1308 | 1309 | 2132 | 2133 | HORMAD2; HORMA domain containing 2; | ENSG00000176635 | See tables 3 & 4 |
| | | | | | ENSG00000176635 | | |
| 871 | 1310 | 1311 | 2134 | 2135 | OTTHUMG00000030922, RP3-438O4.2 | OTTHUMG00000030922 | See tables 3 & 4 |
| 872 | 1312 | 1313 | 2136 | 2137 | NP_997357.1 (RefSeq peptide ID); | ENSG00000169668 | See tables 3 & 4 |
| | | | | | ENSG00000169668 | | |
| 873 | 1314 | 1315 | 2138 | 2139 | OTTHUMG00000030574, AP000357.3, | OTTHUMG00000030574 | See tables 3 & 4 |
| | | | | | novel pseudogene | | |
| 874 | 1316 | 1317 | 2140 | 2141 | LA16c-4G1.2 (Vega gene ID); Pseudogene; | OTTHUMG00000030832 | See tables 3 & 4 |
| | | | | | OTTHUMG00000030832 | | |
| 875 | 1318 | 1319 | 2142 | 2143 | KB-226F1.11 (Vega gene ID), embryonic | OTTHUMG00000030123 | See tables 3 & 4 |
| | | | | | marker, OTTHUMG00000030123 | | |
| 876 | 1320 | 1321 | 2144 | 2145 | OTTHUMG00000030780, CTA-373H7.4, | OTTHUMG00000030780 | See tables 3 & 4 |
| | | | | | novel pseudogene | | |
| 877 | 1322 | 1323 | 2146 | 2147 | RP1-47A17.8 (Vega gene ID); | OTTHUMG00000030878 | See tables 3 & 4 |
| | | | | | OTTHUMG00000030878 | | |
| 878 | 1324 | 1325 | 2148 | 2149 | RP4-539M6.7 (Vega gene ID); Pseudogene; | OTTHUMG00000030918 | See tables 3 & 4 |
| | | | | | OTTHUMG00000030918 | | |
| 879 | 1326 | 1327 | 2150 | 2151 | CSDC2; cold shock domain containing C2, | ENSG00000172346 | See tables 3 & 4 |
| | | | | | RNA binding; ENSG00000172346 | | |
| 880 | 1328 | 1329 | 2152 | 2153 | Gamma-parvin, PARVG | ENSG00000138964 | See tables 3 & 4 |
| 881 | 1330 | 1331 | 2154 | 2155 | OTTHUMG00000030167, CTA-243E7.3 | OTTHUMG00000030167 | See tables 3 & 4 |
| 882 | 1332 | 1333 | 2156 | 2157 | Oncostatin M precursor (OSM), | ENSG00000099985 | See tables 3 & 4 |
| | | | | | ENSG00000099985, OSM | | |
| 883 | 1334 | 1335 | 2158 | 2159 | Oncostatin M precursor (OSM), | ENSG00000099985 | See tables 3 & 4 |
| | | | | | ENSG00000099985, OSM | | |
| 884 | 1336 | 1337 | 2160 | 2161 | Myosin-18B (Myosin XVIIIb), MYO18B | ENSG00000133454 | See tables 3 & 4 |
| 885 | 1338 | 1339 | 2162 | 2163 | Q6ICL0_HUMAN (Predicted | ENSG00000184004 | See tables 3 & 4 |
| | | | | | UniProt/TrEMBL ID), hypothetical protein | | |
| | | | | | FLJ3257; ENSG00000184004 | | |
| 886 | 1340 | 1341 | 2164 | 2165 | OTTHUMG00000030140, CTA-299D3.6 | OTTHUMG00000030140 | See tables 3 & 4 |
| 887 | 1342 | 1343 | 2166 | 2167 | GALR3; galanin receptor 3; | ENSG00000128310 | See tables 3 & 4 |
| | | | | | ENSG00000128310 | | |
| 888 | 1344 | 1345 | 2168 | 2169 | GALR3; galanin receptor 3; | ENSG00000128310 | See tables 3 & 4 |
| | | | | | ENSG00000128310 | | |
| 889 | 1346 | 1347 | 2170 | 2171 | IL2RB; interleukin 2 receptor, beta; | ENSG00000100385 | See tables 3 & 4 |
| | | | | | ENSG00000100385 | | |
| 890 | 1348 | 1349 | 2172 | 2173 | CTA-343C1.3 (Vega gene ID); Putative | OTTHUMG00000030151 | See tables 3 & 4 |
| | | | | | Processed transcript; | | |
| | | | | | OTTHUMG00000030151 | | |
| 891 | 1350 | 1351 | 2174 | 2175 | CTA-941F9.6 (Vega_gene ID) | OTTHUMG00000030231 | See tables 3 & 4 |
| 892 | 1352 | 1353 | 2176 | 2177 | CTA-941F9.6 (Vega_gene ID) | OTTHUMG00000030231 | See tables 3 & 4 |
| 893 | 1354 | 1355 | 2178 | 2179 | LL22NC03-121E8.1 (Vega gene ID); Novel | OTTHUMG00000030676 | See tables 3 & 4 |
| | | | | | Protein coding; OTTHUMG00000030676 | | |
| 894 | 1356 | 1357 | 2180 | 2181 | Cytohesin-4, ENSG00000100055, PSCD4 | ENSG00000100055 | See tables 3 & 4 |
| 895 | 1358 | 1359 | 2182 | 2183 | RP4-754E20_A.4 (Vega gene ID); Putative | OTTHUMG00000030716 | See tables 3 & 4 |
| | | | | | Processed transcript; | | |
| | | | | | OTTHUMG00000030716 | | |
| 896 | 1360 | 1361 | 2184 | 2185 | PIB5PA; phosphatidylinositol (4,5) | ENSG00000185133 | See tables 3 & 4 |
| | | | | | bisphosphate 5-phosphatase, A; | | |
| | | | | | ENSG00000185133; embryonic marker | | |
| 897 | 1362 | 1363 | 2186 | 2187 | no gene associated | | See tables 3 & 4 |
| 898 | 1364 | 1365 | 2188 | 2189 | PLA2G3; ENSG00000100078; | ENSG00000100078 | See tables 3 & 4 |
| | | | | | phospholipase A2, group III | | |
| 899 | 1366 | 1367 | 2190 | 2191 | PLA2G3; ENSG00000100078; | ENSG00000100078 | See tables 3 & 4 |
| | | | | | phospholipase A2, group III | | |
| 900 | 1368 | 1369 | 2192 | 2193 | DGCR2; DiGeorge syndrome critical region | ENSG00000070413 | See tables 3 & 4 |
| | | | | | gene 2; ENSG00000070413 | | |
| 901 | 1370 | 1371 | 2194 | 2195 | TCN2; transcobalamin II; macrocytic | ENSG00000185339 | See tables 3 & 4 |
| | | | | | anemia; ENSG00000185339 | | |
| 902 | 1372 | 1373 | 2196 | 2197 | IGLL1; immunoglobulin lambda-like | ENSG00000128322 | See tables 3 & 4 |
| | | | | | polypeptide 1; ENSG00000128322 | | |
| 903 | 1374 | 1375 | 2198 | 2199 | RP1-29C18.7 (Vega gene ID); Novel | OTTHUMG00000030424 | See tables 3 & 4 |
| | | | | | Processed transcript; | | |
| | | | | | OTTHUMG00000030424 | | |
| 904 | 1376 | 1377 | 2200 | 2201 | IGLC1; immunoglobulin lambda constant 1 | ENSG00000100208 | See tables 3 & 4 |
| | | | | | (Mcg marker); ENSG00000100208 | | |
| 905 | 1378 | 1379 | 2202 | 2203 | APOBEC3B; apolipoprotein B mRNA | ENSG00000179750 | See tables 3 & 4 |
| | | | | | editing enzyme, catalytic polypeptide-like | | |
| | | | | | 3B; ENSG00000179750 | | |
| 906 | 1380 | 1381 | 2204 | 2205 | CRYBB1; crystallin, beta B1; | ENSG00000100122 | See tables 3 & 4 |
| | | | | | ENSG00000100122 | | |
| 907 | 1382 | 1383 | 2206 | 2207 | CRYBA4; crystallin, beta A4; | ENSG00000196431 | See tables 3 & 4 |
| | | | | | ENSG00000196431 | | |
| 908 | 1384 | 1385 | 2208 | 2209 | sushi domain containing 2, SUSD2 | ENSG00000099994 | See tables 3 & 4 |
| 909 | 1386 | 1387 | 2210 | 2211 | sushi domain containing 2, SUSD2 | ENSG00000099994 | See tables 3 & 4 |
| 910 | 1388 | 1389 | 2212 | 2213 | OTTHUMG00000030870, Putative Processed | OTTHUMG00000030870 | See tables 3 & 4 |
| | | | | | transcript, CTA-503F6.1 | | |
| 911 | 1390 | 1391 | 2214 | 2215 | OTTHUMG00000030800, KB-1323B2.3 | OTTHUMG00000030800 | See tables 3 & 4 |
| 912 | 1392 | 1393 | 2216 | 2217 | no gene associated | | See tables 3 & 4 |
| 913 | 1394 | 1395 | 2218 | 2219 | IGLV1-44; immunoglobulin lambda variable | ENSG00000186751 | See tables 3 & 4 |
| | | | | | 1-44; ENSG00000186751 | | |
| 914 | 1396 | 1397 | 2220 | 2221 | IGLV1-44; immunoglobulin lambda variable | ENSG00000186751 | See tables 3 & 4 |
| | | | | | 1-44; ENSG00000186751 | | |
| 915 | 1398 | 1399 | 2222 | 2223 | OTTHUMG00000030922, RP3-438O4.2 | OTTHUMG00000030922 | See tables 3 & 4 |
| 916 | 1400 | 1401 | 2224 | 2225 | OTTHUMG00000030922, RP3-438O4.2 | OTTHUMG00000030922 | See tables 3 & 4 |
| 917 | 1402 | 1403 | 2226 | 2227 | APOL4; apolipoprotein L, 4; | ENSG00000100336 | See tables 3 & 4 |
| | | | | | ENSG00000100336 | | |
| 918 | 1404 | 1405 | 2228 | 2229 | OTTHUMG00000030852, RP4- | OTTHUMG00000030852 | See tables 3 & 4 |
| | | | | | 756G23.1, novel processed transcript | | |
| 919 | 1406 | 1407 | 2230 | 2231 | ENSG00000100399, | ENSG00000100399 | See tables 3 & 4 |
| 920 | 1408 | 1409 | 2232 | 2233 | Neutrophil cytosol factor 4 (NCF-4) | ENSG00000100365 | See tables 3 & 4 |
| | | | | | (Neutrophil NADPH oxidase factor 4) (p40- | | |
| | | | | | phox) (p40phox)., ENSG00000100365, | | |
| | | | | | NCF4 | | |
| 921 | 1410 | 1411 | 2234 | 2235 | Neutrophil cytosol factor 4 (NCF-4) | ENSG00000100365 | See tables 3 & 4 |
| | | | | | (Neutrophil NADPH oxidase factor 4) (p40- | | |
| | | | | | phox) (p40phox)., ENSG00000100365, | | |
| | | | | | NCF4 | | |
| 922 | 1412 | 1413 | 2236 | 2237 | Somatostatin receptor type 3 (SS3R) (SSR- | ENSG00000183473 | See tables 3 & 4 |
| | | | | | 28), D | | |
| 923 | 1414 | 1415 | 2238 | 2239 | Somatostatin receptor type 3 (SS3R) (SSR- | ENSG00000183473 | See tables 3 &4 |
| | | | | | 28), D; SSTR3 | | |
| 924 | 1416 | 1417 | 2240 | 2241 | Bcl-2 interacting killer (Apoptosis inducer | ENSG00000100290 | See tables 3 & 4 |
| | | | | | NBK) (BP4) (BIP1)., BIK | | |
| 925 | 1418 | 1419 | 2242 | 2243 | GAS2-like protein 1 (Growth arrest-specific | ENSG00000185340 | See tables 3 & 4 |
| | | | | | 2-like 1) (GAS2-related protein on | | |
| | | | | | chromosome 22) (GAR22 protein), GAS2L1 | | |
| 926 | 1420 | 1421 | 2244 | 2245 | RP3-355C18.2 (Vega gene ID) | OTTHUMG00000030072 | See tables 3 & 4 |
| 927 | 1422 | 1423 | 2246 | 2247 | SOX10; SRY (sex determining region Y)- | ENSG00000100146 | See tables 3 & 4 |
| | | | | | box 10; ENSG00000100146 | | |
| 928 | 1424 | 1425 | 2248 | 2249 | Gamma-parvin ENSG00000138964 | ENSG00000138964 | See tables 3 & 4 |
| 929 | 1426 | 1427 | 2250 | 2251 | Caspase recruitment domain protein 10 | ENSG00000100065 | See tables 3 & 4 |
| | | | | | (CARD-containing MAGUK protein 3) | | |
| | | | | | (Carma 3). ENSG00000100065, CARD10 | | |
| 930 | 1428 | 1429 | 2252 | 2253 | ENSG00000100101, NP_077289.1 | ENSG00000100101 | See tables 3 & 4 |
| 931 | 1430 | 1431 | 2254 | 2255 | HTF9C; HpaII tiny fragments locus 9C; | ENSG00000099899 | See tables 3 & 4 |
| | | | | | ENSG00000099899 | | |
| 932 | 1432 | 1433 | 2256 | 2257 | Oncostatin M precursor (OSM), | ENSG00000099985 | See tables 3 & 4 |
| | | | | | ENSG00000099985, OSM | | |
| 933 | 1434 | 1435 | 2258 | 2259 | CTA-407F11.4 (Vega gene ID); Novel | OTTHUMG00000030804 | See tables 3 & 4 |
| | | | | | Processed transcript; | | |
| | | | | | OTTHUMG00000030804 | | |
| 934 | 1436 | 1437 | 2260 | 2261 | Q6ICL0_HUMAN (Predicted | ENSG00000184004 | See tables 3 & 4 |
| | | | | | UniProt/TrEMBL ID), hypothetical protein | | |
| | | | | | FLJ3257; ENSG00000184004 | | |
| 935 | 1438 | 1439 | 2262 | 2263 | CTA-989H11.2 (Vega gene ID); Putative | OTTHUMG00000030141 | See tables 3 & 4 |
| | | | | | Processed transcript; | | |
| | | | | | OTTHUMG00000030141 | | |
| 936 | 1440 | 1441 | 2264 | 2265 | transmembrane protease, serine 6 | ENSG00000187045 | See tables 3 & 4 |
| 937 | 1442 | 1443 | 2266 | 2267 | HMG2L1; high-mobility group protein 2-like | ENSG00000100281 | See tables 3 & 4 |
| | | | | | 1; ENSG00000100281 | | |
| 938 | 1444 | 1445 | 2268 | 2269 | NP_001017964.1 (RefSeq peptide ID); | ENSG00000161179 | See tables 3 & 4 |
| | | | | | hypothetical protein LOC150223; | | |
| | | | | | ENSG00000161179 | | |
| 939 | 1446 | 1447 | 2270 | 2271 | Platelet-derived growth factor B chain | ENSG00000100311 | See tables 3 & 4 |
| | | | | | precursor (PDGF B-chain, | | |
| 940 | 1448 | 1449 | 2272 | 2273 | OTTHUMG00000030815, | OTTHUMG00000030815 | See tables 3 & 4 |
| 941 | 1450 | 1451 | 2274 | 2275 | MGAT3; mannosyl (beta-1,4-)-glycoprotein | ENSG00000128268 | See tables 3 & 4 |
| | | | | | beta-1,4-N-acetylglucosaminyltransferase; | | |
| | | | | | ENSG00000128268 | | |
| 942 | 1452 | 1453 | 2276 | 2277 | Ceramide kinase (EC 2.7.1.138) | ENSG00000100422 | See tables 3 & 4 |
| | | | | | (Acylsphingosine kinase) (hCERK) (Lipid | | |
| | | | | | kinase 4) (LK4), ENSG00000100422, | | |
| | | | | | CERK | | |
| 943 | 1454 | 1455 | 2278 | 2279 | Reticulon 4 receptor precursor (Nogo | ENSG00000040608 | See tables 3 & 4 |
| | | | | | receptor) (NgR) (Nogo-66 receptor), RTN4R | | |
| 944 | 1456 | 1457 | 2280 | 2281 | UNC84B; unc-84 homolog B (C. Elegans); | ENSG00000100242 | See tables 3 & 4 |
| | | | | | ENSG00000100242 | | |
| 945 | 1458 | 1459 | 2282 | 2283 | RABL4; RAB, member of RAS oncogene | ENSG00000100360 | See tables 3 & 4 |
| | | | | | family-like 4; ENSG00000100360 | | |
| 946 | 1460 | 1461 | 2284 | 2285 | Cadherin EGF LAG seven-pass G-type | ENSG00000075275 | See tables 3 & 4 |
| | | | | | receptor 1 precursor (Flamingo homolog 2) | | |
| | | | | | (hFmi2), CELSR1 | | |
| 947 | 1462 | 1463 | 2286 | 2287 | OTTHUMG00000030326, LL22NC03- | OTTHUMG00000030326 | See tables 3 & 4 |
| | | | | | 5H6.1 | | |
| 948 | 1464 | 1465 | 2288 | 2289 | OTTHUMG00000030656, RP3-515N1.6 | OTTHUMG00000030656 | See tables 3 & 4 |
| 949 | 1466 | 1467 | 2290 | 2291 | SMTN; smoothelin; ENSG00000183963 | ENSG00000183963 | See tables 3 & 4 |
| 950 | 1468 | 1469 | 2292 | 2293 | ZNRF3 protein (Fragment), | ENSG00000183579 | See tables 3 & 4 |
| | | | | | ENSG00000183579, ZNRF3 zinc and ring | | |
| | | | | | finger 3 (ZNRF3) | | |
| 951 | 1470 | 1471 | 2294 | 2295 | OTTHUMG00000030700, GRB2-related | OTTHUMG00000030700 | See tables 3 & 4 |
| | | | | | adaptor protein 2, GRAP2 | | |
| 952 | 1472 | 1473 | 2296 | 2297 | CAP-binding protein complex interacting | ENSG00000186976 | See tables 3 & 4 |
| | | | | | protein 1 isoform a Source: RefSeq_peptide | | |
| | | | | | NP_073622 | | |
| 953 | 1474 | 1475 | 2298 | 2299 | SAM50_HUMAN (UniProt/Swiss-Prot ID), | ENSG00000100347 | See tables 3 & 4 |
| | | | | | ENSG00000100347, SAM50-like protein | | |
| | | | | | CGI-51; sorting and assembly machinery | | |
| | | | | | component 50 homolog (S. Cerevisiae) | | |
| 954 | 1476 | 1477 | 2300 | 2301 | SULT4A1; sulfotransferase family 4A, | ENSG00000130540 | See tables 3 & 4 |
| | | | | | member 1; ENSG00000130540 | | |
| 955 | 1478 | 1479 | 2302 | 2303 | TIMP3; TIMP metallopeptidase inhibitor 3 | ENSG00000100234 | See tables 3 & 4 |
| | | | | | (Sorsby fundus dystrophy, | | |
| | | | | | pseudoinflammatory); ENSG00000100234 | | |
| 956 | 1480 | 1481 | 2304 | 2305 | T-box transcription factor TBX1 (T-box | ENSG00000184058 | See tables 3 & 4 |
| | | | | | protein 1) (Testis-specific T-box protein), | | |
| 957 | 1482 | 1483 | 2306 | 2307 | MPPED1, metallophosphoesterase domain | ENSG00000186732 | See tables 3 & 4 |
| | | | | | containing 1 | | |
| 958 | 1484 | 1485 | 2308 | 2309 | ENSG00000188511 NP_942148.1 novel | ENSG00000188511 | See tables 3 & 4 |
| | | | | | Gene hypothetical protein LOC348645 | | |
| 959 | 1486 | 1487 | 2310 | 2311 | Cdc42 effector protein 1, | ENSG00000128283 | See tables 3 & 4 |
| 960 | 1488 | 1489 | 2312 | 2313 | RPL3; ribosomal protein L3; | ENSG00000100316 | See tables 3 & 4 |
| | | | | | ENSG00000100316 | | |
| 961 | 1490 | 1491 | 2314 | 2315 | APOL2; apolipoprotein L, 2; | ENSG00000128335 | See tables 3 & 4 |
| | | | | | ENSG00000128335 | | |
| 962 | 1492 | 1493 | 2316 | 2317 | RAC2; ras-related C3 botulinum toxin | ENSG00000128340 | See tables 3 & 4 |
| | | | | | substrate 2 (rho family, small GTP binding | | |
| | | | | | protein Rac2); ENSG00000128340 | | |
| 963 | 1494 | 1495 | 2318 | 2319 | OTTHUMP00000028917, Q96E60 | ENSG00000100399 | See tables 3 & 4 |
| 964 | 1496 | 1497 | 2320 | 2321 | Neutrophil cytosol factor 4 (NCF-4) | ENSG00000100365 | See tables 3 & 4 |
| | | | | | (Neutrophil NADPH oxidase factor 4) (p40- | | |
| | | | | | phox) (p40phox)., ENSG00000100365, | | |
| | | | | | NCF4 | | |
| 965 | 1498 | 1499 | 2322 | 2323 | XP_371837.1 (RefSeq peptide predicted ID); | ENSG00000168768 | See tables 3 & 4 |
| | | | | | PREDICTED: similar to oxidoreductase | | |
| | | | | | UCPA Source: RefSeq_peptide_predicted | | |
| | | | | | XP_371837; ENSG00000168768 | | |
| 966 | 1500 | 1501 | 2324 | 2325 | triggering receptor expressed on myeloid | ENSG00000112195 | See tables 3 & 4 |
| | | | | | cells-like 2, ENSG00000112195, TREML2 | | |
| 967 | 1502 | 1503 | 2326 | 2327 | TREML1; triggering receptor expressed on | ENSG00000161911 | See tables 3 & 4 |
| | | | | | myeloid cells-like 1; ENSG00000161911 | | |
| 968 | 1504 | 1505 | 2328 | 2329 | ENSG00000178199, Q6ZRW2_HUMAN; | ENSG00000178199 | See tables 3 & 4 |
| | | | | | zinc finger CCCH-type containing 12D | | |
| 969 | 1506 | 1507 | 2330 | 2331 | AIM1; absent in melanoma1; | ENSG00000112297 | See tables 3 & 4 |
| | | | | | ENSG00000112297 | | |
| 970 | 1508 | 1509 | 2332 | 2333 | NKG2D ligand 4 precursor (NKG2D ligand | ENSG00000164520 | See tables 3 & 4 |
| | | | | | 4) (NKG2DL4) (N2DL-4) (Retinoic acid | | |
| | | | | | early transcript 1E) (Lymphocyte effector | | |
| | | | | | toxicity activation ligand) (RAE-1-like | | |
| | | | | | transcript 4) (RL-4), | | |
| 971 | 1510 | 1511 | 2334 | 2335 | Disheveled associated activator of | ENSG00000146122 | See tables 3 & 4 |
| | | | | | morphogenesis 2, ENSG00000146122, | | |
| | | | | | DAAM2 | | |
| 972 | 1512 | 1513 | 2336 | 2337 | RP11-535K1.1 (Vega gene ID); Putative | OTTHUMG00000014660 | See tables 3 & 4 |
| | | | | | Processed transcript; | | |
| | | | | | OTTHUMG00000014660 | | |
| 973 | 1514 | 1515 | 2338 | 2339 | OTTHUMG00000015679; Novel Protein | OTTHUMG00000015679 | See tables 3 & 4 |
| | | | | | coding; RP3-509I19.3 | | |
| 974 | 1516 | 1517 | 2340 | 2341 | RP11-503C24.1 (Vega gene ID); Putative | OTTHUMG00000016040 | See tables 3 & 4 |
| | | | | | Processed transcript; | | |
| | | | | | OTTHUMG00000016040 | | |
| 975 | 1518 | 1519 | 2342 | 2343 | GABRR2; gamma-aminobutyric acid | ENSG00000111886 | See tables 3 & 4 |
| | | | | | (GABA) receptor, rho 2; ENSG00000111886 | | |
| 976 | 1520 | 1521 | 2344 | 2345 | ANKRD6; ankyrin repeat domain 6; | ENSG00000135299 | See tables 3 & 4 |
| | | | | | ENSG00000135299 | | |
| 977 | 1522 | 1523 | 2346 | 2347 | TXLNB; taxilin beta; ENSG00000164440 | ENSG00000164440 | See tables 3 & 4 |
| 978 | 1524 | 1525 | 2348 | 2349 | TXLNB; taxilin beta; ENSG00000164440 | ENSG00000164440 | See tables 3 & 4 |
| 979 | 1526 | 1527 | 2350 | 2351 | RP5-899B16.2 (Vega gene ID); Putative | OTTHUMG00000015698 | See tables 3 & 4 |
| | | | | | Processed transcript; | | |
| | | | | | OTTHUMG00000015698 | | |
| 980 | 1528 | 1529 | 2352 | 2353 | Probable G-protein coupled receptor 116 | ENSG00000069122 | See tables 3 & 4 |
| | | | | | precursor, | | |
| 981 | 1530 | 1531 | 2354 | 2355 | RP11-146I2.1 (Vega gene ID); Novel | OTTHUMG00000014290 | See tables 3 & 4 |
| | | | | | Processed transcript; | | |
| | | | | | OTTHUMG00000014290 | | |
| 982 | 1532 | 1533 | 2356 | 2357 | GPR115; G protein-coupled receptor 115; | ENSG00000153294 | See tables 3 & 4 |
| | | | | | ENSG00000153294 | | |
| 983 | 1534 | 1535 | 2358 | 2359 | GPR126; G protein-coupled receptor 126; | ENSG00000112414 | See tables 3 & 4 |
| | | | | | ENSG00000112414 embryonic marker | | |
| 984 | 1536 | 1537 | 2360 | 2361 | RP1-60O19.1 (Vega gene ID); Known | OTTHUMG00000015305 | See tables 3 & 4 |
| | | | | | Processed transcript; | | |
| | | | | | OTTHUMG00000015305 | | |
| 985 | 1538 | 1539 | 2362 | 2363 | new gene!!!, OTTHUMG00000015313, | OTTHUMG00000015313 | See tables 3 & 4 |
| | | | | | RP1-47M23.1 SCML4 sex comb on midleg- | | |
| | | | | | like 4 (Drosophila) [Homo sapiens] | | |
| 986 | 1540 | 1541 | 2364 | 2365 | OTTHUMG00006004170 , TPX1testis | OTTHUMG00000014822 | See tables 3 & 4 |
| | | | | | specific protein 1 (probe H4-1 p3-1) | | |
| 987 | 1542 | 1543 | 2366 | 2367 | OTTHUMG00000014829, | OTTHUMG00000014829 | See tables 3 & 4 |
| 988 | 1544 | 1545 | 2368 | 2369 | OTTHUMG00000015337RP11-487F23.3 | OTTHUMG00000015337 | See tables 3 & 4 |
| | | | | | hypothetical LOC389422 | | |
| 989 | 1546 | 1547 | 2370 | 2371 | Nesprin-1 (Nuclear envelope spectrin repeat | ENSG00000131018 | See tables 3 & 4 |
| | | | | | protein 1) (Synaptic nuclear envelope protein | | |
| | | | | | 1) (Syne-1) (Myocyte nuclear envelope | | |
| | | | | | protein 1) (Myne-1) (Enaptin), | | |
| | | | | | ENSG00000131018, SYNE1 | | |
| 990 | 1548 | 1549 | 2372 | 2373 | Nesprin-1 (Nuclear envelope spectrin repeat | ENSG00000131018 | See tables 3 & 4 |
| | | | | | protein 1) (Synaptic nuclear envelope protein | | |
| | | | | | 1) (Syne-1) (Myocyte nuclear envelope | | |
| | | | | | protein 1) (Myne-1) (Enaptin), | | |
| | | | | | ENSG00000131018, SYNE1 | | |
| 991 | 1550 | 1551 | 2374 | 2375 | RP11-398K22.4 (Vega gene ID); Putative | OTTHUMG00000015024 | See tables 3 & 4 |
| | | | | | Processed transcript; | | |
| | | | | | OTTHUMG00000015024 | | |
| 992 | 1552 | 1553 | 2376 | 2377 | MyoD family inhibitor (Myogenic repressor | ENSG00000112559 | See tables 3 & 4 |
| | | | | | I-mf), MDFI | | |
| 993 | 1554 | 1555 | 2378 | 2379 | OTTHUMG00000014691, putative | OTTHUMG00000014691 | See tables 3 & 4 |
| | | | | | processed transcript, RP11-533O20.2 | | |
| 994 | 1556 | 1557 | 2380 | 2381 | RP3-398D13.4 (Vega gene ID); | OTTHUMG00000014188 | See tables 3 & 4 |
| | | | | | OTTHUMG00000014188 | | |
| 995 | 1558 | 1559 | 2382 | 2383 | RP3-429O6.1 (Vega gene ID); Putative | OTTHUMG00000014195 | See tables 3 & 4 |
| | | | | | Processed transcript; | | |
| | | | | | OTTHUMG00000014195 | | |
| 996 | 1560 | 1561 | 2384 | 2385 | MOG; myelin oligodendrocyte glycoprotein; | ENSG00000137345 | See tables 3 & 4 |
| | | | | | ENSG00000137345 | | |
| 997 | 1562 | 1563 | 2386 | 2387 | RP3-495K2.2 (Vega gene ID); Putative | OTTHUMG00000016052 | See tables 3 & 4 |
| | | | | | Processed transcript; | | |
| | | | | | OTTHUMG00000016052 | | |
| 998 | 1564 | 1565 | 2388 | 2389 | RP11-417E7.1 (Vega gene ID); Putative | OTTHUMG00000016054 | See tables 3 & 4 |
| | | | | | Processed transcript; | | |
| | | | | | OTTHUMG00000016054 | | |
| 999 | 1566 | 1567 | 2390 | 2391 | yrosine-protein kinase-like 7 precursor | ENSG00000112655 | See tables 3 & 4 |
| | | | | | (Colon carcinoma kinase 4) (CCK-4)., | | |
| | | | | | ENSG00000112655, PTK7 | | |
| 1000 | 1568 | 1569 | 2392 | 2393 | RP11-174C7.4 (Vega gene ID) | OTTHUMG00000015553 | See tables 3 & 4 |
| 1001 | 1570 | 1571 | 2394 | 2395 | cytidine monophosphate-N-acetylneuraminic | OTTHUMG00000016099 | See tables 3 & 4 |
| | | | | | acid hydroxylase (CMP-N-acetylneuraminate | | |
| | | | | | monooxygenase); CMAH | | |
| 1002 | 1572 | 1573 | 2396 | 2397 | PKHD1; polycystic kidney and hepatic | ENSG00000170927 | See tables 3 & 4 |
| | | | | | disease 1 (autosomal recessive); | | |
| | | | | | ENSG00000170927 | | |
| 1003 | 1574 | 1575 | 2398 | 2399 | RP3-471C18.2 (Vega gene ID); Novel | OTTHUMG00000014332 | See tables 3 & 4 |
| | | | | | Processed transcript; | | |
| | | | | | OTTHUMG00000014332 | | |
| 1004 | 1576 | 1577 | 2400 | 2401 | RP11-204E9.1 (Vega gene ID); Putative | OTTHUMG00000014342 | See tables 3 & 4 |
| | | | | | Processed transcript; | | |
| | | | | | OTTHUMG00000014342 | | |
| 1005 | 1578 | 1579 | 2402 | 2403 | glutathione peroxidase 5, | OTTHUMG00000016307 | See tables 3 & 4 |
| | | | | | OTTHUMG00000016307, GPX5 | | |
| 1006 | 1580 | 1581 | 2404 | 2405 | RP11-411K7.1 (Vega gene ID); Putative | OTTHUMG00000014887 | See tables 3 & 4 |
| | | | | | Processed transcript; | | |
| | | | | | OTTHUMG00000014887 | | |
| 1007 | 1582 | 1583 | 2406 | 2407 | skin marker, Glutamate receptor, ionotropic | ENSG00000164418 | See tables 3 & 4 |
| | | | | | kainate 2 precursor (Glutamate receptor 6) | | |
| | | | | | (GluR-6) (GluR6) (Excitatory amino acid | | |
| | | | | | receptor 4) (EAA4) | | |
| 1008 | 1584 | 1585 | 2408 | 2409 | C6orf142; chromosome 6 open reading frame | ENSG00000146147 | See tables 3 & 4 |
| | | | | | 142; ENSG00000146147 | | |
| 1009 | 1586 | 1587 | 2410 | 2411 | HDGFL1; hepatoma derived growth factor- | ENSG00000112273 | See tables 3 & 4 |
| | | | | | like 1; ENSG00000112273 | | |
| 1010 | 1588 | 1589 | 2412 | 2413 | forkhead box C1, OTTHUMG00000016182, | OTTHUMG00000016182 | See tables 3 & 4 |
| | | | | | FOXC1 | | |
| 1011 | 1590 | 1591 | 2414 | 2415 | C6orf188; chromosome 6 open reading frame | ENSG00000178033 | See tables 3 & 4 |
| | | | | | 188; ENSG00000178033 | | |
| 1012 | 1592 | 1593 | 2416 | 2417 | ME1; malic enzyme 1, NADP(+)-dependent, | ENSG00000065833 | See tables 3 & 4 |
| | | | | | cytosolic; ENSG00000065833 | | |
| 1013 | 1594 | 1595 | 2418 | 2419 | SLC22A1; solute carrier family 22 (organic | ENSG00000175003 | See tables 3 & 4 |
| | | | | | cation transporter), member 1 | | |
| 1014 | 1596 | 1597 | 2420 | 2421 | RP11-235G24.1 (Vega gene ID) | OTTHUMG00000015959 | See tables 3 & 4 |
| 1015 | 1598 | 1599 | 2422 | 2423 | T-box 18; TBX18 | ENSG00000112837 | See tables 3 & 4 |
| 1016 | 1600 | 1601 | 2424 | 2425 | CTA-31J9.2, putative processed transcript, | OTTHUMG00000015619 | See tables 3 & 4 |
| | | | | | OTTHUMG00000015619 | | |
| 1017 | 1602 | 1603 | 2426 | 2427 | RP1-32B1.4 (Vega gene ID); Putative | OTTHUMG00000015628 | See tables 3 & 4 |
| | | | | | Processed transcript | | |
| | | | | | OTTHUMG00000015628 | | |
| 1018 | 1604 | 1605 | 2428 | 2429 | OTTHUMG00000014223, RP11-203H2.2, | OTTHUMG00000014223 | See tables 3 & 4 |
| | | | | | novel processed treanscript | | |
| 1019 | 1606 | 1607 | 2430 | 2431 | OTTHUMG00000014737, C6orf154 and | OTTHUMG00000014737 | See tables 3 & 4 |
| | | | | | Name: chromosome 6 open reading frame | | |
| | | | | | 154; RP3-337H4.2 | | |
| 1020 | 1608 | 1609 | 2432 | 2433 | transcription factor AP-2 alpha, | OTTHUMG00000014235 | See tables 3 & 4 |
| | | | | | OTTHUMG00000014235, TFAP2A | | |
| 1021 | 1610 | 1611 | 2434 | 2435 | IL20RA; interleukin 20 receptor, alpha; | ENSG00000016402 | See tables 3 & 4 |
| | | | | | ENSG00000016402 | | |
| 1022 | 1612 | 1613 | 2436 | 2437 | KAAG1; kidney associated antigen 1; | ENSG00000146049 | See tables 3 & 4 |
| | | | | | ENSG00000146049 | | |
| 1023 | 1614 | 1615 | 2438 | 2439 | TGM3; transglutaminase 3 (E polypeptide, | ENSG00000125780 | See tables 3 & 4 |
| | | | | | protein-glutamine-gamma- | | |
| | | | | | glutamyltransferase); ENSG00000125780 | | |
| 1024 | 1616 | 1617 | 2440 | 2441 | RASSF2; Ras association (RalGDS/AF-6) | ENSG00000101265 | See tables 3 & 4 |
| | | | | | domain family 2; ENSG00000101265 | | |
| 1025 | 1618 | 1619 | 2442 | 2443 | no gene associated | | See tables 3 & 4 |
| 1026 | 1620 | 1621 | 2444 | 2445 | no gene associated | | See tables 3 & 4 |
| 1027 | 1622 | 1623 | 2446 | 2447 | no gene associated | | See tables 3 & 4 |
| 1028 | 1624 | 1625 | 2448 | 2449 | no gene associated | | See tables 3 & 4 |
| 1029 | 1626 | 1627 | 2450 | 2451 | no gene associated | | See tables 3 & 4 |
| 1030 | 1628 | 1629 | 2452 | 2453 | no gene associated | | See tables 3 & 4 |
| 1031 | 1630 | 1631 | 2454 | 2455 | no gene associated | | See tables 3 & 4 |
| 1032 | 1632 | 1633 | 2456 | 2457 | no gene associated | | See tables 3 & 4 |
| 1033 | 1634 | 1635 | 2458 | 2459 | no gene associated | | See tables 3 & 4 |
| 1034 | 1636 | 1637 | 2460 | 2461 | no gene associated | | See tables 3 & 4 |
| 1035 | 1638 | 1639 | 2462 | 2463 | no gene associated | | See tables 3 & 4 |
| 1036 | 1640 | 1641 | 2464 | 2465 | RP4-697P8.2 (Vega gene ID); Putative | OTTHUMG00000031879 | See tables 3 & 4 |
| | | | | | Processed transcript; | | |
| | | | | | OTTHUMG00000031879 | | |
| 1037 | 1642 | 1643 | 2466 | 2467 | no gene associated | | See tables 3 & 4 |
| 1038 | 1644 | 1645 | 2468 | 2469 | OTTHUMG00000031883, | OTTHUMG00000031883 | See tables 3 & 4 |
| 1039 | 1646 | 1647 | 2470 | 2471 | no gene associated | | See tables 3 & 4 |
| 1040 | 1648 | 1649 | 2472 | 2473 | no gene associated | | See tables 3 & 4 |
| 1041 | 1650 | 1651 | 2474 | 2475 | no gene associated | | See tables 3 & 4 |
| 1042 | 1652 | 1653 | 2476 | 2477 | no gene associated | | See tables 3 & 4 |
| 1043 | 1654 | 1655 | 2478 | 2479 | no gene associated | | See tables 3 & 4 |
| 1044 | 1656 | 1657 | 2480 | 2481 | Ras and Rab interactor 2, | OTTHUMG00000031996 | See tables 3 & 4 |
| 1045 | 1658 | 1659 | 2482 | 2483 | no gene associated | | See tables 3 & 4 |
| 1046 | 1660 | 1661 | 2484 | 2485 | no gene associated | | See tables 3 & 4 |
| 1047 | 1662 | 1663 | 2486 | 2487 | no gene associated | | See tables 3 & 4 |
| 1048 | 1664 | 1665 | 2488 | 2489 | no gene associated | | See tables 3 & 4 |
| 1049 | 1666 | 1667 | 2490 | 2491 | no gene associated | | See tables 3 & 4 |
| 1050 | 1668 | 1669 | 2492 | 2493 | no gene associated | | See tables 3 & 4 |
| 1051 | 1670 | 1671 | 2494 | 2495 | no gene associated | | See tables 3 & 4 |
| 1052 | 1672 | 1673 | 2496 | 2497 | no gene associated | | See tables 3 & 4 |
| 1053 | 1674 | 1675 | 2498 | 2499 | no gene associated | | See tables 3 & 4 |
| 1054 | 1676 | 1677 | 2500 | 2501 | no gene associated | | See tables 3 & 4 |
| 1055 | 1678 | 1679 | 2502 | 2503 | C20orf112; chromosome 20 open reading | OTTHUMG00000032219 | See tables 3 & 4 |
| | | | | | frame 112; OTTHUMG00000032219 | | |
| 1056 | 1680 | 1681 | 2504 | 2505 | FER1L4; fer-1-like 4 (C. Elegans); | OTTHUMG00000032354 | See tables 3 & 4 |
| | | | | | OTTHUMG00000032354 | | |
| 1057 | 1682 | 1683 | 2506 | 2507 | no gene associated | | See tables 3 & 4 |
| 1058 | 1684 | 1685 | 2508 | 2509 | no gene associated | | See tables 3 & 4 |
| 1059 | 1686 | 1687 | 2510 | 2511 | Protein C20orf102 precursor, | | See tables 3 & 4 |
| | | | | | ENSG00000132821, CT102_HUMAN | | |
| 1060 | 1688 | 1689 | 2512 | 2513 | no gene associated | | See tables 3 & 4 |
| 1061 | 1690 | 1691 | 2514 | 2515 | no gene associated | | See tables 3 & 4 |
| 1062 | 1692 | 1693 | 2516 | 2517 | no gene associated | | See tables 3 & 4 |
| 1063 | 1694 | 1695 | 2518 | 2519 | no gene associated | | See tables 3 & 4 |
| 1064 | 1696 | 1697 | 2520 | 2521 | no gene associated - Nearest transcript | | See tables 3 & 4 |
| | | | | | CDH22 (~18 kb upstream) | | |
| 1065 | 1698 | 1699 | 2522 | 2523 | no gene associated | | See tables 3 & 4 |
| 1066 | 1700 | 1701 | 2524 | 2525 | no gene associated | | See tables 3 & 4 |
| 1067 | 1702 | 1703 | 2526 | 2527 | no gene associated | | See tables 3 & 4 |
| 1068 | 1704 | 1705 | 2528 | 2529 | no gene associated | | See tables 3 & 4 |
| 1069 | 1706 | 1707 | 2530 | 2531 | no gene associated | | See tables 3 & 4 |
| 1070 | 1708 | 1709 | 2532 | 2533 | no gene associated | | See tables 3 & 4 |
| 1071 | 1710 | 1711 | 2534 | 2535 | no gene associated | | See tables 3 & 4 |
| 1072 | 1712 | 1713 | 2536 | 2537 | ZHX3; zinc fingers and homeoboxes 3; | OTTHUMG00000032481 | See tables 3 & 4 |
| | | | | | OTTHUMG00000032481 | | |
| 1073 | 1714 | 1715 | 2538 | 2539 | no gene associated | | See tables 3 & 4 |
| 1074 | 1716 | 1717 | 2540 | 2541 | CHD6; chromodomain helicase DNA | ENSG00000124177 | See tables 3 & 4 |
| | | | | | binding protein 6; ENSG00000124177 | | |
| 1075 | 1718 | 1719 | 2542 | 2543 | no gene associated | | See tables 3 & 4 |
| 1076 | 1720 | 1721 | 2544 | 2545 | PTPRG; protein tyrosine phosphatase, | ENSG00000144724 | See tables 3 & 4 |
| | | | | | receptor type, G; ENSG00000144724 | | |
| 1077 | 1722 | 1723 | 2546 | 2547 | no gene associated | | See tables 3 & 4 |
| 1078 | 1724 | 1725 | 2548 | 2549 | no gene associated | | See tables 3 & 4 |
| 1079 | 1726 | 1727 | 2550 | 2551 | no gene associated | | See tables 3 & 4 |
| 1080 | 1728 | 1729 | 2552 | 2553 | PTPNS1; protein tyrosine phosphatase, non- | ENSG00000198053 | See tables 3 & 4 |
| | | | | | receptor type substrate 1; | | |
| | | | | | ENSG00000198053 | | |
| 1081 | 1730 | 1731 | 2554 | 2555 | Q7Z5T1_HUMAN (Predicted | ENSG00000088881 | See tables 3 & 4 |
| | | | | | UniProt/TrEMBL ID); KIAA1442 protein; | | |
| | | | | | ENSG00000088881 | | |
| 1082 | 1732 | 1733 | 2556 | 2557 | NP_689717.2 (RefSeq peptide ID); | ENSG00000171984 | See tables 3 & 4 |
| | | | | | ENSG00000171984 | | |
| 1083 | 1734 | 1735 | 2558 | 2559 | ENSG00000149346, NP_001009608.1, | ENSG00000149346 | See tables 3 & 4 |
| | | | | | hypothetical protein LOC128710, | | |
| | | | | | chromosome 20 open reading frame 94 | | |
| 1084 | 1736 | 1737 | 2560 | 2561 | C20orf82; chromosome 20 open reading | ENSG00000101230 | See tables 3 & 4 |
| | | | | | frame 82; ENSG00000101230 | | |
| 1085 | 1738 | 1739 | 2562 | 2563 | C20orf23; chromosome 20 open reading | ENSG00000089177 | See tables 3 & 4 |
| | | | | | frame 23; ENSG00000089177; embryonic | | |
| | | | | | marker | | |
| 1086 | 1740 | 1741 | 2564 | 2565 | PCSK2; proprotein convertase | ENSG00000125851 | See tables 3 & 4 |
| | | | | | subtilisin/kexin type 2; ENSG00000125851 | | |
| 1087 | 1742 | 1743 | 2566 | 2567 | PCSK2; proprotein convertase | ENSG00000125851 | See tables 3 & 4 |
| | | | | | subtilisin/kexin type 2; ENSG00000125851 | | |
| 1088 | 1744 | 1745 | 2568 | 2569 | solute carrier family 24 | OTTHUMG00000031993 | See tables 3 & 4 |
| | | | | | (sodiumVpotassiumVcalcium exchanger), | | |
| | | | | | member 3, OTTHUMG00000031993, | | |
| | | | | | SLC24A3 | | |
| 1089 | 1746 | 1747 | 2570 | 2571 | solute carrier family 24 | OTTHUMG00000031993 | See tables 3 & 4 |
| | | | | | (sodiumVpotassiumVcalcium exchanger), | | |
| | | | | | member 3, OTTHUMG00000031993, | | |
| | | | | | SLC24A3 | | |
| 1090 | 1748 | 1749 | 2572 | 2573 | ENSG00000089101, CT026_HUMAN | ENSG00000089101 | See tables 3 & 4 |
| 1091 | 1750 | 1751 | 2574 | 2575 | ENSG00000089101, CT026_HUMAN | ENSG00000089101 | See tables 3 & 4 |
| 1092 | 1752 | 1753 | 2576 | 2577 | C20orf74 protein, ENSG00000188559, | ENSG00000188559 | See tables 3 & 4 |
| | | | | | Q9ULE8_HUMAN | | |
| 1093 | 1754 | 1755 | 2578 | 2579 | C20orf74 protein, ENSG00000188559, | ENSG00000188559 | See tables 3 & 4 |
| | | | | | Q9ULE8_HUMAN | | |
| 1094 | 1756 | 1757 | 2580 | 2581 | C20orf14 protein, ENSG00000188559, | ENSG00000188559 | See tables 3 & 4 |
| | | | | | Q9ULE8_HUMAN | | |
| 1095 | 1758 | 1759 | 2582 | 2583 | PLAGL2; pleiomorphic adenoma gene-like | ENSG00000126003 | See tables 3 & 4 |
| | | | | | 2; ENSG00000126003 | | |
| 1096 | 1760 | 1761 | 2584 | 2585 | GGTL3; gamma-glutamyltransferase-like 3; | ENSG00000131067 | See tables 3 & 4 |
| | | | | | ENSG00000131067 | | |
| 1097 | 1762 | 1763 | 2586 | 2587 | MYH7B; myosin, heavy polypeptide 7B, | ENSG00000078814 | See tables 3 & 4 |
| | | | | | cardiac muscle, beta; ENSG00000078814 | | |
| 1098 | 1764 | 1765 | 2588 | 2589 | TRPC4AP; transient receptor potential cation | ENSG00000100991 | See tables 3 & 4 |
| | | | | | channel, subfamily C, member 4 associated | | |
| | | | | | protein; ENSG00000100991 | | |
| 1099 | 1766 | 1767 | 2590 | 2591 | EPB41L1; erythrocyte membrane protein | ENSG00000088367 | See tables 3 & 4 |
| | | | | | band 4.1-like 1; ENSG00000088367 | | |
| 1100 | 1768 | 1769 | 2592 | 2593 | C20orf117; chromosome 20 open reading | OTTHUMG00000032395 | See tables 3 & 4 |
| | | | | | frame 117; OTTHUMG00000032395 | | |
| 1101 | 1770 | 1771 | 2594 | 2595 | PTPRT; protein tyrosine phosphatase, | ENSG00000196090 | See tables 3 & 4 |
| | | | | | receptor type, T; ENSG00000196090 | | |
| 1102 | 1772 | 1773 | 2596 | 2597 | PTPRT; protein tyrosine phosphatase, | ENSG00000196090 | See tables 3 & 4 |
| | | | | | receptor type, T; ENSG00000196090 | | |
| 1103 | 1774 | 1775 | 2598 | 2599 | PTPRT; protein tyrosine phosphatase, | ENSG00000196090 | See tables 3 & 4 |
| | | | | | receptor type, T; ENSG00000196090 | | |
| 1104 | 1776 | 1777 | 2600 | 2601 | PTPRT; protein tyrosine phosphatase, | ENSG00000196090 | See tables 3 & 4 |
| | | | | | receptor type, T; ENSG00000196090 | | |
| 1105 | 1778 | 1779 | 2602 | 2603 | PTPRT; protein tyrosine phosphatase, | ENSG00000196090 | See tables 3 & 4 |
| | | | | | receptor type, T; ENSG00000196090 | | |
| 1106 | 1780 | 1781 | 2604 | 2605 | SDC4; syndecan 4 (amphiglycan, ryudocan); | ENSG00000124145 | See tables 3 & 4 |
| | | | | | ENSG00000124145 | | |
| 1107 | 1782 | 1783 | 2606 | 2607 | SDC4; syndecan 4 (amphiglycan, ryudocan); | ENSG00000124145 | See tables 3 & 4 |
| | | | | | ENSG00000124145 | | |
| 1108 | 1784 | 1785 | 2608 | 2609 | cadherin-like 22, CDH22 | OTTHUMG00000033073 | See tables 3 & 4 |
| 1109 | 1786 | 1787 | 2610 | 2611 | EYA2; eyes absent homolog 2 (Drosophila); | ENSG00000064655 | See tables 3 & 4 |
| | | | | | ENSG00000064655 | | |
| 1110 | 1788 | 1789 | 2612 | 2613 | SULF2; sulfatase 2; ENSG00000196562 | ENSG00000196562 | See tables 3 & 4 |
| 1111 | 1790 | 1791 | 2614 | 2615 | KCNB1; potassium voltage-gated channel, | ENSG00000158445 | See tables 3 & 4 |
| | | | | | Shab-related subfamily, member 1; | | |
| | | | | | ENSG00000158445 | | |
| 1112 | 1792 | 1793 | 2616 | 2617 | Breast carcinoma amplified sequence 4, | ENSG00000124243 | See tables 3 & 4 |
| | | | | | BCAS4 | | |
| 1113 | 1794 | 1795 | 2618 | 2619 | nuclear factor of activated T-cells, | OTTHUMG00000032747 | See tables 3 & 4 |
| | | | | | cytoplasmic, calcineurin-dependent 2, | | |
| | | | | | OTTHUMG00000032747, NFATC2 | | |
| 1114 | 1796 | 1797 | 2620 | 2621 | Nuclear factor of activated T-cells, | ENSG00000101096 | See tables 3 & 4 |
| | | | | | cytoplasmic 2 (T cell transcription factor | | |
| | | | | | NFAT1) (NFAT pre-existing subunit) (NF- | | |
| | | | | | ATp), NFATC2 | | |
| 1115 | 1798 | 1799 | 2622 | 2623 | Bone morphogenetic protein 7 precursor | ENSG00000101144 | See tables 3 & 4 |
| | | | | | (BMP-7) (Osteogenic protein 1) (OP-1) | | |
| | | | | | (Eptotermin alfa), | | |
| 1116 | 1800 | 1801 | 2624 | 2625 | transmembrane, prostate androgen induced | OTTHUMG00000032831 | See tables 3 & 4 |
| | | | | | RNA, | | |
| 1117 | 1802 | 1803 | 2626 | 2627 | NO annotated gene; NP_775915.1 (RefSeq | ENSG00000176659 | See tables 3 & 4 |
| | | | | | peptide ID) | | |
| 1118 | 1804 | 1805 | 2628 | 2629 | CDH4; cadherin 4, type 1, R-cadherin | ENSG00000179242 | See tables 3 & 4 |
| | | | | | (retinal); ENSG00000179242 | | |
| 1119 | 1806 | 1807 | 2630 | 2631 | NP_001002034.1 (RefSeq peptide ID); | ENSG00000177096 | See tables 3 & 4 |
| | | | | | ENSG00000177096 | | |
| 1120 | 1808 | 1809 | 2632 | 2633 | NP_612444.1 (RefSeq peptide ID); | ENSG00000133477 | See tables 3 & 4 |
| | | | | | ENSG00000133477 | | |
| 1121 | 1810 | 1811 | 2634 | 2635 | no gene associated | | See tables 3 & 4 |
| 1122 | 1812 | 1813 | 2636 | 2637 | OTTHUMG00000030780, CTA-373H7.4, | OTTHUMG00000030780 | See tables 3 & 4 |
| | | | | | novel pseudogene | | |
| 1123 | 1814 | 1815 | 2638 | 2639 | no gene associated | | See tables 3 & 4 |
| 1124 | 1816 | 1817 | 2640 | 2641 | Cat eye syndrome critical region protein 1 | ENSG00000093072 | See tables 3 & 4 |
| | | | | | precursor, CECR1 | | |
| 1125 | 1818 | 1819 | 2642 | 2643 | IGLC1; immunoglobulin lambda constant 1 | ENSG00000100208 | See tables 3 & 4 |
| | | | | | (Mcg marker); ENSG00000100208 | | |
| 1126 | 1820 | 1821 | 2644 | 2645 | OTTHUMG00000030521, AC000095.4 | OTTHUMG00000030521 | See tables 3 & 4 |
| | | | | | putative processed transcript; | | |
| 1127 | 1822 | 1823 | 2646 | 2647 | Uroplakin-3A precursor (Uroplakin III) | ENSG00000100373 | See tables 3 & 4 |
| | | | | | (UPIII)., UPK3A | | |
| 1128 | 1824 | 1825 | 2648 | 2649 | Sp1 site_no gene associated | | See tables 3 & 4 |
| 1129 | 1826 | 1827 | 2650 | 2651 | USP18; ubiquitin specific peptidase 18; | OTTHUMG00000030949 | See tables 3 & 4 |
| | | | | | OTTHUMG00000030949 | | |
| 1130 | 1828 | 1829 | 2652 | 2653 | BCR; breakpoint cluster region; | ENSG00000186716 | See tables 3 & 4 |
| | | | | | ENSG00000186716 | | |
| 1131 | 1830 | 1831 | 2654 | 2655 | TBC1D10A; TBC1 domain family, member | ENSG00000099992 | See tables 3 & 4 |
| | | | | | 10A; ENSG00000099992 | | |
| 1132 | 1832 | 1833 | 2656 | 2657 | signal peptide-CUB domian-EGF-related 1, | ENSG00000159307 | See tables 3 & 4 |
| | | | | | ENSG00000159307, SCUBE1 | | |
| 1133 | 1834 | 1835 | 2658 | 2659 | MAPK8IP2; mitogen-activated protein | ENSG00000008735 | See tables 3 & 4 |
| | | | | | kinase 8 interacting protein 2; | | |
| | | | | | ENSG00000008735 | | |
| 1134 | 1836 | 1837 | 2660 | 2661 | ENSG00000192797, miRNA | ENSG00000192797 | See tables 3 & 4 |
| 1135 | 1838 | 1839 | 2662 | 2663 | RPL3; ribosomal protein L3; | ENSG00000100316 | See tables 3 & 4 |
| | | | | | ENSG00000100316 | | |
| 1136 | 1840 | 1841 | 2664 | 2665 | RPL3; ribosomal protein L3; | ENSG00000100316 | See tables 3 & 4 |
| | | | | | ENSG00000100316 | | |
| 1137 | 1842 | 1843 | 2666 | 2667 | RP4-695O20_B.9 (Vega gene ID); Putative | OTTHUMG00000030111 | See tables 3 & 4 |
| | | | | | Processed transcript; | | |
| | | | | | OTTHUMG00000030111 | | |
| 1138 | 1844 | 1845 | 2668 | 2669 | NOVEL transcript?? No associated gene | | See tables 3 & 4 |
| 1139 | 1846 | 1847 | 2670 | 2671 | MN1; meningioma (disrupted in balanced | ENSG00000169184 | See tables 3 & 4 |
| | | | | | translocation) 1; ENSG00000169184 | | |
| 1140 | 1848 | 1849 | 2672 | 2673 | no gene associated | | See tables 3 & 4 |
| 1141 | 1850 | 1851 | 2674 | 2675 | RTDR1; rhabdoid tumor deletion region gene | ENSG00000100218 | See tables 3 & 4 |
| | | | | | 1; ENSG00000100218 | | |
| 1142 | 1852 | 1853 | 2676 | 2677 | RPL3; ribosomal protein L3; | ENSG00000100316 | See tables 3 & 4 |
| | | | | | ENSG00000100316 | | |
| 1143 | 1854 | 1855 | 2678 | 2679 | embryonic marker, GRB2-related adaptor | OTTHUMG00000030700 | See tables 3 & 4 |
| | | | | | protein 2, OTTHUMG00000030700, GRAP2 | | |
| 1144 | 1856 | 1857 | 2680 | 2681 | Serine/threonine-protein kinase 19 (EC | ENSG00000166301 | See tables 3 & 4 |
| | | | | | 2.7.1.37) (RP1 protein) (G11 protein). | | |
| 1145 | 1858 | 1859 | 2682 | 2683 | Transcription factor 19 (Transcription factor | ENSG00000137310 | See tables 3 & 4 |
| | | | | | SC1). | | |
| 1146 | 1860 | 1861 | 2684 | 2685 | Pannexin-2 | ENSG00000073150 | See tables 3 & 4 |
| 1147 | 1862 | 1863 | 2686 | 2687 | OTTHUMG00000030167 | OTTHUMG00000030167 | See tables 3 & 4 |
| 1148 | 1864 | 1865 | 2688 | 2689 | signal peptide-CUB domian-EGF-related 1 | ENSG00000159307 | See tables 3 & 4 |
| 1149 | 1866 | 1867 | 2690 | 2691 | Reticulon 4 receptor precursor (Nogo | ENSG00000040608 | See tables 3 & 4 |
| | | | | | receptor) (NgR) (Nogo-66 receptor) | | |
| 1150 | 1868 | 1869 | 2692 | 2693 | Arylsulfatase A precursor (EC 3.1.6.8) | ENSG00000100299 | See tables 3 & 4 |
| | | | | | (ASA) (Cerebroside-sulfatase) [Contains: | | |
| | | | | | Arylsulfatase A component B; Arylsulfatase | | |
| | | | | | A component C] | | |
| 1151 | 1870 | 1871 | 2694 | 2695 | glycoprotein Ib (platelet), beta polypeptide | OTTHUMG00000030191 | See tables 3 & 4 |
| 1152 | 1872 | 1873 | 2696 | 2697 | No gene associated | | See tables 3 & 4 |
| 1153 | 1874 | 1875 | 2698 | 2699 | No gene associated | | See tables 3 & 4 |
| 1154 | 1876 | 1877 | 2700 | 2701 | Mitochondrial glutamate carrier 2 | ENSG00000182902 | See tables 3 & 4 |
| | | | | | (Glutamate/H(+) symporter 2) (Solute carrier | | |
| | | | | | family 25 member 18, ENSG00000182902, | | |
| | | | | | SLC25A18 | | |
| 1155 | 1878 | 1879 | 2702 | 2703 | Thioredoxin reductase 2, mitochondrial | ENSG00000184470 | See tables 3 & 4 |
| | | | | | precursor (EC 1.8.1.9) (TR3) (TR-beta) | | |
| | | | | | (Selenoprotein Z) (SelZ) | | |
| 1156 | 1880 | 1881 | 2704 | 2705 | Somatostatin receptor type 3 (SS3R) (SSR- | ENSG00000183473 | See tables 3 & 4 |
| | | | | | 28) | | |
| 1157 | 1882 | 1883 | 2706 | 2707 | OTTHUMG00000030964 | OTTHUMG00000030964 | See tables 3 & 4 |
| 1158 | 1884 | 1885 | 2708 | 2709 | No description-pseudogene | OTTHUMG00000030574 | See tables 3 & 4 |
| 1159 | 1886 | 1887 | 2710 | 2711 | Cat eye syndrome critical region protein 1 | ENST00000262607 | See tables 3 & 4 |
| | | | | | precursor | | |
| 1160 | 1888 | 1889 | 2712 | 2713 | No gene associated | | See tables 3 & 4 |
| 1161 | 1890 | 1891 | 2714 | 2715 | Membrane protein MLC1 | ENSG00000100427 | See tables 3 & 4 |
| 1162 | 1892 | 1893 | 2716 | 2717 | BAI1-associated protein 2-like 2 | ENSG00000128298 | See tables 3 & 4 |
| 1163 | 1894 | 1895 | 2718 | 2719 | ENSG00000100249 | ENSG00000100249 | See tables 3 & 4 |
| 1164 | 1896 | 1897 | 2720 | 2721 | OTTHUMG00000030111 | OTTHUMG00000030111 | See tables 3 & 4 |
| 1165 | 1898 | 1899 | 2722 | 2723 | OTTHUMG00000030167, CTA-243E7.3 | OTTHUMG00000030167 | See tables 3 & 4 |
| 1166 | 1900 | 1901 | 2724 | 2725 | OTTHUMG00000030620 | OTTHUMG00000030620 | See tables 3 & 4 |
| 1167 | 1902 | 1903 | 2726 | 2727 | OTTHUMG00000030676 | OTTHUMG00000030676 | See tables 3 & 4 |
| 1168 | 1904 | 1905 | 2728 | 2729 | ENSG00000197549 | ENSG00000197549 | See tables 3 & 4 |
| 1169 | 1906 | 1907 | 2730 | 2731 | NFAT activation molecule 1 precursor | ENSG00000167087 | See tables 3 & 4 |
| | | | | | (Calcineurin/NFAT-activating ITAM- | | |
| | | | | | containing protein) (NFAT activating protein | | |
| | | | | | with ITAM motif 1). | | |
| 1170 | 1908 | 1909 | 2732 | 2733 | immunoglobulin lambda constant 2 | OTTHUMG00000030352 | See tables 3 & 4 |
| 1171 | 1910 | 1911 | 2734 | 2735 | immunoglobulin lambda constant 2 | OTTHUMG00000030352 | See tables 3 & 4 |
| 1172 | 1912 | 1913 | 2736 | 2737 | OTTHUMG00000030870, CTA-503F6.1 | OTTHUMG00000030870 | See tables 3 & 4 |
| 1173 | 1914 | 1915 | 2738 | 2739 | Lactosylceramide 4-alpha- | ENSG00000128274 | See tables 3 & 4 |
| | | | | | galactosyltransferase (EC 2.4.1.228) | | |
| 1174 | 1916 | 1917 | 2740 | 2741 | OTTHUMG00000030966 | OTTHUMG00000030966 | See tables 3 & 4 |
| 1175 | 1918 | 1919 | 2742 | 2743 | Cold shock domain protein C2 (RNA- | ENSG00000172346 | See tables 3 & 4 |
| | | | | | binding protein PIPPin) | | |
| 1176 | 1920 | 1921 | 2744 | 2745 | GAS2-like protein 1 (Growth arrest-specific | ENSG00000185340 | See tables 3 & 4 |
| | | | | | 2-like 1) (GAS2-related protein on | | |
| | | | | | chromosome 22) (GAR22 protein), GAS2L1 | | |
| 1177 | 1922 | 1923 | 2746 | 2747 | BAI1-associated protein 2-like 2 | ENSG00000128298 | See tables 3 & 4 |
| 1178 | 1924 | 1925 | 2748 | 2749 | ENSG00000197182 | ENSG00000197182 | See tables 3 & 4 |
| 1179 | 1926 | 1927 | 2750 | 2751 | OTTHUMG00000030991, LL22NC03- | OTTHUMG00000030991 | See tables 3 & 4 |
| | | | | | 75B3.6 | | |
| 1180 | 1928 | 1929 | 2752 | 2753 | Reticulon 4 receptor precursor (Nogo | ENSG00000040608 | See tables 3 & 4 |
| | | | | | receptor) (NgR) (Nogo-66 receptor) | | |
| 1181 | 1930 | 1931 | 2754 | 2755 | Smoothelin; SMTN | ENSG00000183963 | See tables 3 & 4 |
| 1182 | 1932 | 1933 | 2756 | 2757 | solute carrier family 35, member E4 | ENSG00000100036 | See tables 3 & 4 |
| 1183 | 1934 | 1935 | 2758 | 2759 | Protein C22orf13 (Protein LLN4) | ENSG00000138867 | See tables 3 & 4 |
| 1184 | 1936 | 1937 | 2760 | 2761 | No gene associated | | See tables 3 & 4 |
| 1185 | 1938 | 1939 | 2762 | 2763 | Histone | ENSG00000196966 | See tables 3 & 4 |
| 1186 | 1940 | 1941 | 2764 | 2765 | Gamma-aminobutyric-acid receptor rho-1 | ENSG00000146276 | See tables 3 & 4 |
| | | | | | subunit precursor (GABA(A) receptor). | | |
| 1187 | 1942 | 1943 | 2766 | 2767 | OTTHUMG00000015693, RP11-12A2.3 | OTTHUMG00000015693 | See tables 3 & 4 |
| 1188 | 1944 | 1945 | 2768 | 2769 | OTTHUMG00000015697 | OTTHUMG00000015697 | See tables 3 & 4 |
| 1189 | 1946 | 1947 | 2770 | 2771 | OTTHUMG00000014289 | OTTHUMG00000014289 | See tables 3 & 4 |
| 1190 | 1948 | 1949 | 2772 | 2773 | ENSG00000178289 | ENSG00000178289 | See tables 3 & 4 |
| 1191 | 1950 | 1951 | 2774 | 2775 | Forkhead box protein O3A, | ENSG00000118689 | See tables 3 & 4 |
| 1192 | 1952 | 1953 | 2776 | 2777 | nuclear receptor coactivator 7 | ENSG00000111912 | See tables 3 & 4 |
| 1193 | 1954 | 1955 | 2778 | 2779 | OTTHUMG00000015043 | OTTHUMG00000015043 | See tables 3 & 4 |
| 1194 | 1956 | 1957 | 2780 | 2781 | chromosome 6 open reading frame 190 | OTTHUMG00000015534 | See tables 3 & 4 |
| 1195 | 1958 | 1959 | 2782 | 2783 | phosphatase and actin regulator 2 | OTTHUMG00000015732 | See tables 3 & 4 |
| 1196 | 1960 | 1961 | 2784 | 2785 | High mobility group protein HMG-I/HMG-Y | ENSG00000137309 | See tables 3 & 4 |
| | | | | | (HMG-I(Y)) (High mobility group AT-hook | | |
| | | | | | 1) (High mobility group protein A1), | | |
| 1197 | 1962 | 1963 | 2786 | 2787 | Pantetheinase precursor (EC 3.5.1.—), | ENSG00000112299 | See tables 3 & 4 |
| | | | | | ENSG00000112299, VNN1 | | |
| 1198 | 1964 | 1965 | 2788 | 2789 | histone H2A | ENSG00000164508 | See tables 3 & 4 |
| 1199 | 1966 | 1967 | 2790 | 2791 | transcription factor AP-2 alpha (activating | OTTHUMG00000014235 | See tables 3 & 4 |
| | | | | | enhancer binding protein 2 alpha) | | |
| 1200 | 1968 | 1969 | 2792 | 2793 | N-acetyllactosaminide beta-1,6-N- | ENSG00000111846 | See tables 3 & 4 |
| | | | | | acetylglucosaminyl-transferase (EC | | |
| | | | | | 2.4.1.150), ENSG00000111846, GCNT2 | | |
| 1201 | 1970 | 1971 | 2794 | 2795 | No gene associated | | See tables 3 & 4 |
| 1202 | 1972 | 1973 | 2796 | 2797 | No gene associated | | See tables 3 & 4 |
| 1203 | 1974 | 1975 | 2798 | 2799 | No gene associated | | See tables 3 & 4 |
| 1204 | 1976 | 1977 | 2800 | 2801 | No gene associated | | See tables 3 & 4 |
| 1205 | 1978 | 1979 | 2802 | 2803 | No gene associated | | See tables 3 & 4 |
| 1206 | 1980 | 1981 | 2804 | 2805 | No gene associated | | See tables 3 & 4 |
| 1207 | 1982 | 1983 | 2806 | 2807 | No gene associated | | See tables 3 & 4 |
| 1208 | 1984 | 1985 | 2808 | 2809 | No gene associated | | See tables 3 & 4 |
| 1209 | 1986 | 1987 | 2810 | 2811 | No gene associated | | See tables 3 & 4 |
| 1210 | 1988 | 1989 | 2812 | 2813 | No gene associated | | See tables 3 & 4 |
| 1211 | 1990 | 1991 | 2814 | 2815 | No description | OTTHUMG00000031920 | See tables 3 & 4 |
| 1212 | 1992 | 1993 | 2816 | 2817 | No gene associated | | See tables 3 & 4 |
| 1213 | 1994 | 1995 | 2818 | 2819 | No gene associated | | See tables 3 & 4 |
| 1214 | 1996 | 1997 | 2820 | 2821 | No gene associated | | See tables 3 & 4 |
| 1215 | 1998 | 1999 | 2822 | 2823 | No gene associated | | See tables 3 & 4 |
| 1216 | 2000 | 2001 | 2824 | 2825 | No gene associated | | See tables 3 & 4 |
| 1217 | 2002 | 2003 | 2826 | 2827 | No gene associated | | See tables 3 & 4 |
| 1218 | 2004 | 2005 | 2828 | 2829 | OTTHUMG00000032045 | OTTHUMG00000032045 | See tables 3 & 4 |
| 1219 | 2006 | 2007 | 2830 | 2831 | No gene associated | | See tables 3 & 4 |
| 1220 | 2008 | 2009 | 2832 | 2833 | No gene associated | | See tables 3 & 4 |
| 1221 | 2010 | 2011 | 2834 | 2835 | No gene associated | | See tables 3 & 4 |
| 1222 | 2012 | 2013 | 2836 | 2837 | OTTHUMG00000032221 | OTTHUMG00000032221 | See tables 3 & 4 |
| 1223 | 2014 | 2015 | 2838 | 2839 | TIMP3 | ENSG00000100234 | See tables 3 & 4 |
| 1224 | 2016 | 2017 | 2840 | 2841 | No gene associated | | See tables 3 & 4 |
| 1225 | 2018 | 2019 | 2842 | 2843 | No gene associated | | See tables 3 & 4 |
| 1226 | 2020 | 2021 | 2844 | 2845 | No gene associated | | See tables 3 & 4 |
| 1227 | 2022 | 2023 | 2846 | 2847 | No gene associated | | See tables 3 & 4 |
| 1228 | 2024 | 2025 | 2848 | 2849 | no gene associated | | See tables 3 & 4 |
| 1229 | 2026 | 2027 | 2850 | 2851 | No gene associated | | See tables 3 & 4 |
| 1230 | 2028 | 2029 | 2852 | 2853 | No gene associated | | See tables 3 & 4 |
| 1231 | 2030 | 2031 | 2854 | 2855 | No gene associated | | See tables 3 & 4 |
| 1232 | 2032 | 2033 | 2856 | 2857 | No gene associated | | See tables 3 & 4 |
| 1233 | 2034 | 2035 | 2858 | 2859 | No gene associated | | See tables 3 & 4 |
| 1234 | 2036 | 2037 | 2860 | 2861 | No gene associated | | See tables 3 & 4 |
| 1235 | 2038 | 2039 | 2862 | 2863 | sorting nexin 5 | OTTHUMG00000031953 | See tables 3 & 4 |
| 1236 | 2040 | 2041 | 2864 | 2865 | Probable D-tyrosyl-tRNA(Tyr) deacylase | ENSG00000125821 | See tables 3 & 4 |
| | | | | | (EC 3.1.—.—) | | |
| 1237 | 2042 | 2043 | 2866 | 2867 | solute carrier family 24 | OTTHUMG00000031993 | See tables 3 & 4 |
| | | | | | (sodiumVpotassiumVcalcium exchanger), | | |
| | | | | | member 3, OTTHUMG00000031993, | | |
| | | | | | SLC24A3 | | |
| 1238 | 2044 | 2045 | 2868 | 2869 | ENSG00000089101 | ENSG00000089101 | See tables 3 & 4 |
| 1239 | 2046 | 2047 | 2870 | 2871 | RNA-binding protein Raly (hnRNP | ENSG00000125970 | See tables 3 & 4 |
| | | | | | associated with lethal yellow homolog), D; | | |
| | | | | | RALY | | |
| 1240 | 2048 | 2049 | 2872 | 2873 | Protein phosphatase 1 regulatory inhibitor | ENSG00000101445 | See tables 3 & 4 |
| | | | | | subunit 16B (TGF-beta-inhibited membrane- | | |
| | | | | | associated protein) (hTIMAP) (CAAX box | | |
| | | | | | protein TIMAP) (Ankyrin repeat domain | | |
| | | | | | protein 4) | | |
| 1241 | 2050 | 2051 | 2874 | 2875 | protein tyrosine phosphatase, receptor type, T | OTTHUMG00000033040 | See tables 3 & 4 |
| 1242 | 2052 | 2053 | 2876 | 2877 | protein tyrosine phosphatase, receptor type, T | OTTHUMG00000033040 | See tables 3 & 4 |
| 1243 | 2054 | 2055 | 2878 | 2879 | protein tyrosine phosphatase, receptor type, T | OTTHUMG00000033040 | See tables 3 & 4 |
| 1244 | 2056 | 2057 | 2880 | 2881 | Receptor-type tyrosine-protein phosphatase T | ENSG00000196090 | See tables 3 & 4 |
| | | | | | precursor (EC 3.1.3.48) (R-PTP-T) (RPTP- | | |
| | | | | | rho) | | |
| 1245 | 2058 | 2059 | 2882 | 2883 | cadherin-like 22 | OTTHUMG00000033073 | See tables 3 & 4 |
| 1246 | 2060 | 2061 | 2884 | 2885 | potassium voltage-gated channel, Shab- | OTTHUMG00000033051 | See tables 3 & 4 |
| | | | | | related subfamily, member 1 | | |
| 1247 | 2062 | 2063 | 2886 | 2887 | potassium voltage-gated channel, Shab- | OTTHUMG00000033051 | See tables 3 & 4 |
| | | | | | related subfamily, member 1 | | |
| 1248 | 2064 | 2065 | 2888 | 2889 | Zinc finger protein SNAI1 (Snail protein | ENSG00000124216 | See tables 3 & 4 |
| | | | | | homolog) (Sna protein) | | |
| 1249 | 2066 | 2067 | 2890 | 2891 | Cadherin-4 precursor (Retinal-cadherin) (R- | ENSG00000179242 | See tables 3 & 4 |
| | | | | | cadherin) (R-CAD) | | |
| 1250 | 2068 | 2069 | 2892 | 2893 | cadherin 4, type 1, R-cadherin (retinal) | OTTHUMG00000032890 | See tables 3 & 4 |
| 1251 | 2070 | 2071 | 2894 | 2895 | Cadherin-4 precursor (Retinal-cadherin) (R- | ENSG00000179242 | See tables 3 & 4 |
| | | | | | cadherin) (R-CAD) | | |
| 1252 | 2072 | 2073 | 2896 | 2897 | Metalloproteinase inhibitor 3 precursor | | See tables 3 & 4 |
| | | | | | (TIMP-3) (Tissue inhibitor of | | |
| | | | | | metalloproteinases-3) (MIG-5 protein). | | |
| 1253 | 2074 | 2075 | 2898 | 2899 | Tubulin alpha-8 chain (Alpha-tubulin 8) | ENSG00000070490 | See tables 3 & 4 |
| 1254 | 2076 | 2077 | 2900 | 2901 | No gene associated | | See tables 3 & 4 |
| 1255 | 2078 | 2079 | 2902 | 2903 | No gene associated | | See tables 3 & 4 |

TABLE 3
Characteristic methylation value ranges of tissue markers according to the present invention

| | | | | Embryonic | | |
|---|---|---|---|---|---|---|
| SEQ ID | CD4 T- | CD8 T- | Embryonic | Skeletal | | Heart |
| NO: Genomic | lymphocyte | lymphocyte | Liver | Muscle | Fibroblast | Muscle |
| 844 | 75-100% | 75-100% | 75-100% | 75-100% | 75-100% | 75-100% |
| 845 | 75-100% | 75-100% | 75-100% | 75-100% | 75-100% | 75-100% |
| 846 | 75-100% | 75-100% | 75-100% | 75-100% | 75-100% | 75-100% |
| 847 | 75-100% | 75-100% | 0-25% | 0-25% | 0-25% | 0-25% |
| 848 | 0-25% | 0-25% | 75-100% | 75-100% | 75-100% | 75-100% |
| 849 | 75-100% | 75-100% | 75-100% | 75-100% | 75-100% | 75-100% |
| 850 | 75-100% | 75-100% | 75-100% | 75-100% | 75-100% | 75-100% |
| 851 | 75-100% | 75-100% | 75-100% | 0-25% | 75-100% | 75-100% |
| 852 | 75-100% | 75-100% | 75-100% | 75-100% | 75-100% | 75-100% |
| 853 | 25-75% | 25-75% | 25-75% | 25-75% | 0-25% | 25-75% |
| 854 | 0-25% | 0-25% | 0-25% | 0-25% | 0-25% | 0-25% |
| 855 | 75-100% | 75-100% | 75-100% | 25-75% | 75-100% | 25-75% |
| 856 | 75-100% | 75-100% | 25-75% | 25-75% | 25-75% | 25-75% |
| 857 | 25-75% | 25-75% | 0-25% | 0-25% | 0-25% | 0-25% |
| 858 | 75-100% | 75-100% | 75-100% | 75-100% | 75-100% | 75-100% |
| 859 | 75-100% | 75-100% | 75-100% | 75-100% | 75-100% | 75-100% |
| 860 | 0-25% | 0-25% | 0-25% | 75-100% | 75-100% | 25-75% |
| 861 | 75-100% | 75-100% | 75-100% | 75-100% | 75-100% | 25-75% |
| 862 | 75-100% | 75-100% | 75-100% | 75-100% | 75-100% | 75-100% |
| 863 | 75-100% | 75-100% | 75-100% | 75-100% | 75-100% | 75-100% |
| 864 | 75-100% | 75-100% | 75-100% | 75-100% | 75-100% | 75-100% |
| 865 | 75-100% | 75-100% | 75-100% | 75-100% | 75-100% | 75-100% |
| 866 | 75-100% | 75-100% | 75-100% | 75-100% | 75-100% | 75-100% |
| 867 | 75-100% | 75-100% | 75-100% | 75-100% | 75-100% | 75-100% |
| 868 | 75-100% | 75-100% | 75-100% | 75-100% | 75-100% | 75-100% |
| 869 | 75-100% | 75-100% | 25-75% | 25-75% | 25-75% | 25-75% |
| 870 | 25-75% | 25-75% | 25-75% | 25-75% | 25-75% | 25-75% |
| 871 | 75-100% | 75-100% | 75-100% | 75-100% | 0-25% | 75-100% |
| 872 | 75-100% | 75-100% | 75-100% | 25-75% | 75-100% | 75-100% |
| 873 | 75-100% | 75-100% | 25-75% | 25-75% | 25-75% | 25-75% |
| 874 | 75-100% | 75-100% | 75-100% | 75-100% | 75-100% | 75-100% |
| 875 | 75-100% | 75-100% | 75-100% | 25-75% | 75-100% | 75-100% |
| 876 | 75-100% | 75-100% | 0-25% | 0-25% | 0-25% | 0-25% |
| 877 | 75-100% | 75-100% | 75-100% | 75-100% | 0-25% | 75-100% |
| 878 | 75-100% | 75-100% | 75-100% | 75-100% | 75-100% | 75-100% |
| 879 | 25-75% | 25-75% | 25-75% | 25-75% | 25-75% | 25-75% |
| 880 | 0-25% | 0-25% | 75-100% | 75-100% | 75-100% | 75-100% |
| 881 | 25-75% | 25-75% | 25-75% | 25-75% | 75-100% | 75-100% |
| 882 | 0-25% | 0-25% | 75-100% | 75-100% | 75-100% | 75-100% |
| 883 | 0-25% | 0-25% | 75-100% | 75-100% | 75-100% | 75-100% |
| 884 | 75-100% | 75-100% | 75-100% | 75-100% | 75-100% | 75-100% |
| 885 | 75-100% | 75-100% | 25-75% | 25-75% | 25-75% | 25-75% |
| 886 | 75-100% | 75-100% | 75-100% | 75-100% | 75-100% | 75-100% |
| 887 | 75-100% | 75-100% | 75-100% | 75-100% | 75-100% | 75-100% |
| 888 | 75-100% | 75-100% | 75-100% | 25-75% | 75-100% | 75-100% |
| 889 | 0-25% | 0-25% | 75-100% | 75-100% | 75-100% | 75-100% |
| 890 | 75-100% | 75-100% | 0-25% | 75-100% | 75-100% | 75-100% |
| 891 | 75-100% | 75-100% | 75-100% | 75-100% | 75-100% | 75-100% |
| 892 | 75-100% | 75-100% | 75-100% | 75-100% | 75-100% | 75-100% |
| 893 | 75-100% | 75-100% | 75-100% | 75-100% | 25-75% | 75-100% |
| 894 | 0-25% | 0-25% | 25-75% | 25-75% | 25-75% | 25-75% |
| 895 | 75-100% | 75-100% | 75-100% | 75-100% | 75-100% | 75-100% |
| 896 | 75-100% | 75-100% | 75-100% | 0-25% | 0-25% | 0-25% |
| 897 | 75-100% | 75-100% | 75-100% | 75-100% | 75-100% | 75-100% |
| 898 | 75-100% | 75-100% | 25-75% | 25-75% | 25-75% | 25-75% |
| 899 | 75-100% | 75-100% | 25-75% | 25-75% | 0-25% | 25-75% |
| 900 | 75-100% | 75-100% | 75-100% | 75-100% | 75-100% | 75-100% |
| 901 | 0-25% | 0-25% | 0-25% | 0-25% | 0-25% | 0-25% |
| 902 | 75-100% | 75-100% | 75-100% | 75-100% | 25-75% | 25-75% |
| 903 | 75-100% | 75-100% | 75-100% | 75-100% | 75-100% | 75-100% |
| 904 | 75-100% | 75-100% | 75-100% | 75-100% | 25-75% | 75-100% |
| 905 | 0-25% | 0-25% | 75-100% | 75-100% | 75-100% | 75-100% |
| 906 | 75-100% | 75-100% | 25-75% | 75-100% | 75-100% | 75-100% |
| 907 | 75-100% | 75-100% | 25-75% | 25-75% | 75-100% | 75-100% |
| 908 | 75-100% | 75-100% | 25-75% | 0-25% | 0-25% | 25-75% |
| 909 | 75-100% | 75-100% | 25-75% | 25-75% | 25-75% | 25-75% |
| 910 | 75-100% | 75-100% | 25-75% | 0-25% | 0-25% | 25-75% |
| 911 | 25-75% | 25-75% | 25-75% | 75-100% | 75-100% | 75-100% |
| 912 | 75-100% | 75-100% | 25-75% | 25-75% | 25-75% | 25-75% |
| 913 | 75-100% | 75-100% | 25-75% | 25-75% | 25-75% | 25-75% |
| 914 | 75-100% | 75-100% | 25-75% | 25-75% | 25-75% | 25-75% |
| 915 | 75-100% | 75-100% | 25-75% | 0-25% | 0-25% | 25-75% |
| 916 | 75-100% | 75-100% | 75-100% | 0-25% | 0-25% | 0-25% |
| 917 | 0-25% | 0-25% | 0-25% | 0-25% | 0-25% | 0-25% |
| 918 | 75-100% | 75-100% | 75-100% | 25-75% | 25-75% | 75-100% |
| 919 | 75-100% | 75-100% | 75-100% | 25-75% | 75-100% | 75-100% |
| 920 | 0-25% | 0-25% | 25-75% | 25-75% | 25-75% | 25-75% |
| 921 | 0-25% | 0-25% | 75-100% | 75-100% | 75-100% | 75-100% |
| 922 | 75-100% | 75-100% | 0-25% | 0-25% | 0-25% | 0-25% |
| 923 | 75-100% | 75-100% | 0-25% | 0-25% | 0-25% | 0-25% |
| 924 | 0-25% | 0-25% | 25-75% | 25-75% | 75-100% | 75-100% |
| 925 | 75-100% | 75-100% | 75-100% | 75-100% | 75-100% | 75-100% |
| 926 | 75-100% | 75-100% | 75-100% | 75-100% | 75-100% | 75-100% |
| 927 | 75-100% | 75-100% | 25-75% | 25-75% | 25-75% | 25-75% |
| 928 | 0-25% | 0-25% | 75-100% | 75-100% | 75-100% | 75-100% |
| 929 | 75-100% | 75-100% | 75-100% | 75-100% | 75-100% | 75-100% |
| 930 | 75-100% | 75-100% | 75-100% | 75-100% | 75-100% | 75-100% |
| 931 | 75-100% | 75-100% | 75-100% | 75-100% | 75-100% | 75-100% |
| 932 | 25-75% | 25-75% | 25-75% | 25-75% | 25-75% | 25-75% |
| 933 | 25-75% | 25-75% | 25-75% | 25-75% | 25-75% | 25-75% |
| 934 | 75-100% | 75-100% | 75-100% | 75-100% | 75-100% | 75-100% |
| 935 | 75-100% | 75-100% | 75-100% | 75-100% | 0-25% | 75-100% |
| 936 | 0-25% | 0-25% | 75-100% | 0-25% | 0-25% | 0-25% |
| 937 | 75-100% | 75-100% | 75-100% | 75-100% | 75-100% | 75-100% |
| 938 | 75-100% | 75-100% | 75-100% | 75-100% | 75-100% | 75-100% |
| 939 | 0-25% | 0-25% | 0-25% | 0-25% | 0-25% | 0-25% |
| 940 | 75-100% | 75-100% | 25-75% | 75-100% | 75-100% | 75-100% |
| 941 | 75-100% | 75-100% | 75-100% | 75-100% | 75-100% | 75-100% |
| 942 | 25-75% | 75-100% | 75-100% | 75-100% | 75-100% | 25-75% |
| 943 | 75-100% | 75-100% | 75-100% | 75-100% | 75-100% | 75-100% |
| 944 | 25-75% | 25-75% | 75-100% | 75-100% | 75-100% | 75-100% |
| 945 | 75-100% | 75-100% | 75-100% | 75-100% | 75-100% | 75-100% |
| 946 | 0-25% | 0-25% | 75-100% | 75-100% | 75-100% | 75-100% |
| 947 | 75-100% | 75-100% | 75-100% | 75-100% | 75-100% | 75-100% |
| 948 | 75-100% | 75-100% | 75-100% | 75-100% | 75-100% | 75-100% |
| 949 | 75-100% | 75-100% | 25-75% | 25-75% | 25-75% | 25-75% |
| 950 | 0-25% | 0-25% | 25-75% | 25-75% | 25-75% | 25-75% |
| 951 | 75-100% | 75-100% | 75-100% | 75-100% | 75-100% | 75-100% |
| 952 | 75-100% | 75-100% | 75-100% | 75-100% | 75-100% | 75-100% |
| 953 | 0-25% | 0-25% | 75-100% | 75-100% | 75-100% | 75-100% |
| 954 | 75-100% | 75-100% | 75-100% | 75-100% | 75-100% | 75-100% |
| 955 | 75-100% | 75-100% | 75-100% | 75-100% | 0-25% | 75-100% |
| 956 | 0-25% | 0-25% | ND | 0-25% | 75-100% | 0-25% |
| 957 | 75-100% | 75-100% | 75-100% | 75-100% | 75-100% | 75-100% |
| 958 | 75-100% | 75-100% | 0-25% | 0-25% | 0-25% | 0-25% |
| 959 | 0-25% | 0-25% | 75-100% | 75-100% | 75-100% | 75-100% |
| 960 | 75-100% | 75-100% | 75-100% | 75-100% | 75-100% | 75-100% |
| 961 | 75-100% | 75-100% | 75-100% | 75-100% | 75-100% | 75-100% |
| 962 | 0-25% | 0-25% | 25-75% | 25-75% | 25-75% | 25-75% |
| 963 | 75-100% | 75-100% | 75-100% | 75-100% | 75-100% | 75-100% |
| 964 | 75-100% | 75-100% | 75-100% | 75-100% | 75-100% | 75-100% |
| 965 | 75-100% | 75-100% | 75-100% | 75-100% | 25-75% | 75-100% |
| 966 | 0-25% | 0-25% | 75-100% | 75-100% | 75-100% | 75-100% |
| 967 | 75-100% | 75-100% | 75-100% | 75-100% | 75-100% | 75-100% |
| 968 | 25-75% | 25-75% | 0-25% | 0-25% | 0-25% | 25-75% |
| 969 | 0-25% | 0-25% | 0-25% | 0-25% | 0-25% | 0-25% |
| 970 | 75-100% | 75-100% | 75-100% | 75-100% | 75-100% | 75-100% |
| 971 | 75-100% | 75-100% | 75-100% | 75-100% | 75-100% | 75-100% |
| 972 | 25-75% | 25-75% | 25-75% | 25-75% | 25-75% | 25-75% |
| 973 | 75-100% | 75-100% | 25-75% | 25-75% | 25-75% | 25-75% |
| 974 | 75-100% | 75-100% | 75-100% | 75-100% | 75-100% | 75-100% |
| 975 | 75-100% | 75-100% | 75-100% | 75-100% | 75-100% | 75-100% |
| 976 | 0-25% | 0-25% | 0-25% | 0-25% | 0-25% | 0-25% |
| 977 | 0-25% | 0-25% | 0-25% | 0-25% | 0-25% | 0-25% |
| 978 | 75-100% | 75-100% | 75-100% | 75-100% | 75-100% | 75-100% |
| 979 | 75-100% | 75-100% | 75-100% | 75-100% | 75-100% | 75-100% |
| 980 | 75-100% | 75-100% | 75-100% | 75-100% | 75-100% | 75-100% |
| 981 | 75-100% | 75-100% | 75-100% | 75-100% | 75-100% | 75-100% |
| 982 | 75-100% | 75-100% | 75-100% | 75-100% | 75-100% | 75-100% |
| 983 | 75-100% | 75-100% | 25-75% | 75-100% | 75-100% | 75-100% |
| 984 | 75-100% | 75-100% | 75-100% | 75-100% | 75-100% | 75-100% |
| 985 | 0-25% | 0-25% | 75-100% | 75-100% | 75-100% | 75-100% |
| 986 | 75-100% | 75-100% | 0-25% | 0-25% | 0-25% | 0-25% |
| 987 | 75-100% | 75-100% | 75-100% | 75-100% | 75-100% | 75-100% |
| 988 | 75-100% | 75-100% | 25-75% | 25-75% | 25-75% | 25-75% |
| 989 | 75-100% | 75-100% | 0-25% | 0-25% | 0-25% | 0-25% |
| 990 | 75-100% | 75-100% | 75-100% | 75-100% | 75-100% | 75-100% |
| 991 | 75-100% | 75-100% | 75-100% | 75-100% | 75-100% | 75-100% |
| 992 | 75-100% | 75-100% | 75-100% | 75-100% | 75-100% | 25-75% |
| 993 | 0-25% | 0-25% | 75-100% | 75-100% | 75-100% | 75-100% |
| 994 | 75-100% | 75-100% | 75-100% | 75-100% | 25-75% | 75-100% |
| 995 | 25-75% | 25-75% | 25-75% | 25-75% | 75-100% | 25-75% |
| 996 | 75-100% | 75-100% | 75-100% | 75-100% | 75-100% | 75-100% |
| 997 | 75-100% | 75-100% | ND | 25-75% | 0-25% | 25-75% |
| 998 | 75-100% | 75-100% | 75-100% | 75-100% | 25-75% | 75-100% |
| 999 | 0-25% | 0-25% | 0-25% | 0-25% | 0-25% | 0-25% |
| 1000 | 75-100% | 75-100% | 75-100% | 75-100% | 0-25% | 25-75% |
| 1001 | 75-100% | 75-100% | 75-100% | 75-100% | 75-100% | 75-100% |
| 1002 | 75-100% | 75-100% | 25-75% | 25-75% | 25-75% | 25-75% |
| 1003 | 25-75% | 25-75% | 25-75% | 25-75% | 75-100% | 25-75% |
| 1004 | 75-100% | 75-100% | 75-100% | 75-100% | 75-100% | 75-100% |
| 1005 | 0-25% | 0-25% | 75-100% | 75-100% | 75-100% | 75-100% |
| 1006 | 75-100% | 75-100% | 75-100% | 75-100% | 75-100% | 75-100% |
| 1007 | 0-25% | 0-25% | 0-25% | 0-25% | 75-100% | 0-25% |
| 1008 | 75-100% | 75-100% | ND | 75-100% | 75-100% | 75-100% |
| 1009 | 75-100% | 75-100% | 75-100% | 75-100% | 75-100% | 75-100% |
| 1010 | 0-25% | 0-25% | 0-25% | 0-25% | 0-25% | 25-75% |
| 1011 | 75-100% | 75-100% | 75-100% | 75-100% | 0-25% | 75-100% |
| 1012 | 75-100% | 75-100% | 75-100% | 75-100% | 75-100% | 75-100% |
| 1013 | 75-100% | 75-100% | 75-100% | 75-100% | 75-100% | 75-100% |
| 1014 | 75-100% | 75-100% | 75-100% | 75-100% | 75-100% | 75-100% |
| 1015 | 0-25% | 0-25% | 0-25% | 0-25% | 75-100% | 0-25% |
| 1016 | 75-100% | 75-100% | 75-100% | 75-100% | 75-100% | 75-100% |
| 1017 | 75-100% | 75-100% | 75-100% | 75-100% | 0-25% | 75-100% |
| 1018 | 75-100% | 75-100% | 75-100% | 75-100% | 75-100% | 75-100% |
| 1019 | 75-100% | 75-100% | 25-75% | 0-25% | 0-25% | 25-75% |
| 1020 | 0-25% | 0-25% | 0-25% | 0-25% | 0-25% | 0-25% |
| 1021 | 25-75% | 25-75% | 0-25% | 0-25% | 0-25% | 25-75% |
| 1022 | 0-25% | 0-25% | 0-25% | 0-25% | 0-25% | 0-25% |
| 1023 | 75-100% | 75-100% | 75-100% | 75-100% | 75-100% | 75-100% |
| 1024 | 75-100% | 75-100% | 25-75% | 0-25% | 0-25% | 25-75% |
| 1025 | 75-100% | 75-100% | 75-100% | 75-100% | 0-25% | 75-100% |
| 1026 | 75-100% | 75-100% | 75-100% | 75-100% | 75-100% | 25-75% |
| 1027 | 75-100% | 75-100% | 75-100% | 25-75% | 0-25% | 75-100% |
| 1028 | 75-100% | 75-100% | 0-25% | 0-25% | 0-25% | 0-25% |
| 1029 | 0-25% | 0-25% | 75-100% | 75-100% | 75-100% | 75-100% |
| 1030 | 75-100% | 75-100% | 75-100% | 75-100% | 25-75% | 75-100% |
| 1031 | 75-100% | 75-100% | 75-100% | 75-100% | 75-100% | 75-100% |
| 1032 | 75-100% | 75-100% | 75-100% | 75-100% | 25-75% | 75-100% |
| 1033 | 75-100% | 75-100% | 75-100% | 75-100% | 75-100% | 75-100% |
| 1034 | 25-75% | 75-100% | 75-100% | 75-100% | 75-100% | 75-100% |
| 1035 | 75-100% | 75-100% | 75-100% | 75-100% | 75-100% | 75-100% |
| 1036 | 75-100% | 75-100% | 75-100% | 75-100% | 75-100% | 75-100% |
| 1037 | 75-100% | 75-100% | 75-100% | 75-100% | 75-100% | 75-100% |
| 1038 | 0-25% | 0-25% | 75-100% | 75-100% | 75-100% | 75-100% |
| 1039 | 75-100% | 75-100% | 75-100% | 75-100% | 75-100% | 75-100% |
| 1040 | 75-100% | ND | ND | ND | 0-25% | 75-100% |
| 1041 | 75-100% | 75-100% | 75-100% | 75-100% | 0-25% | 75-100% |
| 1042 | 75-100% | 75-100% | 75-100% | 75-100% | 0-25% | 75-100% |
| 1043 | 75-100% | 75-100% | 75-100% | 25-75% | 75-100% | 75-100% |
| 1044 | 0-25% | 0-25% | 0-25% | 0-25% | 0-25% | 0-25% |
| 1045 | 25-75% | 25-75% | 25-75% | 25-75% | 25-75% | 25-75% |
| 1046 | 75-100% | 75-100% | 75-100% | 75-100% | 75-100% | 25-75% |
| 1047 | 25-75% | 25-75% | 25-75% | 25-75% | 25-75% | 25-75% |
| 1048 | 75-100% | 75-100% | 75-100% | 75-100% | 0-25% | 75-100% |
| 1049 | 75-100% | 75-100% | 75-100% | 75-100% | 75-100% | 75-100% |
| 1050 | 0-25% | 0-25% | 0-25% | 0-25% | 0-25% | 75-100% |
| 1051 | 75-100% | 75-100% | 75-100% | 75-100% | 75-100% | 75-100% |
| 1052 | 75-100% | 75-100% | 75-100% | 25-75% | 75-100% | 75-100% |
| 1053 | 75-100% | 75-100% | 75-100% | 25-75% | 25-75% | 25-75% |
| 1054 | 0-25% | 0-25% | 0-25% | 0-25% | 0-25% | 0-25% |
| 1055 | 75-100% | 75-100% | 75-100% | 25-75% | 75-100% | 75-100% |
| 1056 | 75-100% | 75-100% | 75-100% | 75-100% | 75-100% | 75-100% |
| 1057 | 75-100% | 75-100% | 25-75% | 25-75% | 0-25% | 75-100% |
| 1058 | 75-100% | 75-100% | 75-100% | 75-100% | 75-100% | 75-100% |
| 1059 | 75-100% | 75-100% | 75-100% | 75-100% | 75-100% | 75-100% |
| 1060 | 25-75% | 25-75% | 25-75% | 25-75% | 25-75% | 25-75% |
| 1061 | 75-100% | 75-100% | 75-100% | 75-100% | 25-75% | 75-100% |
| 1062 | 75-100% | 75-100% | 75-100% | 75-100% | 0-25% | 75-100% |
| 1063 | 75-100% | 75-100% | 25-75% | 25-75% | 25-75% | 25-75% |
| 1064 | 0-25% | 0-25% | 0-25% | 0-25% | 0-25% | 0-25% |
| 1065 | 75-100% | 25-75% | 25-75% | 25-75% | 25-75% | 25-75% |
| 1066 | 75-100% | 75-100% | 75-100% | 75-100% | 75-100% | 75-100% |
| 1067 | 75-100% | 75-100% | 75-100% | 75-100% | 25-75% | 75-100% |
| 1068 | 25-75% | 0-25% | 0-25% | 0-25% | 0-25% | 0-25% |
| 1069 | 75-100% | 75-100% | 75-100% | 75-100% | 25-75% | 75-100% |
| 1070 | 25-75% | 25-75% | 75-100% | 75-100% | 0-25% | 75-100% |
| 1071 | 75-100% | 75-100% | 75-100% | 75-100% | 25-75% | 75-100% |
| 1072 | 75-100% | 75-100% | 75-100% | 75-100% | 0-25% | 75-100% |
| 1073 | 75-100% | 75-100% | 75-100% | 75-100% | 0-25% | 75-100% |
| 1074 | 75-100% | 75-100% | 75-100% | 75-100% | 0-25% | 75-100% |
| 1075 | 75-100% | 75-100% | 75-100% | 75-100% | 75-100% | 75-100% |
| 1076 | 75-100% | 75-100% | 75-100% | 75-100% | 0-25% | 75-100% |
| 1077 | 75-100% | 75-100% | 75-100% | 75-100% | 25-75% | 75-100% |
| 1078 | 75-100% | 75-100% | 75-100% | 25-75% | 0-25% | 75-100% |
| 1079 | 25-75% | 25-75% | 75-100% | 75-100% | 0-25% | 75-100% |
| 1080 | 75-100% | 75-100% | 75-100% | 75-100% | 75-100% | 75-100% |
| 1081 | 75-100% | 75-100% | 75-100% | 25-75% | 25-75% | 25-75% |
| 1082 | 75-100% | 75-100% | 25-75% | 25-75% | 25-75% | 25-75% |
| 1083 | 25-75% | 75-100% | 75-100% | 75-100% | 75-100% | 75-100% |
| 1084 | 75-100% | 75-100% | 75-100% | 75-100% | 0-25% | 75-100% |
| 1085 | 75-100% | 75-100% | 75-100% | 25-75% | 75-100% | 75-100% |
| 1086 | 75-100% | 75-100% | 75-100% | 75-100% | 0-25% | 75-100% |
| 1087 | 75-100% | 75-100% | 75-100% | 75-100% | 75-100% | 75-100% |
| 1088 | 75-100% | 75-100% | 75-100% | 75-100% | 75-100% | 75-100% |
| 1089 | 75-100% | 75-100% | 75-100% | 25-75% | 75-100% | 75-100% |
| 1090 | 75-100% | 75-100% | 25-75% | 25-75% | 25-75% | 25-75% |
| 1091 | 75-100% | 75-100% | 75-100% | 75-100% | 25-75% | 75-100% |
| 1092 | 75-100% | 75-100% | 75-100% | 75-100% | 75-100% | 75-100% |
| 1093 | 75-100% | 75-100% | 75-100% | 75-100% | 75-100% | 75-100% |
| 1094 | 75-100% | 75-100% | 75-100% | 75-100% | 75-100% | 75-100% |
| 1095 | 75-100% | 75-100% | 75-100% | 75-100% | 75-100% | 75-100% |
| 1096 | 75-100% | 75-100% | 75-100% | ND | 25-75% | 25-75% |
| 1097 | 75-100% | 75-100% | 75-100% | 75-100% | 75-100% | 75-100% |
| 1098 | 75-100% | 75-100% | 75-100% | 75-100% | 75-100% | 75-100% |
| 1099 | 75-100% | 75-100% | 75-100% | 75-100% | 75-100% | 75-100% |
| 1100 | 75-100% | 75-100% | 25-75% | 25-75% | 0-25% | 0-25% |
| 1101 | 75-100% | 75-100% | 75-100% | 75-100% | 75-100% | 75-100% |
| 1102 | 75-100% | 75-100% | 75-100% | 75-100% | 75-100% | 75-100% |
| 1103 | 75-100% | 75-100% | 75-100% | 75-100% | 75-100% | 75-100% |
| 1104 | 75-100% | 75-100% | 25-75% | 25-75% | 25-75% | 25-75% |
| 1105 | 75-100% | 75-100% | 75-100% | 75-100% | 75-100% | 75-100% |
| 1106 | 75-100% | 75-100% | 25-75% | 25-75% | 25-75% | 25-75% |
| 1107 | 75-100% | 75-100% | 0-25% | 0-25% | 0-25% | 0-25% |
| 1108 | 0-25% | 0-25% | 0-25% | 0-25% | 0-25% | 0-25% |
| 1109 | 75-100% | 75-100% | 75-100% | 25-75% | 75-100% | 75-100% |
| 1110 | 0-25% | 0-25% | 0-25% | 75-100% | 75-100% | 75-100% |
| 1111 | 25-75% | 25-75% | 25-75% | 25-75% | 25-75% | 25-75% |
| 1112 | 0-25% | 0-25% | 0-25% | 0-25% | 0-25% | 0-25% |
| 1113 | 75-100% | 75-100% | 0-25% | 0-25% | 0-25% | 25-75% |
| 1114 | 0-25% | 0-25% | 75-100% | 75-100% | 75-100% | 75-100% |
| 1115 | 0-25% | 0-25% | 0-25% | 0-25% | 0-25% | 0-25% |
| 1116 | 75-100% | 75-100% | 25-75% | 25-75% | 25-75% | 25-75% |
| 1117 | 75-100% | 75-100% | 75-100% | 75-100% | 75-100% | 75-100% |
| 1118 | 25-75% | 25-75% | 25-75% | 25-75% | 25-75% | 25-75% |
| 1119 | 25-75% | 25-75% | 25-75% | 25-75% | 0-25% | 25-75% |
| 1120 | 75-100% | 75-100% | 75-100% | 75-100% | 75-100% | 75-100% |
| 1121 | 75-100% | 75-100% | 75-100% | 25-75% | 0-25% | 75-100% |
| 1122 | 75-100% | 75-100% | 0-25% | 0-25% | 0-25% | 0-25% |
| 1123 | 75-100% | 75-100% | 75-100% | 75-100% | 75-100% | 75-100% |
| 1124 | 75-100% | 75-100% | 75-100% | 75-100% | 75-100% | 75-100% |
| 1125 | 75-100% | 75-100% | 75-100% | 75-100% | 75-100% | 75-100% |
| 1126 | 0-25% | 0-25% | 25-75% | 75-100% | 75-100% | 75-100% |
| 1127 | 25-75% | 25-75% | 25-75% | 25-75% | 25-75% | 0-25% |
| 1128 | 0-25% | 0-25% | 75-100% | 75-100% | 75-100% | 75-100% |
| 1129 | 75-100% | 75-100% | 75-100% | 75-100% | 75-100% | 25-75% |
| 1130 | 75-100% | 75-100% | ND | ND | 25-75% | 75-100% |
| 1131 | 0-25% | 0-25% | 0-25% | 0-25% | 0-25% | 75-100% |
| 1132 | 0-25% | 0-25% | 75-100% | 75-100% | 75-100% | 75-100% |
| 1133 | 75-100% | 75-100% | 75-100% | 75-100% | 75-100% | 75-100% |
| 1134 | 25-75% | 25-75% | 75-100% | 75-100% | 75-100% | 75-100% |
| 1135 | 75-100% | 75-100% | 25-75% | 25-75% | 25-75% | 25-75% |
| 1136 | 75-100% | 75-100% | 75-100% | 75-100% | 75-100% | 75-100% |
| 1137 | 25-75% | 75-100% | 25-75% | 25-75% | 25-75% | 25-75% |
| 1138 | 75-100% | 75-100% | 75-100% | 75-100% | 75-100% | 75-100% |
| 1139 | 75-100% | 75-100% | 75-100% | 75-100% | 0-25% | 75-100% |
| 1140 | 75-100% | 75-100% | 75-100% | 75-100% | 0-25% | 75-100% |
| 1141 | 0-25% | 0-25% | 25-75% | 25-75% | 75-100% | 75-100% |
| 1142 | 75-100% | 75-100% | 75-100% | 75-100% | 75-100% | 75-100% |
| 1143 | 75-100% | 25-75% | 25-75% | 75-100% | 75-100% | 75-100% |

| SEQ ID | | | | | Skeletal | |
|---|---|---|---|---|---|---|
| NO: Genomic | Keratinocyte | Liver | Melanocyte | Placenta | Muscle | Sperm |
| 844 | 75-100% | 75-100% | 75-100% | 75-100% | 75-100% | 0-25% |
| 845 | 75-100% | 75-100% | 75-100% | 75-100% | 75-100% | 0-25% |
| 846 | 75-100% | 25-75% | 75-100% | 75-100% | 75-100% | 75-100% |
| 847 | 0-25% | 0-25% | 0-25% | 0-25% | 0-25% | 0-25% |
| 848 | 75-100% | 75-100% | 75-100% | 75-100% | 75-100% | 75-100% |
| 849 | 75-100% | 75-100% | 0-25% | 75-100% | 75-100% | 75-100% |
| 850 | 75-100% | 75-100% | 75-100% | 0-25% | 75-100% | 0-25% |
| 851 | 75-100% | 75-100% | 75-100% | 75-100% | 0-25% | 75-100% |
| 852 | 75-100% | 75-100% | 75-100% | 75-100% | 75-100% | 0-25% |
| 853 | 75-100% | 25-75% | 75-100% | 25-75% | 25-75% | 0-25% |
| 854 | 0-25% | 0-25% | 75-100% | 0-25% | 0-25% | 75-100% |
| 855 | 75-100% | 75-100% | 75-100% | 25-75% | 25-75% | 75-100% |
| 856 | 25-75% | 75-100% | 75-100% | 25-75% | 25-75% | 75-100% |
| 857 | 0-25% | 0-25% | 0-25% | 0-25% | 0-25% | 0-25% |
| 858 | 75-100% | 25-75% | 75-100% | 75-100% | 75-100% | 0-25% |
| 859 | 75-100% | 75-100% | 75-100% | 75-100% | 75-100% | 0-25% |
| 860 | 25-75% | 0-25% | 0-25% | 75-100% | 75-100% | 0-25% |
| 861 | 75-100% | 75-100% | 75-100% | 75-100% | 75-100% | 75-100% |
| 862 | 75-100% | 75-100% | 75-100% | 75-100% | 75-100% | 0-25% |
| 863 | 75-100% | 75-100% | 75-100% | 75-100% | 25-75% | 75-100% |
| 864 | 25-75% | 75-100% | 75-100% | 75-100% | 75-100% | 75-100% |
| 865 | 75-100% | 25-75% | 75-100% | 75-100% | 75-100% | 0-25% |
| 866 | 25-75% | 75-100% | 75-100% | 75-100% | 75-100% | 0-25% |
| 867 | 75-100% | 75-100% | 75-100% | 25-75% | 75-100% | 75-100% |
| 868 | 75-100% | 75-100% | 75-100% | 75-100% | 75-100% | 0-25% |
| 869 | 25-75% | 25-75% | 25-75% | 25-75% | 25-75% | 0-25% |
| 870 | 75-100% | 25-75% | 25-75% | 25-75% | 25-75% | 25-75% |
| 871 | 75-100% | 75-100% | 75-100% | 75-100% | 25-75% | 75-100% |
| 872 | 75-100% | 75-100% | ND | 75-100% | 25-75% | 75-100% |
| 873 | 25-75% | 25-75% | 25-75% | 25-75% | 25-75% | 75-100% |
| 874 | 75-100% | 75-100% | 0-25% | 75-100% | 75-100% | 75-100% |
| 875 | 75-100% | 75-100% | 75-100% | 75-100% | 75-100% | 75-100% |
| 876 | 0-25% | 0-25% | 0-25% | 0-25% | 0-25% | 0-25% |
| 877 | 75-100% | 75-100% | 75-100% | 75-100% | 75-100% | 75-100% |
| 878 | 0-25% | 75-100% | 75-100% | 75-100% | 75-100% | 75-100% |
| 879 | 25-75% | 75-100% | 25-75% | 25-75% | 25-75% | 75-100% |
| 880 | 75-100% | 75-100% | 75-100% | 75-100% | 75-100% | 75-100% |
| 881 | 0-25% | 25-75% | 75-100% | 25-75% | 25-75% | ND |
| 882 | 75-100% | 75-100% | 75-100% | 75-100% | 75-100% | 75-100% |
| 883 | 75-100% | 75-100% | 75-100% | 75-100% | 75-100% | 75-100% |
| 884 | 75-100% | 75-100% | 75-100% | 75-100% | 0-25% | 0-25% |
| 885 | 0-25% | 75-100% | 75-100% | 75-100% | 25-75% | 75-100% |
| 886 | 75-100% | 75-100% | 0-25% | 75-100% | 75-100% | 75-100% |
| 887 | 75-100% | 25-75% | 75-100% | 75-100% | 75-100% | 75-100% |
| 888 | 75-100% | 25-75% | 75-100% | 75-100% | 75-100% | 75-100% |
| 889 | 75-100% | 75-100% | 75-100% | 75-100% | 75-100% | 75-100% |
| 890 | 75-100% | 75-100% | 75-100% | 75-100% | 75-100% | 75-100% |
| 891 | 0-25% | 75-100% | 75-100% | 75-100% | 75-100% | 75-100% |
| 892 | 0-25% | 75-100% | 75-100% | 75-100% | 75-100% | 75-100% |
| 893 | 0-25% | 75-100% | 75-100% | 75-100% | 25-75% | 75-100% |
| 894 | 0-25% | 25-75% | 25-75% | 25-75% | 25-75% | 75-100% |
| 895 | 75-100% | 75-100% | 75-100% | 75-100% | 75-100% | 0-25% |
| 896 | 0-25% | 0-25% | 0-25% | 0-25% | 0-25% | 75-100% |
| 897 | 75-100% | 75-100% | 75-100% | 75-100% | 25-75% | 75-100% |
| 898 | 25-75% | 25-75% | 25-75% | 25-75% | 25-75% | 75-100% |
| 899 | 0-25% | 25-75% | 25-75% | 25-75% | 25-75% | 75-100% |
| 900 | 75-100% | 75-100% | 75-100% | 75-100% | 25-75% | 75-100% |
| 901 | 0-25% | 0-25% | 0-25% | 0-25% | 0-25% | 75-100% |
| 902 | 75-100% | 75-100% | 25-75% | 75-100% | 75-100% | 75-100% |
| 903 | 75-100% | 75-100% | 75-100% | 75-100% | 25-75% | 75-100% |
| 904 | 75-100% | 75-100% | 75-100% | 75-100% | 75-100% | 75-100% |
| 905 | 75-100% | 75-100% | 75-100% | 75-100% | 75-100% | 75-100% |
| 906 | 75-100% | 75-100% | 75-100% | 75-100% | 75-100% | 75-100% |
| 907 | 75-100% | 75-100% | 75-100% | 75-100% | 75-100% | 75-100% |
| 908 | 0-25% | 25-75% | 0-25% | 25-75% | 25-75% | 75-100% |
| 909 | 25-75% | 25-75% | 0-25% | 25-75% | 25-75% | 75-100% |
| 910 | 0-25% | 25-75% | 0-25% | 0-25% | 75-100% | 75-100% |
| 911 | 75-100% | 75-100% | 75-100% | 75-100% | 75-100% | 75-100% |
| 912 | 25-75% | 25-75% | 25-75% | 25-75% | 25-75% | 75-100% |
| 913 | 25-75% | 25-75% | 25-75% | 25-75% | 25-75% | 75-100% |
| 914 | 25-75% | 25-75% | 25-75% | 25-75% | 25-75% | 75-100% |
| 915 | 0-25% | 25-75% | 0-25% | 0-25% | 0-25% | 75-100% |
| 916 | 0-25% | 0-25% | 0-25% | 0-25% | 0-25% | 75-100% |
| 917 | 0-25% | 0-25% | 0-25% | 0-25% | 0-25% | 75-100% |
| 918 | 75-100% | 75-100% | 0-25% | 25-75% | 75-100% | 75-100% |
| 919 | 75-100% | 75-100% | 0-25% | 25-75% | 25-75% | 75-100% |
| 920 | 25-75% | 25-75% | 25-75% | 25-75% | 25-75% | 75-100% |
| 921 | 75-100% | 75-100% | 75-100% | 75-100% | 75-100% | 75-100% |
| 922 | 0-25% | 0-25% | 0-25% | 0-25% | 0-25% | 75-100% |
| 923 | 0-25% | 0-25% | 0-25% | 0-25% | 0-25% | 75-100% |
| 924 | 75-100% | 75-100% | 75-100% | 75-100% | 25-75% | 75-100% |
| 925 | 0-25% | 75-100% | 75-100% | 75-100% | 75-100% | 0-25% |
| 926 | 0-25% | 75-100% | 75-100% | 75-100% | 75-100% | 75-100% |
| 927 | 25-75% | 25-75% | 0-25% | 25-75% | 25-75% | 0-25% |
| 928 | 75-100% | 75-100% | 75-100% | 75-100% | 75-100% | 75-100% |
| 929 | 75-100% | 75-100% | 75-100% | 75-100% | 0-25% | 75-100% |
| 930 | 0-25% | 75-100% | 75-100% | 75-100% | 75-100% | 75-100% |
| 931 | 75-100% | 75-100% | 75-100% | 75-100% | 25-75% | 75-100% |
| 932 | 75-100% | 25-75% | 25-75% | 25-75% | 25-75% | 0-25% |
| 933 | 25-75% | 25-75% | 25-75% | 25-75% | 75-100% | 0-25% |
| 934 | 75-100% | 25-75% | 75-100% | 75-100% | 75-100% | 75-100% |
| 935 | 75-100% | 75-100% | 75-100% | 75-100% | 75-100% | 75-100% |
| 936 | 0-25% | 75-100% | 0-25% | 0-25% | 0-25% | ND |
| 937 | 0-25% | 75-100% | 75-100% | 75-100% | 75-100% | 75-100% |
| 938 | 75-100% | 75-100% | 75-100% | 75-100% | 75-100% | 0-25% |
| 939 | 0-25% | 75-100% | 0-25% | 0-25% | 0-25% | ND |
| 940 | 75-100% | 75-100% | 75-100% | 75-100% | 75-100% | 0-25% |
| 941 | 75-100% | 75-100% | 75-100% | 75-100% | 75-100% | 0-25% |
| 942 | 75-100% | 75-100% | 75-100% | 75-100% | 75-100% | 75-100% |
| 943 | 0-25% | 75-100% | 75-100% | 25-75% | 25-75% | 75-100% |
| 944 | 75-100% | 75-100% | 75-100% | 75-100% | 75-100% | 75-100% |
| 945 | 75-100% | 75-100% | 75-100% | 75-100% | 25-75% | 75-100% |
| 946 | 75-100% | 75-100% | 75-100% | 75-100% | 75-100% | 75-100% |
| 947 | 0-25% | 75-100% | 75-100% | 75-100% | 75-100% | 75-100% |
| 948 | 75-100% | 75-100% | 75-100% | 75-100% | 25-75% | 75-100% |
| 949 | 25-75% | 25-75% | 25-75% | 25-75% | 25-75% | 25-75% |
| 950 | 25-75% | 0-25% | 25-75% | 25-75% | 75-100% | 0-25% |
| 951 | 0-25% | 75-100% | 75-100% | 75-100% | 75-100% | 75-100% |
| 952 | 0-25% | 75-100% | 75-100% | 75-100% | 75-100% | 0-25% |
| 953 | 75-100% | 75-100% | 75-100% | 75-100% | 75-100% | 0-25% |
| 954 | 75-100% | 75-100% | 25-75% | 75-100% | 75-100% | 75-100% |
| 955 | 75-100% | 75-100% | 75-100% | 75-100% | 25-75% | 75-100% |
| 956 | 0-25% | 0-25% | 75-100% | 75-100% | 75-100% | 75-100% |
| 957 | 0-25% | 75-100% | 75-100% | 75-100% | 75-100% | 75-100% |
| 958 | 0-25% | 0-25% | 0-25% | 0-25% | 0-25% | 75-100% |
| 959 | 75-100% | 75-100% | 75-100% | 75-100% | 75-100% | 75-100% |
| 960 | 75-100% | 25-75% | 75-100% | 75-100% | 75-100% | 75-100% |
| 961 | 75-100% | 75-100% | 75-100% | 75-100% | 25-75% | 75-100% |
| 962 | 25-75% | 25-75% | 25-75% | 25-75% | 25-75% | 75-100% |
| 963 | 0-25% | 75-100% | 75-100% | 75-100% | 75-100% | 0-25% |
| 964 | 0-25% | 75-100% | 75-100% | 75-100% | 75-100% | 75-100% |
| 965 | 75-100% | 75-100% | 75-100% | 75-100% | 75-100% | 75-100% |
| 966 | 75-100% | 75-100% | ND | 75-100% | 75-100% | 75-100% |
| 967 | 0-25% | 75-100% | 75-100% | 75-100% | 75-100% | 75-100% |
| 968 | 0-25% | 75-100% | 0-25% | 0-25% | 0-25% | 75-100% |
| 969 | 0-25% | 0-25% | 0-25% | 25-75% | 0-25% | 0-25% |
| 970 | 0-25% | 75-100% | 75-100% | 75-100% | 75-100% | 75-100% |
| 971 | 75-100% | 0-25% | 75-100% | 75-100% | 75-100% | 75-100% |
| 972 | 0-25% | 25-75% | 25-75% | 25-75% | 25-75% | 0-25% |
| 973 | 0-25% | 25-75% | 25-75% | 25-75% | 25-75% | 0-25% |
| 974 | 75-100% | 75-100% | 75-100% | 75-100% | 75-100% | 0-25% |
| 975 | 75-100% | 75-100% | 75-100% | 75-100% | 25-75% | 75-100% |
| 976 | 0-25% | 0-25% | 25-75% | ND | 0-25% | 0-25% |
| 977 | 0-25% | 75-100% | 25-75% | 0-25% | 0-25% | 75-100% |
| 978 | 75-100% | 75-100% | 75-100% | 75-100% | 25-75% | 75-100% |
| 979 | 75-100% | 25-75% | 75-100% | 75-100% | 75-100% | 75-100% |
| 980 | 25-75% | 75-100% | 75-100% | 75-100% | 75-100% | 75-100% |
| 981 | 0-25% | 75-100% | 75-100% | 75-100% | 75-100% | 75-100% |
| 982 | 0-25% | 75-100% | 75-100% | 75-100% | 75-100% | 75-100% |
| 983 | 75-100% | 75-100% | 75-100% | 75-100% | 75-100% | 75-100% |
| 984 | 75-100% | 25-75% | 75-100% | 75-100% | 75-100% | |
| 985 | 75-100% | 25-75% | 75-100% | 75-100% | 75-100% | 75-100% |
| 986 | 0-25% | 0-25% | 0-25% | 0-25% | 0-25% | 0-25% |
| 987 | 0-25% | 25-75% | 75-100% | 75-100% | 75-100% | 75-100% |
| 988 | 25-75% | 25-75% | 25-75% | 25-75% | 25-75% | 75-100% |
| 989 | 0-25% | 0-25% | 0-25% | 0-25% | 0-25% | 75-100% |
| 990 | 0-25% | 75-100% | 75-100% | 75-100% | 75-100% | 75-100% |
| 991 | 75-100% | 75-100% | 75-100% | 75-100% | 75-100% | 0-25% |
| 992 | 0-25% | 25-75% | 25-75% | 25-75% | 25-75% | 75-100% |
| 993 | 75-100% | 75-100% | 75-100% | 75-100% | 75-100% | 75-100% |
| 994 | 75-100% | 75-100% | 75-100% | 75-100% | 75-100% | 75-100% |
| 995 | 0-25% | 75-100% | 75-100% | 75-100% | 25-75% | 75-100% |
| 996 | 0-25% | 75-100% | 75-100% | 75-100% | 75-100% | 0-25% |
| 997 | 0-25% | 25-75% | 25-75% | 25-75% | 25-75% | ND |
| 998 | 75-100% | 75-100% | 75-100% | 75-100% | 75-100% | 75-100% |
| 999 | 0-25% | 25-75% | 0-25% | 0-25% | 0-25% | 0-25% |
| 1000 | 75-100% | 75-100% | 75-100% | 75-100% | 25-75% | 75-100% |
| 1001 | 0-25% | 75-100% | 75-100% | 75-100% | 75-100% | 0-25% |
| 1002 | 0-25% | 25-75% | 25-75% | 25-75% | 25-75% | 75-100% |
| 1003 | 75-100% | 25-75% | 75-100% | 25-75% | 25-75% | 75-100% |
| 1004 | 75-100% | 75-100% | 75-100% | 75-100% | 25-75% | 0-25% |
| 1005 | 75-100% | 75-100% | 75-100% | 75-100% | 75-100% | 75-100% |
| 1006 | 0-25% | 75-100% | 75-100% | 75-100% | 75-100% | 75-100% |
| 1007 | 75-100% | 0-25% | 75-100% | 0-25% | 0-25% | 0-25% |
| 1008 | 75-100% | 75-100% | 75-100% | 75-100% | 25-75% | 75-100% |
| 1009 | 75-100% | 75-100% | 75-100% | 75-100% | 75-100% | 0-25% |
| 1010 | 0-25% | 0-25% | 0-25% | 0-25% | 0-25% | 0-25% |
| 1011 | 75-100% | 75-100% | 75-100% | 75-100% | 25-75% | 0-25% |
| 1012 | 75-100% | 75-100% | 75-100% | 75-100% | 75-100% | 0-25% |
| 1013 | 75-100% | 25-75% | 75-100% | 75-100% | 75-100% | 75-100% |
| 1014 | 75-100% | 25-75% | 75-100% | 75-100% | 75-100% | 75-100% |
| 1015 | 0-25% | 0-25% | 0-25% | 0-25% | 25-75% | 75-100% |
| 1016 | 75-100% | 75-100% | 75-100% | 75-100% | 25-75% | 75-100% |
| 1017 | 75-100% | 75-100% | 75-100% | 75-100% | 75-100% | 75-100% |
| 1018 | 0-25% | 75-100% | 75-100% | 75-100% | 75-100% | 75-100% |
| 1019 | 0-25% | 25-75% | 0-25% | 0-25% | 0-25% | 0-25% |
| 1020 | 75-100% | 0-25% | 0-25% | 0-25% | 0-25% | 0-25% |
| 1021 | 0-25% | 75-100% | 75-100% | 0-25% | 0-25% | 0-25% |
| 1022 | 0-25% | 75-100% | 0-25% | 0-25% | 0-25% | 0-25% |
| 1023 | 0-25% | 75-100% | 75-100% | 75-100% | 25-75% | 75-100% |
| 1024 | 25-75% | 25-75% | 25-75% | 0-25% | 0-25% | 0-25% |
| 1025 | 75-100% | 75-100% | 75-100% | 75-100% | 25-75% | 75-100% |
| 1026 | 75-100% | 75-100% | 75-100% | 75-100% | 75-100% | 75-100% |
| 1027 | 75-100% | 75-100% | 0-25% | 25-75% | 75-100% | 75-100% |
| 1028 | 0-25% | 0-25% | 0-25% | 0-25% | 0-25% | 75-100% |
| 1029 | 75-100% | 75-100% | 75-100% | 75-100% | 75-100% | 75-100% |
| 1030 | 75-100% | 25-75% | 75-100% | 75-100% | 25-75% | 75-100% |
| 1031 | 0-25% | 75-100% | 75-100% | 75-100% | 25-75% | 75-100% |
| 1032 | 75-100% | 75-100% | 75-100% | 75-100% | 75-100% | 75-100% |
| 1033 | 0-25% | 75-100% | 75-100% | 75-100% | 75-100% | 75-100% |
| 1034 | 0-25% | 75-100% | 75-100% | 75-100% | 75-100% | 75-100% |
| 1035 | 25-75% | 75-100% | 75-100% | 75-100% | 75-100% | 75-100% |
| 1036 | 25-75% | 75-100% | 75-100% | 75-100% | 75-100% | 75-100% |
| 1037 | 75-100% | 25-75% | 75-100% | 75-100% | 75-100% | 75-100% |
| 1038 | 75-100% | 75-100% | 75-100% | 75-100% | 75-100% | 75-100% |
| 1039 | 0-25% | 75-100% | 75-100% | 75-100% | 75-100% | 75-100% |
| 1040 | 75-100% | 75-100% | 0-25% | 0-25% | 75-100% | 75-100% |
| 1041 | 75-100% | 75-100% | 75-100% | 75-100% | 75-100% | 75-100% |
| 1042 | 75-100% | 75-100% | 75-100% | 75-100% | 75-100% | 75-100% |
| 1043 | 75-100% | 75-100% | 75-100% | 75-100% | 25-75% | 75-100% |
| 1044 | 75-100% | 75-100% | 0-25% | 0-25% | 0-25% | ND |
| 1045 | 75-100% | 25-75% | 25-75% | 25-75% | 25-75% | 75-100% |
| 1046 | 75-100% | 75-100% | 75-100% | 75-100% | 75-100% | 75-100% |
| 1047 | 25-75% | 75-100% | 25-75% | 25-75% | 25-75% | 75-100% |
| 1048 | 75-100% | 75-100% | 75-100% | 75-100% | 25-75% | 75-100% |
| 1049 | 75-100% | 75-100% | 0-25% | 75-100% | 75-100% | 75-100% |
| 1050 | 0-25% | 0-25% | 0-25% | 0-25% | 0-25% | 75-100% |
| 1051 | 75-100% | 25-75% | 75-100% | 75-100% | 75-100% | 75-100% |
| 1052 | 75-100% | 75-100% | 75-100% | 75-100% | 25-75% | 75-100% |
| 1053 | 25-75% | 75-100% | 75-100% | 75-100% | 0-25% | 75-100% |
| 1054 | 0-25% | 0-25% | 0-25% | 0-25% | 0-25% | 75-100% |
| 1055 | 75-100% | 75-100% | 75-100% | 75-100% | 25-75% | 75-100% |
| 1056 | 0-25% | 75-100% | 75-100% | 75-100% | 75-100% | 75-100% |
| 1057 | 75-100% | 75-100% | 75-100% | 25-75% | 25-75% | 0-25% |
| 1058 | 0-25% | 75-100% | 75-100% | 75-100% | 25-75% | 75-100% |
| 1059 | 0-25% | 75-100% | 75-100% | 25-75% | 25-75% | 75-100% |
| 1060 | 25-75% | 25-75% | 25-75% | ND | 75-100% | 75-100% |
| 1061 | 75-100% | 75-100% | 75-100% | 75-100% | 75-100% | 75-100% |
| 1062 | 75-100% | 75-100% | 75-100% | 75-100% | 25-75% | 75-100% |
| 1063 | 25-75% | 25-75% | 25-75% | 25-75% | 25-75% | 75-100% |
| 1064 | 75-100% | 0-25% | 0-25% | 0-25% | 0-25% | 75-100% |
| 1065 | 25-75% | 25-75% | 25-75% | 25-75% | 25-75% | 75-100% |
| 1066 | 0-25% | 75-100% | 75-100% | 75-100% | 75-100% | 75-100% |
| 1067 | 75-100% | 75-100% | 75-100% | 75-100% | 75-100% | 75-100% |
| 1068 | 0-25% | 0-25% | 0-25% | 0-25% | 0-25% | 75-100% |
| 1069 | 25-75% | 75-100% | 75-100% | 75-100% | 75-100% | 75-100% |
| 1070 | 0-25% | 75-100% | 75-100% | 75-100% | 75-100% | 75-100% |
| 1071 | 25-75% | 75-100% | 25-75% | 75-100% | 75-100% | 75-100% |
| 1072 | 75-100% | 75-100% | 75-100% | 75-100% | 75-100% | 0-25% |
| 1073 | 75-100% | 75-100% | 75-100% | 75-100% | 75-100% | 75-100% |
| 1074 | 75-100% | 75-100% | 75-100% | 75-100% | 75-100% | 75-100% |
| 1075 | 75-100% | 75-100% | 0-25% | 25-75% | 25-75% | 75-100% |
| 1076 | 75-100% | 75-100% | 75-100% | 75-100% | 75-100% | 75-100% |
| 1077 | 75-100% | 75-100% | 75-100% | 75-100% | 75-100% | 75-100% |
| 1078 | 75-100% | 75-100% | 75-100% | 75-100% | 25-75% | 75-100% |
| 1079 | 75-100% | 75-100% | 75-100% | 75-100% | 75-100% | 75-100% |
| 1080 | 0-25% | 75-100% | 75-100% | 75-100% | 75-100% | |
| 1081 | 0-25% | 75-100% | 75-100% | 75-100% | 25-75% | 75-100% |
| 1082 | 25-75% | 25-75% | 25-75% | 25-75% | 25-75% | 75-100% |
| 1083 | 75-100% | 75-100% | 75-100% | 75-100% | 75-100% | 75-100% |
| 1084 | 75-100% | 75-100% | 75-100% | 75-100% | 75-100% | 75-100% |
| 1085 | 75-100% | 75-100% | 75-100% | 75-100% | 75-100% | 75-100% |
| 1086 | 75-100% | 75-100% | 75-100% | 75-100% | 25-75% | 75-100% |
| 1087 | 75-100% | 75-100% | 0-25% | 75-100% | 75-100% | 75-100% |
| 1088 | 75-100% | 75-100% | 75-100% | 75-100% | 25-75% | 75-100% |
| 1089 | 75-100% | 75-100% | 75-100% | ND | 25-75% | ND |
| 1090 | 25-75% | 25-75% | 25-75% | 25-75% | 25-75% | 75-100% |
| 1091 | 75-100% | 75-100% | 75-100% | 75-100% | 75-100% | 75-100% |
| 1092 | 75-100% | 25-75% | 75-100% | 75-100% | 75-100% | 75-100% |
| 1093 | 0-25% | 75-100% | 75-100% | 75-100% | 75-100% | 75-100% |
| 1094 | 0-25% | 75-100% | 75-100% | 75-100% | 75-100% | 75-100% |
| 1095 | 75-100% | 75-100% | 75-100% | 75-100% | 0-25% | ND |
| 1096 | 25-75% | 25-75% | 25-75% | 25-75% | 25-75% | 0-25% |
| 1097 | 0-25% | 75-100% | 75-100% | 75-100% | 75-100% | 75-100% |
| 1098 | 0-25% | 75-100% | 75-100% | 75-100% | 75-100% | 75-100% |
| 1099 | 75-100% | 75-100% | 75-100% | 75-100% | 25-75% | 75-100% |
| 1100 | 0-25% | 25-75% | 0-25% | 0-25% | 25-75% | 0-25% |
| 1101 | 0-25% | 75-100% | 75-100% | 75-100% | 75-100% | 75-100% |
| 1102 | 75-100% | 75-100% | 0-25% | 75-100% | 75-100% | 75-100% |
| 1103 | 75-100% | 75-100% | 0-25% | 75-100% | 75-100% | 75-100% |
| 1104 | 25-75% | 75-100% | 25-75% | 25-75% | 0-25% | ND |
| 1105 | 75-100% | 75-100% | 25-75% | 75-100% | 75-100% | 75-100% |
| 1106 | 25-75% | 25-75% | 25-75% | 25-75% | 25-75% | 75-100% |
| 1107 | 0-25% | 0-25% | 0-25% | 0-25% | 0-25% | 75-100% |
| 1108 | 75-100% | 0-25% | 0-25% | 0-25% | 0-25% | ND |
| 1109 | 75-100% | 75-100% | 75-100% | 75-100% | 25-75% | 75-100% |
| 1110 | 75-100% | 75-100% | 75-100% | 75-100% | 75-100% | 75-100% |
| 1111 | 25-75% | 75-100% | 25-75% | 25-75% | 25-75% | 25-75% |
| 1112 | 0-25% | 0-25% | 75-100% | 0-25% | 0-25% | 75-100% |
| 1113 | 0-25% | 25-75% | 0-25% | 0-25% | 25-75% | 75-100% |
| 1114 | 75-100% | 75-100% | 75-100% | 75-100% | 75-100% | 75-100% |
| 1115 | 0-25% | 25-75% | 0-25% | 0-25% | 0-25% | 0-25% |
| 1116 | 25-75% | 25-75% | 25-75% | 25-75% | 25-75% | 75-100% |
| 1117 | 75-100% | 75-100% | 75-100% | 75-100% | 25-75% | 75-100% |
| 1118 | 75-100% | 25-75% | 25-75% | 25-75% | 25-75% | 75-100% |
| 1119 | 25-75% | 25-75% | 25-75% | 25-75% | 25-75% | ND |
| 1120 | 0-25% | 75-100% | 75-100% | 75-100% | 75-100% | 0-25% |
| 1121 | 75-100% | 75-100% | 75-100% | 75-100% | 25-75% | 75-100% |
| 1122 | 0-25% | 0-25% | 0-25% | 0-25% | 0-25% | 0-25% |
| 1123 | 0-25% | 75-100% | 75-100% | 75-100% | 75-100% | 75-100% |
| 1124 | 75-100% | 25-75% | 75-100% | 75-100% | 75-100% | 75-100% |
| 1125 | 75-100% | 75-100% | 75-100% | 75-100% | 75-100% | 0-25% |
| 1126 | 75-100% | 25-75% | 75-100% | 75-100% | 75-100% | 75-100% |
| 1127 | 75-100% | 25-75% | 25-75% | 25-75% | 0-25% | 0-25% |
| 1128 | 75-100% | 75-100% | 75-100% | 75-100% | 75-100% | 75-100% |
| 1129 | 75-100% | 75-100% | 75-100% | 75-100% | 75-100% | 75-100% |
| 1130 | 75-100% | 75-100% | 75-100% | ND | 75-100% | 75-100% |
| 1131 | 0-25% | 25-75% | 0-25% | 0-25% | 25-75% | 75-100% |
| 1132 | 75-100% | 0-25% | 75-100% | 75-100% | 75-100% | 75-100% |
| 1133 | 0-25% | 75-100% | 75-100% | 75-100% | 75-100% | 75-100% |
| 1134 | 0-25% | 75-100% | 75-100% | 75-100% | 75-100% | 75-100% |
| 1135 | 25-75% | 25-75% | 25-75% | 25-75% | 75-100% | 75-100% |
| 1136 | 75-100% | 25-75% | 75-100% | 75-100% | 75-100% | 75-100% |
| 1137 | 25-75% | 75-100% | 25-75% | 25-75% | 25-75% | 75-100% |
| 1138 | 0-25% | 75-100% | 75-100% | 75-100% | 75-100% | 75-100% |
| 1139 | 75-100% | 75-100% | 75-100% | 75-100% | 75-100% | 75-100% |
| 1140 | 0-25% | 75-100% | 75-100% | 75-100% | 75-100% | 75-100% |
| 1141 | 75-100% | 75-100% | 75-100% | 75-100% | 75-100% | 75-100% |
| 1142 | 75-100% | 25-75% | 75-100% | 75-100% | 75-100% | 75-100% |
| 1143 | 25-75% | 75-100% | 75-100% | 75-100% | 75-100% | 75-100% |

TABLE 4
Preferred tissue markers according to the present invention

| SEQ ID | |
|---|---|
| NO: | |
| (Genomic) | Tissue |
| 942 | CD4 T-lymphocyte |
| 1065 | CD4 T-lymphocyte |
| 1068 | CD4 T-lymphocyte |
| 1083 | CD4 T-lymphocyte |
| 847 | CD4 T-lymphocyte, CD8 T-lymphocyte |
| 848 | CD4 T-lymphocyte, CD8 T-lymphocyte |
| 857 | CD4 T-lymphocyte, CD8 T-lymphocyte |
| 869 | CD4 T-lymphocyte, CD8 T-lymphocyte |
| 873 | CD4 T-lymphocyte, CD8 T-lymphocyte |
| 876 | CD4 T-lymphocyte, CD8 T-lymphocyte |
| 880 | CD4 T-lymphocyte, CD8 T-lymphocyte |
| 882 | CD4 T-lymphocyte, CD8 T-lymphocyte |
| 883 | CD4 T-lymphocyte, CD8 T-lymphocyte |
| 889 | CD4 T-lymphocyte, CD8 T-lymphocyte |
| 898 | CD4 T-lymphocyte, CD8 T-lymphocyte |
| 899 | CD4 T-lymphocyte, CD8 T-lymphocyte |
| 905 | CD4 T-lymphocyte, CD8 T-lymphocyte |
| 912 | CD4 T-lymphocyte, CD8 T-lymphocyte |
| 913 | CD4 T-lymphocyte, CD8 T-lymphocyte |
| 914 | CD4 T-lymphocyte, CD8 T-lymphocyte |
| 920 | CD4 T-lymphocyte, CD8 T-lymphocyte |
| 921 | CD4 T-lymphocyte, CD8 T-lymphocyte |
| 922 | CD4 T-lymphocyte, CD8 T-lymphocyte |
| 923 | CD4 T-lymphocyte, CD8 T-lymphocyte |
| 924 | CD4 T-lymphocyte, CD8 T-lymphocyte |
| 928 | CD4 T-lymphocyte, CD8 T-lymphocyte |
| 944 | CD4 T-lymphocyte, CD8 T-lymphocyte |
| 946 | CD4 T-lymphocyte, CD8 T-lymphocyte |
| 949 | CD4 T-lymphocyte, CD8 T-lymphocyte |
| 953 | CD4 T-lymphocyte, CD8 T-lymphocyte |
| 958 | CD4 T-lymphocyte, CD8 T-lymphocyte |
| 959 | CD4 T-lymphocyte, CD8 T-lymphocyte |
| 962 | CD4 T-lymphocyte, CD8 T-lymphocyte |
| 966 | CD4 T-lymphocyte, CD8 T-lymphocyte |
| 973 | CD4 T-lymphocyte, CD8 T-lymphocyte |
| 985 | CD4 T-lymphocyte, CD8 T-lymphocyte |
| 986 | CD4 T-lymphocyte, CD8 T-lymphocyte |
| 988 | CD4 T-lymphocyte, CD8 T-lymphocyte |
| 989 | CD4 T-lymphocyte, CD8 T-lymphocyte |
| 993 | CD4 T-lymphocyte, CD8 T-lymphocyte |
| 997 | CD4 T-lymphocyte, CD8 T-lymphocyte |
| 1005 | CD4 T-lymphocyte, CD8 T-lymphocyte |
| 1019 | CD4 T-lymphocyte, CD8 T-lymphocyte |
| 1028 | CD4 T-lymphocyte, CD8 T-lymphocyte |
| 1029 | CD4 T-lymphocyte, CD8 T-lymphocyte |
| 1038 | CD4 T-lymphocyte, CD8 T-lymphocyte |
| 1063 | CD4 T-lymphocyte, CD8 T-lymphocyte |
| 1070 | CD4 T-lymphocyte, CD8 T-lymphocyte |
| 1082 | CD4 T-lymphocyte, CD8 T-lymphocyte |
| 1090 | CD4 T-lymphocyte, CD8 T-lymphocyte |
| 1100 | CD4 T-lymphocyte, CD8 T-lymphocyte |
| 1106 | CD4 T-lymphocyte, CD8 T-lymphocyte |
| 1107 | CD4 T-lymphocyte, CD8 T-lymphocyte |
| 1113 | CD4 T-lymphocyte, CD8 T-lymphocyte |
| 1114 | CD4 T-lymphocyte, CD8 T-lymphocyte |
| 1116 | CD4 T-lymphocyte, CD8 T-lymphocyte |
| 1122 | CD4 T-lymphocyte, CD8 T-lymphocyte |
| 1126 | CD4 T-lymphocyte, CD8 T-lymphocyte |
| 1128 | CD4 T-lymphocyte, CD8 T-lymphocyte |
| 1141 | CD4 T-lymphocyte, CD8 T-lymphocyte |
| 894 | CD4 T-lymphocyte, CD8 T-lymphocyte |
| 896 | CD4 T-lymphocyte, CD8 T-lymphocyte |
| 1110 | CD4 T-lymphocyte, CD8 T-lymphocyte |
| 911 | CD4 T-lymphocyte, CD8 T-lymphocyte |
| 1132 | CD4 T-lymphocyte, CD8 T-lymphocyte |
| 1137 | CD8 T-lymphocyte |
| 853 | fibroblast |
| 871 | fibroblast |
| 877 | fibroblast |
| 904 | fibroblast |
| 935 | fibroblast |
| 955 | fibroblast |
| 965 | fibroblast |
| 994 | fibroblast |
| 998 | fibroblast |
| 1000 | fibroblast |
| 1011 | fibroblast |
| 1015 | fibroblast |
| 1017 | fibroblast |
| 1025 | fibroblast |
| 1032 | fibroblast |
| 1041 | fibroblast |
| 1042 | fibroblast |
| 1048 | fibroblast |
| 1057 | fibroblast |
| 1061 | fibroblast |
| 1062 | fibroblast |
| 1067 | fibroblast |
| 1069 | fibroblast |
| 1072 | fibroblast |
| 1073 | fibroblast |
| 1074 | fibroblast |
| 1076 | fibroblast |
| 1077 | fibroblast |
| 1078 | fibroblast |
| 1079 | fibroblast |
| 1084 | fibroblast |
| 1086 | fibroblast |
| 1091 | fibroblast |
| 1119 | fibroblast |
| 1121 | fibroblast |
| 1130 | fibroblast |
| 1139 | fibroblast |
| 1140 | fibroblast |
| 902 | fibroblast |
| 1003 | fibroblast |
| 1071 | fibroblast |
| 1007 | fibroblast |
| 861 | heart muscle |
| 1010 | heart muscle |
| 1026 | heart muscle |
| 1046 | heart muscle |
| 1050 | heart muscle |
| 1129 | heart muscle |
| 1131 | heart muscle |
| 855 | heart muscle |
| 956 | differentiation between heart muscle and skeletal muscle |
| 1021 | differentiation between heart muscle and skeletal muscle |
| 1030 | differentiation between heart muscle and skeletal muscle |
| 1135 | differentiation between heart muscle and skeletal muscle |
| 894 | keratinocyte |
| 864 | keratinocyte |
| 866 | keratinocyte |
| 870 | keratinocyte |
| 878 | keratinocyte |
| 881 | keratinocyte |
| 885 | keratinocyte |
| 891 | keratinocyte |
| 892 | keratinocyte |
| 893 | keratinocyte |
| 925 | keratinocyte |
| 926 | keratinocyte |
| 930 | keratinocyte |
| 932 | keratinocyte |
| 937 | keratinocyte |
| 943 | keratinocyte |
| 947 | keratinocyte |
| 951 | keratinocyte |
| 952 | keratinocyte |
| 957 | keratinocyte |
| 963 | keratinocyte |
| 964 | keratinocyte |
| 967 | keratinocyte |
| 970 | keratinocyte |
| 972 | keratinocyte |
| 980 | keratinocyte |
| 981 | keratinocyte |
| 982 | keratinocyte |
| 987 | keratinocyte |
| 990 | keratinocyte |
| 992 | keratinocyte |
| 995 | keratinocyte |
| 996 | keratinocyte |
| 1001 | keratinocyte |
| 1002 | keratinocyte |
| 1006 | keratinocyte |
| 1018 | keratinocyte |
| 1020 | keratinocyte |
| 1023 | keratinocyte |
| 1031 | keratinocyte |
| 1033 | keratinocyte |
| 1034 | keratinocyte |
| 1035 | keratinocyte |
| 1036 | keratinocyte |
| 1039 | keratinocyte |
| 1040 | keratinocyte |
| 1045 | keratinocyte |
| 1056 | keratinocyte |
| 1058 | keratinocyte |
| 1059 | keratinocyte |
| 1064 | keratinocyte |
| 1066 | keratinocyte |
| 1080 | keratinocyte |
| 1081 | keratinocyte |
| 1093 | keratinocyte |
| 1094 | keratinocyte |
| 1097 | keratinocyte |
| 1098 | keratinocyte |
| 1101 | keratinocyte |
| 1108 | keratinocyte |
| 1118 | keratinocyte |
| 1120 | keratinocyte |
| 1123 | keratinocyte |
| 1127 | keratinocyte |
| 1133 | keratinocyte |
| 1134 | keratinocyte |
| 1138 | keratinocyte |
| 1140 | keratinocyte |
| 902 | keratinocyte |
| 1003 | keratinocyte |
| 1071 | keratinocyte |
| 1007 | keratinocyte |
| 1044 | keratinocyte |
| 846 | liver |
| 858 | liver |
| 865 | liver |
| 879 | liver |
| 887 | liver |
| 888 | liver |
| 934 | liver |
| 939 | liver |
| 960 | liver |
| 968 | liver |
| 971 | liver |
| 977 | liver |
| 979 | liver |
| 984 | liver |
| 999 | liver |
| 1013 | liver |
| 1014 | liver |
| 1022 | liver |
| 1037 | liver |
| 1047 | liver |
| 1051 | liver |
| 1092 | liver |
| 1111 | liver |
| 1115 | liver |
| 1124 | liver |
| 1136 | liver |
| 1142 | liver |
| 1132 | liver |
| 1044 | liver |
| 936 | liver |
| 849 | melanocyte |
| 854 | melanocyte |
| 874 | melanocyte |
| 886 | melanocyte |
| 909 | melanocyte |
| 918 | melanocyte |
| 919 | melanocyte |
| 927 | melanocyte |
| 954 | melanocyte |
| 976 | melanocyte |
| 1049 | melanocyte |
| 1075 | melanocyte |
| 1087 | melanocyte |
| 1102 | melanocyte |
| 1103 | melanocyte |
| 1105 | melanocyte |
| 1112 | melanocyte |
| 902 | melanocyte |
| 1003 | melanocyte |
| 1071 | melanocyte |
| 1007 | melanocyte |
| 863 | skeletal muscle |
| 884 | skeletal muscle |
| 897 | skeletal muscle |
| 900 | skeletal muscle |
| 903 | skeletal muscle |
| 929 | skeletal muscle |
| 931 | skeletal muscle |
| 945 | skeletal muscle |
| 948 | skeletal muscle |
| 961 | skeletal muscle |
| 975 | skeletal muscle |
| 978 | skeletal muscle |
| 1004 | skeletal muscle |
| 1008 | skeletal muscle |
| 1016 | skeletal muscle |
| 1053 | skeletal muscle |
| 1088 | skeletal muscle |
| 1095 | skeletal muscle |
| 1099 | skeletal muscle |
| 1104 | skeletal muscle |
| 1117 | skeletal muscle |
| 872 | skeletal muscle |
| 855 | skeletal muscle |
| 933 | skeletal muscle |
| 950 | skeletal muscle |
| 1060 | skeletal muscle |
| 851 | skeletal muscle |
| 1043 | skeletal muscle |
| 1052 | skeletal muscle |
| 1055 | skeletal muscle |
| 1109 | skeletal muscle |
| 1089 | skeletal muscle |

### EXAMPLES

### Example 1

### Expression Analysis of Cell- and Tissue Markers According to the Invention

[0250] According to the present invention, the methylation status of particular regions of certain genes (as disclosed in Table 2) were found to have differential expression levels and methylation patterns that were consistent within each cell type.

[0251] The analysis procedure was as follows. Genes were chosen for analysis based on suspected relevance to particular cell types or cell states according to scientific literature. In general, the candidates were selected from conventional markers for specific cell types, those showing strong or consistently differential expression patterns, housekeeping genes or genes associated with diseases in particular tissues (see literature as cited above regarding cell- and tissue markers). Alternatively, candidate genes can be identified by discovery methods, such as MCA.

[0252] Generally, two PCR amplicons (200-500 base pairs long) were designed for each gene, but mainly due to the low complexity of bisulfite-treated DNA and the requirement to avoid CpG sites within the primer (which may or may not be methylated), primers for only approximately 250 amplicons were designed and created.

[0253] In most cases, DNA from at least three independent samples (representing standard examples of the cell types as might be obtained routinely by purchase, biopsy, etc.) for each known cell type were isolated using the Qiagen DNeasy Tissue Kit (catalog number 69504), according to the protocol “Purification of total DNA from cultivated animal cells”. This DNA was treated with bisulfite and amplified using primers as designed above.

[0254] The amplicons from each gene from each cell type were bisulfite sequenced (Frommer et al., Proc Natl Acad Sci USA 89:1827-1831, 1992). The raw sequencing data was analysed with a program that normalises sequencing traces to account for the abnormal lack of C signal (due to bisulfite conversion of all unmethylated C's) and for the efficiency of the bisulfite treatment (Lewin et al., Bioinformatics 20:3005-12, 2004).

[0255] A gene was regarded as relevant, if at least 1 CpG site showed significant distinctions between some pair of cell types, as for the present purposes, a single distinctive CpG within each gene is sufficient to serve as a marker. The statistical significance was generally determined by the Fisher criteria, which compares the variation between classes (i.e., different cell types) versus the variation within a class (i.e., one cell type).

[0256] While all of these markers carry useful information in various contexts, there are several subclasses with potentially variable utility. For example, certain genes will show large blocks of consecutive CpGs which are either strongly methylated or strongly unmethylated in many cell types. Because of their ‘all-or-none’ character, these markers are likely to be very consistent and easy to interpret for many cell types. In other cases, the discriminatory methylation may be restricted to one or a few CpGs within the gene, but these individual CpGs can still be reliably assayed, as with single base extension. In addition to markers that show absolute patterns (i.e., nearly 0% or 100% methylation), markers/CpGs that are consistently, e.g., 30% methylated in one cell type and 70% methylated in another cell type are also very useful. Table 3 provides an overview of the characteristic methylation ranges of a selection of the identified, and preferred markers.

[0257] The markers as described and preferred, for example, in Table 2 therefore represent epigenetically sensitive markers that are then capable of distinguishing at least one cell and/or tissue type from any other cell and or tissue type.

### Example 2

### Pan-Cancer Method for Diagnosis and or Screening of Cancers

[0258] The following example provides a method for the diagnosis of cancer by analysis of the methylation patterns of a panel of genes consisting of the (general) cell proliferation markers SEQ ID NO: 109 and SEQ ID NO: 103 and the tissue- and/or cell-specific markers SEQ ID NO: 80, SEQ ID NO: 76, SEQ ID NO: 57, SEQ ID NO: 84 and SEQ ID NO: 58, as listed in Tables 1 and 2. DNA isolation and bisulfite conversion.

[0259] A blood sample is taken from the subject. DNA is isolated from the sample by means of the Magna Pure method (Roche) according to the manufacturer's instructions. The eluate resulting from the purification is then converted according to the following bisulfite reaction. The eluate is mixed with 354 μl of bisulfite solution (5.89 mol/l) and 146 μl of dioxane comprising a radical scavenger (6-hydroxy-2,5,7,8-tetramethylchromane 2-carboxylic acid, 98.6 mg in 2.5 ml of dioxane). The reaction mixture is denatured for 3 min at 99° C. and subsequently incubated at the following temperature program for a total of 7 h min 50° C.; one thermospike (99.9° C.) for 3 min; 1.5 h 50° C.; one thermospike (99° C.) for 3 min; 3 h 50° C. The reaction mixture is subsequently purified by ultrafiltration using a Millipore Microcon™ column. The purification is conducted essentially according to the manufacturer's instructions. For this purpose, the reaction mixture is mixed with 300 μl of water, loaded onto the ultrafiltration membrane, centrifuged for 15 min and subsequently washed with 1×TE buffer. The DNA remains on the membrane during this treatment. Then desulfonation is performed. For this purpose, 0.2 mol/l NaOH is added and incubated for 10 min. A centrifugation (10 min) is then conducted, followed by a washing step with 1×TE buffer. After this, the DNA is eluted. For this purpose, the membrane is mixed for 10 minutes with 75 μl of warm 1×TE buffer (50° C.). The membrane is turned over according to the manufacturer's instructions. Subsequently a repeated centrifugation is conducted, whereby the DNA is removed from the membrane. 10 μl of the eluate is utilized for further analysis.

### Quantitative Methylation Assay

[0260] A suitable assay for measurement of the methylation of the target genes is the quantitative methylation (QM) assay. The bisulfite treated DNA is amplified in a PCR reaction using primers specific to bisulfite treated DNA (i.e. each hybridising to at least one thymine position that is a bisulfite converted unmethylated cytosine). The amplification is carried out in the presence of two species of probes, each hybridising to the same target sequence said target sequence comprising at least one cytosine position (pre-bisulfite treatment) wherein one species is specific for the bisulfite converted unmethylated variant of the target sequence (i.e. comprises one or more TG dinucleotides) and the other species is specific for the bisulfite converted methylated variant (i.e. comprises one or more CG dinucleotides). Each species is alternatively detectably labelled, preferably by means of fluorescent labels such as HEX, FAM and VIC and a quencher (e.g. black hole quencher). Hybridisation of the probes to the amplificate is detected by monitoring of the fluorescent labels. Primers and probes for the amplification and analysis of the regions of interest are shown below.

SEQ ID NO: 84
(SEQ ID NO: 806)
Forward primer:
ctacaacaaaatactccaattattaaaac
(SEQ ID NO: 807)
Reverse primer:
gggttaattttgtagaattgtaggt
(SEQ ID NO: 808)
CG probe:
cgtaaaccgtactccaaaatcccga
(SEQ ID NO: 809)
TG probe:
cataaaccatactccaaaatcccaacctc
Amplificate:
(SEQ ID NO: 810)
ctacaacaaaatactccaattattaaaactcatcacgtaaaccgtactccaaaatcccgacctcttcgtaaacatacctacaattctacaaa
attaaccc
Genomic equivalent:
(SEQ ID NO: 811)
ctgcagcaaggtgctccaattgttgaaactcatcacgtgggccgtgctccagagtcceggcctcttcgtggacatgcctgcaattctgca
ggattgaccc
SEQ ID NO: 84
(SEQ ID NO: 812)
Forward primer:
aaaccaacctaaccaatataataaaac
(SEQ ID NO: 813)
Reverse primer:
ggatttaagtgatttttttgttttagt
(SEQ ID NO: 814)
CG probe:
caaccgaatataataacgaacgcctataat
(SEQ ID NO: 815)
TG probe:
caaccaaatataataacaaacacctataatcca
Amplificate:
(SEQ ID NO: 816)
Aaaccaacctaaccaatataataaaaccccgtctctactaaaaatacaaaaatcaaccgaatataataacgaacgcctataatcccaatt
actcgaaaaactaaaacaaaaaaatcacttaaatcc
Genomic equivalent:
(SEQ ID NO: 817)
Agaccagcctggccaatgtagtgaaaccccgtctctactaaaaatacaaaaatcagccgggtatggtggcgggcgcctgtaatccca
gttactcgggaggctgaggcaggagaatcacttgaatcc
SEQ ID NO: 57
(SEQ ID NO: 818)
Forward primer:
cacaatatttcactttaataatattaaaaac
(SEQ ID NO: 819)
CG probe:
aataataaaacgaaaacctcgataacgattaa
(SEQ ID NO: 820)
TG probe:
aataataaaacaaaaacctcaataacaattaaaaaaactata
(SEQ ID NO: 821)
Reverse primer:
tttaaattattgtttaagatttggataaag
Amplificate:
(SEQ ID NO: 822)
cacaatatttcactttaataatattaaaaaccgatacaatcaaaaccaccacaataataaaacgaaaacctcgataacgattaaaaaaacta
taaatctttcgctttatccaaatcttaaacaataatttaaa
Genomic equivalent:
(SEQ ID NO: 823)
cacagtatttcactttaataatattggaaaccggtacagtcagggccaccacagtggtggggcgggagcctcgatggcgattagggga
gctgtaagtctttcgctttatccaaatcttgggcagtaatttaga
SEQ ID NO: 76
(SEQ ID NO: 824)
CG probe:
cgtaaccatattaaacgcaaataaacgc
(SEQ ID NO: 825)
Forward primer:
aaatcaaaataaacacaattaaaaaca
(SEQ ID NO: 826)
TG probe:
cataaccatattaaacacaaataaacacaataacaaaa
(SEQ ID NO: 827)
Reverse primer:
aattgagaagtaaaatagtttagtttattagag
Amplificate:
(SEQ ID NO: 828)
aaatcaaaataaacacaattaaaaacattaaaccgtaaccatattaaacgcaaataaacgcaataacaaaattctttaaactctaataaact
aaactattttacttctcaatt
Genomic equivalent:
(SEQ ID NO: 829)
aaatcaaaataggcacagttgggaacattaagccgtggccatattagacgcaagtaggcgcaatagcaaaattctttaggctctaatgg
actgggctattttgcttctcagtt
SEQ ID NO: 80
(SEQ ID NO: 830)
Forward primer:
ctataaaaccaacaaaaaatatttcaa
(SEQ ID NO: 831)
CG probe:
aattttattacgccaacgcgactataaattaa
(SEQ ID NO: 832)
TG probe:
aattttattacaccaacacaactataaattaaaaaaacatct
(SEQ ID NO: 833)
Reverse primer:
aaaattggtatttattttggtttatatg
Amplificate:
(SEQ ID NO: 834)
ctataaaaccaacaaaaaatatttcaaaccatcgaaattttattacgccaacgcgactataaattaaaaaaacatctccatataaaccaaaa
taaataccaatttt
Genomic equivalent:
(SEQ ID NO: 835)
gctgtgaagccagcaaaaggtatttcaggccatcgaagttttgttgcgccagcgcggctgtagattagaaggacatctccatgtgaacc
aagatggatgccaatttt
SEQ ID NO: 103
(SEQ ID NO: 836)
Forward primer:
tagggtaggttggtttgtgttg
(SEQ ID NO: 837)
Reverse primer:
ctttccctacctccttaaataactacc
(SEQ ID NO: 838)
CG probe:
cgcgtgtttttttgcggagtta
(SEQ ID NO: 839)
TG probe:
atgtgtgtttvtttgtggagttaaag
SEQ ID NO: 109
(SEQ ID NO: 840)
Forward primer:
aacaaccaaaactaaaaaccaaaact
(SEQ ID NO: 841)
Reverse primer:
tagtgaagaatggtgttggatttt
(SEQ ID NO: 842)
TG probe:
cacaccacctacacacacaacctcac
(SEQ ID NO: 843)
CG probe:
cgcgccacctacgc

[0261] For each assay, the amount of amplificate detected by each probe species is quantified by reference to a standard curve. The standard curve is plotted by measuring the Ct of a series of bisulfite converted DNA solutions of known degrees of methylation assayed using the respective assay. Preferably the Ct of a series of bisulfite converted genomic DNAs of 0, 5, 10, 25, 50, 75 and 100% methylation is determined. The DNA solutions may be prepared by mixing known quantities of completely methylated and completely unmethylated genomic DNA. Completely unmethylated genomic DNA is available from commercial suppliers such as but not limited to Molecular Staging, and may be prepared by a multiple displacement amplification of human genomic DNA (e.g. from whole blood). Completely methylated DNA may be prepared by SssI treatment of a genomic DNA sample, preferably according to manufacturer's instructions. Bisulfite conversion may be carried out as described above.

[0262] The real-time PCR is carried out using commercially available real time PCR instruments e.g. ABI7700 Sequence Detection System (Applied Biosystems), in a 20 μl reaction volume. Using said instrument a suitable reaction solution is:

1× TaqMan Buffer A (Applied Biosystems) containing ROX as a passive reference dye
2.5 mmol/l MgCl₂ (Applied Biosystems)
1 U of AmpliTaq Gold DNA polymerase (Applied Biosystems)
625 nmol/l primers
200 nmol/l probes
200 μmol/l dNTPs

### Temperature Cycling Profile:

[0263] Initial 10 min activation at 94° C. followed by 45 cycles of 15 s at 94° C. (for denaturation) and 60 s at 60° C. (for annealing, elongation and detection).

[0264] Data analysis is preferably conducted according to the instrument manufacturer's recommendations. The degree of methylation is determined according to the following formula:

methylation rate=delta Rn CG probe/(delta Rn CG probe+delta Rn TG probe)

[0265] Alternatively, the methylation rate may be determined according to the threshold cycles (Ct), wherein

methylation rate=100/(1+2^{delta Ct})

[0266] A detected methylation rate of over 4% is determined to be methylated.

[0267] The presence, absence and type of cell proliferative disorder is then determined by reference to Tables 1 and 2, wherein methylation of either of the genes according to SEQ ID NO: 103 and SEQ ID NO: 109 is indicative of the presence of cell proliferative disorders. Wherein the presence of methylation of said genes is determined, methylation of the further genes is determined in order to localize the cell proliferative disorder.

[0268] The presence of unmethylated SEQ ID NO: 80 DNA is indicative of soft tissue sarcoma. The presence of unmethylated SEQ ID NO: 76 DNA is indicative of the presence of a melanoma. The presence of unmethylated SEQ ID NO: 57 DNA is indicative of abnormal keratinocyte proliferation e.g. psoriasis. The presence of unmethylated SEQ ID NO: 84 DNA is indicative of liver cancer. The presence of unmethylated SEQ ID NO: 58 DNA is indicative of soft tissue sarcoma.

The application's sequence listing, which the Patent Office published only in electronic form, follows.

SEQUENCE LISTING (2903 sequences)

SEQ ID NO: 1 - DNA, 1123 bp, Homo Sapiens
ggggacctggacaccctcaccaggggcctgctggagagctggaatggggcaggtgtcagaacctgtgggcaggaggtcacaggaagcctggaggccctgtctgcatcccaggcagcaaaggaggcctggtgaggccccacctgctcacccgctcggtggccctgaggggtggggagggagcagctccagggggagcagggtgagaggctgggaacggctcagtggtggggtcccagagccaggtgaaaccgaggcttccccagagtcgagccggacccggaacaggagccgcggctctgcgtcggggcgggtgtggcccaggcagccacctggccacagacagacagtggcggctacatacacccccgcccctgcacccgtggccaggctggggtatccgcgcgccaggcggaatgcaggggcgccctgggcccgcacacctccccatgtccgacacgccgctgctgctagagcctgctccgccgcgcccccgtccccggacacctgcgccttcgcctgttcttgggcctgagcccgtcccagtccccgtccccgcaggatctgctgcaacccacctgctgctgccgcagccgctgcctccgctctgagcactgagcccgcccagttcgccggcgccgagcgcagggcccgcccccatcccaggccccccgcgcggccccacccgctgccacacacccagatatttcaccctgcccactctgcccgacctcgcaaggtcgttaccggagctcaccggggtctagggaagccctgtgactgtgactcagtcacagatggagaaggtcagaccgccggctgactgactagcctaggtcagttcggggaggttaagggccacgtctgaaagtccgcagcccaccttctttctactgcagcggacacccttcttgatccctcaccccagtacatgaaccccacccagctgggccccagacaggccccacagcaccgtcatgtgagcttcaggcacagtgagttagatgaagacatgggtctggcagagtggcctggggcggtccctgacctctactcttacaatggaagagactgcagccttttgagagagttctgcgaattgagggaatgcattctggctgttttg

SEQ ID NO: 2 - DNA, 933 bp, Homo Sapiens
ctactaattccacgttcctcaaattggtacaactggtgacaatctcagagtcacctgtcatcgcatcaaagtttgacagagaaggatgacccacaggagcagccttgctgtgcttgaggattgtttgacacttgaaatgagcttcggatcagttcttggctgaagtccacctaggcccctttcgcgaaggctaagctatcagagtcaaccaccactcttgccccaccctgttcaaataccgtcgtcggggttgataactgtatccagtgaacatctgtactggaatccggagcatctacctccctccacctgcagcctgaggaattctgatcctttggtgatttccagaagcctctggacgcagctgtccgtgaggcggatctgcccgtcgccggcctcggggctggacgacacgcccggagtcccagggaggccgcgaggagcctgcccctcggccaggaagtgaccgctgtctgcgtcgcggcccttaaggacaacccctgggcggcaaccatcttcctccacccaggagatcaatttctttgttgaggttccacctaaggctgtagcactcactcactgaggttcctaagaaacctgcctgtcctaggaaacctcctactgagacctgccccgcactgccacctggtggtaagatataaaaacacaccctccacggtgggatcagattgcgcgcctgctccgcccccaccccgccctctccccggtggtggggtagagggatggtggaaagggaaccaagagctagttcccagaagtgtaggtatctgggattgagattggagtggggctacacctccttctctgttttcagtaccagccatagctctgtcactgtgcctctagtttctttcctctttgcagacattggccacttgtgaaactaattgtattccctctttgcattgtctt

SEQ ID NO: 3 - DNA, 660 bp, Homo Sapiens
ctccgcctcctgggttcaagcgattctcctccctcagcctcttgggtaagtgggactacaggcgcccaccaccacgcctggctaatttttgtagagagagttttgccatgttggccaggctgagctggagcaatgctcctctcacctcatggagcctccacctaccacagctgtcagtttcccctaatcctaggaacccccgccccaagggaaacaggacagacagcgcccgtgtcccactctgctcattttcagatgaggaaacagtcaccaaggtcccgtgcaaactcgccgcccacccaacagcccacatcacttgccttgctccagcttcccgctcgccagctggtgttcctggcagccagcaggtccgcgggggccccgtctcagccaggctgggggccgggggctgggcctcaggaactctgctgctgctgttggggctgccccaagctagcgtggacagaagcccagagctcaggggcacctcagggctgaggggctcaggctggcccttgggtctcgggctcagggcagtcacccagggtgtgtgcctgcagccaatcagggttgtggggaggaaggtccccggcactgccacagtctgcaggtcccatgagcctggtcctggggttgggaaggtgggagtctctggctcca

SEQ ID NO: 4 - DNA, 684 bp, Homo Sapiens
tacaaaagctagctgggcgtggtgatgggcatctgtaatcccagctactcaggaggctgaggcaggagaattgcttgaacccaggaggcggaggttgcagtgagccgagatcgtgccattgaactccagcctgagcgacgagagagaaactctgtctcaaaaaagaaaaaaaaaaagatacctcaaaaggccaatcttcacgaagggccaggggtcccacaggtgagtggagccccagcagccccctcagctctgcgtgcccatgtactggtcttctccctggctctatactcagtgttcaaggggttgcagtgagacggggcttgggccgcggagctgcgcctggctttgctgctccacaagggcaccgtggctgtcagcctgtccctgcaactgctgcagagccacgtagggttacaggtggtggctggctgtgggatccacttcttgtgcatgacacttctaggcatccggctgggtgcggctctggcagtcagcagggcctctgcaccagctggcccagtctgtgctagagggcatggtggctggcaccttcctctataccacctttctggaaatctttccaggagctggcgacttctgagcaaaggatcctcaaggtcattctgctcctagaagggtgtgccctgctcactggcctgctcttcatccatatctaggggg

SEQ ID NO: 5 - DNA, 615 bp, Homo Sapiens
ctgtttttaattttttttcctccaagcaagcccaaaacttccatgagcaaaagagtccaaagaggcaagaggacactggcgttttaattgctctctccctccctaacttccttcttccctctcctcctggctggccccatggattacctgggagataaactcacagtggcccagacccacatgacccagtggatgggcaccgtgaggaggtccttccaggaagccctcaatttggtgaccaccacggtgggccacgaacggacgagtgcagagtcggccagccggacccccttcaagcgtacttcctccttccgacacctggcttcccggagtcgggaatccttccgccgcttctctgctcgcagccaacagagattttcttcactgaggaaaaggcatacagattcggaaccgccagatattgtaagcttattatgttttaaaaaatattaaaacaacactgaaagctcctcccctccagtcctcccagggagggggtcccagacatcaaaccggggaagttacttcttccagaatagttgtcagtcaaagcccaggcacttcctgtcccctgtacctgggaaagaggcacgtagcaataattcctctctcctg

SEQ ID NO: 6 - DNA, 550 bp, Homo Sapiens
caccagggatgctgtgagcctgtcagaaggtgttgggggcgggtacagttaccgctcaccaccacccccaacggggcaccggcagccacgtggtcggaaggggcctatggcgcaatggcccggaaggcagtgacaccatcgttcccgtcctaagaaccatccggccctttggggaagactggctgttggggagggccaaggggccaggcacccaggcttagcgaccccacggcaccctcgccgcctccccaggtatctgctgccgggctctggcaggggcctgtgcctgtggcagcgcacgtgggactggggtttctgtgtggctgtgcatctgggtctgtgtgcggcgtgagggagacctgttccgttcaccatggggactctggtctgcatgtgggggttcctgggctggtgagatccagggctgtagatgacgtcatatggctgtgtgcgcatgtggccatgtgggtgtggctgtgcatgctgtgtgattgtgtgggccctggggcccccaggcctggctgactttctattcatcccgggcaagctg

SEQ ID NO: 7 - DNA, 623 bp, Homo Sapiens
cgcccatgccctgcctctgctatccttcctcagctgcctgagggctggctggtgtgagcccaggctcctgtagggtatgccaggagcaagctgtgacctggccccgggctgtggagcccatgctactctccactgaggatcctgggctgctctgtcccgcgtacgggcatccgggttctgatagcccgccgggccctgggccaccagaggccttgaattgcgtcctggtgacagtcagccccttgcatggggcacgcacagacctgggcctaggctggggcaccgagatccccacatccagcagccgcggtgaggctggcctgcctgcttcccggggccacctctgccgtgccgtctcctccctctcccctgccccctctgttggttgctcctcccccgccctctctgggcaggcacggccgggtgggggtgaggttctggcaaagccccctctgttttccagcccagtggcgctcacatgtgacggtgcgggggcagcctcgtgaaaagcccctttgtgtctcctccctaattaagaaatagcagcaggctccgggggcccaggccccacgtcctctctgaacgctggccgtggtcacaggcggctggatgggcaggcctag

SEQ ID NO: 8 - DNA, 682 bp, Homo Sapiens
cgcgccaggcctatgctttgtaatcacataacgtgtcttgttatttttgtaacctgtgttgccctcctttacgaaggcacaggcacatctgtttagttcctggccacgtgggcacctggcgctgagtacttacttgtccgtgctgattgatgtcctcccccagcccccatcttcttttcagaagtttcctctttctgctccgagaggggctgagccagccgtggctcccttccatcccgattccagtggagacaagccggggaagtttctgggagctgcgcgggtgagcagagctgagacccggcatggctgtactggccgggtcactgcagggtgactggcggctcggcttgataacacgtttacctgagtcatctttggcaaaggttaccaggctccaggatggaacacgcatgggggaaatgcctcttccgtgacacgcccacctcgctctaaagtgagacgagggagggagggcgcggctgccaggtaatgaagtctagagtttactagagttgagggattgatgtgttgcgtatgggctgggtctcatttccaggaagctcaggacaaaaccctgttcatgttagagggctttggccaaattctgtcctgtgtgtttgggtgaagtcctgtcttcacaagtggttttagttccttcagagtaagaattatttgtatt

SEQ ID NO: 9 - DNA, 626 bp, Homo Sapiens
cagaggggacccctgcagagctgcctccgccccagggctcagcctgtgtctgacccaaacagctcctgcctccccctgaggatgagttgggtgcacctccttcctgcaggaagatgagggctagagatggaggtctatgtcagggccacagagtctggaatcctccctggagctaaaacagccctgccttattcaccctgcgcatcccatcctctgcttcagccccgccgggctcgccctgcatgcaaggcggggctgggacccagggtctgagcttcgccctctggacatccggctcatcgcctgccaaaggtcctgtggctggaggctccggcctcctcaccctcccacagggtcccagggccgatccaggcctgcgggccaggaatgtgctaacggggcaacttgggccttgctggtccacgcaggcacctgtggactttgagaggggactgggtggggaggggcggggaggggcggggcggggcggtgccgcagagtgcagggcgggcggggccaggccagcagggagtgagcttgtctggccgcctcgcctcggagccactgcactgctggctgcagacacaggctgcaccatgaagccagccctcctgccctgggccctg

SEQ ID NO: 10 - DNA, 694 bp, Homo Sapiens
taaccaccaccaccaccaccgccgccaccaccaatgtattctgcaaattcatatacaatttgcaaacctcctcctgaaataagagagagagggcaattgaaactatctaaggcagcacttggaacacgcaggccaaagactgagccagggagggattgttatcacatgggctgtggggaggcagagctcccctgtgtccccgagagcacccctccccggggccccaccagcccccaactcgcctctcgaattcccacctctccccttgctctgcgcctttggaaacccagacagcggccccactcccgtgattcatccagcaggaatgtgggagttctcgaattgctccagctaaagccttttaattccccttcggtgatgaatgggtgaggccctcaaatgaaatgtggaggctcccagtcccagcccgcggccctccccctcctcggcgtaattatttctgtgcagaacatgtcaagtgccctgcttcccgggaacttgtttcgcatgcaaacatttggtgattaagcgaggcttacttaattaagcactttgtaatgactcttaaaccaaagaacagtggattaggagtccagttcgtgctggtgatgggaaaggcagcttcatatcacaaggaggcagacagtgatctggtgtggggaggcggccgggccaagcggggcagagtaggcgc

SEQ ID NO: 11 - DNA, 701 bp, Homo Sapiens
tggagtagatcttctcgcgaagcacattgcggatggttgcatttggaaccacatcggcatgcaggagggacagccccagggtcagcagcctgtgagggagccccggacccggtcagagcaggagcctggcctggggccaagttcaccttatggactctcttccctgcccttccaggagcagctcactgaaatgtgttccccgtctacagaagtaccgtgatacacagacgccccatgacacactgtacacaccaggggccctgtgctccccaggaagagggccctcacttgaagcggggcccgatggccgccacgtgccggttcatgctccccttggccctgccgatgttcagggacatggagcgctgcagcaggctggagaagatctccacttggtcagagctgcagtacttggcgatctcaaaccgctgcaccaggaactgagcgaaaagaggaagacgctgtggtggtggggctgagccgggctaaccctggggccggcagagacagctgaggaggggttctgggctgactggccgagcttgccgaaggccttgggctcggctacccccaccccaggaacagtcctggccccccaggtggagcaccccacagccttcgtgggggaacaggcacgtacgtcgatccagatgtagtggggggtcacttcggggggacagggtttgggttgacttgcttcc

SEQ ID NO: 12 - DNA, 698 bp, Homo Sapiens
caatgagtgtgtagatcgctgtgtgaccaagtgggccagtgcgaaaggtggggggcagaggccgggtgagctccctgggatgcgggtagcaaggacagggctgtggtgtgaaccaagacatggtgccccctgcccctgtctttcttctgcagggagaggggctattttggtcctgagtacttttaaccccatgtgaaccacgcggacgggtggacagttggagggccagtagcagcagcaggagcctctgcccacttgggggccccgagtgctggcatgatctgactccatggtgtgggcggggtccgggcccacttggaggagcaggatatgtcgtcggaccacagttgggggtgccagactcaggccacgccatatttggtgtcagagcccaagacccaggaatagaaactgtgtatggggccaagttggccgcagcccaatatccaggtgacctcaggcccaaagcatgctcctggcccccgagacgggcctcgcagttgcagcctatgtcctggaccttgtcagctgggcttggcacacccctgctgcctgcccctgcctccaggctcactacttcccgccctgtcaccagggagctactcccagttagcctgttactgtggccactcccctgctctaagcccttccatggctcccatcgccaggattccccatgactcatcttaggcaggaag

SEQ ID NO: 13 - DNA, 641 bp, Homo Sapiens
gtcgccattgatggcaatgaacaggcattctccaaacaggtgaaggacatacagggagttgctgttttccatggagaagcaggtgtaggtgtccgagagcttctccagcatcgtcatggaggagatgatgaccggggctaggagggggctgagctggtcctgtagggcagggagctcttcttcctcattctctgactgcccgaacttcagctggagactctcttcaaactcctcatccgtccagtagaagagggcctctgtgccctcaatggccaccaagatgcacttcatcttggtaaggagcacagtggagcgtccagacagccagaggttcagaaagggctgcagcagacagactctgtgactgcctcatcggagagcagcacaacatccctggtcctgcaaatgcggatcgcggcgtgcacagcaccccgcctgcgggacagaaatgttttctgaactgaaaaagggggactacaggtgcctgccaggccctccatatacatacatccccctatgtctgtgtctagaagtgagatacaccgttatttctgttttctgattggcctttttagttttttgagacagagtctccctctcttacccaggctggagtgcagtggctcgatcttggctcactg

SEQ ID NO: 14 - DNA, 675 bp, Homo Sapiens
atgcagagagaggcaggagggaggaaggagaatgagggggtggcagggagagtgacagagagggactgtgccacagatggtgacatggagcccgtgaaggagggagtaagcagggaggggctgagggccggagagcaggtgtggggggtgggggcggggtgcaggttaagggaggaggcccggagagggagcaggaggggcgcagaccctgttaccggggagatttcagccacccacgcccgctggccttggctcctgcagggagttggagagaagaatgtgctcagtgctcaggggagccgaggctgccagccagtagccagagcagctcgtgaggccactgcggcacaggtcccccggggcagcagctgtgtcccaaggcaaggctgggtgtggggctggccagcccgggagtccacagtccagccctgcagtcgggcacaccggccgcagcacggaccactggggaggccgggtgggggtcattagtcctgggattggttacatctggagagccccaggcagggtgaggagtggaaggacagaacagagaaccaatattttaggctttgagggcaaaatcattgtgcagtgagaaaacagatttttactattttgtaactgacaaaactcaaaatagaataataataattgaggccagtattttgtaatgta

SEQ ID NO: 15 - DNA, 1023 bp, Homo Sapiens
ttggcctgagtgacagactggtgcaggtggccagcagcttaatttgtactgagcgcttactgggtccccacagcgatcctgaactgtgttcctgcccacagtgactcggccggtccgggcatggcagacccagtggcgggcatcgcgggctcggcggccaagagcgtgcggccatttcgctccagtgaggcctacgtggaggccatgaaggaggacctggccgagtggctcaatgccttgtacggcctgggtctcccgggtggtggcgatggcttcctgacagggctggccacgggcacgaccctgtgccaacatgccaacgccgtgaccgaggctgcccgtgcattggcagccgcccgcccggcccgaggtgtggccttccaggcgcacagtgtagtgcctggctccttcatggcgcgcgacaacgtggccaccttcatcggctggtgccgcgtggagctgggtgtgccggaggtgctcatgtttgagactgaggacctggtgctgcgcaagaacgagaagagcgtggtgctgtgcctgctggaggtggcgcggcgtggggcacgcctgggcctgctggccccacgcctcgtgcagtttgagcaggagattgagcgggagctgcgtgctgcacccccagcccccaacgcccctgccgctggggaggacaccactgaaaccgcccccgcaccagggactcctgcccgcggcccccgcatgacacccagcgacctgcgcaacctcgacgagctggtgagtcccccagcaccaggtgccagggacccgacagcacagccagtgcctgcaatctgtccctgaacctcccagggtccaccctgctatctgcagaacagtctgccccacaaaaagagtgcacatgttgagcaccaaaccgaggaatgtatacctgaccccaaggaaatgggtagcccacagagagggaggtgccggggagatgacgcagcccagccgggcctgggacaggatgcgggctcctggcacgatcttccctcactttgtgtg

SEQ ID NO: 16 - DNA, 1843 bp, Homo Sapiens
agccctgctgtcctccgcactttctggcaacctcactgtatgaaactccccaaatcctcctccacgtcaagtgtcaaaacagcccagtttaagtgctttcaggatttccacggagcctgaccgcaaagaggtgagcacatttaagcccctactcccagcccagccccctgcatcagagttccagggctgactctgcagaggggaagcagcctcctcccagaggcaggcacacagtaggtgctcaagcaataggatttctgccatttccacacttttggaagaacctgcccatcccccatcctctgcccgctctcaaggaccgtcatcctgaacttggtaaggcggctcttcctactcccactgaatgaatgaggaaactgaggcagggtgcgggggtcgggaggagaggagcattgtccgaggcccccgggggaggccagggaaacctcagtccggcaggtccccgggttcccggcccccagggccttcttctcaacccacccccggcccctccaaggctcccactcacgcggacgagccctccagcttgccgtagagccagccgttctgggcctcgggcaccaacacctccaccacgtccccagcggagaagcgcagcagcgtgtggttggcgccctccgagtgggagaccagggcgcggactctcctggcgcccccgccgccgcccgggcgctcgccaaaggagttggagcgcgagctttgggcgctgccgctgtagagcgaggctgtgggcgggagagcgcggcggcacgtgggcaggaagttcttcctggcgtctgccctcgatccctcctgctgcagccccacccccgcgcctctcccggccctcctgccgccccggggcgggggcactcacaggccgacggcgtgcggggcagggagcgacggtctggctctagctgggacgcgggcctcgcgtcgggctcggtgccgtaggagccggagccgtgccggctgcggggggagctgaactctcccaggggcctcgggggctgcgggggagatgggcaggggagggtggggcgggggggggggggggcggggccgcgccctagtccagcccccacccccagtcccaggcgtcggcgtaggggttctgggggcggagaccgggccaccacgggggcgcggagaacgcgccggggcggaagggcaggccgggggatgcagcgtagagcgggagcctggggggcaggaggctccaggctgggggcctgaggccccgggcccccgcggggggcggcgggggcgcgaacggcggcgggggcgcccagggcctcaccatgtccaggcaggtgggcgtcaggcggcccgaggggtagggcggccccagcgcggggcccagcaggccgggggagtgggcgcgcgacgggctgcggctggcctcagactgctccttccacagcagcacgcggttctggagcatcccccgggcctggccgggcggggacacgggggtcagccaggtccgggcggctccctgaatcctggggacccaaaatgacaccctcgacctgagagctcaggccctaccagctcgggacgaccggattttctagctggaaggagccagaagccagctcaccgtccaacccgcaccctctacttttggcaaaggcacctccattttccacgaagagcttcctctgaccccccgcttcccgcgtcaatgtgtgtgctttgagcggggctgtcctcaccgcccagcttcaggggtaggggtggcacccaggcctggccactcaatcaccccatcctccttcctgcagcgataggctcaggaatggcgcttagatagaaactacgaccaaagaacccagtc

SEQ ID NO: 17 - DNA, 770 bp, Homo Sapiens
gagccctaggataggatgaggtcccgcagcagcagatttgtcccgcagttcttcatccctcactcttccaaagactctcatctgaattccgttttctttaaacctcccctgagttctccatctgactgcctcagtttccctgaatctccagccaaccctttggttctttccaagcgtttccctcgtatcctcctgaccacagcagctggtggcatagtgtgcgtatctgtgggcaggagttagtgaaggcctccttccctccctccaaagccccaggccccacggtctgccacccgcaaaattccaaccacgagggggcgccttcctgcccgccgccccgtagggagacccggcctaggccgctggagttccgagttccagggtccttgtgatggaagggcgggcgcggcccccacacctggtcttccagccctatccaaggaggactgccagacagtcccgctctgaggtgcaggaggccgggccgcctcggctaccctgaatccacccgaagctagagggcccgagcccggggggcggtcgggtgctcacctccagagcttgcccagcgtcttgctgagctcagcgttgtgcaggtgcgggtactggtccgcgagcttcctgcgcgctgcctgagcccacaccatgaaggcgttcatgggccgcttgacgtgcggcttgcttttgctggcgccgttgacgcgcacgggcatgggcaccagcgtccagtcgtagccgctgagcacctggctgacggcctcgcggatgca

SEQ ID NO: 18 - DNA, 696 bp, Homo Sapiens
aaagggaggaagagggaggccagaaggcgccagccgagccagcgaagccttcacaggagaggaagtgggccaggggaacaggaaggagggctgggctggcctctgggtctgcccctgtcccgggcatgtggtgagcccagccttctgcctgtaatgaggaggaggaagatgaacagtgcctctgtcaaccctggcccttccggtttatgggatgggagatgtcaccattccacgtatccacctcagccagccccacacaggccgaccggggaggtttcccttgagctcaacctgacaagctctgaggagtgagctgtacctactttgtcctgtctgggatagggtggggggtccctgggtagggggctgggggctgcaggagcacggtgggcggccgctctgcacctgcctgaggaaggaccacttcctccgccaagcctttgcttggctgtgcccgccctcagcttctgtgcctttttctaacccgtcaccccgcaagggttggctcaagggctctttctcacagggcccgtaccccctgcctaggctggcatgctgacgtgtccccagaacctggcttctaccctccttctgtgcctccaggtctagagaaaatgaggggctcagtgagtttggggcttctcagaccgtgacgccctctcctgcctcctctgtgcaggcttgggaggcgatgga

SEQ ID NO: 19 - DNA, 1078 bp, Homo Sapiens
gccctttgcctcagactgtggcctcggtcaggaaaggaggcgcgagcgtgtggctggagaactctacaccaaacaccctggtttcctgagtggaaatcacactggctcaggaaaaggaagggggtgagaaggttggttggctggatggctgcttcaagtaatgcgaaaagtaaacccacgaaaccaccttttgaaaacaaagtgcgagggctgtgccatcctggctgcagcagggtcgtacctgcttccctaaccaatgtaccaccttttccagaaatagaacaaagacaaaagcggatgcataataaatcatttcagcctgccagcgctctgagagatgaaaaacctcgcccagagataggattgtgggtttacaaaaaaaccataaagcccaggcactctgccaagcccctagaacgctgccgggtcgccctttccttctccatgctcagccgtgcgtggctgccgggacagcgctcactccggcaggcgacgagtcagtgtgggaacccaggggccgcctcagtttcgctggggtgttgagttgcagggagtggcctgcaccgactcccctctcccccattcacgccactcaaaagcacactagaggggttttgagatgaaatccgcacacttctcagagccttcccagaccaatgcgcggatgagaacgtgcccattgcggggatgcgcccggctgcggatgtgaagaaacccctccgcaggagcagcgaccctgccatatgggccccgcacacggagcccccgccagcccggggcctcggcctcgggaagcacctgggaggcggcggggaaggttggccctggctggtctgacacacgcctcggggctcgtccttcatgggccaggcctggtgctccacctaccactgctgggaagccatggaggcttctcaagggtgacctgcgaggtgggggtgcctgccttccctcttgaggtaagaggggtctggtcccaccgcttgccgtaaaaaaggaggagcagctcaggtctgcacgtggccctgagcagctcgccggaaggttccagcctggtctttttattccgtttcccttc

SEQ ID NO: 20 - DNA, 1245 bp, Homo Sapiens
agttactgccagaggtctcagtttcctcacctttagtggaattggtaaggcccctccctgctcttgtgaagtttaaaatggcacacaggaaaggatcaacagagatgaattattattattactattattatgctagtcatcatttttattatcggatagtgcccagaagctgaactcccctgtaacttgagggtacaatgaggcttctcagagaactactcgtgggtgggggagggggaggcggaaacctgttgaaaaccttgctgtcatttgagactcagtgtactcctctaaaatgcgtgtgatgaggacgcctccctccctggcaggcgtttgtggcagtggagatactagtgtgctacaagaccccccctcctcctcgcgagtggtggtccaggctggggagcagccctgctctccctgcctaacatgcgcctccccaacccctagcatcttcgaccgcgaggaccaggccagcccacgggccggcagcctggcggcgctcgagaaacggcaggccgagaagaagaaagagctgatgaaggcgcagagtctgcccaagacctcagcctcccaggcgcgcaaggccatgattgagaagctggagaaggagggcgcggccgggtgagctgcagaagtgggctgggcagtggggggcggggcgtgataggcagtggggggcggggcttgatagttggcccggcagaggcgggaagaccgcgcggctagatctgtggtgcaaaggcccgaaggtcatggaaggcggggcctgggatccactgggtgggcccaccgaggcatgccccttatagtcgtgtgacctggtcctgacaccgcccctacagcagccctggcggaccccgcgcagccgtgcagcgatccaccagcttcggggtccccaacgccaacagcatcaagcagatgctgctggactggtgtcgagccaagactcgcggctacgaggtgagccccgggaggccagggggcctggaggcctccccagaccccagctcaacacctccttcttagcagagctcctattacccagtacacttcctgccactgtgtggcctcacagggaacatggaaaggctcttggggtgaggaaactgaggctcaaagaggacacaaggcaagccctagattccagaatcagtgatgaagtaacagggcctcttgggtggtgggcagggttcaaggccggatcccactcttggagtcccctccttgttgctctgtaggagg

SEQ ID NO: 21 - DNA, 691 bp, Homo Sapiens
atggggttctggcagggctggggatcccatgttgggtggaaaccccaagaagccagccaagggtctgcaggaggggccctggcagagagaagcattagaatgcaagggcaggtaaagccaccctcacagaaggtgactgtgggctgagcctgaggcccttcccagatggggaagagagaacagcacacctctcctgcccacgcctcggtatctcactcaagaatcagctgcccgttagtcacctgtcatcggagacagctctgttggcggctttcagaaaaagcgaagcagccagaggatgaatcgttattcggggaacacacctgcacacaggacaggaatggatgggagtggggagcgccctggggctactgttcaaacgccatcctcatggtctccaagacttgcatcagcagctcagccgctgatgaattataattctcggacaagctgcagaggcccccctcgttccatgtgttcacccctgccgctcatactgggggatttatgcttcctggggctaggaggagaaaataatgagtcactggggacaagagaaaaacaaaaatgccctgtatgtgcaaaaccacctaaaatggaggcttttagaggacactcaaatcccagccaactagccagaaagggttttgctgggggtatattttatgtgtctttgctatctttggatgca

SEQ ID NO: 22 - DNA, 699 bp, Homo Sapiens
agcagtgatggcagtgccttaaggaacctgggctcaggcactgaccctgaggagctggcgatgcaggtatggggcatccacgcagggctccagcaacctttgggaaggagaacccggggtctgaaggtgaggcgagtggacccaggactggataacttgggggtcccagggaagtgagatctgaagcagccaggtcacaccgggccttcggcagcaggtagagggctccccgtgggaagtttctggccgctggcatttggcagctgctccctgcagaggcactgggcgcagagctgtgctcaccgtcctgaaatctgcgacgcttagcagccctgttccagcctcatcatagcttttgaacgtgcgccgcattggcctccagcagtgcacaattttgggctgaatacgcagcagagcagagtaaaaagatggcgtctccgcgccggcttctttctagacacaagacaagaaggggtgaggagggagcttttgaacacgagggttggggtgggctcctcctcgcctcgcccccgcctcgcccagccctgctccggcttcacctcccaacctgctccgctggctctgaatcgaggagggagcctgccagaactcgtcacaaagatgcgcacccgccccctgaccattgtgtgggctgtttaaaaacgtgtattacatcagccatctcatttacacctcccc

SEQ ID NO: 23 - DNA, 494 bp, Homo Sapiens
tctccgtccggagaggggaacgtgaaggaggtgaggagggagtagtgcaggaggatttgggtctctccttctttcccttttccattctccgagggcttaaccagctggtgaaggttcttaaccagcaaaggaggaagcagccggggccggtgagggtgaggccggcagccaggcaggaaggcagcaggaggaggaggaagcggaggcggcaccttctgagaggcgcatgctcagtgagtcgtgaagatggcagggctggcggagcggccgccgcatctgatctctcccctttttttaggatatgtgatggcgtccagtttggagctgggataaggttcctgtagccgacacccctacaggagaagctctgggactggggcagcagcaaggcgcccatgccacacaccgtctctcgaggaaacgcggttcagcgattctttgactgcggaccctgtgggaaaccccgtcaataaatgttaaagacacactccgag

SEQ ID NO: 24 - DNA, 1362 bp, Homo Sapiens
aactaccagagcaaaccatttaacctatttgtgtacatactcccagatttcttacacacgttgcaaaaaaaatagatcgtaccattctgctggttttctaagctgctttttgtaagtaatgtactgtgagcatcttttcatggccataactattacatacaaaagaaaaaaacaggcttcacaataaatagttaaaagacattttgacctgaaactaatgaagaagggttttttggttttgtttttgtacctcctgtataatgctgaaattggtaattctgcagtaaatattaacattttctgaggatctgctgaagatgaatgtgacaaaaaataagaaactccactttcctcatcacacagccttaattaacatcgctggctttgtttgagatcaagcaaacgttggcttcagtgtccaagtctcttcttggggtcccacggccttgggtctggcacctctgctgggcacctcgcagggcttccgagacgtgccgcgacccacgggaccccacggaagctttctcccaccgcaagctccctggaggcagggaaaggagccgggacccgagcctagctggcctcaagagaagggcggtggctcgcacggcgcgggcggctttgctcactgcagctggggagatgcaggttggccgtccgggcgcggcggcgggaggggctgcgggcctgtggggcggggtggtggctccgtgttgttggatccctatggagatgaccctgtccctgccccacccctctccggagctgcggcccgagttggcgcactcgattttcactgcgcggttccaagaggagacagccgccactgtaccgggcctcatagccacttcctagaggtaaagcccgtggcttctgagccgctagtctttttcttggggccgcccggggcacatcgcctgggccggcttagtttcccagtgcagtcgcccaggaagaccctaagcagcgctgaggggcgcagggccctccctccgcgaccctggagtcccttagcagctctggaattaaccaagattctgaagaggctctggggagaaacaaaatccacgcgtagggtagggtttgcatcgggccatgccaagtaaactcttacctcctccagagaactgatttgggatcgaagtaaagttcttgaacactttggaaaacgctgattttcataggttcacaccaactgccttcttccttctgacagttctctccctctttcctcctatggggtccaaaaatgtagggagtagggtgggggctgggttgggggaatgagggaggaatacaaaaaatctactgtgaatataggtcttggttataaggatagctctaagagttaatatgctaaga

SEQ ID NO: 25 - DNA, 1362 bp, Homo Sapiens; identical to SEQ ID NO: 24

SEQ ID NO: 26 - DNA, 659 bp, Homo Sapiens
acacatcctcctatagttcttgctctccattcaagcaggccctagggctcatggcaagatgatttccttggggagaaagagcctgagacttagaaatttaatttgtataatgaatcctggctttttccctcctttagggatctgattcttctttctcttcctcctcctcttctgtcacaggactctatgctccactccagcgtagtttggttgactgatgcttcattctctatatgcactgacatgacgtgtgactgttcaggcacagttggagaagttggagaagacagcacctcatcccctctcccagaactaatcattgattggagggccaatgcttcaaccttgatgtgattcagcaggtcatgcgagggctgccttcaacaggagcagtgtctcctcctccttgcgcagttcctgacccagctcggcatgtttcctggtgacactgctgctcgccacatggcccagtgctgcaaatatttttatataattacatttgttcattcaatttttaagtgtctttttaatagagaaaacaatcactttatgagctcaaaatctgcaaatcccttgtattttctaaaagactttcttcaattacaaaaattccccttatgttttattctaatactttataaattttgtttagcttgttg

SEQ ID NO: 27 - DNA, 518 bp, Homo Sapiens
aggctgaggcaggagaatcgcttgaacccgggaggcagaggttgcggtgagcggagatcgcgccattgcacaccagccagggaaacgagagtgaaactccgtctcaaaaacaaacaaacaaacaaacaaaaaacgccttagtaacagtgccctcaagaacctggccttccagttctctggcagagaagacctactgctgccgctagtcctcaagatggcatttgctggaggcggtaggcagaggccctaagtgtggattctaacccccgtggggactgaatctctgcggctgttgcttgcccaggcacgtttgcctcccatgaacttccttcatccacagggccccaaacctcatgccggcgggaggaggaaggagactgggcataactcatcagactttcgactgtaagagctggaggccgcctgcgggcttatctgtacccgggcctgtccccacccttccagaatgtaaatcctctgagggaatgtgtcgtcgccatctttcagtcctttgagtg

SEQ ID NO: 28 - DNA, 675 bp, Homo Sapiens
gctgaccccacggccaggtcctccttcacgttctcgccaccccaaatgcgggcaccgcggcgccaaacctgctcttcccactgttgtcaataaccgcagcctggccgaatccagtgattcatttctgtcttaatctctcctggcctttcggcagcgtttaacgtgtgcgacccctcccttctcctgtcttcagccttcctcgggatccgcgaggcgccctctctcccatctccctctcaggagtgtgtctccagccccgcacctgccctctctattctcagtgcatccccgccgcaggcatcaccctctgacttgtcatgccatccgccccctccctcactgtatctacgctttattacctgccttggctcgtacaatgtcagctttgcaaggggttcttccaaggtcttattttcaattgatcaatgccgaggatggggagcaatgcgtgtaccagagggggctgggcacacgcaggcttgttgttggatggaggagaggcagcatcccctgcatgcctgggtggtccccatctccaggcctgcgacaagcacttctcatcttcccatcctctgacggagccagtcccacccaccacgtggacgtgggtgttgtctgtggaccaaggtcagtgttttgttggtttttcttattgtttggcaccagcattacata

SEQ ID NO: 29 - DNA, 699 bp, Homo Sapiens
gtctaaacccaggagattctctgagatgccgcttaatatctccatgtcccatactaaaagtcaatggaacatgcagggggcggcctgagaatccagaacatgtcctgctccccaccacccccaccccactccctcccagggaggtagcggacgctggagcttcttaggccagaagtccaggggcaggggcatggtgggggcgcctttctcaccccgagaaaacgcagcggtggtcacggggaggggcgccaccatgcagcacccaggcctggattccagctagcagtatcagccttctctcactttcgggcagcgacaccgctggtgtagaccgtctcaggtgcgtcttcgttcagctctactgtcctcagccccagcttgggctcgccctcagcctgctggagctgttggatgtgttcaggcctccaggcaccctggcctccccccacccgccccgcgaagaccgagggaaagcagacgcgtctccgcggcaacccggagcctgcagcccgcagggaccccaccgccccaggtgcaggcgtgtacatgccagttgcagaaaatatcacaccaaaccagtctgagggagtcaaagcaaactataatatttcaggcgtcagagactctcctattacagaatttgcctgtttggatagcatgacaccttttccacaagattttattaataagctgcacaaa

SEQ ID NO: 30 - DNA, 698 bp, Homo Sapiens
tattagtctatccactaattcttcctaaaaataaactcagactctctttatttctcataactaaaatttttcaaccacagaggagagctgtgtgcatttatttagtcatgtttttgttctcctctctctctctcctctctctgctctcactccctcttcccttcttcctcccttccctctcagcttctcctttgggacatcgagggacaaagttgcaaggcactactatagatctcccatttcttccttttgttcaccagaacgttaacaagagatacaacacctagaaaacagagagcagagacttttctggatcaaacagtaccttttttttctgtttctgtctccttgtgactcaagggagaaatgatcctttctttctaagtgatcttatttctctctgtcaagaatccgtggacatgttatctggttagagctcagcctgcagccaccacgcaggtaactcactcacgttagactataactcacctaactcgtttgtgtcccagccaaatgtgtaccagagtaaaagttcagacctgaccatgggtaagtttaatgattaacataagccactcaggctttttcctcagggcttgttagtaatgaccaaaggaaaagtgtcttacatttttctccacttactgcatgtgccccagataagaattttaagtaaaagtccacccagtgagacaaac

SEQ ID NO: 31 - DNA, 695 bp, Homo Sapiens
ggtcctatggagtcttcccatagcaagaaaccaggcttgtaacagggtgtaatagagtgacaccccacacctgatgccctgtaaatgcagagtctgcaaatgcctctcttttgatgctttctcaaggtaagtcataaatgaagtcttactgctttaaaaaagtagcttgccaacagttgcccaggctccccatgggactgcgcttcactgagcacctgaagaaagtattcactggaaatgggctctcctgggagactgtctggatcccgagtgtctggcgttcatgttcccacacctggctgctgcttcttgcccttccttggctgcaggtgtgagtgcttgtttgtttaaacctcgctcagcactgcttggaaaaacaaaacaacatggttacttgtctgggcattgaatgttcttcctgaattttggtcctgcccattggcccagaggcggaatgggtggggcaagtttcggtgtgagtttgggaagtttcgagaagacgctatgggctgggtctgttaggttggggttgctcttggttttaatccttttggaatgtcttgagggtcaggagcgttgccattgatggctatgggagttgtcaggctgtggctctctttctcacagagaatgccagaggcactcgggaaggcatttgccagggctctgacagatgtaaagtaagccttatccat

SEQ ID NO: 32 - DNA, 695 bp, Homo Sapiens
gatttcaaaccactccttttcaaagatctctgagggagacattgcacctggccactgcagcccagagcaggtctggccacggccatgagcatgctgagccatcatgcccaccgtggatgacattctggagcaggttggggagtctggctggttccagaagcaagccttcctcatcttatgcctgctgtcggctgcctttgcgcccatctgtgtgggcatcgtcttcctgggtttcacacctgaccaccactgccagagtcctggggtggctgagctgagccagcgctgtggctggagccctgcggaggagctgaactatacagtgccaggcctggggcccgcgggcgaggccttccttggccagtgcaggcgctatgaagtggactggaaccagagcgccctcagctgtgtagaccccctggctagcctggccaccaacaggagccacctgccgctgggtccctgccaggatggctgggtgtatgacacgcccggctcttccatcgtcactgaggtaaaaaagcctctgtaacatgggagttcctgggacagggagaaatataaagcaaatcctatgaagttcagttccatatcaggaaagaggtagggggctatgtttattgtgcagttcgtgggtgtctggctgtgtcccaggcacggggcattctcttctctagtttaatccaccacaaact

SEQ ID NO: 33 - DNA, 685 bp, Homo Sapiens
tagtctgctatctctttacaggacatgagggctgataatcacctcattgcatggtcctggggactgatgaacaaaggctaacatgtggaaaagggcaactaaagaaagaagagccacctccaggttaattagtacaagtctcctcgctggtatgccctaatacactaaaacagcagtaaaaacaatctgcacattggcatcgaaggcacagataaacttgccgaggacccttaccacggcagagggatgctttatatgagtccttagtagattaattaagttcttgctagttccatttggaaatgatgctgtcctcttggggctatgcagagaagttcatgttgatgaaatgagctgtcctagaatggcagttcccgggcagcagagcctgggctcaaggaaggttgaaagaaggggtggcgtggagctgccaggtgcaaatgtcaggccagcaatgcagtccagcttgcatggacgtgcttcgcctaggaagttgtgacttggctgcattttccacttcaggtgagatggaaggttgaactctacctcacctcctggtgaggttgatgtttcctggtgtttataactttctttgtaaatacttgaaaggaatttaccattttaatgctggaagagacgtctattccttcttaagaggacctgagtggatcttgattgcaggcct

SEQ ID NO: 34 - DNA, 589 bp, Homo Sapiens
gccctggggccatcatttgctgacccccaacatagaacacttctgagtcatgtcagggtccttaatcagttaggtcatccaagctcagattgaactgggacatggtttcagaatccttctcaacactgcatgcctgccataatgtgggtagggagaggctgttggctctgcagtagccacctgatggctgcttaaaggaccgtgaactcagttatcaccagcattttccctactctttcagatctgggtgcagttggctcagtcctccatccccagcctcgggaaagtctctctcccagatttccgctcctcctcaacaagcttgcatgttgtgccaaggagcaatcgcttctgctgctacgaattcacttgcccttgtgaattcacgtgcccttcatccttgcctcatccagaacagagaatacaattattttaatattttatgtattttttataagcctacagagttttaatggaagtttggagagacaatggcagtttacacagcagaagtaacagcatctgctcagtgtcattgtttaagtcatcatcatagctaacacttccaggaaatttatttcttttgcca

SEQ ID NO: 35 - DNA, 627 bp, Homo Sapiens
taatatatagtccttctctaacatagatgtttcccagatgtctaacagtggtctaaccttttttatttttacagtgctcccaaagcttgctggcacataaacatgaatgaatgaacaatgtagaattcactcaagaaatttcaaggagagagaggaggagatttacatcacacagcaaacaacctaataaatctgttaaacgccatgcatgtgaataggcgttttcctctttttgaccctttctttccacatagaactcagtgctccttcctcgtcctccgttacagtatttatcgccttccttcttccacgccggggagcagtcgaggcttgtgttcttcagcggacttgccaaatcatcccctccagcatgctgctctctcccttccacagatcatctgttaagaaaatacatttttcatgtcgttaatttacatatacatgtgcattatatatatgtttatacaatgagagattgttaggaaaatcactaccacatatacatgcattatatatattacatatacatacatatgcattatatatatacctgcacacacatgcatatggaaaattgttaggaaaaacagcacagtggtagtgttagtgctggttgtctttcggtgg

SEQ ID NO: 36 - DNA, 796 bp, Homo Sapiens
caaccctaaacaaatgaactgtgatgtgtctcacttccctgtgcaagtggaagatgctaatacatgtgtatcatgagaaaggacctcacaattttcttcttctgggttctgctgagacgtttctttgattcagagagaacttcccaggatcagcaagaaaagcatgtcatcatttcctaaaccctacaatccaggaaatagtccatcattttataaaattataaaagcgaactatttgagtttctttattatctgcccccttctccccaagctggtcttgtacaaacatgatgcacgtccattgggtgacaagtctgtcgtaagtgaaacgtttacaggcactacaggaatgacctggtgcctcgcccacttcattagaattctaattggggtgtgtaggagaggattctataaatggtaaggcaatccttggcagcctgtctgtcagcactgtccgtgccattcccagaggagcctgagaagaggcagaggaaggcgaaacatggctggtgagtgcatggcatcttctccatcaggtccttgccagaagcctgtgcttcccctgggccagcctgccaagccagagtgtccggccaggacagctgcctgccttgggggctctgaaggccagacttcctattttagggtgctagccagaggcggctctttctcagtggtggttgggtccctctagcatattcttggggtagaacatcattggaatgtagctctgaataatgggcagggtgttcagtgcagctggacatcgcatctccttaggcagaggacaagcttt

SEQ ID NO: 37 - DNA, 744 bp, Homo Sapiens
cccctccctcccagacaatgctgtggctgcgtccccttccccgccagctcgtccaggctcccgccgccagcgattcttccgggctgggggtggggaggtggggggggagtgcagggttggggaggatgagctggctcccctcacctccttgctgctgccctctccaagagggatggagacttggcccaagctcctcggttcacccggagctgtgacagccactcccagggaacagtcacgctgccctaccaagcccacctccagcggcctggattccccaggcagaggttgtgggattttgttttttctaacatcccagcttattcccaaaagggtttgagccggacaggggctaaacaggccccttcgacttggcgggccggccagacgtgacagcaatgccaaggaggccaagtttctttgtccatttctcacctcccccttttccatccctggacctcctggcgcccccagtacacagaggcccttgagcagcccggctgcaggttccctatctactcagagttctccccctcacgtgcctatccccaaccctgcagtgtctgcggaccaaaggggaagggagcctcaggccaacccccaaggtacagccagaccagctcatccagcctggaagccaagcattctttactaaattcattgtttggatcttggaatgtgtctcccttagaaacaatgttataaatggtgatctgcttcccaggccagccacaaaagtctgtt

SEQ ID NO: 38 - DNA, 1218 bp, Homo Sapiens
ttctaaaagtgttggcttacttataaccagtgagttgtatctcttttgtggcattggccagattttataaactgtagcttcttgtttatttataatggacttagatccttggatgagatgtattacatatgtgtgaaggattagagggcactttttaataacaacaggaataatactgctttgtgctgctaaactgtagatcttttcttctaaagatttaaagcccattatagacataatttgattgttgctgtattgcaacagtgtttttccttctctcctcatccaggcagatttttttcttgattaaagatggcatgaatactttctcatgttatgacctatttgataaacagctcaggatgttacaaaagcaaagcaggagatgtcttaaataattagtggcagaaagcttgctgctgctcgggtgttaatcttgccagaaagctcagatatttgtgggttgcactgtaaatttctgtacagatgtgtgtgaggttgagtttcagccatacgcctgtaacagcatcaggaaacattttgtcatgctacttccttgggtgatcttctatgaccaaaagaaaaaaaaagtcatatttctgtcttgtgaaattgagctcgaattctgggtagtttagtagtaatcagtatatgcctgaatcacagctgcgcgggatggtttgtattatataccaatggcaactactgctttaaatatggaaattaaatactttaggttcaggctgattccaatctgcgggtaggaaacgtctgatctatcccaagataagtttaaaagtgtgtggagttttctctggggctacaaatcctgttcacattcatatgtatttcttttgagacagtcccttgaggtctcttggcagccaccttcttgaacgtgggaagagattgggatccctaggaatgcaaaaaaggagaaatcaaaatgtcctcagaaaattccagggtgtggttggtccagagacccaatccaacagttccaagactcaaaagatgagtatcaaactatacttggcttccctctcttcaggcatgagacatccacatttacccagaatcagttcctaatttggaagcttcttgtgttcccagcattctcagatcttgtaccaaattttttgtaaactctcctaataatgagtagttatgtatagcattatagttgtggtcttgatgcttctattatcagttgatcat

SEQ ID NO: 39 - DNA, 1016 bp, Homo Sapiens
aactgccatcttgttctcaagatgggccatatactagtctctatttctatttctccagctcttgtccatgccacccagacaactatgatggcctctccttagttattaccctgtagattagttttgcattattggataaatggaatcctatagttttcgtttggaataatttagtcttcggaatctcttacttaacatgatgcttgtggaattcaccatgtagttgcatacagcaatattttatttattcttttgctgaatattattccattacttttgccagtttgaatggatttctttcttacagtcaagtaggccatgactaagggagataatgaagcatggaattgtcttttccagagaaaccacaggcatggaataagaattccctgaggaggccttttctgtcctttcttcatcaagctgcgacattattttcatattcagagaacttcagagcaacaccgagtttcgctgagtgggttcagagttccatatggcagctgtctcagttcctggcacgaggccaaaggatgacagttcttatcttctttcatgttcttttgcccaaccttagggaatatttctttaccctgtgattgctcatatctgaaaatcttactcacactctacaatcttccatcagcccaatgccatgtggtgttaaccctttgcatgctgcagtgttgagctgcaaacctgcccttttcttgcagtaatccaaagtgcccgtaaagtcttgaggcagacaatgttattttgtcatgtatgttcatataatatcagcaaatcattcattgtgtctttgtctatcttccagacatggtggttgctttgtagaatcaaaatttctgttatcttttttcataattagttaataaattcaagttgagctaaggagccaggtgaagccactgtgatttgggcaaggttcccatcgatagacatgtgctttcagacacaagatgtgctttcagacatacaattctgtttggccagagtagaatagaatgggt

SEQ ID NO: 40 - DNA, 708 bp, Homo Sapiens
gataaaaagaacatttgttccatcttcctactaccaggcattcaaactcagttttaaataggtatacaaatagctgggcatttcaggttgatgatatccactctcagggcaagtggctaatttccttcctaagctcgaataataaatgcctaatcatctttttatttttcctaaacagtaatgtgctctgcatccagtctgtgtctgtctgccggtgcagagctgacattacctgatcctatttcacagagaccctgtgtttgctagatgtccaaataagtggttgattcagggcaaaaatattagtcaagccatttgtttcactcagttaaagaatcagtgcaggtaaagtaggcgagtcagtagcccagcgtaggcaaagctgcgtgtcctcgaatgatctttccagccgtcattcctgggagggctgggcttttggggcactcctaaaggaactgccttgggctcaaggcaacattctctctcagcagcttctccttccccatttccagtggttatctcaactacttcaacaggcaaccttaaagccagccagaagcaattttagtttatcaagcttgaatgtgaaaaggagcaagcaaagacctgagctttctcttgtttcttttcttatgagtaacatgtgatcttttaaaaattattgtagtaagaacacctaacatgaaatctaccctcttaacaaatttt

SEQ ID NO: 41 - DNA, 837 bp, Homo Sapiens
ctcttataagagcaattaccatcaatggtcactgcctggaagttggacctggaaatgacatgctggatggtcatagtcttgttagatgaggtgtgcgtgtgatgataagtgggaaacagcttgatttaagggacactttagtccatggccagcacagtaatgatcttgggaagcctgaagctatgtcttctgttgagcaataaggtacagggcgcagaaggggcaaaataagtcagggagtccagttaacatgtgagatggaaacttaaggatagggacagagcacgcacaaagcccagggacacagctttttgctggacattttgcctgtactaactggtaaattagactgcacaacaggaaagaagcttgtgatagcaaaaggggtcgaaaacgggaaggacactcagagggcaggaactatgacggggctctgcggccttgtgggcagcagggagagtgtatttttggcctgcgggtctcgtgagctggaagaaatcaggaaagggaagctgagcatttaatcctacatagatcacaggctaatcgtgcccatttagtgtttgaaagtgagaagttgtcaaggctttgtgacagccttgaaaccgcaggcattagaggatagaaatcctgagcccagagggaggcaggcactcccatctgcccaatttggtcttcaacagcttccaactcttcaatattcccaagcagaatcagattaagcagaagtgctcataatagttctccaatttagcctgtatcttctctctctttcttttgtcctgggggccatgtgccattaggagcagaggttgtgaatgttccagaaatcccttt

SEQ ID NO: 42 - DNA, 1348 bp, Homo Sapiens
attatttcatctttccttttctttctttcttattaaaaaaaaaaaataatggccagaatactggcttctataacattagtccctgctctggcagaccaaaagaggcagaatcttcccagcacaattttgccctccaaacattttaaaagtatccaattatctggctttgtattacttacaaaatcttgtagttatgaagaaagttcttttttttaaattcagtttatctccctaaattaaaagtgtccctataaataagaagagaagctgtttctgtcaaaactttgggtctacttaggactaatggagtttctttgtttcgtaggaaaaccttttgccctcagaccagctgctaaagttgaacaccacagatgattctttcaaagcgattctgaaaaaccatatgctggaatctaaatttcttaaactttacacacaagatcagaactccacatcttaatagccatataactctataaagaattacccctgatttctctggtagatcatcactgcagaaggaacaaaaaaaggcttcataaaagcattccacctgtattgttggcagatgacttataaatgtcgcacagacacgggctgactactggctcatagaagaagcattaaatgaacgacgagacatctgctggtaaatacacagcaaacaaaaaatgcaactcagagccaaacatgtgcacagtgtgggccccatctctgctcataaaccaagcaatgtgttctgctaatcattagcagagttattgattttagatgtgtatcacacagctataattttgtcagagagtagaccacataagttgttctttttctggttgtttcattttgtcttattccaagagtccgtaaattgacgaccgggacaaaaattataattgacatcatctgtgggaaatatttcataaaacaacaggcccagatgtaggattaaagccatgtggtagtaaaataccccactgaaaaggggccaggttccatgatttcttaagaaaacagatgtgctctttttccctctgcttgtttttcaattttttttctccaaataaatccccccccaaccaccaacgttttttcctctctgtctcctcacgattgcactggagagagttcataaatggattacagatgtaggcttgtacttcaaaattctaactgtcacaatctctggaataaaataaatgaaacatttggaaaaattacattgaactattgtaaaggtaatgatgattatgcaaacatgtctgcttgacatttatctagcatctttgggcatgagcatatgatctcccagatacctcaagctggagttcagggagtaggaagtaattta

SEQ ID NO: 43 - DNA, 1125 bp, Homo Sapiens
ctcaagccactggctcaatggtccaatctttgaggagatagaatttaagcaggcagatctgtacacttttacatgacacccatcacctctcctctcgtgtgtctctttttccccctcctctttttctctatttcccttttctgtttctccaaacccctcagttaaccctttccctgccccctagtccttgtccacacagaaaatctggttctagagaacagtactcaaacagcctccaactaaaatgcattacgtgtggtaatgcaaaaaattattagaacagtttttttctatttaaaatatgactcctgttcactgctttggtttccctgtctttgtgcttcaggctaaatattactcagatttctgcgaggccaggtgctttctcaccaattatctgaaaggcccagagaatggtacttacatcaaagccagtcctaatgacaaaggacacctggccacggcaaacacaagcatctctcagctcctcgctccatttggcaaaaagctatttccatctcagtcacaacataacaaaggactaattgatgggagcattttttccatctttcaaaaaataaattgagccaaccccacgagctcatctagaggaattaattagggaataggaaatctccaaagccatccttaaattgacattgaacaaagcccagggaacagatggcttttcatctgaattctttaaaacctttagcactctactaattcccctataggaatgaaaaaaaattgctaaatgaatttgagcaaactatttcaccaggtgttcagttcccctaagattccttttgcactaagaaaaaaagaaaatacaacaggtatcctctctactgatattactataatttcatttgtacatgtgagttcttcccccagggctcattctaaacttcccctgcatttctgactaccaagctgggggaatgattctcttaattggtgcagctgatcatgcacaactgctcagagcacaaggacagtgtcaacacacacaaagtcgagaatgaggccattgttcaagcaaaatagaaaaatagaaaacaatttttgtcattttgtttcagatatctggagatttctggggcaagagatggagaggataaa

SEQ ID NO: 44 - DNA, 793 bp, Homo Sapiens
aaatgtatcgggtaaattctgatgcacaataaaggttgagagcttgagacttagggatccaatcaatcatgcaagatgcttaaaatggaacgttgatcttcacatgatacttgtcaaatgtagaaaattttgtctggatttggaaacaaaaatgtgagcatgaagcttcggtaaaataaactctcttgaaaaacactaatactctacaattatttttccatcaaaataaaatagtgccaagtacatagcttcttccaagtaacaaatctttaaaaccaaagtgaaattttgaaaccactccttcaaatagcatccgtccggtagacagatggcatgttttatttcatttcccgtttctacttggtggagttcatggggtattttgagaatcaatgggtaattaagaattgggtgccaatttaggtatttgatttggaaattgagtctttgaaaaccatcaattccaaatatagcgcaagccctccttattatgctatcccagaaactggtaataagaacactctaaaaatatttagaaatgcaggagccagattttctgggctgcaggtggaggacacacagctgccaggaaatggaagacacctgctatgtccctgagcccccctttggcgggtagtggatggaggacaataaggtctgctgtagtattaatctgggtactaaatagtaataaataaatgtgatttaagagcattgttgggagacctttctgaaagagcatgcacagtagtccttggtagtaaggaatcaaggctggtagccctaagccatt

SEQ ID NO: 45 - DNA, 936 bp, Homo Sapiens
actctgctgcagtcacaggctctgtgactgaggaactcattcccaaagaaagtgcactgggacacatttcaaaagttgatgcatgatagtatggggcagacaaaggttaaaaagacaaggtcatgattaagtaggggagaaacacacagatacctatgtaaatacctagggtatgagcaagaatctggggaaagacttggagttaggaggaggtgggtgcttggcaggcggtgagactttaataggcagaggtagaagtgaagggcaaagggaaactttgggccacacggggaaactagatttgtttgcttgtttaacactgtggcctccagtgggacctaaagtcgatgccttaatgtaggacggctatgttagtgctgatcagaataatgtaccccttagggctacattaaaaaactatgctcagtgcctcatttgcaccttcaaaatatgcacatacatgtgtgggccagaaaaggctgcgctcaggacatgcattcttatgtgaaccgtaggtaattgcacaagcaaacaggaagttgcgtaggtatgcaggcagctgcctgttgagaggtgcgtgtgggcatgggcaggcgtgggccttgtctgtttgagtacaattttaaaggcttctcctgatggaagggagggcaagcaagcctctgggcacctgcttccctaactgctgctgtcgtttgtccttctcaaggtttcctttctgggcagggccatgtcagggagtatttgtggctgtaagaaaaaggtgccgtttcaaggtctttgctaactgccgagctggtgaataaacgttttgaaattctctttgctgagaattccatctcctggttctcttcctgattctatggcccagtttccccagtttattccctgtcttcttcttctgtttgttcctcagatgttttcccgtgaacctgt

SEQ ID NO: 46 - DNA, 940 bp, Homo Sapiens
atggacctgtttctagaggggcatgaaggtggctgtgacttcataagcagaatggaagtgatttgatctacaccgggcctgggaaaattggcttaggtgtggcaaaggtacagagtgtgaaacaggtggggaaaataaattcaagatcctgaacttttccatggcccccaaaggggaagccatgggtacagtgaatggaggggctgccttcagctcacttggcgctgtggtgaactgtctcagggcttggcacattgccaccattccaagacagatgggaaataaacaccattagtatgtcgataagtgtttgttttccttcagcattagggctaagaaaaataaagtggggagggtatcaagccctggagtaagcctttaaaaggtttccccttttgaatctcttacggttgtctatttataacagttacaatcacaacagagaggaaaagacttcaatcacccctgggacacattttgtcaaaattacatttaagcactttttatttgtaagcgagaagcattatcttttattatgcctttaaagcagcgtggggaagttgtgtgcataaaccaaggtgttgctgtggcctgttgtcttttgtgaacttctggaaaggatcaccaagaaggatgctctgataactgtctgccaggcaatttgcataagaggaaagaggcctttctgaagatcattaaaaatgattcattactattggtcatacacatacatgttgttttattacttaaaagcataaatcatacattggcaagtaattgtgtttatcagactattttaggccctgggaggagtagagaggtacaaagtgtggtgattattcccaaggaaagtgcattttaattagggagacaagaacaattacacgtgcagtagttaaaagctatacaaaagcctatgattaagtggtgagttgtgaat

SEQ ID NO: 47 - DNA, 851 bp, Homo Sapiens
aaaatggatctttctgctgcatgcttagaaaaccagatattatcaccacttgattatttacttactggtacagcttgtttcacttattaaagaaaagacaaggttgaaattggatctattcaatgcatgttcgtggctttatgtgtctgtagataataagcagccttgggtgtttgttcagggttgactttctaggctataattggcatcattttgatttttctttggatgagcccacatcgttatggagtctgtagctttaaataagaaaacacctacaaaaatgagaggggcaaaatgttccctttggaagcagtaggggagggggcaggaaggggaggcttttgttcactcatggaaaatggacgtgtgtctcatggtagccgcagtttaagtaaacataaactctgaaccagagatcatacccgccatttcctcagcactagcaataccaaaccaaaatatagttttatttggctaaccccaaagtaggatgtgggtgccagccttgaaaaccacatgatcgggtttccagcagacaccaccagggctatgcttttgtcttaagcaagaaagtcacaaaggcaatactccttgtagtaccatcattatgtttagcaaacagatgcaaccataacaacagttaacttcagagacaacagttcactacagaaaaaggtcaagagggtcttttactcttcatgcgtagaatctgagctatcccatattacaactctattgagagaagaggcattaaaagagagacaatgagaacctagggcataggctcaggtagtggggctgggtggggaaagaatcctcccatcttcttatgagttctagagtcggcc

SEQ ID NO: 48 - DNA, 1072 bp, Homo Sapiens
aataagtacccccagtccatgactatttttgagcaaatgaggatagtaacagtataagatttttagtggcattttcaatgaaagaattatacaacaatccctgattactctttgtctttatgtgtccataattttactgctaacactaagagagtgtatcttgctgttatcaactctggccacatcttcacaagtacatatagcaggtcactattttgttttacaaacagaagttgattaagttgtccattctgtaggacccacaacaaaccacagcccaatatagcagcagaatgtaaggatttagaaggcctaaaatctacaagctcaggaagacacccaattaacagaaattaaagttcaaatctgactcatccacctactggaaattctgggctgtcaaacaatatccaagcttattttgcaatcagattaaagctctgggccttgtgggggccggagattggaattctattttaaaaagaaacgtgtaaggcactctgcttcccatcaagaagtgtaatgagtaggtttcacctatgatccccagtcccaaatgattgaactggcattagtgccaaaaaaattgaaaatgtcttaacatgcattaatcgcttaatggatgtgttgtctgcctgaaaagggcggggtggtatttaggttgcttaatgactttacattttcccatggcaaaatacttgtgatttgattatgctgtaattaaagagttacataaacaatatctttggaaaggaacaaacgggcttccttgaaagagggattttggtcagctccagctggtatctcaggccccttcatgaggagaaaactctcacccccaggtaaactcctctctctgcctcttagaagttgcccttagttttatgcctgcctgtgtgtgtgttgtgagtgtagatcatgggagatggggagtgggcagagggaggattttttaaaaaataaatgacatctttaatagacaattttaaaacaggttgaaatacaagtaataaagacaagcactttaaatttagaaaaggcttgggatcttgaagccaaaaagcctagtaat

SEQ ID NO: 49 - DNA, 795 bp, Homo Sapiens
ccacaatcacacatctggtagttggatggctatcagtgctgcaggatgactagcaggtgttctcctcctcccgcaggctagcctgggctggtggttcactttgtggtcacaagagagtgagaaaaagtgtgcaacaccccttgaagcctaagttcagaactgacacatgttcatttctgccacatttgattagtcaaagcaagtcccaggccagcccaggtatagcaggcgaggaactagactccaccccttgatgagaggagctgtaaagtcatgtgcaagcctaggaagactccgtggccattttagcagtcgattaggctactcagccagttttctggagccacacatgtgggctggccttcccaagtcttctccgcccaaaaagccagacagagtttgtttttccagcagggcgcatatcgcaggcctgggtgggttgtttgtttttgtgtttgttttgacttttagctatttccaggatgtttctttcatggaggagaacgactcagttctgtctgccatgtgtattaagatgagctacaagagagcattgctttcttgtaatgcaagaaatgcaatgtagtcagaggctctgaaatctggtggggacagcggcagcagagactgtgacagcctcgggacacaggaggccaccttggtcttcagtcttaggtgcctggagctaccagacagccaaagttgcacaaggcacaggcatgacctgccaggttgcccagccaggccagggatgacagggcacgttcacctcaccagctaatcagagacaatccc

SEQ ID NO: 50 - DNA, 706 bp, Homo Sapiens
ttccatccccagcacagtccacacacaatgtaagtgctcaaaagtcgaactgtagcactgagttgaggggtggtcagccccggtgagccctggtgtctcatcatggtttccccatggctgtctccacccctcttccagaaaagctattgagaaatggaactctttgacatcacccctagctaaagttgctgaaaacagctcagaggagtgaattccacagagccctatgccccgcctagattcctggggcttcttgtctcatggagtctgcagagccgcgtccagacccctcatcctggaccgctacccggcatcggcctcctccacgtagtcttcttgctcccactgcaatctgactttctgccaaaccatttccctcctggcttcaaacttttgtcgggaaagagatgaaatcagcacttggagagctggaaagggaaaaacagctgcttttcacaaaatgggctagggagggggaagcggagcagcacagctggatcttggtgggaaagccagagtctggtgggaacgtacagctcacagcaggagagacaaacacacaaacctagaggggcccagcggcagcagctcaggggcttgcttgccaatggcaccttgtgccgtattcttcagatacagtcacatctcatatccacattaaccatcctagggctgtagagattttctccattttagagaggtaggc

SEQ ID NO: 51 - DNA, 982 bp, Homo Sapiens
ttgaacatcattaaattgatttaaaatattttcttaatttgcttaactaagaagttggaatttaaaaaattttattaggagtgcctcgtgtgccttttgtaacatctagtttgtcatgaagccaattagctgtgttatagtcgaatgccagcaaaagaatgccaagctgtaaaaggagatcagaagcacattttgtgacccatttcttggtaggtggcattgcttgtttgaaattatacatcagtgttattacacatagccaagagggttcttagaatggattatcttactgttttttttttatctaagaattttatctcctgacacagatggatgcagggatgggagccggggtagcctgggagatggaacctggcggtccaggtgttgaagggtcgagatagacccaggatggccaatgacaggaaacccatctggctgtttaaatacggtgctaggcaactagcagtcacccaggcaaccgatggggctggggaagtccagcaagaggtgacagcgggtcctgatgacaggactgacttgccctcggaggcaggccatggaagcaggcactattcagagacgcaggcaggtggctggccttggggacgtctgtcagctgcagggatgggacgccaggccttgggaagagcaagagcaagacagcattccaggaccagggcaactggagcccgtggatgttgtcaagaaggaggtgggcactggggaaagagatgcaggagcgagtaggtggtccaggatgccaggtccggcaggattccaagagcaagcagaccccggggcagctgaagggtcaagaactgtggtgctgtgaagtggttctcaggacttcttaggtttctctctcaggaaggcctaccaaagggtcctaggtgtgaaaacagcggaccatggaagtgggaacaggacgggatattttcaagttgggagtccctggttagaagttattggattggaaact

SEQ ID NO: 52 - DNA, 929 bp, Homo Sapiens
ttctagatagataagtaaataacctttgcaaactcgagccacacttttcccctttcttttaaaattcagcttaatataattgaaaactgaagtctgactctccaagcctataagggataaaagagagacaggatagatagaaataactggcaacgaggagttactgggctttggctccatgggagacaatagtggtttcatagaaggcaatggtggactcttagtcaactgaagcttgggtggaacttagctgcataattaagaagctgaatctgttttattttatttttctataacataaagagtgtgaaaaggtcattttaatgttcagagagtggcttctcttggaaaatatccccgaacataccatggagcagtgtcaactgtagtataaaatgtcctagaaatcttgcaatttatgagtttaatggcacacctgaggattacgaggttttttccgtccactcataatagcccggtgactgatttagcagagaggaagcaaaatgaacaatcttgatcaccttttaacatttttcctgtcttgctgacttcagagctttaggggtacagcatttgcaggaattgtatgtctttttggcaatactttaaaatcaaactcaaaagatgaagaagaaaaatggttattagatagttataaatatgtcattatttgcaaatggtattgctttgtggatatgaagctcttcattgctcatctgtttttaagttcaacgatccacatataaaggtgtaaggacttattgacattgtgcttcctctctgttgacaccattagcccgagaactaaggacaatggatagctgtatataagttcaagttctgcatctacttcttagtttccctttccatccttcagttgtgtttgttttttttttgaaatctgtaaagtaggaataataataaag

SEQ ID NO: 53 - DNA, 892 bp, Homo Sapiens
aaaataaaatcaacatttgaatgaatattgaaattctcttaaaaaaagacaaatgagggggaaatcacataagcaagtaaggtttcacacacatggtgctctagaaactaatcagtggacagattcagaatccatatctccctttccaaaatgttctctggcagaagtcattctgtaggacaaactggaatcaaaagagttatgaaaattgtacaatgggatgaaggggcttcccctgttggggaatagatagctgacatgctggatggggccagggttcaaacaaaggcccctgttgagtgggagcaggtacaagacagatggtttgttaaacattgccagcatgcttgcgcagtgccgtgcggcggtcagagcctggataatggtcaccagggcattgtgtagcagcgcattggctaatttcagcccagctaaagctattgcttatctttgttggttttgcaaagattaaggcagtttctctgctttgaatgcaccacagctgcccagcaaagcattcctgaagttttgtctgaattcccactgctaagaggggccaagcaaaaggtggctcgtgcaaggacttgttttaagctcatatgtgaagttgcttctcctcaactaatctggaccactcttgactcttacttctgggcaaaaccctctagagttacaggggccttctttctcagtgagtcctttcctgtgtggttcgaaatgcatctgctggggatttatatttcctagatttatatttcctattgggattgattcatttgctacttttgtggaaaaaggtaaacaccattgtaaattccatccggtgaatcatggggaggcggtggttccaattaaacgtgtttgctttcggaagggggcccttggcttctta

SEQ ID NO: 54 - DNA, 798 bp, Homo Sapiens
gggatctgagaaggcctctggggaggcgacatttgacctgagacttgaagaatgaggagtctggcaaagacctggggctgatcagtgttctaggaacaagtaacagcaagggcaagggccctgaggcaggacagagctattaatagtttaaggagggaggcctctgggctggtgagagaaagggaaggggcccagttgggtagtgggcaggggaggagtttggatcttattctccgtgagatgtgctggttctggtggtagtgggggggcctgtagtctcctgttacaagggttgggggtgtggggacagccagagccaaaggtctctcccccacagctccggcagtcccagcccagaggcgccggcctggcggctggaagattgcactgtgggcacatctggggagcagctgccgagccagggccagagtgggtcacgtggcacagggcaggaccgtcctggagcctacaaggccaagactcctaggaggggcagtggagaacactctggacgagaacagtgcgtcaacgaggaggaactgtgcactgtagacgtccaggcacacggccccctgcagccccacacagcccctgcctcaggacagagtgcctgggttcaatgccacctcccagctttgtgatctgaaacaagtcactcaacctctctgggtctcatggcctcagctgtgaaggggacatgatattactaccacagttccacaggctgttctttttttttttttttttttttttttttttttaattttttgagacgcagtctcactctgttgcccaggc

SEQ ID NO: 55 - DNA, 945 bp, Homo Sapiens
gtgccacctcaggcatgtcctggcttccttcctgacaagtatgaagcctcttatgacaatctagtgacatggaggcagacctgcatgatgtcctgggtttgtgacctgaggtcccaaggactagagggcaaggtagcagcacctggtcctcatctcctcctggcttaattgagctttgggggcttgcgtattgtcttgagtgtttggttgaacctgtatatcctgttggatcaatcttgatattgcttccttttcatttctctcgatgaaggccgtcttactgaatcttgtctgctggggaagttcctcattgctgagagcagcagttaaaaaagctgttagccacgtggctgggctcctatttctgcagaggcaggctgagttacagcttggtggtgtggatccaggtaggaattggtcaacattctgaatcctgagctgccatctgcctcgtagcctgctgggatgctcagtttagacaacatataaagtttcctggatacgggacaaacccaggcctatggaaagagcaggaaggttaaagtgtgtggtactttgggcaatgacgaaggcgtaaccagggagctgacatgtttgctccaaagccaagaattccaggacaatttgttatccagctgaagccagtgtagttgctacaaaaaagcctggggacaaaagcatgctttttacttgtttccctgtcttcttgcacacctactctattttctaaagctgtagtaaaggttgctgacattggaaatgtttgatgatttttgctattctcctcgtaaatgaataagagtctgggctcaggccaaaccatggctctatgtgctgaaagtatcagcttcctgaaacagcttcacaaatgctgacatttcactcagaccaggagggtcaggggaaaggcctaagcaagtactaggttttatcatgaaagaatga

SEQ ID NO: 56 - DNA, 776 bp, Homo Sapiens
tatatatatgtatgtatatatttagtgcttcagacaagggaggtcatgctcaaggcagcctactctcaaatcttcatccaaagaaatcctgaatgttccctgggtctctgctggattctagaactcttgtcctcacccttagctactgcaaatgaatcttggtcctatgcccacagcaattagtcccagccctggcatcattccaaaggaaaaatgttaaatcacacctgcccgaggcctctggaatggttcaaaagcttagggaaaagggtgtacagggtaggaaagtggggtgagtgaggcattacctcctcagccagaaagcgcagttttgccaggagcttcttggccagtgccaccttcttttgcacattgcgccgtctcaggccgcgtagaagtcgcagtccttgcttagccaaaaggttctgggagggcaaaaagacagcatgagcggaaggccccagctaggcgcccctgagtcccttcccgaggccgtaccaggctgtgcaccaggagtttccctcggcatcgatccagggcattgggccgggtcatcgtcctgcgctcggcaccgtggcaaaactgtctgcagtgagcagggatgtgcacagcagacaggaatcaaaggaaaggagaaggacagtgaccttggggccacttgctctgagctgacctcccacccccagcctccctcatagccctctcagtcttgggctctgaagaggcaccctttctcctgcaaagctggcctatctctatttggaccactcccaaaa

SEQ ID NO: 57 - DNA, 1597 bp, Homo Sapiens
tgatacccagatctcacctaagaccaattatgtcagaatctctggggtgtgccctgggcacccatatattcttaaagctccccagtcgtcccagtgtgggtccaaggactgccccagctccagatcaattctaagagcctcaagatgaacatctggggaaaaggagaagtcatgagtctcagataagagaaataacttgcccaaggtcacacaaggtggtgatggcaaagcccgtcctgaaacccaggcctctttcctgaccgtgggccaatttcttcctgatgctgcatctctttttaaaaaccagagcccaggcaggcaatgcccacagtatttcactttaataatattggaaaccggtacagtcagggccaccacagtggtggggcgggagcctcgatggcgattaggggagctgtaagtctttcgctttatccaaatcttgggcagtaatttagaaaatttaattaaagggggagaaatggggacacctcgcgctccctgcctcctgttataatgagtgaaatacaccaggctgtaaaaggaaatgctgtctgagacgcagctccgatgttttattgccaagttttattcactgatgtaaacgtaatcgctggaaaccggagctcttattaacacacatattttcacacatccggggcccctcctgctcccccctctccctctgggcttgttcacccacctcctagggtcagccctgctgctttctgggcatgtctatgccaagcctggagttccgcaccggtttcataccctcccatggcagataagactttaatagaattccattgctcctcagagctcagtaatgcattctggaaattaggcggctacatactaaagccattgttcccccttataaatgggctctctcaaagccagtgaccatgggggctctgataagctctcatgaagcctcactccacatgttattggtgtgctaaaaggtgcaactccaggcttacattgctcattgttaggggctgatacatttaagtagtttctccatgaatcaggcagcctaggtatttcccccactcttggcattgatagatgagcaaaaggaagccatttagatggtgctatatagggctccagcccacgtggtgaatgatttccaatgcctggtttaatttatttttaaatgaaatttgttattgattctggattaaaaggacaaatcttacagctgttaccactgacagagccacagtgctcaagtgacacctctcaaggaggggagggagggtggcctgtctgagtcaaggggagggtatggagactctccagggagcttggctcagcagtaaggggcagtgcaagatcccatgcttagagggaagtttaaaaatatcatctttcccaattgaaatacttgacgtgatgctcacctctgagcctcatttatataatggaaatagcagtgatatttgcctcatggcatccacacgaccactagaggcatgttagttgcctccagggatgggaggctttccatctcctgcagcattcccagaatgaaatgagtgacaggcgtcacccactctagtgaattcctagagactgtttcctgggc

SEQ ID NO: 58 - DNA, 804 bp, Homo Sapiens
caaacactgccccagtgtctggcccagttccagctcaatgctgcattctgcatctgtttattgtaagatgtgaatgccccatccaactttcttggcagatgtatccttttttacacttttttaaaaactgaaagatgatttcttcatttcttattcagttttgaaagggaggcacagtcaatgatctcgcacgtattccagaaactgacttccttagaccttaacagaagctactcaagtgcacagatgtttgctggttttacatggaggccttgctggctatgaaaaaacattcccctctaattttttgctcaatttgttttaagttggtaatgaaatctgtgaatctgtgttccctttctacaggaaaaatagaattttgatctcttttaaaaatcagaacgcaacaggataatggagaaatcagtctcaatagcacatttcttgttcgtttcagagcggtgatgtaaacacgatgatgctatgcttttggggtctttgaggtttctgccaaaagcatagcagcttaggtggattcgtgcctaccgcatgcttctttggtggatttctgtcgacaaattgtatgtctgctcttctgaaatagcatcatgaagttgttaatgtctttgcataaagaccaccccattctgtttgccctggggacaaagactttgcactaatcaccttgctctctcctggagcgaagagctgaagaggcaacaggaaatgcttatttactgagttcttactgggtaccaactgtggacacccacagaaggggtttgagtaagtatctcctcattg

SEQ ID NO: 59 - DNA, 838 bp, Homo Sapiens
gggaactctggagctgggatgctccaaatcgagcaaggggccaggcctttgaatccatgtatctaccagatattggacatgggtttctgtcccctcacccgcctaaaggcatgacgtggggtgaggcagctgactttggctgagggctgtcagcagctacagggtcaaaaccgtcctgggtggtatgatccatcacataaaacctgctaaaaactcgggccgacctcagccctggaaacaatagcaggcaagacgtggcctgagcctgggcttatccagctgggcctggccccgctccgagggtctgtcgcttgctgtgatcacagcaggatcagtgccccagatcttgcttaaagcctggcggccaccgcctgcctcgcagctcatctcccgcagctccccgaggtcccagcgattatgccactgaaaattccgctttcatcttgtcaacctcgcagtaaattacaggcctggggaggcgtgggcctcctccttaaacaagattcaattccacttagctgcccccattcccaccccacacacgggttccctccctcccaccaccccgggctcgggatttatggcctctctttgcaggcagctggtaaccatggcaagctccttagggaggcttcaggctggagcctccttagccccagactccagcacggccggccgctttctcctaggatgggagaggggagaggccagagatggcaggaatgggcttcaggggccaaggccgagaggtcatagtaaccccagcaatcatgagaacttcaacactaccacatctgaccctcacaataaccatcatttcccccattatatagatggg

SEQ ID NO: 60 - DNA, 938 bp, Homo Sapiens
tactcccattgtacagatgaagaagatgaggcataacaatttgtgcaagcccacacagttaatgtgccggagtcaggctttgaactccgacagtctgactccagaccacctcttcctcccagtatccatgctctggtgcctcctgtggcacactcagaagatggcctgcatgtgcatgtgctcatttctgtgtgtgtgcatgcatgcatgtttatgcaggactgggaatgcaggggagttagagtccagttaggaaggagagaggaaatatgatctctttgttgcatgtgggcaccgtaactccagccaggcaaagtgctggtctgttgtagctcatttttatgtttttatttagaagcttcaataccagagctgatggcagaaaatgtgcagtaaaatgcggggaggccgctgggtaatggcccctgtaaagtgttaattgcctattgagactgcagactttgtccatgctccaggatctgaactattgacaggttctaatttatttcgggcccacaaagcgggctcctcctctaaacaggcttccaatcagtcacgcttccctgggcctgccaagaagctccagtcgataagtatgtttgctgccttaaccctttgaagctggtcgtgtggtctgattctggcttgccttaaggaaacttccatgcacaatggtcttggatgaaaatccatgagaatcaagtgctgactccgtgctgggctcccagctgggtgttttacatgcattgtctctgatccttaccgcttagagaagcaggtagtatctcttcaaggacatcctaacctcagagaagttgaattaattgtttaagtgaccactatgattatacttcagactgttacgggctaaactgtgttccctcaaattcatgctttgaagctctagctctcagtaccttggaatgtgaccgtatttg

SEQ ID NO: 61 - DNA, 816 bp, Homo Sapiens
caaatcaggaaggtattaattggtgcatgttctgtaagtgctgttagaattagagctactgggctggctgacaggagtttagagggcagcccttttcctcctctgagcctgtctccccagccatcccttctaaaagttgctgggctgatgcttgtatcttggctggctctgatgccagctctgacggggccaccctggaacctgcttgcacaggctgtcgagggcgtgagaacccaagcagacaactcccagtcctacctcctttgctgtgccaggctgccagtgccagctgaggaggccccctcctgcctctgcttgtttcccttgattgttatgtaatgttcggcagcaggaggtaaattcctctccaatttccaggcccgttacagcgcatgaaccccaccgtggggagccacagtgattgagctcagcagccaggtcccatgctgagtgtcataaatcaggcctattaccagcttctcctggcagatgccatagccaagaacctgcccactgcttgcgagacccagccgcctctgcatactgttaaaccagggctgacagatccaccggggatttaggggatcttcatgacactctggctgggtgttgccaggaatcttattctgagagagcaggaggtgacacagcccttggcaaggcatctcagacctgagatctcacagcctgatgtacggggagcagaatcagggcatgatcacctgcaggctacctggatttcctggtatggtggcctcttgtgtgcctggctgtacacgtaagaacctctaggggacttgttaaaaaatatacatc

SEQ ID NO: 62 - DNA, 1072 bp, Homo Sapiens
gggccatgtacttagcatagtcactggtacagaataaacactcactatttgttaaatgaatgaatgaatgtgtatgcgtgtctgtgtgtgtgtgtgtgcatgcatgtccatatgtgagtgcgggtgtttgggtttctgagagtggggttattaatgcttgagtgggtgtgagggtcctacatctgattatgtgtttaggtttctgtaagtctagaacttgaccatgcagagacaatgaattttcttgcactcctctgacccctacctgtgctcccactcatcttccttagggctccccttgcctggggagctaccctcctcaccagcctgtagccagcccccatttggacctttacttctgtgtgtcttccggaggacacagatggcaggagcacggaatcggaagcacttggcaatgaagcagcaattcattccgcaatcccttcgtattcatcgcaacaatgcctgctctgatgggctccgcgcgctgaatgcagctttcaatgtgcaatccagcgggaattgtggtgctttgtggtcctcatcacgtccacttattgtcaagtgttgctgagaattctcccactcgggatgagggaaccacttgttttagcaactgatttccgaaaccttctctgggttggggtatctgcgaagctcctggtgatgtgttattgttcctggtttgtgttttggacactcatgtgctctgctgaagtatgtaaattgccataatgtgaggaaatgtgatataaaaataactccggggcaacaaacaccagaggagctccaagattggcacagcctttcctggtcctgccttggggctagggagcatctcttgccggcagtgttggcagcaaaggcctgagatgccctggaatgaccactgcccatcctcctgcagctgcccagctggcctgctggagaagggcgggtgagacccctcctaggaaggcaggaacagctggatgtggaccgtctccttttttcgcagctggtcaacagaaccacaggctttgctctggctaaagggaatctgccacccctgactattcaggtggctgcacac

SEQ ID NO: 63 - DNA, 1039 bp, Homo Sapiens
tatctgccagcttttgctatttcctcagaaaagctcactgtaatttgtgtgtgtgtgtgtgtgtgtgtgtgtgtatactacagctacatgtatggaacatcccctctgagttcttctcaaagttcctcagagggcaggacctttttgcagctgggcgtgcggtagataatagcccagtgcctgagtttctaagtgctgtgagggatgtcagagtctcaaccgagaattatttccttggtgtctcaccctgccctgcctggctcttcccactcagttcctggagggcttttttcagctcagtctgaaagagcacccagctccccagaggaggggcagcatcttgctgtgatgtgagtctaattgtttctagattgagcgtttccgtgggacaacagtcccagccggtgttccctgaattaacatgctcactgaaggattgaagatggtgattaggcccgacagcatcagtttcggtgggacagtcgcagtgccacagagctgcatgggaccgcaaggagatttatttgtgtggaatggagacatatggccggaatcatctgctccctttcctctgtaattaaaacatctgggagcagcaaagggctggaaaatgaggagaaagcagtgaacatctcttcctgctcagctttgaataatccagccatggggctggggcatcagggggtacaagccacctggtataggctggtccaggagttgcaatggcccaaaggccaggtaacttgtaaatgtgacttgggggttttgtttttggtgctttattttattttttcctgaaagcatgtagaattggtttctttctgaagctgtttctaaaatgttttacaaaaaaaaaaaaaaaggctaaatgacaacgaaagtgtagggctcattgttggagcctgatacaggctatgaccttcatctaagagctatacctccaatggatccaatcaagccagtatcaagacccttagcaaagacatcaagcttggaaggaatggtgcctaagggtgtcctttacttttcttagaaggac

SEQ ID NO: 64 - DNA, 1246 bp, Homo Sapiens
tttatgtgggaataataaaatgtgccttagatgcctgaaaaggttagtgctgaagggccaggggcatggggggagattttaggaggtgagggacaccattcatttaatacaagcgtgcccttccttctctccctgacctccccagtctgcaagatttcggcctgcagctgtcagggaatatgccaaagcctaggcccaggaggggtcagggtaggtgaaaggggaagaggcacttggatcaaccattggttgctctcaaatgtctaaagttggcatttatatacttgacttctctcacagtttctctccttcagatttaacgtctaggtttctctgattttaaaactgggttatttgaatgtcaaactttcgataaccctttaatagaggtgtccattaacctgtgctaaattagagcccagcgtccctggaaatacatgtgacacccacatgaataccaaatgccttcattaggcacagcacttacatgatgaataccaaatgcagagcccaacgcagggacacagatttcgcttcgaggacttgccaacacatctttgcgtttcctcagcggtaccggtcagccctgtttgctgtttatttccaggtgatgagatgtggcaattgtggcattggctgaaataaataaatggcatcctaatcaccaagttcagagatggagcagcaaaggaggctatagctgatcactcaggagtcagcaaaaggatgcccacttagtatgcaagacgacttccaaacacttcataaaaggcgataactttctttgaccaaagaatatattatttataagtgattccaatgccttcttctctccctccttcactgccatcctcctgccccccattttcactgtatgttgtagcacttgttcagtgatgaagcccctcgtaataaataatttataaagcaatttacaagtacattattcttagcaataagataagacctggaagaaagtgttttactgatacacacacacacacacacacacgccccttggcttataagtagcaagctatcagaacaccaataactaaggtccatgggcttggggtgaagggtgttataagccatagtgctggagcccttatacataagccatgtaaagtgtctgaagtgtatttgcataataaataagagaaaactcactaaaaacagccttttctcttaatccttgtacacagctgccatggctttgtccacatggcgtgatactaagtgaaga

SEQ ID NO: 65 - DNA, 976 bp, Homo Sapiens
cctgtgtaccctttactcaccttcctccattaataatatcacacataaccacagtacagtgtcaaaatgaggaaattaacatagtatcatactgttaacttgattacagaatttgtccagattttaccaggacttacgtgtactcttgtgcgtacatgtatgcgtgtgtgtgtggtttacctctatttttaaggactgtctttccttacaatctctatgccaaggtcatggagttttagccattgctaggcagaggtggagctatacatgactgcgcccccacataatcacattcctttcatttaagaatattcatcccatatggagaaatagaccatgtttattaatcactccagaaagtatgtaatttcattagatcaagctctgtctctgggcattgactaatagagggaacggctccccagcgacccagaacccctacgacacggtctgtggagaccatactttggggccagctgctcaaatgcactgctggaattccaggcagaaatgtgtaatggcatgccaagggctgctgagctgtcatagtccaagcagggttatttgtggcttccaaagagaggctgtaaccttttatggtatccacaaatctcagccttcaagagtcagggagaaaatgcaaccatgctgtttgaccgagctaactctttccccaccttgcccctctcccactcccaccatcactctacccccaaccctgagtagtctgcatagctgtcccagggcaaagaacatggcatgagacattacctttagcattacctcagggccagataaaatggccaggcatcccttctgattcaatgagggaaagtcccagaaagttgttgacaaagtagaaactttctaatttgaggtcctgaacattcattgttctttctgagcaagacagaaaagttttacttattggctggggtacttttaatggcagctgtaggccagggacagtcatgtc

SEQ ID NO: 66 - DNA, 1061 bp, Homo Sapiens
tgtgtgatcctccatgggggatacagaagggggagtctagtcggggattttgagttccagttgcctttggaacatgactgcacagatcgcggcctgaaaggaagtggcagagaagaaaaattcaaaatggctgccaatagtttgccctctggaggcctcagagttccgggggccatggatgcatggccacgcagggtgagcaattgtgatgagagaacagaaaggaaatccaaataagagaactcaaagcagagatgagctaaaaatcagcaacacgaaccatcacaagtgggtagttacgctcggcaggagatccaggcaaagcgagggcaaacttcttagccttttcctgtggaaaatttataaagctcagattggagaaaacgtactgatagttttgaagctggcattttaagttggaatgtcttctcaaagtagcacataacggcacaattcaataactctgaccattgtggaaaaatgccatgtgccaacagcgattttccataattttgttcagaaaatctgaaagaaatgcaaaaaatggatttgcagccctggcagcaggcagagaaacagtagcagagggctgcaggccagtaattgatgtttcaaatatcactgagtgctttgcctgtaatttcaggggagaatgataataattaaaagcacaaacttacaagtcatttctgaggaggaaaatgctgaatgcacttaaagtgaagggggtttgttgaaatgcttaagtttttccagcgagctttcagatatgcaatgattagttttatgttcacagagtgactttctcctcaaatgttccaaagtgccacaaaatggaatagattattaacccatgagattccctgggagccagtgatgaaactataaccatatgacattcccacatgttcagaccttacttgattgtaccggcctttgttacaaacagcacagtacactgtttaaaaggatgaaatgaaacctttcctccttctcccaactgacttggggctttactacgaggcagatttgagcttgagtctgcatccaccctttttagt

SEQ ID NO: 67 - DNA, 1052 bp, Homo Sapiens
attgacctcacagaactaggcaagtccccacaagggcagacatcagagccaacccttctcaggatagccctggggaatatttggcccctgggcttcagacacttggcctctgaaccaaggaggccccactaagaaggccagaaagggggcactgccggcaatcacggcagtgagatggatgggcaacacggggcttcctgggctgggtgcagcttccaccctgttctgctctgcagaggagcccggctctgctgggcacagctcaccatggcgagtatgcaaacaaccacagcacaggggccatttcagttagttcaggaaaggtacaagagcatgacaaatatatgtaatttgtaaattggccagtcttttgcaataatttagaggctctagttaggagcaatagaaaccccccaattactgatgtttaaggctggcactgttgctggctgaatatttcatgcataaatgaacttccactaggccacccgctgcttctgatgaggctcttgtgggctttattgcccggcgcccagcagggtcccgccaatgggccccatgacggatgatgcatcgttttgcagcttaaataatgcagtgtggaacaggctcagtgctggtgcactttatttacatatcaattgagtggccactctgaatatgaagaaatatgagaggggaagtggctggcactgaatatttcatggccatgagccccacaggaagcgaatgtccccagcccagagttaggtctggccatgtgtgtaagagagaactggcattaatagtccaggagacgaggcaagaataatcccccaagccaggaggggagccactaactggaattgatgagccccctatcatctggacacagcctgctggtgctttttcaagtcagcaaaatatctgcttcctgcctgtaccttctggttcccagaaacttctgcagagaagggagtttgttcaagccatcacacgctgactttccaagtcatgtggatggaacagaagttagtatgcagtggaaaacagcatagtccatcgagaaaggg

SEQ ID NO: 68 - DNA, 787 bp, Homo Sapiens
tctgaaatcttacttcaatatgaaaaaaaaaaaaacaaactcaaaaccaaaaaccaaaacaacatggggaacatttttttccaaaaattaccacacttcccatgcaatgtttgcctgtcatgaaccactgcacaaatcaagccccgctcaatgtatcaaggtcacaaaaccaacttggttaatatgttgatcattacatagtggctctgtcctctacagcaactttgataccatctttccaaggcagcaacagaagggcccttttcattcattttctatgtgtctttgatactattttgcgcttctggatttttccactgtatgtctcttagaaacaaattaagctcgaataagttgttccagctaatgaagtgcgcttttggctccttctccgtggttcagaattatccggcaaaataccaattgttttaggatgcattttctcttagttttgaaatattgcaatactaagttaccacaaataaagagcattgagataacaacacacaagaacgtgtataaatggaaactactgtaatccttttttaaattaaggacgtgtggacgcctcatgaataaacatttaggatatctggataaatatatactatgtgttcacatagataaaaacagaaaggagcattccttcctacctcactcccccaccccaagtcacataagtttctcgcagggcacaagcccagggcaatcactgctcagaaatgtaaaccatgcaactcaaaatgactcaagccctcaaacactccccacctaagtcctacatccc

SEQ ID NO: 69 - DNA, 871 bp, Homo Sapiens
gaggaaactgaggctcaggctgttttgcgttgctgtttagaatccagggaagtccaggatgttttttcttaagccatgttggggtgcttaggctcagtggagaagcggggcatggccatatgaatgatatgcagttggcagcacatagtaggcacacaagtgtttgctgaatgaatatttacatgaaattggaaaggagccttccaaagatggagccagcaggagacagtgaagttgcctgtgcgggccgggggagtctgtctctgtctctgccccagcccacctctggcctggcctgagtaccttgagaagtgggcccaggagaggcccctggatccctgggttcctggacagccagggtgagggcgctttgccacattcttaggagagagcacatccaaaacaatttctttttctaaaaactcagtgctaacggattccagatgtccgtttgttatataatggggtttgttttaatagcgtcaacttccagatgtgcagcctggaatcaagaagcccattggccccctgaggacactgtgagccaagctgagagctgcccgggggagagacatggacgtgcagaaccagggatgggagaggagccagggtgccttcttgctgcccactgggctgctcacctgccctgcagctgtccccagactgaaagacaggaagggtgttcccgcttccttttttttcagtcctgactctgagcaggggctcccaggggacaatcatagacaggcagcttggggagggtctgctttggaatctggttcaagcaggcctagctggatgagcctggagaagtccttggcctccctgtctttgaatggaaaatagaataacgccattctacccagagagg

SEQ ID NO: 70 - DNA, 866 bp, Homo Sapiens
aacacatcaccagattatgacattttctcatcacaatagtccaaggtggtgtccctgtcatgacagcctgcctactctcctttcagagtgcatgttaaaataacctctcactgcaaccagtggatttcccagtagtctctcttttttttttatttttttctggagtccggcctttcataacaagcccccaggtgcatttggagttgctacctgtaaatgtggcaggatttctcttcatcagacttttgtccctgttctcttccctgaagagcaaacatgctgcactagaaggaatcagtggctcattgtcactggcaaagccgaggcagtgggaggaccattttttctctgggttcagcaaccctcctagtggttagcagacagcagcataatggccagccagtgtgaaactgtgcaaattgcctcataaataactcgtaatgcacaggcaacagggagaggccatagctcatggataaatgactccctgccatttcggggtattaaaccagggataatccggacctcaccatggggattcattaactactatgggtttcccgcacgcaagcctgctgggactcaggcctgcttggtgcttcttgtggcatcatgatgggggcaaaacacttccaagcagggccatgagaaagagaatgtaagtacctttaacaaaccagccaggggtgaaccctgtaggagccaagtattttctctgtggaacttgctttctgaagaaatctctttgaagcgcagagaaaaacataataaccttaacaattaacatgtattgggcatttactctgtgccaggcactgtgctaagtctttttttttttttttttttttttgagatggagtctcgct

SEQ ID NO: 71 - DNA, 716 bp, Homo Sapiens
tcaagcttttcaagctcctcatgccgccccattctccccagcattgttgatttaacctcagggggacctttctcttgacgcctccatgcctcgtttcttccctctgcagattctttggcagcccttttgtgcagaacagccatccggttctatctcccttgcaaggccggagttgctgttttattcccttgactcatatataacaataaaaaaaatcattcttgctatgtgtttctttatctccatcaagtggttgaaactcaatctgattgtccgagcacttctggctggatttgggttggagtcgatgggattttatgagggttgtaaaagtcaagcttttaacatgtctcaaacaaattggcgtgtaaaggagaaacgttagaagaaggaacatggctgcagacgggaggcttgggaatgctagccgtagtactggggcacaggtggctttaataatgcacacaagtttggctgtaagttgcttctacaagagcagaagaggctgcagaaccactctcaggaggttgagatcaaacttctcggctcctgagtgcacacagttttgcatggcttttaaaatacagattccaggatcatccataacaatataaacctgtggttaattctgctgaattttcatttagacccaagctgtgttgtcagtagaaatgcaattgcgttagagaaaaactgtttatatttcttgagatact

SEQ ID NO: 72 - DNA, 777 bp, Homo Sapiens
gatcgaggtttgtcacttggtccctctgaggctcagcttccttgtctgcaaaatggcaccctaatggtacccaactcacggaggtgtttggggggacaaggtcagccatcctgcaggcaggtggggtctctggcctctcccacggggtcctgggactcctggctccggaacccccaaggcccagcccctccagggcccgcatggttccctccttgctgggataatttacagtcccagggccatagctgctgttgctttatttttttcccttccccgacttctcccttcctcaccctggcctcacttctccagaaccagcttgtttttgttttctgtttttacggctccataaatgagtcacgggtctgatttgatttaatttcgttgtaattgttatcttttcaagcttgtttttttccactcggttactcacgagaccacaaaaacctaaacaggacggggccttccccagcccggcctcctggtcccccgggactccgggccagggtcagcagctcctggagactgaggtggggtctgtggagcttctgtggggagggacttggtgtccccagcaggactgggtatcccgagtcccgggctgcagctctgttgctggacagccttgagagaattgttcgagctttctgatttccccagcatcctccttagcaggctttagaacagggaaccaaaacccaggcacctctgggccagaaggtgaaaggatgagtaaggtggcctggtgctggctccggtgaactggagagaacaggc

SEQ ID NO: 73 - DNA, 878 bp, Homo Sapiens
ctgcccttccaaatgtattccaagggctcctcattttgatcattgctcagtggcattgttgtagaggaagtaggagggtgcttggtggagtttgggaggcccatgaatttctgcacttggagaaatgttaatgttgagcttatatttctctccttgcagcacagaagaccattactaggtctgtgtgtagaagcccaagcagttagagggggcctctgcgaggcttgtgggatttttctggccagaagatgggccatggtggaggaaggccatgttaaatggctgtgatccactgcctatagggaagagtacgcaacacacacccaggagggcttaggtagccggaactgtggcggctccatacccccaaagtgaattttaaacttgacttatttatgccgttctcatagcaacaggaaaactgttccgacctatagccacggaagactctgtaaaagaaactgtaggaggaaaaaaagataatgccaggaaaaaaaaaaatttaatgaagtaccattctttcacttattcagtcaactgagaataacagtttgtgcatttggcaatcaaatgggaagtggcatttcgtgttgcaacatgaacctgctcacattaagtgatttatttttttgtttagacacactgtactgagaactttcttcaagtagaaagctattaaaaatgtgagaacaagcagtcctcactaacctgaagcatttggggacttagaggaatgataaatgcaaacagcccagaatccagaaactgtcttgaacatttaaactctagactctgggaatgtgtgcatgtcttcagttagtcagatgtagataatttttctttctgtgaggtctcttttcacttatatcttgtctgga

SEQ ID NO: 74 - DNA, 906 bp, Homo Sapiens
acttttgggattactgaaaagctccacaattatttacaaatatgcaaagggtgcctacaagactggagtaagggtggtggcatggggtaaagctagtagtgcccttctaggtgtcccgtgacagaggagaagggtgcacttggcctgctgcagcctgagtagactctggggttgaaagtcaccctcttgaccatgtgtccagactccacaaaaccacagcccgggcccattggctgggcaacatcatttgaagtgagcagaataattcaaacctccccattcgtaacacaaaaggaaggggttatttgtctcagggatgggcacgccctggtgcaatttggcagagcatctcagcaactctatcagatgtcaggttagggcaaaagtggaaatgcgtctgcccagtacatcttgggttgattacttggagtgcatgtttctgattcatttgcacataactcatccagggggtgttgcaagagctatgcgatggccaaaggaacccaatgcgtcttttattatgttttttaaacaagtctctctacgttgattgtctcttggaaccaagaagcttcattcttccagccccgtgacagacttcaaaatgagactttcataaatctgagaacaagttctagctttggctccaggactatctgctctgaccctaagggttagttgaggagtgtgaaggctaggatgagccatggggtgagtgaaaattgtagctgggaaagcctcgtcttgaggagcttgtacttatgtctctatacaccctgaagcaaccagcccccacctgcacctgtggtctttttgtttctttggtctcatgaggagacagtagctctgtcacttactttttgagagacagtgtggcaaagttagggacagcatgggctctagaac

SEQ ID NO: 75 - DNA, 744 bp, Homo Sapiens
atgggatcataagccaaggaatgaggaagcctccagaagctggaaaaggcaaaaaaagaatccctgccccctacaagagcctctagaaggagcacagccctgctgacaccctgcttttagacctctgattcctagaactgtaagagaatgaatttgtgttgttttaagccactaagtcggtggccatctgttacagcagccacagaaaactgcccactgcaggatgaaaagccactttctcctggtatttctcaaaggctaatctaagagcatggattgttctgtatcttccaggagcactattgcaaagtcgattcattacttttttcatttgttccgcatcaccgtgctggggctcattaacgccctgtcatcgggtgctctgtgcgtaagtagaagtgtgttaagaatcaatcgctctgacctttattccctgttggtgttttgtcattcgtgggctgcttggcttgacatatgaattactctccagctgcctggtgctggggaggcacagtcaccagcccccaaatatttcagacatatgccaattgcaatttcaacacacattttttttctaccgtcaccctggaactgttccattggcaatgcatgaaatatgaacaagaggaaataattgacaaggcaccactgttgactaaggggctaacctttgaggaagattaaaaacagatgtccttgaagaagaaagaactgaggaagtgaatcttctctcctcttaactct

SEQ ID NO: 76 - DNA, 1032 bp, Homo Sapiens
aaaaagaaaagaaaagaagaaaagaaaacataaaatgtccagccacccaggacacaactgtgtggcctgaccgttcagttgtatcactcctcttatctggaaagtgctccagtgactacagaagttgctagaatttccaaaagcaagaagaaagtgatgggaaaatgtgtcaaatccacaatgggagaacactgtgtcactagaaaattatatgaccctggcaaccttaggagtatggaagaaagatttcaaacaagtttctgactatgtatctttttctaaatttttttgaatgctgaagaaatgttaaatttcattaagttttacagccagatttaatatagacataaatccctttaatgttcgtttcagtcaaaagtgagcggaacattatcgttaaaccagtgcatgtgggagaattacttgaggaaaatcaaaataggcacagttgggaacattaagccgtggccatattagacgcaagtaggcgcaatagcaaaattctttaggctctaatggactgggctattttgcttctcagtttccatacagatgagctttgttctggggcaatatggttgcagtttgagagtctatctgaaggagctcatttctctttcattagtccatgagcacagtgcaatttcagctaatactgttacacagctcctagctgggttatttggttaaatgccttcagggaaagtagcaagacagaataaaaggacaaatgcaatgcggtttcttgttctgagttcctgtagctgtggaattacattggcagttaatcattaccacgttgtactcgtgatcataaactcctgttatttaagatgttattcaagtctcacaagaaacatcttgtcttctgtggcacaatttccttgaggtcgggtttgtgcacaactataaccatagagacctgtttcttgtgcttcgtggacatgctagtaggtatatagtgccatttgtgtgaaattgaaaatgacattccctactggtgggtgaactgggaaacagcaccctgtctat

SEQ ID NO: 77 - DNA, 874 bp, Homo Sapiens
ggtttcaccatgttggtcaggctggtctctaactcctgacctcgtgatctgcccgcctcagcctcccaaagtcctgggattataggcgtgagccaccgcgcccagcccaactctgcttttacaggtattggctctcattccctagccattggttctccccttcctgtaattcaggcctgcaatataatttcttagtcccccaaggaaaacagaactaaagacttctaacagaagatctcagtctactaacatagctaatagctattaaagctactcaggcatcggcttaataaaaaactaaagggctgcagcaagtgatcagattttcaccactcatctttgtgagatgggtctcagagggccccgtccctgctgacaccaaccattcttaccggtagcctgccaacacacaagcagttcacagtagaacactgcagactgcagggcattttcaggctacatagcctcaagttcctagaacaggaactgaggcttggaagaaggtcagtgcagcgcactcagcgaatggataaactgaatcatcatttcacaaggctgcaagcccatgtactaatggaatcaacatggaaccagagttaaattactgccttaaatatctaatgcatgtcaagaaatccatctaattactaagtaccgaaattataatactttcaaatgaattcacaaagcaaaacagctgaactaatgatctgtaaggatctcctggcagataaatcctactgggaatcaatacaccactgctaccaagaaagcaggtccaacaaatgaataaaagaaacccagccaggcagagaggttcttgtctgtaatcccagcactttgggaggctgaggcaggaggatcgcccgcggcc

SEQ ID NO: 78 - DNA, 938 bp, Homo Sapiens
ttgaaagacaaaagggcgacattatagaaatggaaaatactgtgtttgaggttgtgcatggtgtagtggaaggccacagttcaggggctggtcactctgtgtttgagtcccctccagcccgtttctgagaagtactgggacttcaaattagttacaactaagcttcggacttcacatctgcaaagtgaggatagggagacctacttgatggggttgttgtgaaggtgaagagagaggaagtctgtcaaagcaattaaacaacacccggcatgtggagctctgtgcctcgccctgcttcgaaacctttcctggtgctgacctgaatgtttctctctgattcggtcaacagttgtgccatttttggctagtgatctgtggctgggctgccagccgatgacaggcagttccccaagcaggtcacaacaaggtggcaattgaccttgctccccgaggatgtctgttcgggttctgctagaagccaagggctccctgatgtggggtttcggtttcacactgtggcactctgaacaattctttatgggctggcaaaaggcgtttcacacttcagataggccccaggaggatgatttgctttcttcaaggagaactgagaattctcagatgattggaaggttctgtactctcattttagcacctccgatagattctcccacatgtggcaaacacagtcatagctggaggtccattgtcggttgttaacaggcagtgaactgttgctgaatcagacagtccacgtatagggcatttccatcatcacagaaagttctgttggtcagagcatctaaagcatattcggcctctccccctagccaccctgtttatctcttgcttgcattcctccttggtatttgtgctgctgccaccccagttccagcccccaatgcctaataacatcctgatagatcaatagagttgtg

SEQ ID NO: 79 - DNA, 782 bp, Homo Sapiens
gttgattcctcccatacctattccctgcaatagttcttttagccacaccgtctgattgccacaggaaaggatgctgcagacctctcctgagtggtgattaagtgaaatgcaccaaagaaatgaggacagtgagcaactaagatgcctgaagcaacactggaaagggagtcaggtctgagccacctctttttgcagccagtgtgcagtggaagtggctcgtgggtgttccatatttggattggagagcaaagcataatcccagcgctaagggaagcctcttatgcttctggaatagtgccccatacttccctgaaaaggtaataaaatatgtgcattcgctgattaggaacaaatgtcaaagcgtccaccatgatggaagtgtccgatttccatggctctgataagtcgccacaggatctcatgaatctttaatggctggcctatatttaggggctttcagtttctgagggtggtaaaaggtccacagagatgctattctcctagcacactggcttctgccaagaccggtgtctatttaaagcacctctcgtctttcgaatgtacagagattctgctgacaacaagaaactttcttgggcctgaaattagatgaaaagacctcccactcagaaagtgtttattaatttatttaaaaatatgatctggatcatccactacatgtcagggcttattctgggcacactgaggaataagacagggtccctgacctctgagcttgcattctagttaggggatacaggcactaggtaagaaaacaaata

SEQ ID NO: 80 - DNA, 1229 bp, Homo Sapiens
atctaaaccttatgtgtcatgatgtagatatttacaggacaagcaagaacaacaaaaccttcagttttgttctccagtataagataattgaagacacttgtggtgaaaagtacttctgtcaccaggaagatagataacagccagcaatcaatgcctttctgttgtacaagttaaaaagtccattaaatccatttttttttcagtgcatacacaagaatacatttggatactcctgcaaattcatatttaagaatagtgtttctcaaatcggttatttgaaagaaactcaaaggaaaaagcagacacttccacaatatgtccttgctctgttgtagtctgtaattgtgaacttttgtaaattgttacaaccctggatgaatgatgggaatataacaggttgtagaattggagaacgttaaatctttgttcctaatggcaaaacatgtttttctcattttcatcagaatgtgtgatccatgccatttgaaatcaaattccaaacacaatgagccattagtgtaatagctcattactaacagcggtcttataaataatacattcttatcatacacatgcagctcgctgtgaagccagcaaaaggtatttcaggccatcgaagttttgttgcgccagcgcggctgtagattagaaggacatctccatgtgaaccaagatggatgccaattttccctgccgagagtcaggctggccgtctctttctgcacatatggtagatggattggttaatcagcgtctgctgagtcttgggcctgaaattacagagaagctagacaactgcggctatgcagcctttgttcacgagtgcaaacaagacaaacaatcacttgttatttgggaaaaaaattaaaatgtttattttggacttttattaaagtgtcaatggctttataaaacagctgtgtaaatccaggctttttcagcaagtatcattttagggggcctgtaaagaaaggaatatacatgaaaaaattaatttttaaaaattcccctcatatttcagtattgagaagaaaatagaggaggtctcacttttattttgcaaacacgtttgagaacaaatgatttttaactgggagacatattcgagaacaaatagtagtttaatacctatttttttttttttttttggtgtcatttaaaaaactgagtattattgtagcccgattctctgttttaggagattaaagcattttctctgactgggcatt

SEQ ID NO: 81 - DNA, 878 bp, Homo Sapiens
agccaagcacgttgtgctttccacggacgagatcgtgccctacgaccacctcatcctctgcaccgggcagcagtaccaggtaaggccgggcacagggggcgcaagccacgtgtctggagagctccatgaaagccattcatatgtttactggggcacacacactctgggtaaagagcatccctctgcctggacagctgctgctctaaattcataaaagcacccttcagggcccgcacacataaccagaattatgtccgcaaaccctcccagaaacccattccaagaaaaacattctgctcgaggataaaaatcacagcaagttggagaaatgtcattctttaagctgttgtccaaaagtctaacacatactgctcgccctagcagaatccagacgcaaccaggcatgcatttgtggtaaattaatttatgcctcaagaggctaacatttggctgtggcaatgggctctcgcaaaagtattgcaaacacgtgcaccttctgtcgacccttattttattttgtctctcagttatgaaaataggaaatctgattgattggtttcccagtgtccatgctttccttttagttaaactctccatccacatttgagtaaagcattgctggataacactgaagctgttcaatgtcttagggcagcagattttaatattccactttgtaatatgcatgagtgtttcatgtagtttacagcagtaaggtatttctccagtgacaagaggcttactctaactcaaggatgaagtcttagaccaagtttgtgaaacccatggcccatgggcccaaggtggctttgaatgtggctcaacacaaatttgtaaactttcttaaaacattatgacttttttttttgcagtttttt

SEQ ID NO: 82 - DNA, 703 bp, Homo Sapiens
tgtgagcctgggaggtggtgcagcccaggccacacgggacagggttttcagacagccttgccaaggcggctgccatccatcagagcgctctgggcagggcctggaccccagacccaggacagaaaggcaggctggggaggtcacacctgccatggccagcctatcctctgggtcctagaccgcagcccattcctaggtctccaccctctgcgctcccgcagcttttgtccgcttttccttccccagctgttccattcagcagcccccgccacaacctgccctccccgcatggaggtctcagaggcctccattaaggctggcggtcaaaggccggcccagcacgtgccgtgtcttatcggcccatctcaagaccctgctccttcaggcctgggcaacaaaaaagggggcggccccagcgcccgctggctccctgcagccccacacacaaaagggcaggcgacaaagacattttccgggatggcaggtgttggtgtcggattcctccccgagtgcacgggcagaagaaaggcaaggctgggcttccccgggcagcgcagacatgcaggggcaggagtgtgggcagggcccccggggaggggaaggcccaggagggcgaggagcactgatgcagggtccgctaccgagggcagccgattagaaaagtcccaccccctccccaaagcagggtggctggacaaatcca

SEQ ID NO: 83 - DNA, 905 bp, Homo Sapiens
agatgaatggaaaaaataaagatctgtccaggaaaaagaaccaaagatcccactgaacaagaaagaaacaaggttgttatagctttagggagaggagtcatttttgaagatgtgaaaattcgtagcagaatttagcaatgagattccaaagtcatgggtctaagaggggacactctggtactatcaaacacatatgttaactgaaaatgaaagtacatttcacttgtgaaagaatgagatacaaaattattttttcttaggcagcccagttctctccatcaaatgctgatagttacagcgagtagagatggtgaatgccattgagactattgttctattgaagtggacgtttattttaaaaagccaccatctgtttgattcagggtgaactcctcctaacgggcacactgcatattgtgtggcaaccttttccctgaaacaagttatttgatgagaagaatgaaaaccttggctcaaatggttgtggaaacgtctatcagttgaccacggtttgattttggaatctttagtcggcttgggaatggtaaacataacatgtggcaagcttcccatttacaaccctctaggcacaggaataggctctttgattgcccatgagggatagaaaaagcagatggcaggtgagttggccctcatcactcagaaaagcagtggccacaagatgaaggctccacttgacaaatttgatttagcctgcagaggacatcacaggagaacccaggagggacaaaggggctgcgatgaaccgttcctgagggtgctttccaaagatacccctactgtgcttacatttttttttaatcatataagacaatggtatttttcagtcttctatgtgcctttgctgcagagttccaactgttaactcagccaagggctcccaa

SEQ ID NO: 84 - DNA, 753 bp, Homo Sapiens
ccaatatgaacaataaatctgttgcctattatttcaaagctttaaaagagagttttcagaagggtaactttcagctccttcaggagaacaacttgaaatgaaaatgaagattatacatactatcaagctgaaaaacacaatgtcattcctcttgagggatggcttaatatgctaatgtttaatttaagaactttaaaaacgcccttctattagtaattctaaaacaaaaacaagtcgctacataaagcatggctaaaataccactaaaggtatgacaaggatcgaaactgcagccaatttagtacacagcacacagatcattggattgttccagctcttcccatgatcaataccaattgacatggctgaattgattctgcagcaaggtgctccaattgttgaaactcatcacgtgggccgtgctccagagtcccggcctcttcgtggacatgcctgcaattctgcaggattgaccccattagcacagtcagaggcttggcaagtgcccgacaccaggcaaggctggattccatacccacggttctccacaaaatgctagatgtgatatggggttccttcaactcttattattaatcaacataaccaaaatttcaagatacaatttttcaaaagtacaaaatttagaaaacttaaaacatttacaaaataataaatttgacattataatttccaaagaggcctagtaatacaataatacaattttgtgctcatgatgaaaaattctttgaaaat

SEQ ID NO: 85 - DNA, 1053 bp, Homo Sapiens
aaaaattacctcatttaacaacttatcttcctaaaaaactttgtatgtgttcacaaaccatttttcctaagacttttttttctttacatgggtcttagtttctacaaatcttgatatttacattcttaaaattactgtataatgcttaattcagtagagttcacatatggtaaatagtttagcaagtactaatttaaagttttagcatttcagcagacttttttcctacatcagaaataaacagataaatagataagtgaaaaaggaaggaaggaagaaaaaaaaacatgaaccatgcttcttccaggttaatgtttaagcctgctttaatcacgtcctttgatacactttaaggtccatatcagtcaaggcaaacattctaagggaccgagcagatggatgctgcagtttagaaagtgtgtggtaaactcaggatccaagagtggaacaaaagatccacctttttcataattaagcctctgattaatgccctaggctcctcagcacacacctgtaattactcacagaggtactcattgtgctgggacttgtctcggaatatcaggcatcaagctatccggcagcagatggaagcacatttctgttgacatatgttgcaatgaaaggattcgtgcaaacctggctagcaaggtagcagaatgccatgcatttgaagattaataatgcaaacaaccatgatgttaactttgttatgcttgtgttaattccatctgttgagatgtggaactaaaccttgaagcttgtgggctttaaaaatctttagcacatacttgaatcaaataagccccttttcaccactggaatttagagttttaattaaaaaatgcttttctaggctaaatttatgggaattatgaactaaatcctttaacaagctaataccacaatttgtaaatgaatccattttgcattgtaagatttgtatgtgtaaaggcaacaatctgtaaaatggggcattcaaaaaatatgactaagttgctatactgatgctaaagacagcagataggcatgtagctgagataaagtcacatg

SEQ ID NO: 86 - DNA, 902 bp, Homo Sapiens
ctgttgagatgtggaactaaaccttgaagcttgtgggctttaaaaatctttagcacatacttgaatcaaataagccccttttcaccactggaatttagagttttaattaaaaaatgcttttctaggctaaatttatgggaattatgaactaaatcctttaacaagctaataccacaatttgtaaatgaatccattttgcattgtaagatttgtatgtgtaaaggcaacaatctgtaaaatggggcattcaaaaaatatgactaagttgctatactgatgctaaagacagcagataggcatgtagctgagataaagtcacatggctccctcaccccctggacctcagccaatcacttcaacggaacctgctactatgagcaagaaggttggaaagagagggcaaaataacagatggctagcctaccctaccctgccacccacgtaagacagcgccctgaggagacacagcgcctgtgtgaagtcgccaaagacagcactgggggagggtaaatgggggggttaaagagggaactatatgaccagtcagccaaattatggccatatgcctgcttccgttgcttctccacactgaagtggaacaactcgaagactgtatctttgtgataacattttaaaattaggaataaccacgtggtactcaaagaagagccgctgcatattctcaatagtgggacatccacaaaatgccccactcatttctaactcagtagaatccttctttcaccatccccaccatacattaagacacagctataacagaagtctttgaaaaatataataaaaatctgaaaccttcctcacagcctccagggctttatatatacatgggaaagaatgatgctctcagacatgagtcattcatgtgcaatcctcatgccttt

SEQ ID NO: 87 - DNA, 894 bp, Homo Sapiens
ttcgcagccattcccaagtggggagccgaaatcttaaagtctgattctttctcttgttgaatagaaggggagatgtgcaagaacgacacaactccattccagatactaatccagaggaagaggatgggagttaccacactgactctcaaaaggggacaagagacccacattcatactcccaagcttaccacagattaccaaccacgatgcaacctgctacaacagggggattccctttgaagagatggtgccaaaatttgatcatgaggcttttccatgtgaagagagaaaagggggtgtctggggattatccacgagaatctggggagggctccaactgcacaaactagctgtgggccacagaatgcttgctcagctcattagcacctgctgcttacagtgaccattcatccaacagactggccgtgaacaagatgatgggatcagcgggttcatgccccagagagctttgctcatcattaacatgagctacgtcctgttcaggaaccattcctcttgttgaagaaacactgcgatgtaatatgataaacacgtccccatcacgagtgtagatttgtctagaaagatctgcattaaggtggctgcattttgcatgaatcacatgctggggaggggtaggtagcactaaaaactagtcccacttgagccttcaagtcattatggcatatgtgcctgcttcactataaacctcaaaggcctgtgacgtctggctttcattgtttaagtcccctcctcctttgcaagggtggaattacctgtttgtaataccagcaattactatgcaccttggaattgagcagagagtgtgctcgagtgtgcatgtttagattggagggaattacccctaccttcaaagtcaaattctactccccc

SEQ ID NO: 88 - DNA, 796 bp, Homo Sapiens
cttccatgaggcccctccaggagggtcacccttgaggccaacctgctggggcccagtgtgatgaaagcagggtgggcctgcccccagcccatggctgcgtgggcagcagagacatgtcctgaggggccttggggaagcagcccgggatgcaccccctctcagcatttccacaaaaccaggccctccccactgtggcaaagggcgactccttcatctgggcaggacccggagcccaccacctgtgcccagaatgcctacgggcagggaaggactgccgtgtccgtctatttgaacatggggcaatgtgctgctattcaaatggaggaattagtgatgaatgggggaaattgttcctccctctgtcccgtctccagaaggagacaaaaaccccttttacctcagcaaacaatgcccttatgtgggcgccagtgccccgcagcccgcacaagcccagctctgtgcgaaccaccaatcgccacaccgcgctctggggcccacagccagtggcaccctctcccggtgggcgactcccaccagctcccaggctaggctcggagaacgggaaggcccaccatccctgggaccacaggccaggtacacggccactggaggccagcaggccctgcgtgcagactgccttccgtgtccagaggtgtggctgctggaggcagtgccgcctccatgagactctgtcacagcagcagccaggcgggggatgggaggggcatcaataattcacacacaacagggcgacgggggaggagggggtgggagactgctggagccacggcccacc

SEQ ID NO: 89 - DNA, 887 bp, Homo Sapiens
agaggttgttcaggcacacaccagtttcttatccatgaggcttttcacttctaacacaaccaatgccctcttaacagactccacaccatcatctgtgcaaagccaggagtaagtgtttaacatctgacagcaccctctgctcacaaagtttgcaactaaattaaggaggaggaagtcttgccttcatggagctgagggctgagctgggagatgacatcagtgccttccagccaggcatcaaagcgctgcgaggacaaggatgccaggagccatccatgagacctgggcagcagcggccctgagcttccaaggctctccttcaacatgtagatggtgaagtgaccccttcctgtaattctgccacatcctcaggcatcaatctccagaacaattctgtctttcttttccctgctgtgagcacttgtaacagtttgactccctagaaattcctacagagagtaaaagtgtttcaaatagctggagatggagctgtgcgcatgtactgtctgctctagatagaaatcaaacgttttgagaaaaaccaaacgttactaagacgtgaagtgagccttgatatgattaaggtgagtgtaacctagcctccaacactttacaccacacgtctcaccccacctgatcacccttttaactgcattttctattcactgaccctccaggtctgtgggaatgcctccacccacccaaccctagccaccaacacaaacacattcatacacagacagaaacacggttgtgccattctcatttccagacttttgtctgtgccatttttcccaactagaatggctttccttttacttgttttttttgttttgttttgttttgttttgagacagagtctcaccctgtcacccaggctggagtgc

SEQ ID NO: 90 - DNA, 794 bp, Homo Sapiens
ggttactctgaacacaatcactcaggagagagccaggcctggcactgcctgcaaccagcttttcaccaagcctcagggcagcccattcccacagcaagaactccaggatcctagggtgccagctagaaatgggggaagggttcaggagcctctggatgtctccctgccaggagctgacccagcacccttgttactaactccctggatgatcgtggacaattcccttctctgagcctcagttttccaatctgtaaaagacaggtctcaaagagacaagcctccctctgtcccagcccagtaaccaagctgggcattgctccgattaccggtggagacagccaggagggggctggctccctcagggcctcagagacagaggtgcattgaagttggagcttgtaatctaggcagcagatccgaaatccctgctggatccgagggctagggaggctctcgggatgtaaacaaacctcctgtgttctcagagcagagtagagagcccacgctgcagccttatctcagctgattagatcagccctgggtgctggcttcctgcctcttcccagcctccctcaccgacccccaaggaagccatcctccagaccaggtcagtctgtcccacagacggctccggcagggcttctccaaggcaaggagtatccccactctgggtagccgggccagccatgtgccacatctgcccccacgcccagaggctagagtgacaccgccagtccccgcaggcctggccactgactgctgggcttcaccaagtcactgtttccacacatacc

SEQ ID NO: 91 - DNA, 785 bp, Homo Sapiens
aatcctgccgtatatctaaaatagatctcaccacctacaggagttggtcatgagtgctgaccccataattctatctttttttaaaaaattaaaaatcctacaaaatccacatccagctgacagaggcctcgggggaaattatagttcggaaaacggattagtcagagtacccagattttatggaaatgctgggaggttgctttgagggtgggtgtcgtgagaaggttcggggagaggtgggccagggttgccaatgggggcagggccgcggaaggagctgtttgtgtggggccttggcgacaaccgcggggcccagcggttcctgtgggtgctgacaggagcctggcggtgagtgatggaggaggcggttgtaaaataggttaccgtcgggcgcccggggttcactctgcggatggtgctgttgctaagctacctttagaattcgacaaggacggatgctccgagcggctccctggggtggggggaaccaggaagcagtgaattaactgaaaccgtggtgaagtcctttcttcctgaagagtgagagagcgtggtatgagagtgtgtgtttgcattcatatgtgcccacacaagcactcgtacatacgagggactcagctggaaaggggacaggtggcttttaaaagcccaagctcatattcctagggttggggggtggggtgggctaatgacaaccttcccccccacttagtggtaagaaactatactgttaggttgccaaaaagactttttgggatttggggcgggagttcacagttagatgg

SEQ ID NO: 92 - DNA, 776 bp, Homo Sapiens
gtcccggtcctcagccccactgcacttcacctgtgtcaaggccacgggaacccttccaccgtctctgccagcagatgccattcagcacccaccccaagatactcatactttgacccggaagagaccagaagcaccctgcagttcgtgtggacaagtctcccctctgacttacagtcccctcaccctcgtacctaggagagggatggcagcgctgagggtcgtgggattctcttccctggaggctcccccatcctcgtggcctctgcgcggtccagctcccctccgagctggctcaaggggtaacttgatccaggtcagctggtggagtatgaggtagcgtctagctgagcgtcacggtattttattaagtccgaaatgtgatcgctactgttgtcacactttagcgcccccaacaatccccttacaaatgagaaaaacagagcctccccaaatgcctttcctctgacatcaaggaaagcgcatggaaccctgcccagaggcctgagcccgggtgaccccaggagtggctccagagcttgaggaaaggcctggggggcggagggggtgtttttccagtttcaggcaaagcagtgagctgggggctatctgctgtttcctctgcgcctgggtctgtaaagtcagcggttgccgtttaaatcccattttccttaacatgtcaggattgctcattctaggccatccatttatatggccatggctcagaggtctcagactcacatgcctagtggggtcaaggatccaggtaacgtaaactg

SEQ ID NO: 93 - DNA, 786 bp, Homo Sapiens
cctaacgacacgtttctcagcatgtatccccattgttacgtgacacacgactgtacattgcttggaactggcacatagcaagtgcctactaagggttatattttcattatccaccaatgggcccgtcccctgttatagccaacttcttgctgttaacatctggtttaatggagtccccctgcccccttggagaggatcactagctccccatatccttcctgcaccctgcttcgtggcccagcaggtcggccacttcccctgcaggcagctctacggtggaggctccacgcggctgcttccccatttgtctgagttaagtgctcctggggaacgattcggagcctgatgggaggaggagacccttctgttttctctcccagccccaaatctaactgaaattgccttgtaataattgcatttgtggtctgtgaaagctgtgtctcgtggcgaccagggactgagattagctggtgaaaaacctggcacaggggcacacacggcatcactggggatactaagcaagccacggacaatgggggagacagagggctcctgcaaccagaaaccactgggaacctcggccacctctccctgctgcagacatgtccccgccatgccgggccggcgtaggaacacgctgttcctcccagcatcagttctcccttttcccagtaacacaggtggtaatgtggcagagtgcccaaagcgtctctgcagtcagactgtctgggtttgaatcctggatctgccacctcctagctgtgggaccacaaaggactttgtccc

SEQ ID NO: 94 - DNA, 793 bp, Homo Sapiens
ctgcaagtctggaaacccaagctcagttcctgggttggtggcccactggccgtttgactctaaacaggttgcttgccctctccgagcctccacatcatcccaagctcacaaggccaaccatcctcagaggtggggagaggtcagagggcaggcaggctctgttgtgggcaggcaggctctgttcacccttatcctcttaagggtgaggtcttaaggtatgagttgctcccagtgcaaaagctggcaccaacagcagcaactcacaaatctttggagaggcccggcattccccactcagtgactgctgagtttgactgatggggccatgtcggcaaattagccaccattcagcagagacaccctttagagatgctaattgcccagtgctcatgcgtccccacccctccctggcacaggcggctggctgtcgatcccctgccattattgtctgataacagtgcttgatttgtctacacagaccagggcccctgcatgcatgctgttagcatctaactaccagccagcacggcgcatgaagcacggttcattaatgctcttgaggggagcaaacaggtgctggcagaaatctattcccgtggacaaatctgtggacacgtgcaccctcatacgtgcccacttagcccccaagtataggaatgagtcagtgtcacgtgtgcatatgcattctgtgaactactcatacgccggctaagaagcagcctcagacacatacgcacaggatggagtacatgcatgtacataacaggcaatgctacatggggttgtgttagga

SEQ ID NO: 95 - DNA, 718 bp, Homo Sapiens
tggaggagaccatcgagggcatgctcctcaggctggaagagttttgcagcctggctgacctggtgagtggctgcctggaaggcgtgggtttaggcccaggccagacttcaggcccttgctggagttttctgcggaagccattttggtggtgagttagcaaccaggaggaatggggcagcggccagcgctgagaggaaagccacgtgcaaacactccctcctctctctctctctcgctctctctctctcactcaaccccaagtgcttcctgaggcggccatcttgatctcgtccttccctcgagatggtttttattccgcagaggagccaggagtggaccacaaggtggcactctcgggcaccgatgcagggagccgttcagcggggacgctagactatatttaactttcctcagctctgcaccgtcccctgtgcaaacatggagacagccaggaaatggcttcaggcctgcgaggcctaggaggagcctcttgcccaggccacagcccgtggtggagttgggcatcgagttccttcctgaatccttctgttctctctgcttttacctcctactctgtctggttggcccaaatctactagcctggctgaggaggaagatggaagacaatggcccagaagacaaagcctcccacgccagagtctctagaaatcgcctctagaggctgggtgcagtggctcacacctgtaatcccagcact

SEQ ID NO: 96 - DNA, 1055 bp, Homo Sapiens
taccaggtctattgtttcagagaacatcacgccgggtacaaccaaacccagggagagaaacaggtgggaagagcaggtgtctgctctaagatggttccgattgttccagggcacaaattcacggaaaaatacttaatttagaaaaaaaaaaattattttaagcatatgcatttatatttattaaacaaagctcaaaatacaacctttggggacctccaagtaataaaatgactcatgtcaggatatgatgactcagtgggaaagagggaattccaccacccacgcgtcctttctaaaaaatcaatttgtcctctggacaggtgatgggagcctctgccatcagaccgttccaagaaaatcgtccagcaaaacaaaacaaaaaattctcttcaaacaatttaagtttcaaagctgagtaatctgatgcaggccagtttccaacctacgcccccgcaggacacacagagccagggagctagttggccaagcctgggggcctgaattaagaaggatttaccagccgaaaaattccaaaactctgtgtcatgtgaaggaaccttccaaaacattggatcccacccaggcgcagcgagtcgctcaaagccatggcaacccctttcccgctgccacatcacttttatttttgtgtccttagattttttcctgttttgcaatgttttgctgggacccccgactccgcctgaggccctgtggccaagggccagggttcccactgaagtcaggaacagcctggacttcccagcgtgaactttgcctgaagggttacacattttttaaatttcagagaacatccaaatggcttttcagcaattactgagaatgataaataggaaagaccctgattgttctgtttggtttctctgtcctctctgacatgactagaaaaaattactcgagttgacgacaaatgctgccttgggattccacctctgtcaccagttgtgggctgacctggggtgcatgacttgacatctgtgagcctcagttacctcatctgtaaaatggggataatgctgcccgcttctcagggctgg

SEQ ID NO: 97 - DNA, 829 bp, Homo Sapiens
tgcatttttcaccccaatattacttggctgaaacccccggtccagccccagaccacccttgttcaatccctgcaaacaaggccacatttgggtactcatggcttattccacgcctccccccatgatagacgttcgcctgagcccagcctctgcagccaccgccttccaccaaagcagatccttccccctcctttgctcacggaggagtgagggggaactgctgagaggaggggcagattggccagggagggggcgattgagaacaggaagaagatggggtgagatctgagaggcacgctttggacacaataaacaagcctgctgccttgttcagaaagggacccgggacccccaatcccaccagagccctaaaagcattagttcaaagttaaagttagatacacgcaaagctgcagcccccgggggaactcagagctcaaaaacaatactctctttgactcaaaaaccacaagggaacacccacggcatacttcttgattaaaaaaggaaagtgaaaaataaggttttctttttttccttcttaatcatcataaaactaacttgtgcctattccatcaagtcacgacttctgttggcctcaagcgagcccaattcatgttggccacagacacgaggggccgggaagcttgggcatgtcctagtgaactgaaccggtcctttctgaatggttgtcatttccttcctctgcttcctttagcacaggaaagccaccaaggagccgcctacgccagcacatccatcacccagactcccagggcactgttcatctgagaggccagacacagcggggctcaccaaagcctcaaag

SEQ ID NO: 98 - DNA, 793 bp, Homo Sapiens
gctgcctggcctctcaggaaccagctgcagctgggattctctgcagccttccccgcagcaagctggggtagccatgagccctgcctgtccaacgtggggtcaggcgggcatgcctgctgtgtctggcagccttgacacccccagattctgctggaagatgctcgtggcctgaaagctcattttgtagtcgctctaccctgggatgcagcttctgcactggcaggattaacgcaaacagaatctgcttggctcattcctcgccgggcctcaacaggcctgcaacgccactgtctgccagggagagccactcggtgatactgttaattaaaaccatgactctgggggcaagaaaaaattttaaaacgctgaagtcatcttccctaatagaaatcttattttgaaggtgctcacggaggtcaggctgaccagaaaaacccacaagccataaataagctcaaatagttttatttaatttacttaactcggtgcctggagtcctcatggggagaggtgcctggcatcaacacagggtgggggtggccaccctcatctctagcccctgggtcccagagctgagaggagggagagaactgaactttcttggaagaatgtggaactgctgagtagatgctttggaatttgctgacccaggcatctgggagtacagcctgaccggccatctctgcgccaagctatctatagtccaatggctattttcaattggaaattcattttaaagtggtggcagtgacgggggagtggctgtatctgtaatccattatttcacacagag

SEQ ID NO: 99 - DNA, 860 bp, Homo Sapiens
agaaggggaacagatccggggagccacagcagacccttgcctgggttgatcctgtccatcagaggagccaccggggggctctggagtctggaagtttcattgctctgttgaaccagacagggtggaaatgcctggtgtcatcacatttaaaaacattttcacatgaaaatgtttcacatgaaacccacaagtaggaggtgccattggctgggaagatatctaaagtgaactattgagaagagggaacagacacgttatttattctttcaaggcaggcaacagtaaaaggtgaatgcgaggggaaaacactttatctaatgtaacagtgagtcgctttttttggtttctcgaataaatagtaattaaatcatgtaagctgtgacagcaaaattgcttgaaaaaccaatcctcccaccataattgcttagatacccacatttttataaataggagttaactttatccgtggcttttatgagcagaatgtgacacgggctgtgggtgcgtcgtaatttaccacggctgtaggtgacagttgcaaaagcacacgtctaaaaaatgcactaatgtgtccggatgaatctgcgcctctggaggtgtctttttctgcagcagaattagagatggccatgatgctggagccgtgaagggaggttggcatcctggtgcctactggttaatgttttggaagcgaagcaatgctcagcacccagcggtatcaatagactgtctgacttcaactctgtttccagttcaccaagaaagcacttggtggggccagggtctgccctggccacacctgcctagcccaccccaaggccatttgcaggcatcaggtctggcttaataataaaaaggac

SEQ ID NO: 100 - DNA, 5907 bp, Homo Sapiens
gccgtcggagcagggccccagcgcaccgcgagcctctgcttcctccgccttgcagcgccgcgagcccttctttcctccgcgcctggccccgtctgcgcccctctcggcgtgggcattcgcagacccgctaggaggctgacgagaggtgtcctcatagagtcctgccttcttccagacccccaaacgaaaagaaagagaaaagccaacctttcgcctccattctgcacgcatttggagagcggctggtggcgagcgatccgcacaatcgcttccctcgcggcgtccctggacgggcggagagaacccgggtgactgagcctgaggctgagcttccttgggagcgatccatgccagccacttctaccttcaagggggactcgcggccgggtttacgcgcgaaggatgggtgccagggaaactgacttatagacgacccgctccgcgagagactgacaactcagtcctgcgggctttcggggcgcccagaccagtccttagccagaggatctggggctgcacagctcccggaccctggagggggtggtccgggggtgggagactgcgagcatcagcccacgccggccccctcccaccctgcggcggcgaggtgggaagggccaggatgcgagcttagcacctcccctagaaatgcagcacttcgcccccccacctcccctgccctcggcgctccctctttcacgcgctccctcccgcctccttcccaagggcgcccttcttctgcccccagctcacgtctgaatccctcggcgccccctttctcttctcctagccccttcctcacgtcccctgcctccgggtatttcctctctccaatcccccacccccgcaccgcctgattccgaggggcgggagcgcattgggctgcgcacgggtgggggcgccgcgccagcttcgcgtagctgctctgacgccgctgccgccgccgccgccgccgccgccctccgcagcccagctcgcgccccgcggcagctccgcagtgcactagccaccaccgccgccgccgccgctccgccagacctgctgccagcttgcccggtccagccctgagagagcctcgaacgccagctgcgagggtcatgagccagagagccccggggcgccgcgcggagagcaagcggagatagcgactttgcgccccccagccctcgccttcttgcatcgcgttccccgcatcctcgggtccttctgtcctttccgctgtccccaccgccgccatggccaccttgctccgcagcaagctgtccaacgtggccacgtccgtgtccaacaagtcccaggccaagatgagcggcatgttcgccaggatgggttttcaggcggccacggatgaggaggcggtgggcttcgcgcattgcgacgacctcgactttgagcaccgccagggcctgcagatggacatcctgaaagccgagggagagccctgcggggacgagggcgctgaagcgcccgtcgagggagacatccattatcagcgaggcagcggagctcctctgccgccctccggctccaaggaccaggtgggaggtggtggcgaattcgggggccacgacaagcccaaaatcacggcgtgggaggcaggctggaacgtgaccaacgccatccaggtaagcgcgggattcccagttctgcctgtcctcccccctcccagctcagcgtgccgggctctgcccccgacagtcgcccggtgatctcggcctggagaccccctcctgtacccaggaatctccctttctccatccctcccagccctgcgcggggacctacgcccccaggcggtgttttccgccctaacccacgctccctcccaacggcaccagctgcaagaccgctaggctgaagttcggtctgagacacctgtccggagacactgcaaaagtgaaggaaatggggggagggagcaggaagcgatgagaaagaaagaaaatcaggattggagggcacggtttggtcttggactctggaacggattcacagctgcatttttgggaggaaagaagaaggggaaatcgctgaggtcggagtctcctccccccgcacacacgcatagacacgcacacgtatataggcaggcacaccacatgcccacagccccccttcccacgaacaaaggcgcaggcacaggcgcacacgacatgtatctatatatagaccacagtactatccccaaatgcacctgcgtacacccctacagctccacaaacaaaagcatatacctgcacataccaaacacacgaatattcgtttgaacatatgcacacacacatgcacagatgcatgcagacaggaaccagcctgctcccttgggtgcggccctgttggagacatacaggtatacacacacgaaagcacacacatgctcccacacaaacacatttagtccgcaataatccagcattacctgtgcacagactcgcccctctcgcccgaaatcccggctgcaccgcaaagaggcggccagctcctccccgtgtgaccctggcgaagccctctccagaggctaagaatggcccctgctctctaggccctctccccttattcctaaccccccactccccaccaggcggcgcaggactcctacatagggagcaggtttggagtcttggcaacgacctccgagctagcaggggctggcaggccgcagctttctgggccgaaggagacttcagctctaggcaaccccggtcccttacagcttggccccgcggcgtccctggagcgcactatcactggggccacggaaggcaggttttctgggagcagaggcctcccaggggttgttccatgtatcggggtaagcaggactccaccgggccccgaacaccagatggcccgacccaaggcgctttccgctccggggcccggcgagacggccttgctggatcacggacccggggctgctcccgccttcgctgtgccccgcgacttcccggggcgtctttcaaggctccgtttgataggccccaagggaggccagggcaggaggctggaggctcgtaggcctccgggaccctggatttcgttagctcttagtccccgtgtggattctaaaccctacagccctgtccgcctgaccctgaagcttctggttctagactcttgctcggttcggctttctggcctccctggcgccttcccgccaagctcctcctcctgcttgcctccccagcctccacttagtccccttccttaggtctcgccctcgcctcactctaactccagccttgtcctaagactctcaatttccagccctgcttcctcctccccgcgcgctgctccccaagcgtcttcacattgtctctgttcttgcctcccaggggctttgccccaccttcagcccctctccctctctaccctatttccttttcgcctcacaactgcagcctttaacgtttcctcctctggtctgagcctgagacgcccgagttttcctctttagctcccgtgccccattccagccccaccacaaatcccgtgcccactctttccactggcccaggcccagctcactacctttcttagagcccctttccgactacgctcccttctgtcccttctcatctcctcccccaactcctcattctgttcctgtccccagaaaccatcccgaagtatctcccttccctcctgtggcttctccctattctcagccctctcccaccctagccctctcgctatcaccagccattagcgcacctttccttctcagatccgtccatacatccctccctctccatctctggctcgacacccgggctcactattagttcccctacatccaccccgcagcctgctcttaacctctcctccccggcggctcagacccaattctcagtgtccttagcgcccccttcgggccacagcgttaagccacgccccccgggcccctcatccgttgccaagttcgctgagcgtccgcgtctggttgcctctccgccccacagggcatgttcgtgctgggcctaccctacgccatcctgcacggcggctacctggggttgtttctcatcatcttcgccgccgttgtgtgctgctacaccggcaagatcctcatcgcgtgcctgtacgaggagaatgaagacggcgaggtggtgcgcgtgcgggactcgtacgtggccatagccaacgcctgctgcgccccgcgcttcccaacgctgggcggccgagtggtgaacgtagcgcagatcatcgagctggtgatgacgtgcatcctgtacgtggtggtgagtggcaacctcatgtacaacagcttcccggggctgcccgtgtcgcagaagtcctggtccattatcgccacggccgtgctgctgccttgcgccttccttaagaacctcaaggccgtgtccaagttcagtctgctgtgcactctggcccacttcgtcatcaatatcctggtcatagcctactgtctatcgcgggcgcgcgactgggcctgggagaaggtcaagttctacatcgacgtcaagaagttccccatctccattggcatcatcgtgttcagctacacgtctcagatcttcctgccttcgctggagggcaatatgcagcagcccagcgagttccactgcatgatgaactggacgcacatcgcagcctgcgtgctcaagggcctcttcgcgctcgtcgcctacctcacctgggccgacgagaccaaggaggtcatcacggataacctgcccggctccatccgcgccgtggtcaacatctttctggtggccaaggcgctgttgtcctatcctctgccattctttgccgctgtcgaggtgctggagaagtcgctcttccaggaaggcagccgcgcctttttcccggcctgctacagcggcgacgggcgcctgaagtcctgggggctgacgctgcgctgcgcgctcgtcgtcttcacgctgctcatggccatttatgtgccgcacttcgcgctgctcatgggcctcaccggcagcctcacgggcgccggcctctgtttcttgctgcccagcctctttcacctgcgcctgctctggcgcaagctgctgtggcaccaagtcttcttcgacgtcgccatcttcgtcatcggcggcatctgcagcgtgtccggcttcgtgcactccctcgagggcctcatcgaagcctaccgaaccaacgcggaggactagggcgcaagggcgagcccccgccgcgcttctgcgctctctcccttctcccctcaccccgcccccaccagcccagtgcgccctgccgccgcgttgggaggccaagctttaaacatctctggttcctagtttctgattattcggggatgggggggatgggaggggacagggattcacgatccatcgcgtctgcgtttctgttgtcctttcttttccacaacaccctggttttggggggaggcggggtgcatttgcgggcagggttctctgtccttccaagtggggccccgacactttggttccagtcatcgagggggttgggaagggagggagagggggcgcagctcgcaggcgtggcaacttgaccttgggggaatatttcacatccatccagagctcggaatctacagcgtccagccatttccagcaagagcgcttcccattccggagacgtttcaaccctgcagcgggaaaggctgactgggaaatccattttgggtgggcaatttccttcaacgaagccggaaggcgagaagccgcggcggggccagcttgcctgccggttttcaggaatctaaactctcatcttgtgcaatttatcaggtgtggaactgttctactgtgcgtgtggtgtgctcgtggtgaataagatgaaatgtatatcagaaaaaaatctatctctaatttagagtgcggtacataattatatccgcaaataaagaagagacaaaggcttgcgcggcccggtgtcgggtttgtg

SEQ ID NO: 101 - DNA, 2001 bp, Homo Sapiens
ggaatctcactcacgctcggctcctccacccatcccgtctacagcgcgtgtcccagtccagggcgtgcgtgcgctcggtgtccgattccgggctgtgtgtgtccatttggcgagatgtcgagagcggggggagtgtccttgtcggtgtatctgggcccaggttaggggacttctcctccccacccccgcgtgggtgtgggggtgtgtccgggctagggcgcgtgtgcttctgtgcctgtgcgtgcgtgtgcgggtcagggtggtgggaccgcgcatcagggcagggtgcctgcgtctgcgtctgggtctgtctggtctgcatgtcggcgcgatctcgacctggattcgtgtccctggatgtcgagaggccagcgtggtgggggtgtccagcctcccggaggagtactatgccttgacaccttcgtttcaccgccccaaagctggcctggggctccgtagggagtggcctgcatggggagggcccgcgtgctgtgtttctgggaggggtaagagagtgggggcgcagggggcgggccaggtccctgggcgcggcgcgggctcgggggacccgcgcggctgacgtcaggccactccttaaatagagccggcagcgcgctccgctcggcatttcccgaagagccagatcgcggccggcgccagcgccaccgtccggtccacccgccagcccgcacagccgcgccgccgccgagcgtttcgtgagcggcgctccgaggatcaggaatggggcttcgggcgctgggcgcgctccgaacccggcgcacgtaagagcctgggagcgcccgagccgcccggctgcccggagccccatcgcctaggaccgggagatgctggaaatgcaaccgcctgttccccgaggagccgctgcccccgggaccccctggcactgtgcgcaccctggtcagcagcccccggagaagacggcgcccccaacgcccgacccgcgtggccgtggcagcgccacgcgagccctctaggcgaccgcagggccacagcagctcagccgccggtgccccctcggaaaccatgacccccggcgcgggcccatggagccatggcctatagggtcctgggccgcgcggggccacctcagccgcggagggcgcgcaggctgctcttcgccttcacgctctcgctctcctgcacttacctgtgttacagcttcctgtgctgctgcgacgacctgggtcggagccgcctcctcggcgcgcctcgctgcctccgcggccccagcgcgggcggccagaaacttctccagaagtcccgcccctgtgatccctccgggccgacgcccagcgagcccagcgctcccagcgcgcccgccgccgccgtgcccgcccctcgcctctccggttccaaccactccggctcacccaagctgggtaccaagcggttgccccaagccctcattgtgggcgtgaagaaggggggcacccgggccgtgctggagtttatccgagtacacccggacgtgcgggccttgggcacggaaccccacttctttgacaggaactacggccgcgggctggattggtacaggtaaggaccaggagctccgctccgtgcgccgggtctctgatcgcttccattgggagagccatccgtctcttgtgttttctctttcttttaacccaactcattgtatgggttcaggctgacacacagggccatggggggctatagcagaatttacccagaacttcccagtgataatctagacgggcagtttctggaactgcaaagggcgttccctcgtcactggagtcgttggaaaaggattatctccagtcaaacctaagtgccagctaaagggctaactccctctgtgaccagcccttagggtgcccaaggaagggacaggcgaggacctgtgctgcctgaacacggcaccatcctaaccctctgtaggtctttgctggtacccagcccctgaaggaccctgagaaagataaggcagttcagagaccccttgcagcaaggctc

SEQ ID NO: 102 - DNA, 2448 bp, Homo Sapiens
ctgccctgcctctacgacaaaagccaacgggtcttcagtacttttattaaaaaatagtcacgcagacagtgccctggtggctctgccccgcatcccaactctggggtgggggaaaggggtcaacgttttcgcagccccaaaccgggccatcacttgcccaccgagtcgaatatgatgcggttctgctcggcgcgctcccgctggctctgcgtccgcgccactccagcagggtccgcagcaggtgaaaggtgaggtcaatggacagagaagggttgtcccgccgcggccgctcgcctgccgtcccgagtcccaatcggccgggccccgcgcgggcgagaagcgtccgccagcagcaagaggagcgcgcgggccccgcaccctggttccgtgccccggggctccagcgcagactcgggtcctggacccggccgcctcggggctcctctggctgctcccagggcacagctgtaccaggagcagcagcgcggccagcagcgctgcgtcccgcctgcctcatggtgccgccggccctggacacacaggggcagcgcagggtgaggtgcgcctgggacagctgcaggcgccgctcccctccccgcgctcgcccggcgacccctccggccgccgcccaatgcccgcagcctgccctccagccccagccactgcgccagtgctgttccatcccttccacccagcctccctccccggaggagcgtggtggctgagctgagcggagtcctggtgcagggggaggctgggcggacgctctgagccactcacaggttgtcggcgagcgtctgtacggtccaagattgagctccagtctctgtccctcggggcaggctgaagacgccttggggaacacagggtctgtcccggcgtgtcgccagccttatatagtgccaggacagctccgactgacgtcagcgaagaacatgcactgattgtagaagcaatgacagccacagcttcgagtctgacggctggcgggccccggagggcgcacctccctacaccagccttcgtgcccctgggcgtagcgctggaagcagcactggacgcaggaaagcgagaagccggctggggcgtaaagactgctctgggacccacgggagtcccatcgccccgcttagaacagccagcaatgactagggccgtccccagaccagactagtccgggtcgcgtgttctgacacacgaaagggaggcgggaccgtgaggctgtccatggtgctgaccccgtcctctgcctctagaagtggccagaaatgtgagaacgctgtgccgctggaacccactgcctccctgcagctatcagttctgcaaatgcaggcatcaggagtccaccgctggcactcagccaacacagtgggacccactgagaggcagtctgccacaaccaaagtctcccagcattcttatctttttccagccccaggatccaaatttgtagggctgtctgacaggcaccatgtaacagagggtctctagcatccgagtgctttcagaccacaaatggctggcccatctgcttttgagtttgccaaagtagtttagcaaagttcagtttctctcctgggaatcatagcagcagtgtaactctgcccatgagcagcaaagaaatatgggttcaagtttctgctaactcctggtgtggacaggtcacctccctcctaccaacctcagggtcctcatttgtaagactgggcttggccaggcgcggtggctcacgcctgtaatcccaacactttgggaggccgaggcaggcggatcacgaggtcagtagtttgaaaccagcctggccaatatggcgaaaccccatctctactaaaaatacaaaaattagccgggcgtggcggtatgcgcctgtggtcccagctactcaggaggctgaggcaggagaactgcttgaacccaggaggcggaagctgcagtgaggcaagatcgcgccactgcactccagcctgggagacagagcaagaccctgtctcaaaaaaaaaaaaaaaaaaaaaaaaaaaaattgggcttggtggtctcttggcttctttccagctctagaaatgactccccaatagttttctgcttaaaaacttactcattaccactgcagattccggattacatatttaataacatatttactgaggcaccatataaagggttccgggagtctctaaagagctggagctacaagaagcctaggcagggttagagtaacaaatgtgtctatgaagagtggggatgagtggcatttgctgggatatgggtgtaaagttgataaggtcatgaaggttcaacagatatttatggagtgcctagtatgtggtgggaataagactattatcaagggctctaaagcagtcagtgtacattttagagtgaagaggggcattgcagggtgctagtcctcttaagctctgaccggcaacccaaccccgtggaaactgg

SEQ ID NO: 103 - DNA, 2820 bp, Homo Sapiens
cctaggggacaatacccaggcatgttaacggagtttaaaatgccaaggaaattacaccacaattctgcccagtatactacaggctgtcaaaccgaaatgctatgccagctaggagtgcagcaactcccatcctctggccctatttaattaggaagcttcagcagagcgaagcctgccaagcgttcgccgtcagaatctgaaggaacccgagcgagcaagaagagtgcctgacccactccacagaagcctgtccagaaatggaggagtcagcgcccactgaagtcggttccgccctcggctcgcctacatggagcctgaccagcctcagtcatgcccactccggcctgggagacccgcaaagtgttctttttctcaactcccctgtactaccttgaagcttagggaagcaaagagaggggcatatctggactgcaaaaccaatgtcttttgccgcctaggagagaagggaatgagagagagagagagatagatagatagagagagagagagagagagagagagagagagagagagagagagagaaattctattgaaacccagctcctctagaatctgtgtgacctggtcttcaacgggagaccagtgcgacctcatggcacctttgccaggaatcagcgattcccctgcagtcaccatttgatttattgctttctcgctcattctttctcataaagttatttcttcctcatcctagtaagacttttttctttaatgatgacaaagcttctgtttcagtgtttcccctaggattggtgctctttcaaaacagtgaacccagaaaaccatcccgtttaatatttctcaaaatcctcgcagctccaatgtaagcgcaagcatgcaaaggtttcctgctacacctgcactttctgcccatcccagaaccacccctcacccccgggcctgcaacagttccccttgtttctctggatagaggtgggtggtattaggggtctagggcagtaggaggtgaggggctgaggaggccgctagggtaggctggtctgtgctggatacgcgtgttcttctgcggagttaaagggtcggggacgggggttctggacttaccagagcaattccagccggtgggcgtttggcagtcacttaaggaggtagggaaagcagcgagcttcaccgggcgggctacgatgagtagcatgacgggcagcagcagcagccagcaaaagccctcgcaaagtgtccagctgctgcactgccgcggggactcccacagcaccatgactagttcgtgcaactctgcagcagcaaacggcttccgaggaacacaggatcgcgggggccgggcagcgggctactgagcatcccgcggacggcggcagcagaggcggcggcggtggcagtggcacccggcggggaagcagcagccaaacccgcgcatgatctcgagagtttcagcaacatccagggactgggctcagccccggagcgagagggtcgtccgctgagaagctgcgccggagacgcgggaagctgctgccataaggagggagctctgggaagccggaggacaggaggagacgggagtccaggggcagacgagtggagcccgaggaggcagggtggagggagagtcaaggcgccccgcagcccggcagccgcctctcgagctctgccgcccgcatccctctggcgtttgggaagcagcaggtcctcagcccgcccggggtcacgtgggaagaggcagtcgggctctgattggtggagcaggatgcaggtcccgggagggaggggtcgacgaggaggtgcaaggatgcaaggaggaggcggccgcggaagccacagatgggctcgctcgccaggcgctggcccgagtggggctaggcggggatggctcaaatgagaagctcgggcttcagggtgggctacccgcacactcatataccattcgcctcactctccgctccaggacgccccctaccgaaggcggggtccggactagcgcccctcttccgcgcgtgaccccgggccgcgagtgcgggccgcggctgggtggcgtctctccgagctggagatggtgggggcggaggtgtcagaggagcagcagcagcagggcagagaggggcgagtcggcgcgggagagggcgtcctgctggcgaccggcgctccagcgtgcgggagcgcgccgcctaggctgtagggggatgcaggctgggaatgtcgcggcggagaggccagggacgtttctctagggatttacaggaaagagggtgagaggcgatggtgttagaaccgctcttgccgacctggaagcaacagcagcatctcccacaagagcgtgcaaccccaaggctgctcgccgaggcagctcagccatcccggcaggcgctctccttccttctctcttctcccctctctcctcccaggccccccgcagctccgacccagcccaagcgttcgcaggtttgaatccctctcctcatcacccgctcctctccagcccgtagcctattagtgtgtccacctgggaggtgcggtcagatgtgtttggaaggtcagattggtcgggacaagtggtctgagagaaagagaaaggctcctctgcatacgccgcgggtgggttgccgggagcatcggccgggcagcggcgtccgggaaggggagagcgggctccatttgttggcccaggcagtgaccctgcgttccttactcgggtctttgccggatggccggtgacctggggcgacgagagaaggtctaactcggcaggagtctctggctctgcgcgtttctttcattctctccagcgggaagggcaaacggcatagcgggacccgccttccg

SEQ ID NO: 104 - DNA, 5907 bp, Homo Sapiens; identical to SEQ ID NO: 100

SEQ ID NO: 105 - DNA, 3685 bp, Homo Sapiens
caagcctccttccccggcgcacaggcacgcagccacaggccaagctgcgacgcgagctccgcgcgcgggatctccgcaaaaggtccgcccgatgcgttgggcgggaatcgagcccgggtcaactgcttggaaggcaactatgctcaccactataccaccaacgccgcacggcgcgggcagccccgccgcgccggcccggggctcccaccagcgcgccgccgacgcccggggcaggccggccccgacgcccggtccgtccgcccgcccgcagctccgcgctgccgcggcctctccaaaggccgccccgcgccccaccggtgcaaggccagcgcggctgacccgttacgcccgcctgcctctgggggcgctctcgctcactcgccgcctcgggcccccagagcccttccccaacaggtgcccgggggggaaacggccggcgccggcagggtccccactcctacgcttcccaccgggcgcagggccccgtgtgtcgcagaaagcctcttccgacaaccactttgagccggcagctcgttgggcgccgtgcagggccagaggaggcctcccggctgccgctaccaagccgcggacgagaagaaaagacaggaggccaaggaggcccagaaggccaaagggccaggcaggccaggcccgagatggcaccctgcgactagctggagggcggaggaaggagaaggagggcccacaggctgggtccgaggcggcggcccaaaaagcacggctgcctccccgtcggggaatcgaaccccggtctcccgcgtgacaggcggggatactcaccactatactaacgaggacgacggcgacggtcgccgggacgccagaccccactccgaccgcggacgcctagccctgccttgatcccctcccccgacggcaggggccgggcgcgtgctcgccttccacccgccgcccgccgcccgccacccgccacacgccacccgtcacctgccacccgccccccgccaccgttggcacgacctaccccgacacccaacaaagcaccctgcgatcccgctgggacccggagccggagccggaccccgacaggtaccggagcggcgtggaacctccccgcgcgccctgcctgctgtctccaacgcggggatcgcgccggggcaggaggaggcgcgggcgaaacagtcaggccgctgctcctaggacgcggtgggcgcacgccctgcggggttcggcgagcggaggcgcgggggctggggcgtgcgccggcggcggccggcccgacgcggaccctttgggtccggggtggggacgcgggggcgtccacgccaacgccagccggctccgttcacttggcgcccgctccccccgcgcggtccgtcggttgcgcaccgaacccagacaggcgccggccaagggcgcaggcgttcgcgccgggtcccagccatgccagcggcgaagcgccccggcgcgccgtcaggatggccgagcggtctaaggcgctgcgttcaggtcgcagtctcccctggaggcgtgggttcgaatcccactcctgacaagccgaccttttggcccgcccgccggagggcaacgcccatggcaaccctggagcacctttggccgcttcctgccttgagcccttgcccgctctccagactccagcccccttgaagcaagcctccaaaacgccgccgcttctcaggcacgtccgttcttcctgcccacccgccggctgtcgcagaaacagcccaggaccatgcgccagcgcccgcgaccctctaccaattgcccttcggacagacgccctccccaccacctcacacgccctcttccctggccccacacacagcgagcgaccgcgaccaccttccacgctcttccctgcctatctcctccgcccgccttctcctcactcgcccaaacagacacagcccagattcttcccctattcctccttttccctccttcctcccaccggcctccgcccaccgcccaccgccttgaatcgccgctgcgctgcccagaggcgtcctggcctgaacagcccgcccggtttcaccctccaacttctgaccgctgagcagcagcgagcgactcgctcgtggagccgcacacacgtctcccaccagaggcacgccatccaacatcctgtcctttcctccgacccctcggaccccggccgcgcattccattctgccgacaccctagccaggtcgccgatcccacctcgctacctgtgctcccttcccgctaacacctgcctgccggcccacctgcagcccggacgcctgccggccagaggcagcgggaaccctgcacacagccgggcaggcgagtccaaacccggaaagacagcccaagaggaatcacgagcggaagccctagatccccgtcacccgcccacaaacgcctggccccgccgggaccagctctgcgccacagcgcatccccacgcgggaagccgcggcctgggccgtcccagccacacccagcgcgccttctccagggtcagccagctgcggctctgccgaagcgctcctccgctcctttctcgcgctccagcctccctaccagcccagggggccggaccccaagtgcgagccggtggcgtgggtcagagcgcaggagcgaggcgcccacggacctggtctgcgtttctgagccgcacgccacggctgcgagacccgttccccatcgccgcccccgctcgctgacacacccatcccgcctctcacctgctggtgacacaagtgagaaggctggccccacggtggtgaaaaaaaaaaacaccacacgaaagaaagaaagaaagaaagaaagaaagaaagaaagaaagaaagaaagaaagaaagacagaaagaaacaacaaaaacaaaacacaaaaactctgggtctgtgccggggatccgcgctcagcaaggcccgccacagcaaatctgcccacacgggcattcgggcgcgggccacggccggtccttcccctggagaccccggcgggcagtctctcgaccctgggcggcagagaaagcgcaagatgggacgagtcggcctctctccctccgctctccctccgcgccccgcctcaggtccctcgacgtgacgagagcctccccttctgctcgccccatcgggccagcctctcgtggacgctgcaataggacggaggcccacggcaggcggtgaccagtgaacggcggctggtggcgagttccgctgtgccagcttccgttggcgtttgccatcggtgcatgggtggttcagtggtagaattctcgcctgccacgcgggaggcccgggttcgattcccggcccatgcagcacgccctcccattttggtgctgcagcagcaccaaggcgtagctgcgctcgcctctgccgcctccttacactcggggcgcgcgagcgagtccggcaccggctgcgctcccacgcgcgacggccctctgccctttcttccgtgcctctctcgactgacttagggatgagcctaccccccgcacccacacaccttggtgacaacaacccctccagacacgagagcgcgccagacaccagaacttggcagcctcctggtcctgtttctcttcattgccctgccaccgcctctgcccgacgcatttcacttcacggaacaccgccaggcaccacgggcttgcagccactcgcaccaccccttctcttcacatttcaccgcctcgcctctctc

SEQ ID NO: 106 - DNA, 3104 bp, Homo Sapiens
gcgggcgctgtcgagcacggggaggtgctgaaatagtcctggcgtgctgattcaagctttgattggcagagccacccggtgactgacagggggtctccatggcgcccgcgccgccaatccgcccaccccaatagcggagccagctcgcctgccggcgtgcctgagccgagccgagcccgaaccccaagccgcggagccagcacctcctccagtcggggtcgtccgctcccggccgttgagccaccgccgccacccggtagtgtgtcccgctgccccaatccgcctcatcaacaagcgcctggcacactcagccaggcccgcgggcatctgctgcgtgtcccgctccgggctcagtgccctcgccgccgccggcactgcctcgatgttccagctgcccatcttgaatttcagcccccagcaagtggccggggtatgtgagaccctggaagagagcggcgatgtggagcgcctgggtcgcttcctctggtcgctgcccgtggcccctgcggcctgcgaggccctcaacaagaatgagtcggtgctacgcgcacgagccatcgtggcctttcacggtggcaactaccgcgagctctatcatatcctggaaaaccacaagttcaccaaggagtcgcacgccaagctgcaggcgctgtggcttgaagcacactaccaggaggctgagaagctgcgtggaagacccctgggacctgtggacaagtaccgagtaaggaagaagttcccgctgccgcgcaccatttgggacggcgaacagaagacacactgcttcaaggagcgcacgcggcacctgctacgcgagtggtacctgcaggatccataccctaaccccagcaaaaaacgtgagctcgcccaggcaaccggactgacccctacgcaggtgggcaactggttcaaaaaccgccgacaaagggaccgagcggctgcagccaagaacaggtcggtacctagaggcctccgcgctttgagcgcaccggggaggaggcgggtggaggcacctctggcgcccttacccagtccctggcgactccaattcagcaggagttgggagcgcggtctgtcttgggttaagagccctgcgttctgggctcctggccgggagttcccttgccggctctgcttccccacccgctggctccccacgcctgcgggcagctgcagcagctggtcccggtcaccaaaccaaggcttcactgggacggagaggggaagagaaataaaaaattaaaatcctacaaacagttagggaccccaagacccaaagctaattcttgtcagcctgggcacaggctcctactattaatcgaagcctggcttattagcaatgtgtcggtttcatgttaattatcattttcaaagcccaggtatatccctccctaatgctttgaaaacagttttcaatggacttttgagaaatgggaagtcgagttttcctcttcccatgcgctgcctgccactcttgtctcaaaacagcaaactagtccgtgggccgaggcttttcgtttcccggagtgtggatctcgattagccaaacattttgcggaagagcccggcctcatcccccaggcccaaatgctccttacaatcctttttgcctttaggtcgggccgacccgatccaacgcgatcgcgggagcacttgctcaggcgtaagccccaggcagacgcaccgttagaaatggtatcccatgtccctgggaccgatctgtccttgtcacccacacttcgtttatttcctgacagtcctgtaaatctcccaaaagtgcacaacaaacagggaggacactgcaagcccagtatataaaagacctgggagctgcggcgctgagaaagggcgcgaatcatggtggggcacaacagtagggacccgcggaggggcggccgcggactcctgcccgacctctgtcgccttgccgagtaatcctcgccttaactgctggggtcttcggaagaacctctagccgccgggctggagggacgcaggaggtggtgggggcgggcgacgggcggctgtgttacgagctgtgacccgtgttccctttcttccccgtagactccagcagcaggtcctgtcacagggttccgggcgggcactacgggcggagggcgacggcacgccagaggtgctgggcgtcgccaccagcccggccgccagtctatccagcaaggcggccacttcagccatctccatcacgtccagcgacagcgagtgcgacatctgagttgcccatccaggatgctcagaagcagattccagtgtaaaaacgagaaaaacaaaatgaaagaggggaagaagatgagagacctgcaaatccagcgccacagaagccaggtgaccagggacccgcgggctcgggttgccgtttcccgccccaccccgcggccggcctggcttcactggcgccctttggccgcgaccacgggaaccagcgtgaggcctgacccagcaccacgttcttcttgctttgctttttcctaaggattttgctgcaaagtctcttcggaacccgaactgcaagctgagcgcctgcccagattctcccatgggtatttcacgtcgaaaggacgctgttacatatgtataactttcgctttaaagtttttttttaacaaaacatatatatgctgtttatttacttatttaagagaccgccatggtaggtttctctgtagcttggggaacttgctgtttctaaacatgcaggctggtggtgatgggttctgtgtggagaagccaaacaataaaacaacctagtgggcaaccttcttaattaagggagctgctctcagattccttttcttcttattattattaatatcattcccttcaccaggcatgcagggacccttgagcaaatggtctccggaaggtcttacctatatatcttttgccttctttggtgcttcctggtatatgttttaaacaacctatggtaggtctataaccacctcccacgtcaaattacacgtatgtgcatatatgtatgtacctatacaaacatatgtatgtacctatacaaacatatgtatgtatgcatacacgtgatatatttaaggctagaaattggcaacatgtgagcgtcctctcta

SEQ ID NO: 107 - DNA, 2528 bp, Homo Sapiens
ggtctgactcccggcttttctctgccagtgcaaccaccattacggcgtgatccactccttttcctctaagaatgctgaacggtaccactctagaggcaggtgagttatgtgccaggttccttctgatgttctctgccccttgggccagtgcgtataccatgtgagtgtgtgtgcgtgtgtgtgcgccttcgttgggtggaacgaagaggagtgtgtgtttgtcttaaaaattaaaccgcgcttcgtaggctcaaaaatacacattctctttcagagtctcctgataggactcctgaaaccctccttttgcctttctctttgactgtctttgactttcctcaggatcagtgtccggggcgccaggcagaggtcctggttccactgatcctccagtagtcagtggctccagggacgcgctcctgaccctccggggagctgctgggggtgtctctttcttggaagggatggaaggggggccgagaagacactgtttctcacacgtgtaggggttaactggaaactggcttcacccacatttttttgttgttgttcagtcctaacccagcgcagccgtttctgcgcctgatctcagcggacgcagtgcgggacttctccctttatttctgcagagctgagggcaggcggcgcaacaaatctcaggtaaaagagcatcagatttcagaagagctgtattctagacttggcgcaggcccctttggggagaagagcccaggggctatagagaacagaggtttgaaggaagcaaaagctggcgagaggttttttttttgtcgcgaagggtgagggtaggcagagaacgcgcgaaagggcagggccttggccgggaagtaccgcccagcgaaaggctggcaagggtgcgcagctggagcgtggcctcgggtacccctttccaggcagccgaactccccgtatcccagctctgcttggctgactcccatttgtcttgagggaggatcccctagtaggactgaatcagaagtgcgcccgtgcagcagccccagtatggatctgccaacctcagtgtagggggaaattttccacatggagtatctcagtctccactgtctggagaaaggccccagcgtgtcccggcaatccgctcaccttccatccagcgcagcccgggcatccagggccaggtggcgcggcactgaacgcatggttcccagcctcaggctgacgctgacgtttcactgggccttgggtgctcaggacagtgccagacgctggatactgttttaagagccgcgcctttcaaaccgaaggggctccttaaccagcttaacagggtctggaggaaaggtaacgcctccttcttaaagggcaaacttagaggcgcagaatcatggcctccaaaattcaggtagagagagaccttaagtcacctttgctctcaaaatatgcacatttgttgggttacttcttccctctcaaccctaactgttctgtgggtttaatttccctttcctcccccctagggaattctactgggctcgggttctttgcccatgtagacccacctgagccggcgacaagggcgctgcagtctttttgaccttcatagagattctaagatcccgaactctcagttccaactattatgctccactatagtccggccgtccactttcctaaaagcggcaacagtagcgggatgggtgctgtcagaatagaaaggaaagaaagcttagtggactgcgtgtgctcaattgtgagggagagcagtgctggtcaagggacctgccccattatacctggtagaactttgaatttagaggagacttaagatcttatccccgacgcaggctagagagaaccacatgcacctgtccctcagctcaggaactgaaaaaatgaacactgtaatttttatggaacacttgcgggccattcagactacagctgggagaagggggaacatttttttttttgtccccagccaccgggcctcagcccctctgctggagaggtgaaagaaagcagaggtacaaagatgctttccttatttaaagtgcttatttaaagtcctttgagaatgaggagcggggagctcttaggcaatctttcttgggggctccaagacaaaaagagtagaaaacccagggtcacacacccaattcgagggcattccttcccacccttcctgggcttcctccttaggaactgtgagagaaggcagggctggacccatggggacgtatttccgcagagctaacaaggacctcccaaactccagctgacccccaccccacccccagctttctccagacttcctgcgttcactgagaaggaagaatcctggcagtttgcttctttacaggaagtagcaaatgccactggatgcaggaacttataacctgagttttataagagcaggaatagctaggattcaacttggaaactgattgcagaaggtgttctgccttgcctgtacctagatgattaacaaacttgtgtggaatagaagaatgaatggatgattggagggcttacaaaacctctgtgtt

SEQ ID NO: 108 - DNA, 2280 bp, Homo Sapiens
ctgccttggtcctatgcttgtaaggtttccggcctaagaggcccatcgactccttctgccttctttcagttgattacaaaataaataaataaataaataaataaataaataaataaataaaaaagcaggacattaaacctgccacctccagagggtcctctagcttccttctccactcctgaattgagcgaagcggtgccgacctccaccctttgggcacgagcccctgcgcacttgggagactcctgaacaccctcggagaagccagaaagccccgggagatggctccgtctgctgctgtaccagaccgggtcctgcaaaggatgcatcctccgagcctcctccctgcacgtccagtggggcctgccccgattctacctgagggacccactggaggagaggcacggggatgctgcctgagcagcggacccttctggcgcggagcaggctgtccccaggcagagtccgacgggtccttccttctgggtgcccccggcttcccggactccagcaggcctgggaaggccccgggcccccttagccgatgcccagagagtctccatttctcaagctttgccaccgaactcatcggtcggtgcgcctctgatcgcagggcaagggcctgcgcacccccaaagacaagcggggtccccggaaggcccccaggcagaaatgagcaccacggggaacggcccgcctccaagacaacctcggggacatggacacaacaagacagggtggcaagtctcaacaaggcgggtgcgcggcgtctgagggtggccgggccgggccgggcctggccttgcgtccacctcgtcaagaaccgtctgggtacgggccccgcgggatgccccgcggcccaccttcctccctaggacgcaaggaggaacgccccggcgcgcggccagcagcggcgggcaccggcccaatggccacggaactcagcactggcagtcggccctcctcacaccgcaggcgtgcagtgtggccgacggagcctcccgggccgaggacccagctaggccgtcaccccggttgctcccacgggaaggggcaccaggcaaactgcccaaggccccgagcccaggctccctggcggaggcctccgctggtcccgcccagatcatggccgccaccaggctcccgagccatggcttcctgtccgggaacggcccggcgtcctggctgtccagctagtcctggcgcctctctctggggcttccaccgcccgaccccgcggcggagcctgcttctctcggacctccagagacctcggatccgtccgagcacctgccctagtcctgcctggtcccccaggacagtcccaagccactcctccccaggcgagcacagcgaagggtgcgcgggattgccaagccagttcctcttgatggcagtattgctccagaaatgcccacctgcccttcccccacgtccactccctccgccctttgctgaggaaaaaacgccaacagcgccccgcacatggcggatcagcatctcggccgctttgggccagccctggcccacctgcgggaccctgtccttggcagatgggactcggcgggacccttcttactagcctgccttcctgacaaaccagaaagcggtccccttggaccgccctggggatggacccgacctaaccgcatccctaacgatgcgttaggatgggaggatggtggaacccgcagggacgagaaggagactgggcacacactaggatcccagccccggccctgccccccgggacacattggcacttgggcattctcacgggtcacggcaaggccagcttgaccaagaggtcaaaggcgactggcgtcccactgaccgctgggggtttggcctcaaacttcaggtgaacccacaattccggaatagcgggaccggcacccgggcccttctcacgtggcagcaccggcaaggggctgggggaagagcccacgccagcctacgtcacgcaggaagggagccagtggccaccccaaacacacctctcctcctcacacctggcctacgtccaactctccacggctctgcccagaaggctgcacgtacaacacacacagaggcgggcatttccctgacgactcgtgtgtgccgtgggggagcggtagatggcccagccccaagtgttccgatcttcctgcccaaacatattctgtgacggaaagcctatgttgacctcgtccggcactcaaggcgtgggcagcggcctaacgtctgctgcgggaacacagtcgcgttgaatgctattctcaagacagacaaaacagt

SEQ ID NO: 109 - DNA, 2251 bp, Homo Sapiens
ggaccccgagccgcccccaggtagccaggagcggcctcagcggcagccgcaaactccagtagccgcccgtgctgcccgtggctggggcggagggcagccagagctggggaccaaggctccgcgccacctgcgcgcacagcctcacacctgaacgctgtcctcccgcagacgagaccggcgggcactgcaaagctgggactcgtctttgaaggaaaaaaaatagcgagtaagaaatccagcaccattcttcactgacccatcccgctgcacctcttgtttcccaagtttttgaaagctggcaactctgacctcggtgtccaaaaatcgacagccactgagaccggctttgagaagccgaagatttggcagtttccagactgagcaggacaaggtgaaagcaggttggaggcgggtccaggacatctgagggctgaccctgggggctcgtgaggctgccaccgctgctgccgctacaggtgagatggcgttgggctgacgttggggtcaacgggtagagaacgcagggatgcggccctcgccgaagagagccaagaagggaagagcgcgctctccaaattgcttttgtaacttgttttcagtgagcattttattgattcagaatctatcgagaatagcactagcgagctacttttcccttgagatgggtcttattcatcttggcaatggagtgagttggattgtggggaggaagaggaatgggaaaatcagtttataaatattaatgtcagcaagagtgtgctgttggcaggacgtatcgcgagcctggagattttggtggccgcagttggtaagtggctacaatccagaaagtaggatcgagttgctccccttgtcttatcagtgtatcgtttctcgggcgcgggtctaacaccttacaagtggtaatttccgctcacggcagctttgtctctcttctaccatccccagacccagccttgcactccaaggctgcgcaccgccagccactatcatgtccactcccggggtcaattcgtccgcctccttgagccccgaccggctgaacagcccagtgaccatcccggcggtgatgttcatcttcggggtggtgggcaacctggtggccatcgtggtgctgtgcaagtcgcgcaaggagcagaaggagacgaccttctacacgctggtatgtgggctggctgtcaccgacctgttgggcactttgttggtgagcccggtgaccatcgccacgtacatgaagggccaatggcccgggggccagccgctgtgcgagtacagcaccttcattctgctcttcttcagcctgtccggcctcagcatcatctgcgccatgagtgtcgagcgctacctggccatcaaccatgcctatttctacagccactacgtggacaagcgattggcgggcctcacgctctttgcagtctatgcgtccaacgtgctcttttgcgcgctgcccaacatgggtctcggtagctcgcggctgcagtacccagacacctggtgcttcatcgactggaccaccaacgtgacggcgcacgccgcctactcctacatgtacgcgggcttcagctccttcctcattctcgccaccgtcctctgcaacgtgcttgtgtgcggcgcgctgctccgcatgcaccgccagttcatgcgccgcacctcgctgggcaccgagcagcaccacgcggccgcggccgcctcggttgcctcccggggccaccccgctgcctccccagccttgccgcgcctcagcgactttcggcgccgccggagcttccgccgcatcgcgggcgccgagatccagatggtcatcttactcattgccacctccctggtggtgctcatctgctccatcccgctcgtggtgagtgaccggggctggggccctactcggcctttttctcgcatccacctcccgcgtccattccccgctccctgctttccctctgagtccttggcagtgaacgtgtcgcctttaggtcggggctgggattcccacactgtttctcagagcaggcccaaccctctttgaagtcccaaccctaacgagatttagcaggtgctttgcccctacatcccccagtttatgttcccggaagcctgggtttctttctccaccgagacagcccttaccccttgctgcctgacactggccgagtcttccaagaaaaccccccgccccctctgttagacgtggaggggagcctgctgtagtgtgacttagcccattcctccgtactgtgaactgtgaactgca

SEQ ID NO: 110 - DNA, 2586 bp, Homo Sapiens
cccgcgcgggcgcgggagtagccccgctgggcgctcgcagccgcgggagtcaagccccctccccaggtgcaggcataaaagtttatggctcttgaacaatgcggggcagaggtttttccaagcaacgtctaattggccgcttctaattaaggaaagagaggcttccagctctatggcaacccaagcagggcagcttcaggctaaaggtactttagaataataagatcattctaagaaatggaatgtctcactggacacccgaacaggttctctgtcattggaattggtgtgtactgtacttcaaccagtactcttgtgtggagggaggcgacccagtctaggaaagtcaactacagaaagaggtgacctccgaaaggattgtcttagcgctattagaatacatgtgaccacaccaaaagcccaggcggacacccgcagccagctcggatttggacaattcaacattgctggcagaactgaagggaacaagttaccccaaccccatcccctgtacgcgtagtgctgagtgagttgggggtgggaggacagcggttcgtttattgcccccttttaaaatctgagatctgaaaatatggaggtcccattcgttttcccagctcttgattgccaacaaaaaaacaaatcccgctggctacattttctcctcattccaaaatagcaaccctatggcttgtattaagcccttcagaagtttatctcatttgctctgggccagggagggaacaatgctaggaaaagtcaccggtgctcttccatcctcgccccttccagggtgcaggatgtgcgggccggcgggcctgtgatcccggaacgcttcctgccatccccttgcgcgaacttgaaaggactgggaggtgttgagagcagagttcagggctggtgcactctgcggtgctgagtgggcggcgcgcccgggcgctcaggccgggggacctgtagtcgccctaccgcggaggggaaaatacgtagctggagggcgtgcgccgtgcgggttgtgatccgttaccccatcggtcatcctggggtctccccaagcctctaggtagggctgtgagagtcccctagagctgaagccccggaggctgacctgtgggtctggctgctatgggaacccggttggtccaaagaagcctttcttccgggcacctggaattccagtttagtgtggggcatcggggaagtggcgctggggggctgggttgggggacctcagccggcagctccggagagggcctacccttggggtcgctgggtgaggccggcacgattcttggctccaaaaggaaagtttctgcttcttgttctggcgcgagaagccaaagacttattttgagagcggagagagaaatgttattggtaacgttttctttggaaagttcgagaggggtcttctggacacactacctagtgcccccaaaccagagaagtagtttttctttggtgcctgggctcagaagtcgccactcactcagcccatggttcgaaatcagcatgggaagcgccggggcaaggcttcgtcggagactagaggcctgcctgtcgggaggagcccctgggggatggggaccccattctcctgcttgctctggttcccacctgggacgcctccgtaggagcccagaaagacgatccactacatggtcccgggacagagcagcgcgcccaactttgagggaactttgtgcgcctctctgaggccctagctttccaaggcaccgccgtccgttcttctttccctagaccgaaactggggaagagtgtgggcgcttctttgccccgatgagttcgcctccccaaacgcctacttcggctgcaccagagcatctgggaaactctgaaaggtgcccaggcctcacacagcagcgtctccctactcagcctctgtctttgggttttttcaagagagtctctacctcatgcctcggtctttcttcgatgtcgggtccccgaggtaggcacggagtccctctgaaagcagttgcctatctgtgcccctttggtgtaaagttagagtttactttgttgggggaaggggaggtagaaaagatcacagttgggaaagtgcgcttttcgccttgttcctaaaacatgcctcaagactgtcatcgcgattgttaggagagctatcaacgtctaggggctataaaggaatttctgaaccctcggcccttcccaaacccccaggttcctaaaaccctagtgggggtctcttggggctgggattcaggctggcaccgctgggaggacctcgcctagcatccctttattaatatttcacgaaggcaggctcctgccttctctggagcctcttttctcggaatgttcccaaactctggctaactcactcccctgtgagccatcctagggctctgtggcccgggaagagacgcgtcaactccgcgggtctgcgcgcagtccttagccgcaaagtgctgcaagtgacccccctgacggccctttccgaccgaagagctcgggaaccaaagagaaaaaaaataactttattttcaaaagaacaagtcatcactgcggcgatactgtggcggaggactttggcgatggggt

SEQ ID NO: 111 - DNA, 2325 bp, Homo Sapiens
agccccagcagcctggctcggccgcggcggcggcagcagcagcagcggcggcggcggccgcggcggccttggggcacccgcagcaccacgcacctgtctgcaccgccaccacctacaacgtggcggacccgcggagattccactgcctcaccatgggtagggcggggtcttggggcacctgcgctccgcgcctttcgcgctcctggagcaaactttccacctccagtggaggaagtgggagcccggggacagggtgaagagagaggacgggcttttagtgtaaccgtagagtcagccacagaagttccacgaaagtggaagttagtttgccagcttctccactcagcctggtgcgttttactcctagtagtaggtgctcgagtattgccttattaatactggggccttagggacctcgaacgtcacggcggataaaccagaggttaactgcttgggatttggggtgggtgtgtttgaacctgtgtggcatccccgcgtcggggcggctaaagcgtcttgacgtttttggctaagcctgcgcgcttctccgcttggctcaaagggaggcgatcagatagtgcaagcccccatccctctttaatcctgtgacttcgcatcctgcgcatcgaagacctttatttgctttgcacgtctcttttcttccccgctaagcaaccacgtgccttgaaatgggaaagggatacagatgttcggctgggcttccccgggtgggtccctgaaatgcgtcctggttagcacatggggtgggagcaccttgcccgagccttacctctctaccctctcttcgccggtccgcaggaggctctgacgccagccaggtacccaatggcaagaggatgaggacggcgttcactagcacgcaactcctggagctggagagagaattctcttccaacatgtacctgtctcgactccggaggattgaaatcgccacttacctgaacctgtcggagaagcaggtgaaaatctggtttcagaaccgccgagtgaagcacaagaaggaggggaagggcacgcagaggaacagtcacgcgggctgcaagtgcgtcgggagccaggtgcactacgcgcgctccgaggatgaggactccctgtcgccggcctcagccaacgatgacaaggagatttcccccttatgagggagggcctcctccctcacatcccccgctcctggcagaccaggcaacgccaaggcgtggggcacccaggggccagaatccttgctcattgcagtggtcccatctggagaagaaacgaacctggaagttctggaatggacaagccgggacctgacccttcgcgtctccttcttgacctgtttatctaggactccaacttgaagttacagatttttttaaaaaatgtaaataacctataattcaactcattcttgtcgtataacagaggaaaaacagggttggtttaagtttaacactgtatggggtttttgaaagcacatgtcagttccccatccctactctctttcagaactcgataagaacacaggatttattgattattttctgttgtcgttttcaaacaaaaacacccaagttgaaaataatttagaaaattagaccttgtaggtcttgctttctgaaatttcgcctggggagaatttaaaatctaagtcgctggaagtccctttgtatgtgaataggtttatataaaatttatatttatatttatttaaataaatgaaacaaaaaccagaattttaaatctgtggtgtttgctctccctatcttctcctgccccctcctccaatgtctagagaaaggcatatgcaggaaaaagctgtctgaggaattcgaggaaaatgttgagtaagaacttggtaatgtgggtctcttgactgagggagtttgtggctcaatgggttttctatgtaacagaactttcgccaaggagacacctttagtcatgatggcatctaccaggcagtgcctctccatccttaaaataggcaacctcctcacagttgataggacaaatcactccatttggaatgacactgaccattaacgacaggtaaacctttatttagcaaggaagggtaaaaatcccccatctagtttttgttttcttctttctacttcctcatttctctcagtacgaaaacttgaattatgtgaaggaatttgtagagtcagaatagttttaggaagagcaacaatccatcaaacaggtcagaagcaaacagtggaaacttaataacgatgctacaagcagaattagcgggtttccctcaatgttaagaaaacaaaaagtcagggacaggaagtattctgttcaaagatttat

SEQ ID NO: 112 - DNA, 2501 bp, Homo Sapiens
tttgcaaatggagacatcttcattattcctatagtatcatatgtttttaaagtttgtactcacactttgggtgataaatgaaggacaagatccttccctatccttgtgaggatgactacagcatgactggatgggcttgctatgatttttatctttccctgtgttctcactaccgttttattaatctcagttctttttcacagggtagcacagaatttaactagcagaaagagatccagccatgtagaccagagatttgtctaagtgacggcatgtaagaatcaggaaggaaagttttttgtttaaataccaacaggttccttccttaaagcaattattatttttcaaatctaacccacaaggtgatagtatccttaaaccaattaaatcagaatctcgggttggataacctcaaatatgacttattagcacttcccattaatcactggtccttcaggcctttaagtttacttactaggaatctcacttttaataccatcttatcaacttcagttgtaaataagagaacactcaaaggctgaggaattctcagcggtaaagctctgcccacgttaagtaacaaaggataagttagtctttgttgtgatcactttgttgtactgataagctacgtatttctactcaaggattcaaattctcacctttctcaagaattgggccaaaaccgataaactaaacttatttacggtccactgattaaaggttgttgcataataagttcttgctatgttcagcagttggattcacagcgccagaaacctataactgcttgactttcctccccactacactgcgaaaattgccccttaaatgtaactaaccctaaaacctcaacagtatcgtggccaggcgtggtggctcactactgtaataccaacattaggcataggcgaggggattgaggccaggatatcgaaactagcctgggaaacacacggagacccggtctttggaaaaataattagccttgcgtggtggtgggcgcgaggttccggctaatcgggaggctacagtgagccatgatgacactgcactacagtctgcgcgacggcccatgtcagtaagctctggagcacctgaaacaagttgtgttgggtattttatttactggagagcgattagtgactgatgcctacttacagcgactagagacgcatgctccgatagcagcacaaactcagcaggcgcgaacaaatggtaaagagaaactgggcaaacaagcatcacggctcctcagctgagaaagtgggggccctaaaaagggccttttgttgatagaaagggacgctcaaccaccgaaaccgtagagggtgcggccctggcgcttgagcgcgtagaccacatccatggcggtgaccgtcttgcgcttggcgtgctctgtataggtcacggcgtcccggatcacgttctccaggaacaccttcagcaccccgcgagtctcctcgtagatgaggccggagatgcgcttcacgccgccgcggcgagcaaggcgccggatggccggcttggtgatgccctggatattgtcgcgcagtactttacggtggcgcttagcgccgcctttgccaagacccttcccgcctttgccgcggccagacatgacgagcaagaggagtctcacccaacgctttgtgaggactctggcctgaggcagcgcctttatacgacagttggcggaccgaactgagaacctgaaagaagtcggcgggaagtcccgccccggtgggggaggggaaatctaaagggccaaaccgaaatagggggaaaaaaaaagcgagcttcttgtttccgtgttctgaattttgtaacgtgcatagtattttgttaccacgttatgaggctttaaaaaattgcttttgaacgcagaagatatacatcaatactgtgggaaatacaagaaaggacaagaaattaagaaactacaatgttatcccatcacacaggctagttaatcatgtattttgcagagcagttgcacatatttttccaagaaaatgtatacagtgttgtatatggagttttgtaacctccttatattgattataatttaaccaatttctattaaagagataaaagtgatgttttggtgtctatgtttcttaggaattatcaatagttataatcagttccccagcaattttttaatcggctgtattttaaaaataatgttttccacattcaacataaatgtactttttctctatacttgggaccaatattgaaatttatgattttattacaccaaaatttaaattttattacattaatatttaaaattgtattagaggtctcatgatttggtactacgggtctccgcattatttcctttccaaatttcctaatctgtttcaccaaggtttctggacaactttagagaccttttgtgaagtttgaataaaatctcttcgagattttgataattgcattagctttaggacttaattggaatagaattaaaatccttaaaacaagctcttata

SEQ ID NO: 113 - DNA, 2168 bp, Homo Sapiens
cagggtccagatttggtttcagaatgagaggtcacgccagctgaggcagcaccagcgggaatctcggccctgcccccgggaaatgcggccacaaagaaggcagacgaaagcggacggccgtcaccggatcccagactgccctgctcctccgagcctttgagaaggatcgctttccagaccagccaccagggaagagctggccagagagatgggcctcccagagtaaaggattcagatctggtttcagaatagaagggccaggcacacgggacaggctggcaaggcgcccgcacaggcaggcggcctgtgcaaagcggaccctggcgggtgtcaccctgctccctcgtgggtcgccttcgcccacaccggtgcgtggggaacggggcttcctgcaccccacgttccctgcgtgcctgcggctctcccacagggggcttttgtgagccagggagcaattgccgtccccgtgctccaggccagccaggccaggccggcagatgggatctcccaacctgccccggcaagcggagattttgcctacgacaccccggctcctctggaaggggcgctctcccagcttcaggctcctcggtggcccctgcacccaggcaaaagccaggaggaccaggacccacagcgtgacagcctgctgggcccttgcacggtgggacagcctgggcctgctcaagcggggtcacagggccaaggtgtgcctaagccacccgcgtcccaggggagtccgttgtggggctggggctggggtccccaggtcgccatggcggcatgggaaccccaagccggggcagctcaacctcgccagcctgctctcccagagacctccatgcggcaggtgcagatgaaaggcatcccggcgccctcccaggcgctccaggtttcggggcgctcatctgcactccccttcggcctgctgctggatgagctcctttcgacaccagagtttttgcagcaggcacaacctttcctagaaacggaggccccgggggagctggaggccttggaagagggcgcctcgctggaagcacccctcaacgaggaagaataccgggctctgctggaggagatttcagatgcggggtttggccaggatcgggtcgtggcagagcggtggcctctatttcggggggaacacctggctggctatggaggggcgtgtcttccccccgccccctccaccgggctgaccggcctaggattcctgccctatagttctaggcccggtgagaagctccacacaatggagaactgccattctttcctgggcatcctggggatggcagagccggcccaggtaccagcatgtcgactgcctactgcgcacgcgcgggtttgcacgtagccgcctgggctgtgggagcagcccgggcagagctctcatgcctttccaccacacaaacccgcctgaccacccccccacccccacaccccaacactggaaaatgcatcctcctctgggctgggtggagacccacgtcccgcgaaaccctgagagcgtgcagcgtccaggcctgacaaccctctggtggctcgcctcctctgcaccactgtgccaccgttgtcggcccgcccgtgcccctgcagcctcccagctgccaccatggagcgcctgtcggtggaacacagacctctagctcactttgccagtctcctggctaggcctgcgctcattgtgcaccccagctgatgtgcaagggagccagctggcctctctctgcccttgtccgtccgtgaaattctggctgaggctctcccaacaccttccaacgctctatagtcaaagcctggagaatagttacatctcctggatgttcagttcagaaatatgtcacaatgccccctccctgcagagcgtagggaagatttgcatcatttgggtgatcagtgcagagatatatcacaatgtcccctgtacaaaaagactggaaatgatttacatcacctcggtgatcagtgcataggtatgtcagaaatccccagtaggctgaacctagacaagggttacatcaatttggtgatcactgtagagatatgtgaaaattcccgtgtagacagagcctagacaagtgttacatcacctagtgatcagtgcaggggtaattcgtgaagcctcctttaggcagagtgtagacaagtgtttcctccctggagtg

SEQ ID NO: 114 - DNA, 2490 bp, Homo Sapiens
gaccagcacggccaccacacccacagtcatcagctccagagccactccctcctccagtccagggactgcaaccgcccttccagcactgagaagcacagccaccacacccacagctaccagcgttacagccatcccctcttcctccctgggcaccgcctggacccgcctatcacagaccaccacacccacggccaccatgtccacagccacaccctcctctactccagagactgtccacacctccacagtgcttaccaccacgaccaccacaaccagggccaccggctctgtggccaccccctcctccaccccaggaacagctcacactaccaaagtgccgactaccacaaccacgggcttcacagccaccccctcctccagcccagggacggcactcacgcctccagtgtggatcagcacaaccaccacacccacaaccagaggctccacggtgaccccctcctccatcccggggaccacccacaccgccacagtgctgaccaccaccaccacaactgtggccactggttctatggcaacaccctcctctagcacacagaccagtggtactcccccatcactgaccaccacggccactacgatcacagccaccggctccaccaccaacccctcctcaactccagggacaactcccatccccccagtgctgaccaccaccgccaccacacctgcagccaccagcagcacagtgactccctcctctgccctagggaccacccacacacccccagtgccgaacaccacggccaccacacacgggcggtccctgccccccagcagtccccacacggtgcgcacagcctggacttcggccacctcgggcatcttgggcaccacccacatcacagagccttccacggtgacttcccacaccccagcagcaaccaccagtaccacccagcactcgactccagccctgtccagccctcaccctagcagcaggaccaccgagtcacccccttctccagggacgaccaccccgggccacaccaggggcacctccaggaccacagccacagccacacccagcaagacccgcacctcgaccctgctgcccagcagccccacatcggcccccataaccacggtggtgaccacgggctgtgagccccagtgtgcctggtcagagtggctggactacagctaccccatgccggggccctctggcggggactttgacacctactccaacatccgtgcggccggaggggcagtctgtgagcagcccctgggcctcgagtgccgtgcccaggcccagcctggtgtccccctgcgggagttgggccaggtcgtggaatgcagcctggactttggcctggtctgcaggaaccgtgagcaggtggggaagttcaagatgtgcttcaactatgaaatccgtgtgttctgctgcaactacggccactgccccagcaccccggccaccagctctacggccacgccctcctcaactccggggacgacctggatcctcacaaagctgaccacaacagccactacgactgagtccactggatccacggccaccccgtcctccaccccagggaccacctggatcctcacagagccgagcactacagccaccgtgacggtgcccaccggatccacggccaccgcctcctccacccaggcaactgctggcaccccacatgtgagcaccacggccacgacacccacagtcaccagctccaaagccactcccttctccagtccagggactgcaaccgcccttccagcactgagaagcacagccaccacacccacagctaccagctttacagccatcccctcctcctccctgggcaccacctggacccgcctatcacagaccaccacacccacggccaccatgtccacagccacaccctcctccactccagagactgcccacacctccacagtgcttaccaccacggccaccacaaccagggccaccggctctgtggccaccccctcttccaccccaggaacagctcacactaccaaagtgccgactaccacaaccacgggcttcacagtcaccccctcctccagcccagggacggcacgcacgcctccagtgtggatcagcacaaccaccacacccacaaccagtggctccacggtgaccccctcctccgtcccggggaccacccacacccccacagtgctgaccaccaccaccacaactgtggccactggttctatggcaacaccctcctctagcacacagaccagtggtactcccccatcactgatcaccacggccactacgatcacggccaccggctccaccaccaacccctcctcaactccagggacaacacctatccccccagtgctgaccaccaccgccaccacacctgcagccaccagcagcacagtgactccctcctctgccctagggaccacccacacacccccagtgccgaacaccacggccaccacacacgggcgatccctgtcccccagcagtccccacacggtgcgcac

SEQ ID NO: 115 - DNA, 2500 bp, Homo Sapiens
tcaaaacaagcagggctctctccctggggcatctcacttttttttttccttttaaaccacaaggccctaacagaggagcaaactccatgtggtttcttaactgtttcaaaagtgatcaatcaccaaatcgaatgtgacgtgcattgtcaccttccaaggaaaactctgagtagtcttgaaagatagaatcacaaaagggaaaaatcacctctccagggctagttcccttataaaataaatctgtcctggggcttccccttggaaaaacacacacagggccccaagtgtgtgtaggctgactggctacacaatcatttgaatttagtttcgaaaatagcccttccctgtgtccctaatgtaaaggaataattaaaacccaaagcgcatttcccttaattagccgaaagccctagcaatgcatggcattgtgggcattcaggagccaaaatgcccccactcataaaaaatgatccaaacaatggctcgtgcccaagctttcacacttgttttgcagagaagtcttggctggcagaggcaggatttgtaattccttgggtcgcttgacttcacgaggggcgaggtatgcattgtagcgacacggactacttgtgaagcctttgggcgggagtcgcttaaagattaactttctcgggtttccgttaccaaaagcgtttccgtgaatagcgtgattggaaacttgtgcgggccggagaccgcggcgcggctgctctttcaacaggcgatttgttctcctgtccgaggctcatttccatgcaaagagcctgacatcagagcaccttttgttgctaaacgctttctttagcctcgagggagagagtcatgtggagctggaagagctcattttgaagagaggggtcccggggagctccctccaagatctagaggctccgcggccacccctgccgggtcctgccaagacttgctagaaggaacgagtcgcgtgccttagttagttggttcccgtcacaggaagaaacgcctttgcagtgggtttaattgcttctgggccgagcgaattccccgccgtacaactcagtggtgcggactttgcctcctgctaccctgttgctgcgccgagcggggtgggaaagtttctggagttgtcagtcgcgcagcccgtggccacctagacccgaggtgcgggcgcctgcgaagggcccccgcggggtggccggggccgccggggcatgcagcgcgggggcgcggctcggtgacgccgcgggcggggacccggcatccgggcaggctgcgcgcgggtgcggggcgagggcgccgcggggactgggacgcacggcccgcgcgcgggacacggccatggaggacgcgggagcagctggcccggggccggagcctgagcccgagcccgagccggagcccgagcccgcgccggagccggaaccggagcccaagccgggtgctggcacatccgaggcgttctcccgactctggaccgacgtgatgggtatcctggtaagttacctggggagggggcggcgcaggaagtacagttcgcagcagcccctctgaaaccgggggctcccttctcgcccacccactgggcaacccactccgcagaggcgtccttctctggctctagttcttagggggctaaatacacacagtataggatttcaaaccctaattaaaaaataaccagccacaggtcccgtcaaaaggtgttttttaaacaatcgggtatgatattcaacagtttaatctgggacacctgctgacatgttggtgtggaaaaggcgagaaagaggccttcaaaaagtagatgtaaataaatatttggttggtgctggattagggaaaaggctgatgttactgatgtttatctcttcaccatttgttgtgtgaccacaagagggaaaacaaacatttccttactcagaactgccaaaatgtttgcctacttttttttgcagtttttcaatttgtggagttacaggatatttgttttatatgtttggggctaaaacaataggacttattttgctaaatctgtgctgtcatgtattttgaaatgtccagtgactaaaagcgcccctggatttggcatagtctctgggaagcagttcttctgtatggagggtgaagttttaacctgctcagggttgaataccttggggaagtaatagatttgctttggtggagctgtagttaggcaggtagactggaatcagatgggcgaggtttattacagtcagacatcttaatccatacataaaagacaactttagtttaaagacttggaatggccagatgtgcagattatcagaaaagtctctagatttgctttgagatcttatattttttgagtgggaggagatggagtgaaagttcttctttgggaatgataaaccgtgtacagtttttagcacagtgattaaactcttgggcttcaaagtaagttatactaggtcaaatgccagctctccaattgactgtttacatgatcttggccaagtcattcaac

SEQ ID NO: 116 - DNA, 2243 bp, Homo Sapiens
aaggtgctctgttaagtgaccttggggagagcagtcccctgccccagcctcactctttcccgtcccagcctctaagggcactgcctaccttagttctaccccagggcctcaaaattggccctcatgcttttgttctcttctttctctggcctcctctcctttcttctccttttccaccaaactcatcttctgggtatcctactcttggtcatctagaccctttggtacctagtagcccacagttttttttcagatttgctaatgagtcttgtttattgcaaagagggctattgatttctactaacaatggaacttctagtgctttcccagtaatctcagggatgttgatgtggggcctttgggaaacaggacctgagcatgtgagtttcagtctcacagagagagggtcagtgagtgctgggaggggactgtgcactgccctcaagctgcacactttgctgaccatctaataacctcctttatatctgtataactctttcccattttcatacttttttgcctaccatccttagattcacatatgatccaagtaataaagccctatttgcaaatgggaaattttttaatcagagggtgagggtgatctgtccaaggccacatagcaaaatgtatcctccaacattgagaagctagacaccgactcacacaggcactaaggaagttggggaagttctccttcatcatcgtcagcaggcttggcttctcaatcttgtcatcacgtctggtgtatttgtgaaacatgtcgatcatgcctattatggacctctcagcttgagtgttgctcatctttgctttcaaaaagccttcaggaaataaagacaatcatttttttcccttcatttaagttagggtctctatttgggagtgctggaaggagggctgaggacagagtaaaaacacggataaggtgtagcagaacgaactcaatttttttttaatgtgatgggataagttgctcaaaaatgagagggtaggaccaagtctgagacctggcccatcctggccagggccaagaggagatgcaggtggatggcggaagtccagctgtggacagtgcttcagagagggagaagcagggagagtcgggcgccagcaacacatggaagaactaagctgggacaccccagcctcagccagcacatggcagaccccactcttaaaagagcaccaaatccatctcctccagcttcacagtcggggtgacagtcatgggggcaggacaatggccttggtgatctggtgtctgaccctcctcggctgcttcaggaaccagacaccgtgggccccaccttgactcaagtgcaagccctgcatgacacggtgtgtgcaggctccaggtgcacatgtgagcgtggacgtgagtgttagcaggaaacacagtcctgtcccgagcacagggggcccttcttgtattcccttgggaacgagaaacaggaatggcctctgttacaaggaacagaaataactctctggttcttaagctgctggacggggtgggagtgaggtgggagtcacttcatgtctgctcttgggaattatctgcaccctctgaatcaccaagccttgactgtttaaataaaaatgtctgacttcccaaagcagatctttcagccagtagtcagtctgggctggcctgcaccccaagcctgaaaaataggacagtgcagttctcacttcccacactttccaaagaaccaggaaaggaccttggctaatgcatatgggtgtctgacaataaacccccaacacctctcaatgcaggagaaagctccatgccggcaactgactaagaggagccacccagagcttttttgaatctgaggccaaggccagagggcaagccctgtgcccagagggtgactgacaatttgcaggttgtggtagggagtgacggagcgttggtttctcaataccttacccaggtaggggcaagccatctggccagggctatgctgtgtcggggtcccaggcctgggggtttggagagcctccaaagcattcacaggggacccctagccctccaccctctgtggagctggagctggggaggggatttagcaaccgggaccccaacaggaggatgaatccagggaggaagaggacagggagggtcctgtgctcaggtcccactggggacatttccacaggagttgcctcaggagatcccaaaggagcaatggacaggtctggttcagccacctggttatacagacgtgggcttt

SEQ ID NO: 117 - DNA, 2246 bp, Homo Sapiens
cgcgcgcgcgcacactcacacacacacacacacagtcgccagttgcgcacacccgcagcccaagccggacacacgtgcaaaccgcgtttttgtgcgctcatctcccccgagccccggctgcgcaacagcgggagggggttggggggggccactgggcagcttattttaaaataaaagaaaaatcgtccttatatctcctccatcctgggagcaggaccccctgagaaggggggcggggtgctgtgtgagtgaactaaattgaatcaatgcaagtctccacccacccaaaagctctttcggacttggactttgggggtgggggcgtggactgtggaaaagggttggggtcgacatgggagttggggggacagtaagaatcgcttcgtttccctggaaaagtcgcttggtagtttttacttttgttttatggtcgcgggcggcgaggggaggggagtagatgttggagttcaacttccaaaaagtgtctccatataaatcctggtattacagactctgggagggtgaggatgacaaaataaacgacactaagacaacagaatcaagagcacgtgagggggtgagaagtgtttgagaccttgtttgagtcccacttggaaaaggattttcactcaaatctttgtcccctcccctcaccttaccccgattaactcctggggtcaaacacgaccccacctcctaaactgggtctatggcaagcgagagggtaaagggaccggggcgctccacgtgggagagggacttggacttgccagcccaggagtaggtgtggccaaatctccgcagatactcgggtgggtgactccaggaggcgcccctgacaatcacagcaacctggaagtcacaccccgccccccgcgctcctcggcccagggtaggacttggaaatgcctgtcagactgggaaggacgcagctgccttgtcagccgtttgatctccaaccggcgaggacaagaggagttgtggggcctctccgtggcccggggacaaggccagaccacggcccccgtggacaccccccattccccaggctgtggccaactttgtcaatttgatgacctggcctccagggctgggcgcgccacgcggctggcctcctctcccttctcagggtttctctggaggcggccagggcgggtcggggcctggctccggctaggcttcgcgggcgagtccagctgcacccaccccactccgcccccaggcctggctccggcggcttcacccgggcgcatggcgaggccgtgacgcctcagcgccgcctccctcggggccttttcctcggggggcacacgggggtttttgttttcgtcccgaaggtcttgggtggggcgatggcaccaacaatttaacagcgcccagagtccgtgagcgagaacagaaagagatcccttccagtcccataccctaaaaaataataacaataaaatgtgccctggcttgcagttctgtaaactgtgggctccacggtgggcggacgcgaggccgagcggatggagaccgggggcggggcgcggacttgcacctcctcgccctggccgggcaggctgcacccggctgcccacccccaacaccccacctccacgtggtccaaagtctagtagggcctccctcttctgccatccctctcaccgggaaaatctttccaggaaagtggcttaaaaaaaatatgcccacacgcacctttaataaacttctttaagacattcataaactggccatccctactcgcccggactctaaatttgaaagatcaactcgcgctctctttctgagaactagcgatgtgaagcccagagagggtgagcactttgccctaggacacacagcgcgtcagggacaggtctggacccaaaacaccgcggcgtgcctgcagcccagcgccgccggcggtccgggactcgaaatcccgacccacgaccctcaccttcctggggttgattacaaggaaggcagaccccgccagtggcaaggcgggacggggaggacccctcaggaaaagggagcccctccgcgagcggcgcaagggctctcggagtcccagctgcagccgccaccccgcgtgcggtaaggggccgtgcctggggagggggcaccccctccccactcccagcaggaagtagctggcgtgggccggcgcgtgccccacggacccgaggagcacttcctcattggccccgcgctgccccgacggcgggaagagggacgcgcgggcgggcggacgcagg

SEQ ID NO: 118 - DNA, 2357 bp, Homo Sapiens
cctgcagctcccgggagcgggaacgtcggggacaagagctgaagggacgaaggacactggagatggccagggggaaactcggcgtgactctctcttagggctgtgtgagggttttcaaaccctcatccctgtttagggccggcagcgaggcctcaccacagggacaagcccggtagacctttctcctccttaggctcccagtaaaatgctgggtcccttgccagtggaaaacggaagaaaagtttggagcgtttctggagccgcccgtttgggaagaaatgaactctgaccccagctccggcccgtgtatcggaggtcccagggctgcgagggtcgcctgggcagagctcaggccaagaaggagctcggctgaggacaggagcccggggtctgtgtgggagacgggatcccttcctaggatgcccgggctggcctgctgggaggcggcggggtctcctcctcagggtcctgcactcgggtttcacatcgggtgaaatttctgggctggggctcagcacgcgagaccgctgcctcacgcgggccacacagaccacctccccgcgggccgcagcccctggtcaccggccctcctctcggtgctggggccgcctggagccgctgggagccgagtggccctcggggaggcggcgccgcggtgcccagggtgcggggtccgcctctgtgcgcctgagggcgggggtcgtacaggagctcttcccggggctggtccccgaggcgctgcacctcctaccagcttcctgtgatcgaaaccgaaacctccacctgcgcaaccctcccagatgggcttgaggttggggtgtggccgggacccgggcggggaggggtaggggtggagtgaaggcggggtctgggggggtgcgcgtggacggggagagtggaaccgcgggtgtggacctccaagtacagacgtcagagaacgtttgtcgtcctggctcgttggtctaggggtatgattctcgctttgggtgcgagaggtcccgggttcaaatcccggacgagcccgcttttttttttttttctgaacaccatcattttctcgcggtgaagattgaggagcttcacggagtctcggccgcagggaacttggtctctccgtggcagctgcaggcgccggggccgatccgacttcccgcttccgtccggcttgcggcccctcgccttgcccggctacaggaaggactcgcctgcgcctcctgactggagccttccacctgggagttctgagtgcgcctaaggcctggcgctgaggcagtggaccccagatccgggacccgaaaggagggcaaacacctccaccgccgcgtctgcctctgcggacgtggccctagatcccgggtggccatggaacttggtctgggcgtgtagttttcctttgagtgggtcggttctaagtttaaatttccgacgagcccagggtttcgaacttccttccttttttccttcgtttctctttcttttcttttctttctttctttctttttctctctttctttctttttctctctttctttctttctttctttctttctttctttctttctttctttctttctctctctctctctctctttctttctttctttctttttctcttttattttcctttttcttctttttttgttttttgttttttttgacagtgtctccttctgttgcccaggctggagtgctggagtgcagtggtgcgatctcggctcactgcaacctcaacctcccaaactcaagggatcctcccacctccacctcccaagtagctgggactacaggtgctcaccaccacgccaggctaagtgtgtgtgtgtgtgtgtgtgtgtgtgtgtgtgtgtgtgtgtgtttgtgtgtgtaaaaccgaggtctcgctgtgttctggaggctggtctccaacttgcactcaagcaatcttcctacctcggcctcccctcacaaagtgctgcaattacaggccagaaccaccatgctcagctggttccttttccttccaggtcctgaggtcgcagcggcgcgtccctccggtacatggcggggaagaggtgcggttccgggagcctgcgacgcctctggggagtccaagcccggctcctagccctttgcccgaggacggaggaggacctggggggcttcccctagctggtggtctcagttctccaggggcggcggagacagcaggaagccccaaaacccgagctgggtttcctgcttggagtcgcagggtgtggcaatgttgaagttcgccgtgcccctgctccctatgggaattagaatccggtccaggacaagcatcgggaaagggggacagtttgtgaccgaggaaactaggactgatccagaacagcgca

SEQ ID NO: 119 - DNA, 2290 bp, Homo Sapiens
taacaaggttcctaaagcctctatattcaatgtgtggccccggaaccagaagcattgtaatcacctggaagcttgcttgtcataaatacagatacttagaccttgcttcagacatactgaaacagaatctgcattttaacaaaagacccagaggattgcttttacattgtgtgtgtgtgtgtgtgtgtgcatttaaaaagatacaggtgtcacaatttcttattgtttggtcaattttaaaatttaatactgtataatggatatctcttatgtcaacacagatctacgttattattcatcataaataaacagtaagttattgtatccatcgctactgattggtattcatattaatccaatattttgctattgtaagaaacattctgattcagaaacgctgacgtaaagacctctgagcaggacatctaggagacactgactttgttatatctccctttctgttatatcttgctgccttaatagaccacgtgggcacatcactttcactgatcttttttttctttgtaaatgtaaattttaattgaattataaggccagtttacagtgcatctgtgggcagatttctttaaaatgcatggtactttaaactttgtcttacgagaggtccaggaaaatgcccactaagcctctgtgattttaataccgtgccaggccatggcaaagtgaggtgcctctgacgtttgggctgccacagcgtgtttttcagttactctggtaacacctgtgacctgagggttattctattcgcgttagcaactcgcgcgggttgggaggcgccaatgagagcagggcttgaaactagcgcttggcgtctgatggttgcctagcgacggtcgtcgacgctaatccttggccggacggatccacatctgttttctggctaccgagagggcagccatgaacacccaaaagggttccctcaccataaacgtccacagaggttccctcgccatgagcatccaaaggggttccctcgtcccccgggatatggatagctcgggtagagacatgcagctgcgggtgatcccggctgaggtgaagttcctggacacgatggccgggagggtgtaccgcctcccgattactgtgcataatatttgccgctggaaccagaaaatccgatttaaggagcccgtcaagccacaggtgacacactaaggggtgctgggagcgggaccttgtgagagcgcctcctcacactgcgtctctctttgccccagggagtagtcatctggctcctgccgggatggagggaggattgggcttcccgggaaacagtgacaggtttctgtgtgtgtgctctttttgtttctctttgttttctgttttgtttaggattaggagatggggagggcagggtggagaaaagctgacctagagcctccccatttcttcaacctgggtttagaaacttgttaacaatcccaaaatctgtgcaacttggttttatgattttgctgttgccttaagaattatgagaacaaaattctctattaactgccctttgaatcataaagtgcctgataactccaggaactgtaggattagtggaaaggttcattatttcatattttaacaaacatttgttaagcacctactatataacgggtaatagacatgaggaatacggaatggacacagccctgccctcatagaacttagaaactaatgagggggttttagtacagatctaaccatcaagaaagttaatgttctgagagggtgtttctatcttctaatttaaagtgggcagaatttcctctgtatctcactgtgttattttacatcatgtgtgtgaatggatggttattagttcagtatgatcacattttctcaggcaaatttttgatataggaaatgcgataagaatttttgaaatgtaagcaataaataactgaaaacttcaagagatattcctaataaaaagtagtgttgaatacagctggactatatgtgcagaaaaaaaagatgtccgtaattttagattaaatttacatatatttctttgtatatatgtagaaaaacctatgttaatgattagaagagcaatgagaaaaaggacttccatgttctaatttttgctctgttaaaaaaatcgatgtattatttacttactaaagtgcacagatctcaaaagtaaagtttgatgaatttacaaaaaaataaatatgtgtgtgtgtagatagatagctagatagataatctccattagctaccacctggatcaaataatagaatatgttcactaccccagaagatccccagtgct

SEQ ID NO: 120 - DNA, 2367 bp, Homo Sapiens
gacgtgtgcggcggtaagcgcccggcccgtaccccctccgcaccccgcaactccgactttggcggcccccagacccggcgaaaccgtgaagtctcggcctcaggagccccccagatccatggtctcagattcgaaccctcagacctgttcgatctccttttatgccgtcccggggacccttctccaccctctgtctcatgatccaaaatacaggcccataggtttcagagataccctgtgaattcttccttggggtgtcctgaaccgcgatcgtagatctgtgcccccagttccagcggggaaccccattgtccgggaacccagagctcacagccacgatcttagacccgagcccacagagccagaggtgacactggaatcctgccgctgggaatacctaaattctcaagcccacatttgggatttcctaaaccccgccctggggccctttaggccgtggatgtttgctccgcgcccatgacctgccaaggacctctacattcaggctgggctctggatctcacattctagcgcccagacatgtcgggaacgccttacgccaacttggggtccccaccaagagaacccccaccagatctgcaccctccccttcacgcgtgcacccagtccaggctccctcaagccccacgggtgccttttagacctgaggaggttgcaaacctgatcccccatacctgccccacccatccgcggacaacccgccctcgcaaactcagacccccacccggaggcttcagattcctcccaggtccagctgccggaaatgcgtgtttgaagggagggtgtgggctcaggggcgaagcacccactggtccccttttttccccccagcagtgagtcgcagccatgttcctggttaactcgttcttgaagggcggcggcggcggcggcgggggaggcgggggcctgggtgggggcctgggaaatgtgcttggaggcctgatcagcggggccgggggcggcggcggcggcggcggcggcggcggcggtggtggaggcggcggtggcggtggaacggccatgcgcatcctaggcggagtcatcagcgccatcaggtaaggcggagactatcagaggggcggggcctgggaatgggaggagcctcagtgaggcgtggtctgggaggggcgtggtctaaaaatagaataggattaacctggaggctaacctgggtacatgaattaggccggggaggcctggtttgagagttctgctgtaagggggtggaccccagtgaggcggatatcagtcattgggggcggtgcttgatatgggagtagtctgattgtgtgggaccaggacaatgtggtcctgaggggactgatgtggagttttggcgggtggggcttatgggtctgggctcagcctgcattggctaacctggagatgaacgttaaaggtgcggagccaatgcgtctgagtgacattttacggaaggggcttgacttatgagtgtggtcagaggttttaggtgggttaatgaggaggtgagcccaggaggaagcaagacctaatggggtagggtaaatggcccagaatgggctgggcttgctgggaactggctggattaatggagaaaaatgccctggtagggatagggcaggttggcttaattagccacggccacttagcagtgatcccttgaaggggcggggaccaatggctggggtaggatgttgggaagacgggcatttaggaagcgggccatggagtagggtcttgggcagatggcacctgaggaggataaggccttgggaagctggggcagagcctctatgaagtgagccctccaaggggcggggtcttttgattctacgtgggattttttaggtttagggtggccaagatgactgaaatctgccactgggtaggtgtgcctggcaggaggggagcctcccaggggaccggtctctgggtttcctcgagggtggggttggcctgaggaagggagaagaggggcacgaccagggcagtgtggattgggacagatgaggacaagaacaaatgaaaggcacagcaaccaagtaaggaagataacggctggggtctggagcgttggggctgatggttctgtagtgctgcccgttggaggccccgcccctggcactaacccctcccccttatctcttcgcagcgaggcggctgcgcagtacaacccggagcccccggtaagccccctctgcaaccagacccccttctcctgccaaggcctcttcgaggtcccatccctgttcctgtagagaagccccaccttcctccccttcttgtgaaattcctctgccagttcctcccatgccgtgtctgcagcttcgccatgggtcttagccatgccccacatacgtgcac

SEQ ID NO: 121 - DNA, 2383 bp, Homo Sapiens
ataataaagacgcatatatgtatgcttttataaaatttagctgagactctatttttattttacaaacattccatttaatagtgcatgaacttaactgcagacaaagagacagaaacagaaacgaaggaattcctcaactcccgattacagttagagagatatttttctaaaggaatcttctaaggataaacgtacactaaattaagtagaagacattaagatttggagtggttttcttattcccttttacaatcaggttgattaaggtgtgagttgactttggtacaatgcatccatttcaagtttgatgacgtgtctattactctaaaaggtcctcttgtgccctttgcagtcagttccgccctccccctgaggccagcagtcaatgatgtagtttctgtcactatacaggttagttttaactgttgtagaaattcaccttgatggcgccacacagggtgcactcttttcatcactcggcataatgtttttgagatgatccacgctatttcatgtttccgtaatgtgtcctattttattgctgggtagttcgggtagttggggtagatcgcagcacattctggcgacaggtgagactgcggttctgacctgcaggcctcggtgaacatgagcaagggcacctgggcgccgggagagacctcccttcccctacagaaagcaagcgtgttatgttaacaaccgaacggggaccctgctttcatcccaaagaacagcacccgactgcgtagtttcttccctggctctaggaggtgagaacacattccccgctagcacagacatcctacaaactcctgcggaggctgcggttagaagcagaggctgtgtgaagggtgactctgggggctatgaaaaaacacgaaggttttcacagagcatgagaacccaaaagactggagactatgaagcgatctgcaaaaagcagccccaagtagaaagggaagagaagagccctgcggccacttagtgttaaaagagctcacggcggcggagaggataacacgttactttctgtttcccatcattgcgactgtaaggagaacacttaacatgccacccaagccacaaaactgcagttttaagaataacccttataggggagtctattttttcattacaaaaattcaggggaaagcgcggacgcagtcccccactaccacaaattatgcagtcgagtttcccacatttggggaaatcgcaggggtcagcacatccggagtgcaatggataagcctcgccctgggaaaaccaccttcgtgatcatggtatctcccctgccaggtaagtatgacttcacacacttctgccctgtcacagctccatatacctcaccctttacacacatggtcacttgccccgcgcacccccgagccttcctagccctgacacacagctgggaccctcaggtccgaccagcggtcctgaacccgctcccacggcacgggagctccttcgtggtgaaacagccagtggcgaagcagcagcccctgcgctgcctcatctacatagaagtcgccctatccgtgatgtcaccgacagcgccttcctcgtcccggtctgcttttctgccccaccctccgccactcagccgaccaacatggtgccagagcctgcgggggcagtgatgtctgcctctgcctcctttccctctcttccccgcccatggtcttccccaaagaagcgggtgtttctgttgtagttttttgtttgttttttgttttgcgccgtctcgctctgtcgcccaggctggagtgcagtcgcatgatctcggctccctgcaacctccgcctctcgggttgaagcgattctcctgcctcaggcttccgcatagctgggattacaggcacacgccaccaagcccggctaatttttgtgtttttagtagagacggggtttcaccatgttggccaggctgatcccgaactcctgacctcaggtaatccgccgacctcggcctcccaaagtgctgagattacaggcgtgagccatcacgactgcccagaagccggttcttagcctgtgttgccgaggacctctttggcagaaatctggagcctgtccacccttcttcaaataatggcttgtaatgcgcagactaaaacatggaggattacacaagaaactggttcacttcacatcattatccttgtgatgtagcattctacttgaaattggaagccgttcgatatcagagaaaccatatctatgaaactagagaggctgctcagatgactgcaaaccagccatccttacttgttttaccactagtagtgttataaggacggtggtccaatttcaggaatcttgtagggttctttcaaatacagcaatgtacaaatatgctgccccagcagagcacactgga

SEQ ID NO: 122 - DNA, 2417 bp, Homo Sapiens
aggcaatctgcccacctcagcctcccaaagtgctaggcttacaggcacccgacaccgcatctggccaatttttggtatttttagtagagacatggtttcaccttgttggtcaggatggccttttaactcctgacctcgtgataggcccgcctcgacctctcaaagtgctgggattacaagcgtgagccaccacgcctggccccaggaaatctggatttttaatgtggtatctccaaattctgaaactttggcaactaatgcaatttttagaagactgtgggccaggcagactgcattctatggaggtagaaaaggaggcctgaggccgggctcggtggctcacgcctgtaatcccagcactttgggaggccgaggcgggcagatcacgagattaggagtttgagaccagcctggccaacatggtgaaaccccatctctactaaaaatataaaaattagccgggcgtggtggcagcgcctgtagtcccagctactcgggaggctgaggcagaagaatcgtttgaacccgcgaggtggaggttgcagtgagccgagatcgtgcccctgcacggcagcctgggcggcagagcgcgactgtctcaaaaacaaacaaacaaaaaattagccgggcgtggtggcgcatgcctgtaatccagctacttgggaggctgaggcaggagagtcgcttgaacccaggaggcggaggttgaggtgagccgagatcgcgccattgcactccagcctgggcaacaagagcgaaactccgtctcaaaaagaaaagaaaagaaaagaaaaggaggcctgagcccggcgcggtggctcacgcctgtaatcccacgtttgggaggctgaggtgggaggactgcttgagcccggaagctcgaggttgcagtgagccatcatcgcgccactgcactccagcctgggtgacaagagcgagaccccgtgtttaaaaataagtttaaaaaaaaaaaaaaaaaaaaaaaaaggcctgtaacagagacgcgactctccaaaatgccacacaggcaagtgggggccgcacagcccatggtttccagaaagcttctcttgggaatgtaaaataacacttaccctgggacttctagtttctaaacctcctgagcctagaggccctgaagacggaccaagtgcaaagtccccgaccccatacaccgtcctccgctccctccgcaccacacccttcattccctgagcaccgcggttcctccgtctccgggacttcgccctccgttacctggatggcctgcaaggccattacccgccactccaccctatctgggccatgtcggctgcaagcttggcttccactccgcactcccggagagccacgcgcagaccctcctccacggccccatcacaccctcccaagacaggcagcttaggcttgcgtcccctgccgacacccagcaccgaggggcagtccccgaggccacgcagacctccccaacccacacgcacagaccgacccggggaaccgcgggagccagtcccgcgctggggcagtggcagacccgaggcgtgaggcgcgcatgcgtagcgcggcctttattgcgtcactgcgagtccagagcgcacggctggatcatgagcacgcccgcgctggcgcctgcgcgcttgcgcatcttcctctgcccggcgcgcgccgcagccgtcgggatcacctcggggttgcgctgcttctccagcaagtgcatgcgcgccatggtctcagtcagcatgtctatgagcagttcctgctgcagcttcaggtagttgttctcctccagcaacacttggcttttggaccgctgcacctgcgccttccagccccaggcggtccgcgagagcagcggcgaccgcgtcctcgccagctggctctcagtggtccaccgcccgccgcggaacacgaaggcctggttgctgaggcgcatgcacggcgcgccgtaggcgaggcccagctcggcctggcgcgtgttgtggtccagcaggtagaaggtggacagggagggcatgcggcgcagtggcggccgccgtggcgagaagggccgcgagatgtgatcggcccaaaactgctgcagcgtctgccacaggcggctggcatggctcgtagccgagcactcgaaggttgccagggcgtggaccttgtagggcacgcaggtgctcgaaggggagcctcgggagcgctggcgactcgtgctgcgctcttgtctcgggagcccggatgtccagaatgatgaaggcgagccagggggcgctgctgggagacaagagtccgggtgagcagcgtgcttggtacaggccgcctctcaaaccgcgaggccggcggacatgtcttagccctgcagctacggctgcggctgtgtctcaccagctgctggccaccgaggagcccgtcgttccacgctgcacaggcag

SEQ ID NO: 123 - DNA, 2463 bp, Homo Sapiens
tgtacagttctccagtacaagcaacagtagttcaacctcaagaaaaagacatcttaaaggccgtacattaaaagttgccagggatccagccgcttacatttcatgaaaagtacagaccatacccgtttagctagctgtgcaccttaactggtcgagaaggcgcgctgggggctgggtttgagggtgagcaaaaggcaagattattagtttgggttgacgtgggggtcaaggggagagcagaggaataatctgtaagatctgagtcccgaagctctttgggttatggaggttagaaaagggcctgttaaagttaggcccaagtttcggcaaggtggaactgggaaaaaaaaaaaagaaagaaaaaaaaaacgaaacccgaaaaaacaacagcgagcaggctcccgagttctagcgttcacagtgaagccgttaaacgcagcaggaaagtaggcgtgtgttttcttcctcttcccgcctccccagagactcgagcccagtcctttcccctcattttcaccccagccgagtccaatggctgccctcgccgcggagtcgggtcggaagacgccccgccccctcgccgcgttcgccctagggaacccctccgccccaccttccctgcccgatgaggggcagtggctgccgccgtcacgtgtgctggcagccgccaagtgaggccgcttttgcgacgcggtgacagccaaatggtgcgacaggaggagctgcagccgcggccgcagcgcccgcacggagaggcttgaggcggctcctggcgtcgcccagagggagcgactagacgaacagtccggtgagggcggcgagaggaagcccgctacgagtgccctagctccccgccgctctcgatgaaccggacggaataagccgcgcctccagcaggggctgcgcctccatgaatccctagttgtttttttttttttctttctctcccctctcctcacccccaccccgagccccgtcccgccttctcccttcgccagaggcggccgcgtccaggtgcggagtccataccggagcgcaatggcgtccaaccccgaacggggggagattctgctcacggaactgcaggtaagggccgcggccctggtgagaggcgctggcggaggagacagggagagagccccgcgcggcgtcggggaccgaggaaagccctgcggccgccgcgcccctagcccgctaagtgcggaaactccgggatgtcactcgggaaatgcttccctcggggaaccgcttccctggggagccggaccctctcccccgccaaagccctggcctgccaccgctttggtttgattctgcctaccagaggggaccccatctctgcagccctgctgcagcgggagcctgctctcgcctggtccccggagaggccggcccgtcgccccctccctcggtgtcagagctacccgcgaacgcccctgttgccccctcccttcgcgcggccgggccccgccccgcctttcctccgtacaccgctccttaaactcctttgaatgactcccaagctgttttcttgtccctccccctcccctcagactccgcacaaagagcgcccccataacttccagcccctagacaagtttttttaaaaaacgagtctcaccaaatgtttgcttcacttcagcagccctcttcaggtgacagagtttctttcctctattttgagggttatctttttcttttcttttcctttctttttttttttttaaccgagtgataaatacagggtgcctttctctgctacccctgcccagatccgggagctcagatgctgatgcttttcagactttcattttccctctcatttgagcaccagagaaagagctaataagttgtttactaatgagaaagcagtcgactaagggaaaacattgggcaccacatgtctgcaaaagatgagagcaaagtagatcgcttagttaagtcatgtcgagtagcaatgttatttcccatttccagataaatatttgataatgtaggcacgattttctttagatctctatggtgtacatggggacttaagctaccctgtcgggtttttcattacttgggagtgttccagagatgtttgttttttgacttaaaagttattttgctttattttaatatagttatcttttagctactcaaagattgtagatgggaattaggagaaaaaaatagcatgcctgcatttctttttgtgtgttggacagttaattttttttaaaaaaaagactaaatcaagaaattctgaagagttgatgtcaaaattaagtattgcaactgcatctaaatttcttgtttaaatatactttttaagaaatctctttataagtttggtttcttgtgcagtcagacgtaagcttgaaaactttggtataatggttgatatttcctccacaaaaatagagactttaacaatgtatatcaatgcagtgttgcacatttagaatcctttggtaa

SEQ ID NO: 124 - DNA, 2297 bp, Homo Sapiens
agaaaaacaccaccgtgtccccccgtttgcatttaatacactcaaggctcctcatttattcctctggaacaaattcccagcaaatattcacccatcgatttgggagcgatggatttttataaaggtttgatcgctttctaagtggtcgaagtgatttgtttccgtggtcttctcagtattgaagggggtgggggaagcggatttgagggggtgcatgtccttgccgtcggtgggctcactttctaaaaactattgagatgcgccagggtggccgtgaccaagcgggcccagggtcaactgtgtgagggggaagcgcccctcagagcgcgcgcagcgtcgggggtccagcttacgccgctgcgcgcccttgtgcgcaccgggtgaggatgccgagctctgcgggcatcccggaagccgcggtggaggcaggggccccgctcggcgcagtgggcctgctggggaggtgcaggggaggtcctgactcctggtctattcccttccagactttttcgttcgctcccggaccttcagggctctccctcaaactttctcctgcccccttcacgggaggttcctgtagcctctgggccttagggtcccgtaagcctcgggatcgacttgtgcccggggtgggtgtggcggaagcttgaatcggattacccaggtacgccacctgtagacgtagtgggcgagggggactttgctaccttctcagcttcttccctggaccccgcagcgaggggaaccaaatctctcccatgatagcccctctggcgtcagtctggaccgagtggctacaggttggactagggtaggcagaagatgcacttggcaccttaccgaacggtatttgaatccgtctccattactcattaatggcgtgaccttaggcaacccatctaaactttccgaacctcagcggtccccatctacaatatgggggttaatgataatgccttctccgcatgtaggtggattaaatggacataaagcgcctacccccgcccggcacgtccaaaactctcattaacaggtcagctaatcttattacgagaggaaccctccctcctccgcttcccagagtgtgggcggcatgaggccacggaagcagctgctgcaactagcatttcaaaatccagagactttctaatggtggcagggggtgaaagggtaggggggaggcagggttgggacaggtagaggtaggttcttggggacttccagtcttggggaccaagcgcttggaactagctgggtttgggcagaaacaagaaggcaaatgacgggaccgccgccggagtccggacttccatccctggagttcactgtctctcccagggaacagaggagtgtcctggtttctcagcaatgaaccaggagagtgtgagaaagagcatttgtttcttctcccgtggcccgacaagccactcttcggcagttctgcgagcagattaattgaaacgggcctggaacttcatcctctcctcccgatggagttgctggaggtctgcggacactgcctggttagcctccgggaccacagcgccgtgggctttccctcgtggtgtctgccttaaacttgggtgctatcaatctatccaacaatgacggatgaccttgtcataacgacgccagtcaaaacattttcggtctaactctcttccaaccaacatcgaagcatcctgaatgagacccggatgaagtctgaacagcacgtttcccaggttcagaaaacttgagtggtgggaagagaaaaagaaacaagcagaaatcaggaaagaatggctattaattgctcagattggcaagtgctaaataagttaggttgtttggaaaaagataaatgccgtttcttctctttacggtatggccagaaccccggcgatgggaaagtacctcctgagtcggtcaatttcacacaccctgcctgtgccctctaccatctactaccgaaaatgccaggaagagctggggggcaagtgcctccttcgtgggtgcgagactgcatcgaagggctgccctggcacaaagtctggggagaggacatggtggaggtggggctgcactcccaccctgcccctctaacaccaggttttgggtagagaaacctatgcgtgacctcctgcggcagccgcaggcagctgaccgcaaacagcctcgcccgtgtcccggagcagttgtgccaccagacgtaacactggatacttgtctccgggccccaagaaggagagggaaagagccctccagaagacaacccgagaaggggtcagcagagcgctgggtggagtgcagactcc

SEQ ID NO: 125 - DNA, 2372 bp, Homo Sapiens
gtattgcctctcacatcctcatccgccactcatacagtgctgagatttaggatttccatcttccctctctgcccccacattgcgtgagaagcaagacagcccagacagactgccagcaaagctcagggctctttgcctctttgtccctgcatggcatcctaacaagctcaaagcataacggacaagctagaacttggcgatgcctggagcttgtcccgggtttctgtgaaaccacagtgctggaataccaggggccctgcaaacctctgctgacaatagggaaggccaacggcatgcctgacgccaactgcaggcaggtggtggccccagctacctagggagggtccagtgcagagcctctcggtggacaggctcagatccagactttttggcaaggaggcaaaacgaggcgggagtagggatcaccgtgcgctgcctccaggtcactccgcatctgctgtcggcccttcccaggccctgcgcgggacccgaggtccctggccagcgctcttccatgccttcccagacttcgctgcccccagtctggcgcttctcagagccccgcgccgccagggcgcacccacctcttccaccgcgctgcgcaatttgtgctgcgtgtcctccatcagttcctcaacctcgcggaacatctcattgagggtggcctcctcctgcgggtagctgagagccgggccgggcttgactggagccgaggtcgccgtcggagcgggcgcgggggccgtggggaccgccgccgccagcagcaggcacagcagggtggccccaagccgctgcatctccgctctgcgcccgcagccgccgcctgtgtgtcccggaacgcgatcagaggcgcgcggaccacccccctcgctgggcccgccgccccgccccgttccgccccgccgcccgcccctggcgcccctctttcccgcacccgcccggagacgggaggaaaccgaggcccctgaaaacgcagctcccctacacccgaaaagacgcgaccccacccgctccagcccgagccccgatcgccccaggaccccgcacccccatcctcgagcacaagctgagctctgctcctcacctgtgatgctggagccctcgccagagcaaccgaacccggatcctctacgctaatagctcccaagccccagctcacctagactctgtccccggttcaaaccctagcccctcctcgaccaggtcagagtgcccgacccccacttccacctcaagcctctctcagcccctacctggggtggaccaagcacaggtcagccccctccccttggcgtcgggtcctactcgagcgccccgccccacatccaccaagagaggctgagctcagcagagtcgtcccctcccccgccgccgcccctcacccaccccgactggaccgagttgcgctgcgggccggactggatctgctcgctcccgccgggaggccgccgggctgcgggtgcagatgcgggagcggcgcggtgggcgggccgcgggtgcgggagcgcggcggggtgcggcagcgccggtacccgagggagcccgcaagacgcgccccgcccgcccaccaggctccctctccgcccccgccccgagccccgcccgcccaccaggcccaccccgccccgcggaggggccgcagcccggccattggccagccggggcgccggccacctcacgccccacgccccacgccctcctcttctgcctcagcgaccagctctaccgaaggcagccatctccttcactgcctgcccctgcgcccgcggcatcccaggcccgtcttctctggcctccaggcttgcaacagcccaccgaggttgggggtagggggaatgttcctcagtcccaccttggtctttccaagccaacctctgtcctgtgaaatcctcaggaaaaatcccagcccccagcctggcattcaagccatcaccgctggccttagtctgccgtgattgacaccgtgctccagccaggataacgcacttgcagctcctggaatgggagaacgtcatgagaaagtcagcaagctcctcaagggtggcatagaggagtggtcaggaccagacacctgcagccagctctgctccttcctaacttcccgccctggcgaagttaccagatttgtatgcgtcccagttagccctaatataaaactttgacaagtctcaaaaacgtaataaggagtgggtagtggagaatcagagaagttagacgatcaggccaaacagcaggtgaaggcagggatggccagaggtcctgagtgtagctgactgctctccagcttgaaaccccaagactgcctttctctgcagcactccccacattactgtttaccgccaaaacagccgctttcccttctacttctgggc

SEQ ID NO: 126 - DNA, 2284 bp, Homo Sapiens
tgtggcattgctccctgtaccgtagggctccccgggaccgacagactttggataacagcagttgggaaacactctaaacatataatacatctccaactcccaaacactggagttgtggggtttttttttttttctcttcctttttttgggggttggaggcggaattctttggaaaattctggtattttgtttctccactaacctcaccctctgtggctgtttctattaagatatattttccccctgacaatctctccatattgcacctagtacaacagatgtacctgtggatccactgggcttttattgggttttgggaatactgatgttatttcacttaaaaactaatccaagcttaatgttttgatgaaaatgaaaatatatccacagggaagcaaatatccacagccacccagtcctctaaatgccacacacatctcattttatctaaagtgttttttcttcccttccaattacaaaataattcagtttactcctaggaagatcttcctattcactgtttttagtcatgctagcacatcttcggttttaaggatagagaacagttaggagttacagtattctgtttcccattctccgcatgtttctccccaaccctcacttttcctccctttcgtgttgtctcctctcctctccatgcaaagcagaacaagaagactgccttccacaaagacaataggcttttcccaactgtaaatgactacatcacaagccgcacctgtcagttaatcagtgcatttaagtctttgccagcggatgttgaaatgatgtctgcaataactgactgggtttctgcgagcccagggatgcagacccctccttcccccgccccccgtgcgagtttcagtcgctaatgaaaaccgtatgaaacagattccccttctgttatgtaaccggcttctccctcgcctttcggctgacttgggcacaatgtttctcatgagagtggagatgcctgcggcgacggcggagctggggaaggggacgcggggacccgagagcacggaacgcctcgcccaggtggacgccagctcctcgcctgcgagcagctcagcgcaccgcttacctggctgcggacggggtggcttcactcaatcatgatctcctctcttgaaacggagcaagactgaacaattcactacacgacggatggcgagggaaggaaatgcaaaaaagaaaaggaaaagaaaaaaactggaatcagatggtcaaatttcacatcagcaccgagaggctgttaggagactccattctgctcgcggctgctccggctccaggtccggcttcccggcgtccgcgggtctccacccctccgcccgcccagcctctccagccaggtgcggccgtctccggactggctccctctggccgagcgcggagagcagggctgggcgctggggccaagggaggggcggaggggcgcgcgtttgggcagggacgggggagggagactgggtggaatgaagtggggaaagataagagtggcagaagaaaaaaaaaatccccggttaggagaaaagtggtggaccacgcagagagacgtcatgaaatccgcagattcaatgaatgctactcaattccagccgactggctgagccccgctggcagcgcacgaagcgacgcggctccgagataaaagcgagtgcagcgccgcgtgctggggaaaaagccgcacagcgccggcgcggtccgggaggaaggggcgggggcgagcaggacagagccacagacccagagacgcccaccccgccgcccatgccagctagcgtgtcagcgcgtcgaggaccgggcttggtgggggcgggctgggcacaaaccaacgtgcatcccccgccactggaaacgtgggtgctccatgctgggggaatcttttgggtttcggtccccgaccccccagtcccaacctttctcccagtgccactaagtaagttattcccggagaaacgcctggaaagcaggaaagagccgaagctcggggagcagttttgtctgctggttgtaggggttcggcttttagggttttgtgagataaggaaaaagaggctctgggcactgcctcccaccgggctgaaatccgtgagaggcagccccggcgcgggagccggagcctgcaccgcccagagggggcgcagcgagcggccgggacggaggggaggggccctatccctgagctttgcttgcacctggtggcgccccagcctgctgccccattcagtcccttctgtcctgtccactgcaactgggacctggtcccggctgctgc

SEQ ID NO: 127 - DNA, 2498 bp, Homo Sapiens
taagggctaagcaatgatgcataaacggggtccactgcccaaacttacagaaagcaaaacgtggaaaattagtaactttaactgatagtgtacacctaaagaacctacaccggccgggcgcggtggctcacgcctgtaatcccagcactttgggaggccgaggcgggaggatcatttgaggtcaagagatcgagaccagcctgaccaacatggtgaaaccccgtccctactgaaaacacaaaaaaattagccaggcgtggtggcacatgcctgtagtttcagctactcgggagggtgaggcaggagaactgcttgaacccaggagacagaggttgcagtgagccgagatcgcgccactgcactcgtctgggagacagagcgagactccgtctcaaaacaaaaaacaaacaaaaagaacccacccaacagaattaagtaccaacataataaatacgaagaattttagattcttggtttttaaaaaacatacaaagatgatattccttcaaaatatctttacaaaacatattgagactgtgatgctttatattgattgtatgaaaacaatgaaaaagaaccagcactgtttcactataaaagctttactaatgtaaatttataaatcctttcttaaatattttgagttaattctaattttatgatagaaattcattattttcagcaaaaacagctggcatttgggaaaccaaaggctcaaaaactaagaatagtaaccaaagaaacttgacaaaacagtccttttaaaactctcatctacactataaggggaaactttgatcacgtcccttctccttcatcaatcgtagaactcaacattaaggactacacaatcccacatccctctccgagaaaaagcaaaggctttgtgttgtagcaacaacgcaagacatggagggaagctccactcaagacttccctgcctgctccttccccaaagccactccagaataccagggagggttgagaggtaaggcatgaagggcgcaatatccaatatgagcaacgcgtgtgatgcatctggtcaaaatgcatacagaggacttgtctctgtccctagatagaagtcctccgtcctgcagtcatgagggtcaattgctgaggcttcacagttcccttctctcttacactcggaccgtcacgctcctcacctactaccccgatgcagaggtagactcaggatccctgcacttgtcaaggattcctcggcaagctcacggggcgggagtggccacaagacggagctcgcctggtcctggccttcccggcctatacaagcctgcccccttcccaattcccaatctccacagccttccatcctcccactttcgattcaccttgcgccaccgacgcccctggccttcgtttgcagcaagtttacccccaccattacctctcgcataaaagcctgcatttaccaggtcaaagaggggaaccaacgcctgcaggaatcgcttcaccgaatcgcctggccgcgtcctctgctagacttcacctgccgctgcggaccgtacacaaccactcccggcatgccccgcgcacgcactacctctcccaccccgcccctctcccgcccaaacacgtgacctcctttcgtctccgtccacgcccacttccgttcctccactttcccttaggaaggaggagggagctgggggtgttaaaagcgtagcgacttcctcctcctccccgcccccgctcctgtacctcccgctacaatgtcttccgggtcgctagcgcctcgacgccttctgggaaaatagctcatttcctcccctccccctcctcctgccttcaaccaaccagccacccgtcagagagggacatgcgcagtgagtgcctcccgtctcttctacccgaaccccccctcccccccaagcagagagaccccagcagcagcagcagctgatgatgaagagagaggcagtggcagagggggggcaccttttatttctatttttaaagggacaggacactaattctaccccacttcaaccttgaattcaggggggtggggggaaggcggctgagttccttcccccaccctccagccctgagccctgagagggggattgagcctgagagaggagaaggagtttcttcttcttcgaaaacccccatccacgactcctaccccctcacccctccaactcgcctccctccctccaccctcctcctctttggccgtgagaggaggagagaaagaaaccaaaagcctcttagcaacacagaccctttgctgctgctgttgctgctgctgctgctgttgctgctgctgctgctactgctgctgctgctactgctgctgcttggccctggctggagacatctcactacacccaggagcagccacttccccagctctcctcctcctccttcgcctcctcctcctccactccccccctttattaccctttgtgtcatcctccacagctccagggaaggcactcaaaagtggggggcaggaaaggtaagtgtgt

SEQ ID NO: 128 - DNA, 2357 bp, Homo Sapiens
ctccacgcccctgctgcggccgacgctccagtccctgcctctgtcctcacagggcctgctctgtgcatctgtctctattctgctctgctcttcatggaggaacaccagtgactgacttgggactcagcctcaatccagggtgacctcgtccccagatccttaattacatctgcaaagccctactaccagggaaggttgcattctgaggttctgggcggacatgaattttgggggcaggacactgtccagctcagtgccgggcgccgctgtgggccaggccctttgactcttgcaagcccacgatggctacagagctccaaggaggaggcttcctggaggaggcggcccagctcatcagagaaccagcatgtcttccccttgggttctgggaccagcacttttaacgataagtccttttggaccacgctgatccgggctgagacctgtcgcctgccgcgcgccttgggcggaggttagacaggccgcgcacctccaagctttgacacgtccttcctccaaagggtggaggccccacagggtgagtgcaggttggggatgggccgtggggttgccgggaggggaccagtgggggcttgcagtgttctcgggagggcccggggctgggggcaaccgagacctgcttcggtgggtgagtggagaagcatctggggggtttccttcagcgctggagagaaatgggtgatgaagcctgggaaaggcgtggggggcccgaagcgtgcaccacggtgagaaggctgcgcgtggtcggattccagctcccccgcgtctgcgaaaggctgagctgcgccggccgggggagggtcggaggctgccgggggttgggggatgaagagccgggggcagtttagggcagcgcatcctccgcggaggcaggaacggcaggcggtgcgattcccaccaggacctctgccatcggaaccgcgggtttctgccgggccggaggcgcctgagagatctccgcggaacggcgcgtgaacctgcggccgcggcggcgggtccggatggagatggacgctggatgggctgtttcctgagtttggttcccgtggcggggtcggcccctcgcccctgcatttggcagacctgatgcggagcccgagggtggctgttggcctggggcggggaaggggctctctagatcgggggtcccacctgctgggcttggggagcccatttggccttctctgattggtctggagttgcaggtgaggccacctcaggaagctgctgtatctgagggagcccgggccgccctgggggacgctggggtttgacttctggggctgggggctgcacgggtgggtcggggtctgtctgggttggggtccgcggccgcgtggggtctggattggcgtctgcctggcttgggggtcctcagccgcatgcagtttgggtcgaggtcgggggtccgcggccgcgtggggtctgggtcggggtctgcctggcttgggggtcctcagccgcatgcagttcgggtcgaggtctgcagctgcgtggggtccggctctcatggcccctgtgcctggacttcgctctccaaccatttcctctgcacgtttccctggaaaaggacatggggttcagggtggtggatgtggacaccccctgaaacccaccagccctggtctgtgatgcctggatggaggggccacagccacgccggctcccagcctcttcccagacaccctagcccctggaggcagggtccccccgtgaggcgtatcatccctgagcgccccacacgcctgctcctgggcatcctcctgggtggtggtgtggtgcggctctgcgtccccacccaaacctcacatggaaatggagtctgcagtgtgacggtggggcctggtggggagtgactgggtagcaggggcggatttctcgtgaatggcttggccccgtccctcctggtgctgtcctcgagattgtgagtggccatttaactgtgtcccgcacctgctctgtctttctcgttcccgctcacgccatgtgagacacctgctcccgcttcgccttccaccacggttggaagcttcctggggcctctccagaagcagaaacacctgtgctttccatatagcctacaaagcgtgagccaatcaaactcttttctctataaattacccagtctcagggttttttttgtttgtttgtttgtttgttttggtggaggcgggggtggacagcgtctctctctgtcgcccaggagggagtgcagtggggcgatctcagctcaatgcaccctctgctcctgggttgaagtgattctcctgcctcagcctcctgagtagctgggattacagttatgtgccaccatgcctggctaatttttatacttt

SEQ ID NO: 129 - DNA, 2460 bp, Homo Sapiens
tcggaaaggccttgcaccagaggccaaagcatctggccccagcaaatgaccaagtgtttgaaacagccagtcttgtgctccagagaaacacctcacataccctaaggttagtggggatttaacccgagcataaaccagtaggattaaatcatgacatacacacagagaacacctttttttttaaactagattctttgatcccatagaactacccaactcttcttgtccctaccatgacttgtgggtatctgaccctactgttcatggaattttagattttcctgcttgaaagggaagggacggccaggcgcagtggctcatgactataatcccagcactttgggaggccgaggcaggtagttcacctaaggtcaggagttccagaccagcctggccaacatagtgaaaccccatctctactaataatacaaaaaattagtcaggcatggtggcaggcacccgaaatcccagctacttgggaggctgaggcaggggaatcgcttgaacccgggaggcggaggttgcagtgagccgagattgcgccactgcactccagcctgggcaacaaaagcgaaactccgtctcaaaaaaaaaaagaagaaagaaaagaaaagaaaagaaaaaaagaaagggaagggactttctctgtctaaatgtcactcctgggtcaggctgctgtgtcctcttttcccaacgctggtgattagaaacttcttgcttctctgccatggtggtgggcatggtgatgtggggtacagctgggagcctcaggtccacacgggagatttaagattgcaccctctcaggaacaaagccagagcccccgtccaaacccctacacctagctcaggccctgacccgtagaaggttctccataaatgtctgctgaactgccctgcgttgctgggtcacgcgaggaaaatggaattaagagtccgctgacccggagggctggttccggcgcactattgactggctccagggccttgagccggggatttaacctctcggcttctcgatttcctcgctggcaaaatgaatctgataccgccctgaccgcccttgcttagcaggggtgagtctcactagaggctgaaggcgtgagaaaggcacagagcgctgtccaggcagggagccactcgggctgccacctcccgcgcccgctggagaccgtaagccaggagagctggctcagccgtcagcaattacctgcgccccgaacacaacacctgcgctccacttccgcacaggcagatggtgcaatctggccgcgccgcaccctcccgcaccccacccgcggcggccttgccgtgacagcgctcgcgccaggtgtcggtgtgcaggctggtccgggacgctgcgactgcagccggcaggaacccgcgcgaggggaaaggggcgctgggaccaggccatgggatgcccaaggcacccctctcaagtccaagggaataaggccagcttctcctggattcttaaaacccctctgaaaggagagcagggagcaggtatcagctccctgcgttccacgtggagagactggggctcagagagacgaggtggcctgaggatggacacacacatattaagtgatgggggcggagggaagcccaagtctctaactccgggtccaccattcctccccgggctggcactgctctgactgcacagaccagctgactcgtcttgggcaagggtggaattcttccttttgcccagggctggctttgcctccttccaccccgtggccttgccactcctgtgccacccagcctcctcccaaacaccacgcccatctcacataccctaaggttagtggggatctgagccaagcataaacctgtaggattaaatcatgacatacacacaaagaacacttttttttccttttttttttttttttttgagacggagtctcgctctgtcgcccaggctggagtgcagtggcgcgatctcggctcactgcaggctacgcctcccggattcacgccattctcctgcctcagcctcccgagtagctgggactgcaggcgcctgccaccacgcccggctaattttttgtatttttagtagagacggcgtttcactgtgttagccaggatggtccccatctcctgacctagtgatctgcccccctcggcctcccaaagtgctgggattacaggcatgagccatcgcgcccggcaaaagaacacctttttttaaaagtagattcttcagttccattgaactacccaactcttcttgttccccaagaatcgtggggagctgaccctactgctcatggaattttaggttctcctgcttgaaagggaagggacttctgctgtctaaatgtcacccgagtcaagctgctatgtcctctttgcagcctgtaatcacctatgctggcaattagaaactccttgcttctctttcactgaaatccatcagtctcctgaaggacccagtcgtccctat

SEQ ID NO: 130 - DNA, 2301 bp, Homo Sapiens
cacaacaaagaaatcagaatatctgggagtaaaacccagatttgggaaccatttagggaaagtctgcctcgatctgtagcagagttttgggattgactttctaaactgcagccactcctcatctttggccttgtgaaaaacttgagaccccggctttatcagtcccccttttgaaaaacagggcgtgtctcagccctaggtatgcaaagctaaacgtctcaaaccgctctgcattcgaattagccaacttaagaacaagtccaacagcactgctaagcaagagcctaataactcagcgtttcgcgacatctcttggcggcgttgaccgtttgcccgggacactggtttagaagcacggcatagggtgtctctacatcttagaaatcaagacagcctctaggttagaataaagtttactctggactgggcataactccactccacctctgcgattcttcttctcgtttcccgtcttctgtcttttctttcctcccttcccaactcctagcgcgctactttaacgtctcagtctcgttcgctaagcccatgcgcctgggacttgttctttgaatctcaagtccgaaaagccaggaatcctcgatcatggacttcctcctgctaaattagagggagtgaaatttcgctctcctctccatcctacttccccatcccaaactcgctagattaagttcgctgaccaggcgcgcacccaatggcagcaccctctccaacattttccccaccagagaggcaagtgtcctacatttgtacgtaaaggtccctgagtggctaggtggagaggctcggatgtcttttcctggagcgggcctcggggagctgcagcagccccagcctcaggcaccacagccaagcgagcgcgccttgggctcgctgctctgcacgcagctggaggtctgggccgctgaccctctggccacgtagtcaacccgaggatgtgtgccccggggctcggccttgcctcgggtgagaaggctagtcaccattcagggtgcaggtgtcatggcctggaaatggcaatatctgagcaaacaggtgggcgtcgcttcccggcggtgcggtggccgctggctcgcagcgcgctccagctttcggcgccgccgccgcccctttgctctgcggactcagccagttcccgggtggcccagctgggtggctccgaggcctgcccccttgggctgcggcgggaggcggggactgcagtgccgagtgtagggcgccccagccgggctggcggttcacgctgcgctcgggcctctgccgggagggcgccctggcgccaaacccgggcgggcaggggggtggagagccgattgagtttattcccattcagaatttagaggctggtggagacagagagtctcctaaatggatgcaagtctcctgaaagtctgggccggaagcctcgaaactttctgccacgcaaagccccagctagtctccagggctcggtcctggttccctttgtgcaggcccggaagtgtccgcccggttttcccactgcctggaggggcccagggtcgcggatagactcggacaaggctccgtttactttcagtttgtcttagttgactaatggcgggactggttgtaatgcgtgctctgagattttctccaggatttgtcactttaattttgcaatatgaggtaaggccatgttttttaaagtggagacactctctttgcctttcctgccttcctaaaggaagcacatcctcttgatgtgcccgacgggacctgcagactccagactccactgctttttctcaaaaccacacacttgaaaagaatacacttcgattgctgttaaaacttgtcagatttccatgttttaatcgctggcaatgtcttaataatggaaccttaccacttttgcacgtgttgctgaaaagagagctctccagtaaaagtgccgtgcccatgagtctcttgaggctgtgcaaggttacttatcaaggatctcaaaatgacaggcaggctacctctggatttccaatcacatgttcaaaactcaaagattctcagtctggagaggtttggttttgttttggtttggttttaaaagctcattcctcccccccccccacccccaataacacagtacttaattgttttattaaattgttccaggctctggaaccctggggaggcactcttcaaatggtattgttttttctgtatttatgtcaacacaggaagttgcattagaaacttaagttgacaatttaataaggcctgatcaagtatatgaggtttttttaaaaaaattgacgtagcacatat

SEQ ID NO: 131 - DNA, 2362 bp, Homo Sapiens
tcagctcctggagaaagaattttacaaaggatgggaaacttcaaataagtgcaattcattttgggctgacccagtgccctggataatgtgttttgttcggttcgtgcttcagacatttcttgcaggatatcgtagtttggagatttcttcctcccgtaactgattttacatacctaggatcaccactctacggcagttgtgaacatattaagaggaagaaaacaagtggcctattgaattgcagtttcctcatctacatgtgcgtgaccttttttccttgtaagaaggaaaaaaacaaaacggttcttttggagagggccagggttctctaagtatgtcagggatcaaaagtgggaaactgggaaaatgcaacttcaacgtgttttgtcttttaacggaacttatgcttgtaaaacacatcagaagtacagtgtttggttctgcaagtcatttctgttgttgttttttccttgttacgtggaggccggggggactgggggctggaggaggtgttccctccaacatgactgggcgtgtaacacgtttgcatcaacttttcacagtcagacatgtgctttcgaacaaaggagcagtggagacaggcagagatgggggcttgacacagtttacagattttgtgcttcaacagtactttacaaatgacttgctcaattttaacgtccatcaccacaagagacattggagtaaaatgagaaaattggagctacttgaaccaatcttttttggggagtgggggggaggggaaccattaatttgaatacctgcatcataaatcaaatccagtaagcttgtctcctacaaatggacttgaagtatccactttcttcaaagatgaaggctggagacaaagcaatggattgaaatggaaagaaggatgccaagggtctgaaaacatacgggccttttacatcgatttttgtcatgttacagtaacacacttttttttctgagaaaactgtgtacgtcaaattttaaaaattaaacattgaaaggatgtgcaagtctaaaagggctcaacagggttagaatcctgattcgaacatatcaattcactctcaagcatcactttggtctaaaggcgaggaggaaggcaggcagtaaagggagaaaaagagggagatcattgaattactcaataaaagaggctacttaccatcccaacccattgtaagacatacacttctgacataagagaactccttagaggtcgaataaagcgtgtaagcacctttgagtaatgcacctgcccccggagagggggcccggaagcccaacgagggcttagcgaacagacctttgctaatctgtttatttccttgaactggagtcgggctgcgatgggctgcgattcccaggacgatacatttaattagaacaaaacagaaaaaaaaaatgttgtaaaagctcaccaaactgctgcacttgtgtctctgaatgtgggtggcatttcttttaaaaggcaaagtatggtctgtgaaggagaaaggggaaaggggaggtgggagtggggagaaggggtcgtacgtacagcctggcaagggaagccctggctgagaccccccggctaaggaagggtcctcagcggctccccagccagggctgcgacggagtagccatctgtccagagcgttctcttcccctctccacccccattccctccaagactcgctttcctgccggctgaaacccaccgtccgtgtccaaacctactctccagccgcctcttctctcgccccaccaggaaacagtgggcgaaccctgcaccccaactccttctgctcgagcaggggaaggaaacggggccccaacctcgccctgaaacgcgccgggctgaccccattatcacccgccagccagagaagggcgtggggggcccgcgtttcggacttaataaagagaagggggcgcttcctttaacgccctgccaaagcacaaggaaatctccttttctctcccggaagagacggtgccccattttaccccgacagaggggggaaccccaggagaaagcgcgggaccaacttcctctccctacaaggcagggaaaccaaaccttacccccgcaaaacaaggctgagaatcctccctcacgtcacctacctacgaaaagcgagaggacccctgccctttagcaaaaacacggggaagagtcttctctaaaaaaataggctggggttttcatcaaaagggctggagatgcatctcccccctccccaattcggccttctaggggatagctaaaaaacaccccccgccaaaaaatacaagtgctatagagcacccacccaaatgacccccaattacaaggatggagaagggacctgaatgaacccccaccttc

SEQ ID NO: 132 - DNA, 2568 bp, Homo Sapiens
gtcccccaggggctgatcgctgtgcactcagcagggaagctgaggcgggcggtgccacgctccaggtctagggtccacatacctgctgggccagctccttggtgggcagcacaaccagggcacggatgtggcagaccactctcgaaagcagggcctgagggggaaggagcgcctgcgtcagcaaggctgttacctgtcctctgcacacccgctgtagagaaaggggaccctcacacagacctgcaccacagggatgacgaaggccagtgtcttcccactgcctgttggggcagaaacacagaggtcgctaggccggtagccacctctgcccaccagaaacccacaggctgcgctctccaggagggcaggaatcacagctgcctggactggatgaggaaaggcgagagagaagtcgtgtttacgcctaggcctaggcctgccgcttccctgcctgtgacctctgggctgggctgctctgctggaggcctgggaaccgctccccagagggatggcaccaaggcccagaggaacgccagcctcaggagacccaagtgggaaccatgagcttgagagtgctgagaccacacttggcaccgatgtggcagggacgcctgacccacggccactcacagccttgtgtgtgggtgcccagggaggtgttccctcagctgcctgcccggggctggggcacctggaaagtaggacgagatgccgtgtgcccgcagctgcttctgcaggtcaggatggacgtcagggatgtcctcgataggaaccaggtcttcggtgacattccttctgacacagttaggctcagccagccaccttggcaggaaaggctggacctgccatcaaaaagaaagagaggccaggtgagcgctttccaggctctcgcgcagaagcccacggtggaaaaagctaggggagggaggctggggaaacctctgtcgtcttcagctccttctcagccccaggatgcgctttccatacagccttcagaagttaaacagtaaaagcagatgccactccctgagcaaactcactctgtagcctcccatcaacccacagtggcacccaccctcccgcagccaggaggtcctgtgacctggcgctcgcctgccccagccacgccggcgtccctgcctcgaggcctctgcctggcacccccaacccccaaccttgacctggcttcaagtctttgcatcccaactcaaagagaacctcctccacctgccctacctaaggtgcccgagcactctgtcaaacttctcgctttcttcacctgtctcgccggaaatctctttaccgaaaaccacacgtgctaagcaaaaacaccaacggtcaggagcttgcagaacggcctctgacttactcctgaggcggtgagcgcacagcaggaaaccccgcacgttcacgcaaacacatcttgcagaactggcgcggcgcggcgggaggacaggggcaagcctagcagaggaaacgggagctctgcacgtgcaggatccagacccctaggcgatgaaactgcagacctggcagcgaggcgcggctgtgacccgggaacattcgctgaacgaaatcttccggggcgaccgccgcacttaagaatccgcgcagcctaccctctcacgccgaccaccctcccgcccgccgaggctcaccttcggcgccttcctcttcccgaacccccccagcaccaggccggggaccaggggtccggccgcctcctccagggccggtccatctggggccgcctcggcgctggcgctggtgctgcgctcccccggcgcctcctcgctgctccctgcgctgggctcccctggcgcctcctcgctgctccctgcgctgggctcccctggcgcctcctcgttgctttctgcgaggcagacacccacccggcagcgcgtcagcaccgagtcgccggcgccccagagggagcccgctcgccccgcggcccacctgcgcccgcgtcctcgccgtccgccttccgtcgctttccctgcggcgcctccgggctccccggctccgcgtcgttcacccgccgccgccgccggggccgccgtcgcctcctggtcgccggctcggtcgatgcagccgcctcggtctgcgcgggctcccgctgctgctgccgttcgcgggcccggctctgcagccgctcgagcagcgcgcgggccctgccgtgcgccccggcctccgcgccctccggccccgccgcagctgccgcatcggggcccgggtaccgcgcgacgtagaacagcgccatggccagccgcacgcctgggactcgggcgtggcgcgctgcgatgacgtcggcggcacgcctgcgactcgggctccgcgcaaaagatggggttggggtacggcgcgtagagatgacgtcgggttctacgcgcagtggtgacgtcacgggagcgccggcggctgagaatccgcgttgttccgtgttgggggcggcatggagcgggagccgggcgccgcgggagttcgccgggctctgggccgccggctggaggcggtgctggcgagccgcagtgaggccaacgccgtgttcgacatcctggccgtgctgca

SEQ ID NO: 133 - DNA, 934 bp, Homo Sapiens
tgctgttgttattgcaaagatgttgccaaggataaaagcccatgcagatgcttcgggtttgggcaatcttattcctgcgcactgcttccccagacccctaagcttccccctccatttctcacaattccattcagggctcagagcaggtgactgcagcgatttggttccaataaaatcgaaagtaaacgtctcctgtgaaaagtcccgggctgtaaattagaaatgtttatgctgatttcccattgtatggaaaaagctcctgggcgaaacagctttgagcccgagaacgatttaaaaagctggagctgtgtacacagctctgagcgtttgaagttgtttaaccattgtgtgaccagaaagaagagtgacgcggcaggaagaagaagccgggtcttggggagagcggaggcgggtcagggtgggcaaaggcagccgatgccaggaatacaaccgcccttcgcgccgttccaaactaagagatggcagcggtttcccagcgcactgctggaagtgtgctccagtagacagggtgtgggcaagatgcgcgggcagacagtccgcactcgccacatgtgctggggtgcgagatctagatctgcgccatctcggctttcattccccattccctgtctctgttcgtaacgctcagagactgtttttcctcttttacatccacggccctgtcatttgaaggaaagggctggttggccagcatctaccgaacaaagactgggcgtcgtaggcagcaccaaaattaagactatttgagaaacttagagaaaaccgagggacagcgatgggtctagggctggataaggaataatgagcccttctcctccctccccacagacgcctccttcacgcgggaacccggtcctccttcttccgacgcagagagagaagcgattccacaggtggaaaatctgagaccggc

SEQ ID NO: 134 - DNA, 2359 bp, Homo Sapiens
caagctcatatatgaaatgaggtcaacaactgccttgccaacttgttgagaatattaaatgagataatgcatacaaagtgtttttgcacaaaacctggcatataaacatgcaaattaatcttttaataagataatgtacaattttggtacaatggtagtttaattaatagttgctactttcccttagggccaagactgtaatctttttctattgctcaaagaacaagatgagtgggtgaaaacatgcacacaaaccaataaaacggctgtttcatcaggtttgcagaaacactgaaagatatacgtcttcagatatattctctccaatcaaatcctaactagaagcccaggactactgaggtacaaaagaaggacgggattcaaatgagcgaagtaacttcccgggttatagctgtaaagctaatataggaacagagtggagttagcatagcaaaggttttaagaaaatggagtctggagccaaattgcctgtatttgaatcctgcctacaccccttactcgctctacgaccttgggcaagttactaacttcattttcttcttgtatgttaattttaaaaaggggcgggacagagaggtggggtgtagtctacataataatagtgtctatctcatagagttatgagaagcagataatatttgtaaagtgcttagaacagtgctgggctggcacatagtagatgctatttattcttttaaaaaattcgatagcagcaagagcctttatactatgtgagttagactaagaaaggctgtggcatagtttaaaactatccctgctcattctttaaaataagtccacagtagagaataagacatcggaaaatacaaacatttcttcatatccgaatctatttgaatcctaagatgcagatacggagagttcagagtgccatcagtacagggcagagaggttgaagagctcaggaacagacatagggtgggggaaaggggtaggggcaacgacgctgacttttggttaacaaagcccttccaggctgcggagcaacctcctctgcccttcacctgcccggcccatctctggccaagaagaccctgccgccaaatccccacacccagtccaggtcgcagtgcacagactggcccttccgaagcccctcagcggtagcccgactccgaagctcaccgaggcatccgtgagaggagatgccacctagcgcagatcacatctgctctgaatccttgacaaccgcagcccaaagaatgataaactacaaaggccggaaatgcgtcaccgcggcccgctctccgcgaaacagcggttccggctgtgttccttctaggaaggccggaggtttccacacctctgtggtcgtcactctgaatcccgtctgtagtcttaagtgagatactaggtgacacattgtcttccacgcggcaatataataacggccaacatagtgttttaacacgtattaattcattaccccgcataacaaccctgtgagttaggtacaattatctccatttaacaggtgaggaaactgaagcacatttctacatttattagttgccatttcctgcaaagaataccctttcttttccctgccgtctcattttatcacgatgaactcatggattcctttacaaataattactgttattattatgttgatgctcaaattatttaaaatttggtcagttggagccctttcacactgctccctctcttttctttttttgacaaagtctccaggctggagtgcagtggatgcgatctcagctcactgcaacctccgcattccgggttcaagtgatcctcctgtctcggcctcctgagtatctgggattacaagaacacaccactatgccttagtgaggctggtcttgaactcctgtccctcaagtgatccgctccctcggcctccgaaagggctgggattacagaagtgagccaccgcacccggccacaaacaggtttctatgtcctttgataagttcccaacagtttttgtgcacttcactttctcacaaaagatatttcagtcccattttatactattcctaccctaaacctagaatcaccattgcttcatgaagctacagtacatcagtgaaaaatggtatatagaaaccaagatctggatttcgggcaatgaataacctcattgctactgtgtctggcattggttcctgccagtctactgtgtccagaattggctccttccagtgggttcctgctctgacttcaagaatgaagccgcggatactcacggtgagcattacagttcttaaagatggtgtgtctggactttgttccttctgctgttcagatgcgtccagagtttcttccttccggtgggttcgtggtctcactt

SEQ ID NO: 135 - DNA, 2823 bp, Homo Sapiens
tgagcacgtcacagagcccaacgggccaaaagggggtgatagctccacattaacccctccccgtcctactagcattcccccgcccatctaggtcgcctcgagcctccctggctgtctctgcacccgcgccctacctggtcctcagacccatgcgatgctgggcaacccgggccgggtgtgcccaggaccgcaaagcgggaagcgcaggccttgcggactgcgagtggcccccgcggcctgctgctcccctttataacgcgcgccccgccccccgcgctccgggcgccccgccctggcccattcacctgctgtcgagaaccagacaccgcgcagcagaaagctagccgctgggccgcgaggtccggccgtcggagcgggcggggctggggcgccgccgagacagatccgatttccaccttttcttaaatgcgctgctgaaagtcgagaaggccccggccggggagctcgcgtcgcttcctcccccctcagctcccctcgcaccctgagtcccccagccccactccgggaggggccgcgaaactgcacccgcaagggcctcatacatattttaaggagcaggccaggcaggtaaccggagctggactcggacggtgagggggcggcccccggggacctgataccctggatcccttacggctcagggctcaggcgggggaagaggtggctcaggacgacctggggtcctcactttgctggcctgtccagcgcatcctaagcccgcgtgtatcctaccccctccttctgcagatccaatgtccgtctggcaattgccccattccctctcgctggagagatcccttccgcctcgccacaggcgtcccacgctgcccggagtcgtgcgccccgggacgggtagttttgggttcctcgacgcttggccaggtttaggaaagacccgctgtcttccttgctgcccccacctaggagactcggcgccttgcgctccgtcctttttaatggtgtcgcggcttgtccctctggcttgctccctcctagtccctaccccacacggctcccttcgccagctccatgacaatcccactcgtgctgaagaccttgggcaaagaagtaaccatcggtcttcccctcccttcccattcctccggcggcaggactagggggaaaggtgcccgggatacaagcccctcacgcagacccactgatgcggccgtggttctgccattggcccctctccgaatggtgaggttctcctgctaaccctggccccatggcataactagtataaccccagtgagaggaacccagagttccagtcctcccctgctccagtccctctgtgatctcgatctcgagggattcacttcacctctctaagcctcagtttcccatttgcaaaatgggcagaatgactcgcacctctggggatgaagaaaatgcacatgtgagcacgtgggtacttggcgacccggagatctctgcaaactgcaggcccagcgagatggcctcagcacgccctgcaccctcgtccgcgcgactgccgccgggtgcccgccccagccgctgtgtccctggtgcttcctccgccagggccacgtgccggggaagccaaagcgggagtctttcgatcttggcccagcccttagccctcggtcctttgctctagcatctagattctcgtgggtcaacaaagtcactggaaacccaacgaacttcccgacatttttcgaaaaccgtatgcgtgtgcttctgtgcgtttttcctctgatcgaggtagggccctgtagggttctgtttggacgggaggctggagtggttccttcccggctgcggggtcggaggatgcagagattcgaaagaaggagaaacacagagactgtcaaatgaaaggagattctgtcttcggaatcgacccagctctttaaaagaatgaggaaaacatggggtctttatatatcctggaaagtcgcctaggcgttcagtgaaaaacgcaaaaggcacgtggattcctatttgtgtaaaaatataaatggggcagggggttaaacatcaggttttttctgcacgaaaggtctcagcgcagagggttggagatttttcttttcattgtatgtctttcgggactgttcgaagccaatgtgtgttgcttaccatattcttgcattgaattttcaattaaaaaaagaaactgcaggaattgttttttgtttgtttgtttgttttgagacggagtctcgctctgtagcccagactggagtgcagtggcgctatttaggctcactgcaacctccgcctcctgggctcaagcgattctcctgcctcagtctcccgagtagctgggattacaggcgcgtgccaccacgcccggctaattttttttccttttttctttttttttttttttttagtagaggcggggtttcaccgtgttagtcaggatggtctcgatctcctgacctcgtgatccgcccacctcggtctcccaaagtgttgggatcacaggcgtgagccaccgcgcccggccaataaattgattttttaaaaagcaacctgggccgggcgcagtggctcacgcctgcaatcccagctctttgggaggccgaggcgggtggatcacctgagatcagaagttcgagaccaaccagcgtgactaacatggagaaagcccatctctactaaaaatacaaaattagccgggtgtggcggcactcgcctgtaatgccagctactccggaggctgaggcaggagaatcgcttgaacccggaaagaggaggttgcggtgagccgagatcgcgccattgcactccagcctgggcaacaagaacgaaactccgtctcaataa

SEQ ID NO: 136 - DNA, 3120 bp, Homo Sapiens
aactttaagtttaggccgggcacagtggctcacgcatgtaatcccagtacttggagggaccgaggtgggcggatcacaaggtcaggagattgagaccatcctggccagcatggtgaaaccccgtctctactaaaaatacaaaacttagctgggcatgatggcacgtgcctgtagtcccagctacttgggaggctgaggcaggagaatcgcttgaacccgggaggtggaggttgcagtgagcggagattgcaccactgcactcgcctggtgacagagcaagactctatctcaaaaaacaaacaaagaaaacttgaagtatagtatccttttaaattttaaatagataatagaaactggtttccccccatttaaaccagaatttaagtttaactttatatattcttgacagtttggattttgtccttcaacctcataaaattgggaatttaagcatcacctggttcgatttaaatgcaatgtagaatttgcattaaaatactacattaaagcctcagatttgtagtagctaacagcacttctatgtatgtgtcagggactgctctaaatacttcatatatattaactcctctattctgtacttctgttcccgttttatacagcaggaaattgaaacactgagaggttaagtaactaaagttacagagctagagtgacaggagtaaagcttcaactcaggcaacccagacttccagagttctgatctccactactaagctgctagcatagcttttctggtaactatttttaattcaaatataattcgagtgatctatctaacaagtcatcactctgacaactcagtgacttgtaatgtaaaattattcattgtaattcatttaatattattgtttctctgtgctgcaaaaatcatagcaatcgagatgtaatttattactctccctcccacctccggcatcttgtgctaatccttctgccctgcggacctcccccgactctttactatgcgtgtcaactgccatcaacttccttgcttgctggggactggggccgcgagggcatacccccgaggggtacggggctagggctaggcaggctgtgcggttgggcggggccctgtgccccactgcggagtgcgggtcgggaagcggagagagaagcagctgtgtaatccgctggatgcggaccagggcgctccccattcccgtcgggagcccgccgattggctgggtgtgggcgcacgtgaccgacatgtggctgtattggtgcagcccgccagggtgtcactggagacagaatggaggtgctgccggactcggaaatggggtaggtgctggagccaccatggccaggcttgctgcggggggaggggggaaggtggttttccctcgcactgtcttaaaccgatggcctttccttggcacagggtccactgcagcatgccaaacgaggaggcaggggcgtcgtccccccgccccccactgcagcactggagatggatttcctgtacttcggatccagggtttttgacagaagaggaagaagggggaggggtagaagtgttaaggggagtctgctgagaaaagctgtttttgaagccagaaggggtttttgtttttataatgccatttgacagagtggaataacagtatctaaggaaacgggtagaggacaacaaagaatggagcatattcatggcgaggagcaaaagctctaccccattgaaaggcttcttttcctccctggcgacaaggacacatgcattggtggccaaaagagagaggagacaaaaccgctgcagatggctgatgtgaatctagtggaaagagctactggggatgagagaaagaggaggaggcaggtactgcagagcgtgagtggtggtgttggttggtgaaatactggtcaccagtagtgtgcctgcttttgtaaaacatctaagtaaactccctgtgaacagggtggcaaacagataccagtgtctttgttagttacaaaatgcagtggtagtggctttttgcggacgactgcagcagtgctttttctccctctgttaggccgaaaagacaactgcagaggaataagaaaccttgcagcaaatgctggggtagaagcccatttacaagaagccatagtttataaatgcagcctgaacagcagaaaaaaaattactgttttttaaagtaggaataatgtcaggctatgaatgttttgtcattggaatgtattggacactttgattctacatcacgaaagtgatgctcaaattctttgatttaacataaatcctatacgaaatcttaataaattatgtatgaaacagtggatcttttcttttgttagtgaagcttttatgccattaattaggtcattcaagagcaaaccactttacaacgtaaattactttgtcaaaaattatggtgaacaaatttttgtaggcctaatatttaagacctatagttaagtaattttatatttctctttggttgcttttagataacactgaataaatatttaagatattaattcagtgtgcaaatattttaaattaaagcaacatggcttttcttctagatgtatttctgtttagtgagtactcatgagatatactcttgatataaagtgtttttcattgagcttttttttcctttacctaaatgtaaaagcctatctttatgcatacttatagtagccagcctgccacacctccccactccctgaacaaggatggcagtggctttgtaaagccctccagggtcagtgacagtgtctcttaaataatgtttatgtaatagaaagtcttaagatgacctattatattgtttcagtaatattttcaagataatgcggaattgggctggcttagataaataagactacataagtttttcactgataaatttaaatagttctttaaaaaattatttctgctttaagaattacttgatcatggatatcagggttaatagtacttaggagccgggcgtggtggcccatgcctgtaatacaagctaaacaggaggctgagggaagctgaggcaggaggatcacttgagccttggcgttcaagaccagcctgggcaaccaagcaagaccctatctcaaaaaaaagtacttagagtctcttttttaaaatctgat

SEQ ID NO: 137 - DNA, 2256 bp, Homo Sapiens
aaactcttatcacaaataaactatatcaagtaagctaaagatagtaaaagagcaaaaatgttagcagatattcccaaaatggtaactacatattacctctggaatgatcacatgaatgtggctcattatttcctaagttcctacagcaaacatatatttatttgccctactcagttaaaaataaacacaatatgtagttgcttctgaataatttttctctctctctttctctctttctttctttcgacaaagtctcactctgtcacccaggctggagtgaagtggctccatctcgctgttcactacaacctcagcctcccgggttcaagcgattctcctgcctcaacctcccgagtagctgggattacaggcgcctgccaccacccccggctactttttgtatttttagtagaggcgaggtttcacctgttggccaggctggtctcgaactcccgacctcaggtgattccccccgccttgatctcccaaagtgaagggattacaaggcgtgaggcaccgcgcccggccgcttctgaataatttcgatcaaaatttatattcgatatttattccaacatacaccacagatttccactgataatccctcctagtaagaaagataagctccatccaggtatctgtgaattggaggctaagtagtcccagcacatcttacatttctttaagactccctttttatcccaaacgttcgtaaattttgtatctgataaagagcatacttccatctaatacaaatatgttccccccttcagatcttctcagcattcgagagatctgtacgcgcgtggctcctcattcctcttccttggcttcccaagcccccagggcgtcgccaggaggaggtctgtgattacaaaccccttctgaaaactccccaggaagcctcccctttttccggagaatcgaagcgctacctgattccaattcccctgcaaacttcgtcctccagagtcgcccgccatcccctgctcccgctgcagaccctctacccacctggatcggcctccgaccgtaactattcggtgcgttgggcagcgcccccgcctccagcagcgcccgcacctcctctacccgaccccgggccgcggccgtggccagccagtcagccgaaggctccatgctgctccccgccgccggctccatgctgctccccgccgcccgctgcctgctctccccctctccgcagccgccgagcgcacgcggtccgccccaccctctggtgaccagccagcccctcctctttcttcctccggtgctggcggaagagccccctccgaccctgtccctcaaatcctctggagggaccgcggtatctttccaggcaaggggacgccgtgagcgagtgctcggaggaggtgctattaactccgagcacttagcgaatgtggcacccctgaagtcgccccaggttgggtctcccccgggggcaccagccggaagcagccctcgccagagccagcgttggcaaggaaggaggactgggctcctccccacctgccccccacaccgccctccggcctccctgctcccagccgcgctcccccgcctgccagcaaaggcgtgtttgagtgcgttcactctgttaaaaagaaatccgcccccgccccgtttccttcctccgcgatacaaccttcctaactgccaaattgaatcggggtgtttggtgtcatagggaaagtatggcttcttcttttaatcataagaaaaagcaaaactattctttcctagttgtgagagccccaccgagaatcgaaatcacctgtacgactagaaagtgtccccctaccccctcaacccttgattttcaggagcgcggggttcactaagtcagaaaccctagttcaaaggattccttttggagagtcggactgctctctccttcccctccccttcccctcctgcgtgtaaaacggctgtctggggcaagggtttctcagacgtgtacattgcctggtataagagcagactctgaaaagatgaggtttatttaatacggacgggggagaattctgcctgtaggcagataggaaaatggggagggagtcattggaaggacggactccattctcaaagtcataattcctagaccagaaaaagtgctcagtgttctagaagcagagttgcacagtgatccaaagaccagcttcaaatactgtcctgtctccttcacacttctcacatttctctttcctactgaaaataccttgcatttttcgtaattataaagggggaagg

SEQ ID NO: 138 - DNA, 2501 bp, Homo Sapiens
cgtcactacactgtactgcctgtggatgacttacttgtccctgtagtttcatctgaagaattcctcctccttttcctttgaggcctgcctcaaatatcacttcccctgtgaagactgcctggtgttctccaggagagagtgtgactcccttctctaggaatggtagcaccccaaacacacacattttgcagcatatttcaccttgcatggtaatggcctgcttgtgagttttattccgtaccagagggtgagggctctgaagatagcgccaggtcttatttacctcgataccccacaacactcattacatgtctgatgaatgaatgcatagggggatggctgggtgcatttctctcaacttttcaatttcttgaaataaataacaaaatcttaccttccctcagaagtcctggcatggttcctttcatcttgccacagccactgataatcactttcattttctgtgtaactcaccaggcaagaagtccatgcagatttacttttagtagttcacatgacaaataaatactgcgtttgatttccaaacattaaaccatagtatattatagatagatatagagttatcattcaaagtatgatatttcaatctcaaaaggcttcccctgaagaatattacaaactcttcctctctttaagatctgctgggtaggaaagatgggagaaaatgaattaatgtttacacagaaaggaggataatgggggcaaaaataatagatgaacgtatgggtggatgagagaatggataaaatgataggtggatatgttgatcttggacagatgggaaatgagtggatatatcaataaacagatatgtgggtggatgggtggagaagaggatggtggatggttgtggttttatgaagagatgtgaaaaaggaagtgtggaatgatggatgagaagttgtatgggaagatgaatagaagaataggtggttgaataaattaaaaggtgtgtggttggatgaatgaatgagtgggatgatagatggacctaagtggttagtggatggacaggaggatggatggatgtgagagccccagaaggacataaggaaagatgggtggatagatggatgggcggatggaaggatatttaggaggatgaatgagcatgtgtgtggagagaggtgcccattcacactggcttgaacacatgggttagctgagccaaatgccagccctatgacaggccatcagtagctttccctgagctgttctgccaagaagctaaaattcattcaagccatgtggacttgttattgaggggaaaaagaatgagctctccctctttccacttggaagattcaccaactccccacccctcactccccactgtgggcacggaggcactgcgccacccagggcaagacctcgccctctctccagctcctctcccaggatatccaacatcctgtgaaacccagagatcttgctccagccggattcagagaaatttagcgggaaaggagaggccaaaggctgaacccaatggtgcaaggttttacggttcggtcatcctctgtcctgacgccgcggggccagcgggagaagaaagccagtgcgtctctgggcgcaggggccagtggggctcggaggcacaggcaccccgcgacactccaggttccccgacccacgtccctggcagccccgattatttacagcctcagcagagcacggggcgggggcagaggggcccgcccgggagggctgctacttcttaaaacctctgcgggctgcttagtcacagccccccttgcttgggtgtgtccttcgctcgctccctccctccgtcttaggtcactgttttcaacctcgaataaaaactgcagccaacttccgaggcagcctcattgcccagcggaccccagcctctgccaggttcggtccgccatcctcgtcccgtcctccgccggcccctgccccgcgcccagggatcctccagctcctttcgcccgcgccctccgttcgctccggacaccatggacaagttttggtggcacgcagcctggggactctgcctcgtgccgctgagcctggcgcagatcggtgagtgcccgccgcagcctgggcagcaagatgggtgcggggtgctcagcgcggacccggcggcagcccctccggctgagtcggccctgggggactggagtcaagtgagctgtctgcgaagtgcattgggctccggaaagcagggctgggatttgcgctaaaccgttggagaatgtgtctgtggaagcaccatttggttgaaagaaaaagagaaagagaagaaagtttgttgggcaggctgccggcgcgcagttttgggcgaggtcgctagagctgcagcacatggcagaaagtaaccgttctcccggatgcgcacagtcgttgtctggactaacaggctcctgtgcccaagggctcgccaagccccaccgggctgtgtctaggcagggcagagctgggcggggcagagactggggctggaacagggcgagtgg

SEQ ID NO: 139 - DNA, 2407 bp, Homo Sapiens
gggcgagtgggtgtgtgcggggtgtgcgcggtagagcgcgccagcgagcccggagcgcggagctgggaggagcagcgagcgccgcgcagaacccgcagcgccggcctggcagggcagctcggaggtgggtgggccgcgccgccagcccgcttgcagggtccccattggccgcctgccggccgccctccgcccaaaaggcggcaaggagccgagaggctgcttcggagtgtgaggaggacagccggaccgagccaacgccggggactttgttccctccgcggaggggactcggcaactcgcagcggcagggtctggggccggcgcctgggagggatctgcgccccccactcactccctagctgtgttcccgccgccgccccggctagtctccggcgctggcgcctatggtcggcctccgacagcgctccggagggaccgggggagctcccaggcgcccgggtgagtagccaggcgcggctccccggtccccccgacccccggcgccagcttttgctttcccagccagggcgcggtggggtttgtccgggcagtgcctcgagcaactgggaaggccaaggcggagggaaacttggcttcggggagaagtgcgatcgcagccgggaggcttccccagccccgcgggccgggtgagaacaggtggcgccggcccgaccaggcgctttgtgtcggggcgcgaggatctggagcgaactgctgcgcctcggtgggccgctcccttccctcccttgctcccccgggcggccgcacgccgggtcggccgggtaacggagagggagtcgccaggaatgtggctctggggactgcctcgctcggggaaggggagagggtggccacggtgttaggagaggcgcgggagccgagaggtggcgcgggggtgccaccgttgccgcaggctggagagagattgctcccagtgaggcgcgtaccgtctgggcgagggcttcattcttccgcggcgtccctggaggtgggaaagctgggtgggcatgtgtgcagagaaaggggaggcggggaggccagtcacttccggagccggttctgatcccaacagaccgcccagcgtttggggacgccgacctcggggtgccgtggtgcccggccccacgcgcgcgcggggctgaggggtcgggggcgtccctggccgcccagctttaacaaagggtgctcctctccaccccgcgaggaggggcagctccggagacccggtcttcagcgagcggggtcttagcgccggggaggtctacttccttttggggttgccattttactattattattgccttttttttttcttcaaaaggactggagactgatgcatgagggggctacggaggcgcaggagcggtggtgatggtctgggaagcggagctgaagtgccctgggctttggtgaggcgtgacagtttatcatgaccgtgttcaggcaggaaaacgtggatgattactacgacaccggcgaggaacttggcaggtaaagggggtaccagaagcgtaccctcctggattgtggaaatgcataacgatggggccattgggtggtaaacaaatgcagtttgaatcaggcgtctccctcgccctttctggagatgcgcaaatcatagagaaaagagttactaacccagcggtaaaccgcctgatccaagggcctgggggtggaggagaggcagcagttcagggctagattatgatgcacagtatattgatccagtcccctggacaaaatcagatttaattgtccgtgctaactcttgtcagcccttgcccttctgtgacaacaggacaaacactaagattataattgcaattggagttagcttttatgtgtgatttaaacggagggtacaaactaattaataggttttaaaaatcttagtactttaccctctatctaaattttcagtgtaatttgagcaagtattggtaggtggtaaatggagacttgccagatgttgacattgggcttggattttgaaacttcttccaaccaggaatttaattacctggttggtgttggtggttgctttggtttcatttacaatgttaaatttttaacaaatcaatgagagtctaatatggctatctggattcagagcatacctccattgctgtagcagctgtgattctcagtgtaaaatctttcagtttctaggtaaacaaagaatagtttctttcggggcatctaagggctgattgctgtttcctttgactgtgtattagacagagtgttttgggctctggtcaactttagtagaaaacctagttttcatacatacatttaaaactgaatttatggaatttgactgtggtgtatttacattgtgagtggagtaggcaaaaggatctttaaacaaacaaaatatgtatttacttatatgtgcattgaaata

SEQ ID NO: 140 - DNA, 3000 bp, Homo Sapiens
acatttaaattgcatatttggcttgtaatatattacatatttaaaagaattactatttttctgaataccattaatactaataatagcatcacagtgactaagagtggacttaaataaaggctggcttgaaactcaggtctgccatttattagcaagcttctaaaaattctgagcccttagttttctcacatgtgaaatggagaaaataaatctgcaaaattaattaaatctgtccattcatatttttctctccagtgtatattaactggcattcctcgttaggccagaatgtgctctcaaccatgctccaaatccgctttgtgccaaccccactgccagaaccctttctaccttgagaaccagaaaaggaaacattatgcctggcaatgcctacaccctccaaaataaatctgcaggaaagaacacccagtaagtgatgagagcagcaacgactgcctttatcattttaaatttacaacaccaccttttctagagcctcttaagcattgtagataattccccactcattaaaaaataaattgtaaccataagtattcagggttgatactgcttttgaattagacagtgctcatatcagttgcataagaccaacctaaagtagaggatgaaatcttttttctgaacctttttcagaacgtaacttagtgaatatattaaaactaaactttctttgaatgggagtaatttctacggattaatctgtaatctcttagaccacacctaaggtaatgtagaggttgttgtatcataggctttgtgattagagaccactggatttgtctttggaaaagtcactcatgattctttgggctttggtttcctcatcttttataccggcttaataatgaccaccgtagagttgtcatggaagttaaatgaactcatgtaccataagtgaccaatacaatgattgacactcagtgatttatcaataaattaaaacatttattatcaatatgacagagaaggtgccgctaaaatagacaataggtttttggaagaggtgattaaatggatgcaaaatttatggattgtttattccgtctacctttgctgtgtcccctggttgtggcatacacacgtgtgggtataaaatcgtaaatcctatgtagtcgcgtagtgcatgcgcagaaggcttagacacgaaatgtcatttcagcaatgtgcctagagaagctctgacgccgccttggaagtaagtcgttgctgcctgacctttgggcgtctgggacggatgcctatacctgcacccagcagcactggaaggggcccaggcccttcgcagcacagcctatccccagaccgcttagtccttcataacatatatctccacggaaaagggtatttcctcccgtcagaaaaagcgccccagtctggtctgggttggtttttatttcacgttgttgcaagtaggcgaagtcccttctgtctcctcccttggggtaagtggaaaggagtccggcagggggcccgcagtggcctgcacaggggaactgggtagcgagagagttccaggcaattccgggggctgccccacagaagcaggtggggatcgacagtggctctccggcccagggaggagagcgcggtcgcgggtccctcccctcagcctggaggctgcagccgctcgagtcggcccgggtgggggcggggtgggggcggcgcggagggcacggagattacggcggcgccacccgggacatccagggccccgaggccctgggcggtccccacgcgagatcgcaaaccatgacaataggcagtcacccgaggtcaaataaaaacggagtgggtcccccgcgcgccgccgccccccgcgtccctggcggcctcccccgaggcccccggcggcctcacgagcccgcagtagccggtggcgacgtcgcccccgccccacctccctgcgcaagtgcgaggctgccggcagcgcggcgcacgctccggccgttcccggcttccgcgcaaaacttccatcctgtccacgtgaagttgtcgctgccttagagagggggaaagagctgcgggaaaagccggggagtgacgactgcggcggctgggcgcgctctctcattttcttttcttctcctttcccccctgtcgcagtccggagttttggctcctctcctttcctcctccccctcggagccggcttctccctccgccccgcttctcccccgcttgtgtacgctatttgttgtggggtggccgaaggggatgtcctgttttcaccagaggcacagcgcgaaggggaaacttcgacactggaaggaacgagaataaatacttaattacggacgcactgaaccgcggctgggacagacacttcgggaacccgaggcggaccgggcgacgaggtgagtgaccccttcttccaacccccgccccagggctcccgggggagcctgagttgagagaacccccaaactttccgggaaagtgcgcgaggctccgccggggacgccgagcgctgggtactgaggacgcgcagctggacggtgcgtgggcgcctgcgtccccggggggcgcttggaggccgggtgccccacgcctgagggcccgggccgctcggaccgcagcggtgctctctgccctagaagacgtccccaagccccaagggtcccttccgagcctgcctgtcccttccggggtcggcgcggagcctgcgcgtaacggagttcatccagcagtccagcgcgcggcttctacctgcaccccgcctccacctggcagaggcgcgagcatcggggtctcccccacatctttcttatgacgtgtattactttctgatgaccccctagatggtccaggcgcgaggatgctgacccagagtccttcggagggtcacaggcgcctgggctttcccggtgccgggtgcgtgtgtactttaaaggctcgcgttctaatctccaggcactgatcgggcttttcaactgcggcgatcccactttaatagtttttatgtggcgtggactgaatgtc

SEQ ID NO: 141 - DNA, 469 bp, Homo Sapiens
cctctcccctgccctgtgaagcgggtgtgcaagctccgggatcgcagcggtcttagggaatttccccccgcgatgtcccggcgcgccagttcgctgcgcacacttcgctgcggtcctcttcctgctgtctgtttactccctaggccccgctggggacctgggaaagagggaaaggcttccccggccagctgcgcggcgactccggggactccagggcgcccctctgcggccgacgcccggggtgcagcggccgccggggctggggccggcgggagtccgcgggaccctccagaagagcggccggcgccgtgactcagcactggggcggagcggggcgggaccacccttataaggctcggaggccgcgaggccttcgctggagtttcgccgccgcagtcttcgccaccagtgagtacgcgcggcccgcgtccccggggatggggctcagagctcccagcatggggccaac

SEQ ID NO: 142 - DNA, 2442 bp, Homo Sapiens
tcctcaatatgtctttgaaataaattcagcttaacttcgaaagtacaaatatggtcaaaggcagcagcagcaaagactttactaactcgtaattcttcactgagttctcgaaggtgttccataatgtccaccaagaagccaaagtcacaaagccattgtttgtctgagaagtggactgttgttgcccctactgaaaccaagaacgcttccatttcttttcttagagagaatattagttttaaagttttccctctcctaagccaattgttcagacatcgtccattaaccctttcaccatgctctgattcagattccgttagtaaagtctgaaattcaggtcgcctaacgcctctggtcttaatcaaaactatccattcggatatggtatttatgatctgattaacatctacatcataggagctcaacagttccaagtgaagaaatcctgaataatgaatgacattccaacagttggggcttacggccttttctctcatgtatgagacgagtcctgagttctcaccaatcatcctcaaagtatgggtcgtggtcagtccaaccattctctgcaagctaagccctgctgtctgcagggactctaggattgccgacatgagcgcaccaacactgaaatgatgagtcaggttgattatggtcagaagatcttcttgcacctccaactcagggcctacaccgcggataaagaccaggaggtagttctcataggccacaaaagcctggtcgtccaaggcaagagaataggctttaaagtccctggctcggttaaaaagctggttgcgtagattcctgtcaatgctcaggatcctctgccttgtgatatctggagataagtcaacgccttgcaggacgcttacatgctcgggcagtacctctctcagcaacacctccatgcactggtatacaaagtccccctcaccccagccgcgacccttcaaggccaagaggcggcagagcccgaggcctgcacgagcagctctctcttcaggagtgaaggaggccacgggcaagtcgccctgacgcagacgctccaccagggccgcgcgctcgccgtccgccacataccgctcgtagtattcgtgctcagcctcgtagtggcgcctgacgtcgcgttcgcgggtagctacgatgaggcggcgacagaccaggcacagggccccatcgccctccggaggctccaccaccaaataacgctgggtccactcgggccggaaaactagagcctcgtcgacttccatcttgcttcttttgggcgtcatccacattctgcgggaggccacaagagcagggccaacgttagaaaggccgcaaggggagaggaggagcctgagaagcgccaagcacctcctccgctctgcgccagatcacctcagcagaggcacacaagcccggttccggcatctctgctcctattggctggatatttcgtattccccgagctcctaaaaacgaaccaataggaagagcggacagcgatctctaacgcgcaagcgcatatccttctaggtagcgggcagtagccgcttcagggagggacgaagagacccagcaacccacagagttgagaaatttgactggcattcaagctgtccaatcaatagctgccgctgaagggtggggctggatggcgtaagctacagctgaaggaagaacgtgagcacgaggcactgaggtgattggctgaaggcacttccgttgagcatctagacgtttccttggctcttctggcgccaaaatgtcgttcgtggcaggggttattcggcggctggacgagacagtggtgaaccgcatcgcggcgggggaagttatccagcggccagctaatgctatcaaagagatgattgagaactggtacggagggagtcgagccgggctcacttaagggctacgacttaacgggccgcgtcactcaatggcgcggacacgcctctttgcccgggcagaggcatgtacagcgcatgcccacaacggcggaggccgccgggttccctgacgtgccagtcaggccttctccttttccgcagaccgtgtgtttctttaccgctctcccccgagaccttttaagggttgtttggagtgtaagtggaggaatatacgtagtgttgtcttaatggtaccgttaactaagtaaggaagccacttaatttaaaattatgtatgcagaacatgcgaagttaaaagatgtataaaagcttaagatggggagaaaaaccttttttcagagggtactgtgttactgttttcttgcttttcattcattccagaaatcatctgttcacatccaaaggcacaattcattttgagtttctttcaaaacaaatcgtttgtagttttaggacaggctgatgcactttgggcttgacttctgattaccctattgttaaattagtgacccctcttagtgttttcctgtcctttatttcg

SEQ ID NO: 143 - DNA, 2347 bp, Homo Sapiens
cgagactgaggcactggcgggtgcggccgtcaccgccgcttccccgggtctggatggggtcgctcgcggcggcagcgggggcggtggccccaacgggaaatccgggaaggctgcggggttggcaccggccacaaggtaggaacgcggggagcgcgcggaggcctccgcgccttcctcctcctcctttatctttagagcgggcggctggaagtcgctatagagagggtacgcgtcgtccttgggctcggcgtcgggcgggtacgcgcagtcggggaagtcgcctacagcgaccggggtggacgaggcacagggtgaactccgcggcggggcaaaggcgctggcagccccggccccgccgtcgtaactttcgtcttccagcagctgccgagtgcgggctgccaataaggcgtgattgagaggcaggataggcacgtggatgaaatccatcaccgtggtggccagcggggagcgcccgggcgccatcggcgcgtcctgctccaccagggcgaccctgggcgctgagaagcgggaatcttccttggggaccagggcgacgcctcctgctgccgcccccggcgggacagccgcggctcctcctccagccgccgcgccacccagagcccgaggtttgcccttcagaagcggacccgcagactcctcggactcagagccatcctcctcctcaacctccaccgcagcggcctgcggagacggcttcactggggccccggaccagtgagggctctcagaggccgggagcagcagctgccgggctggtgacaggccccggggcagcactttatgggcagctgccgtcccggagctgtctccaaccttgcacccggaccggctcatgagcggggacaacacccgctgggtggcgggggcagccggtggatcttcgggaagttcggggccaaacaggcaccaagagctggtgacctcgcaggcgggagggctgggttggctctgcccgggacctgagggcgccaacagagtgtccaagacactgtccagcagtccgctgtccttttctgggggactagaactgctgcctccagcaccccttgtagcttcagctctggaatatgcgccctccacgtccgacagcgactgctggtcctgcgtcttttcgtcggaggggtcctgtccctggcagggccgagggaagagtagcccgtccagggagataggtatggccgaaacttcaggcaaggtgtccgaggtctggctccccgggaacggacctgcggctgggcgacacagcagtggggatccgacctcgggggagggcgggccgcccgccacgtggggagcccggggaccctttgccttcagctcagtcatgacgactggactccccttttctcctcccccgtctccaggaggagggaaaagggaaggaggagggggtttcgggaatataggggcagagggaggagaaagtgggtgttgaatgtggctggaccggagggatctccacctcctgggtcgggggcgggggagggcggcgctggtcagctcctgcccttggcctccatcctgtcgtcaggggaactgtggctgtcgtttgtcccagcgagcggcaagtggggagcgcaagaaaaagtagtaattgttaggagatctcgtctcctaactcggggagttctccaagagagttctccaacttctgtccgaggactggagacgcagagtactcacaagtccggcacttgagtggctgcggctgcgacggcaatttagtgacacgcggctcctttatctcccgactttttctctggcatcaaactcgtgcatgctgtgaagctctcagtccctcgctgagttccactgccccctcactaaaaccctggggctagtcggacctctcggtacagcccattcccaggaagggtcggacttctgctggctccgtactgcgggcgacagtcatctccgaagatctcagatcccagtagtgcgggagcactagccgcctcgggttgtagatttcactcaaatgacaagtgaagctagttctcattgagaatgccacccacacgcacaaatacaacaaggcttaccccgattagtgacagctgtggactggccagacagctttctaacaacgcctcctcctctagggaggccccgcccaaagcccctccctaccccaattaccggtaggatctgaaactctggagttggcatttccacccgttattctgaatgctactctcaatagcaggttctttgggatggaacctcataagcatattacgttttgttttgcaaattaagaattatgccctatctaattggaaaaatgaatagattctatcagaagtagaatttttgtcaccat

SEQ ID NO: 144 - DNA, 2353 bp, Homo Sapiens
tacagctggataatagaatttttaagaagcatccttccacacctcctcacctatgaccttccctccacttgctccactgatgcctaaaattctgtttttggagttcacttagtttatgactttgattctggttaacattaaaatacccaggacatgggggaggggaagctgttatcaatcttagtttagtcagttaatatagcgagttgctcttattcattactcaacaagcacttattgactgcatactgtacatcaggtctgtaccaagctttggtgttataaaaatgaatgaagtttggcacttacctttaacattgttgtagtcacatataggagaatgtaagagattattatgaaacaatgtagtaaatgtacaatagggaattctagataagcacagcagagaagcaaccagctccgtttcaggtcctttcctgagactgattcggctggaagggagtaggtcccgccaaatgaagaagctgtgggaagacaggaggacaagaacaggctccacgaagagatttcagagcagagctgcgtactcctttttctttttgtttcttttgctctgtcacccaggctgaagtacagtggttagctcacggctcactgcagctttgacctcccaggctcaagtgatcctctcgtctcagctttccaagtaactgggaccacaggcatgcatcaccacactaggctattgttttacattttttgtagagatggggtctcaccatgttgcccaggttggtctcaaactcctgggctcaagcaatccgctcacgtcaacctccccaaatgctgggattacaggcgtgagccaccgcgccaggcctgagtaatcctaatcacaggattttaaaaagaaacttcctgcgccacccattaaacaatatctcctaccaatttggtagtaaatattttgctaatagtacctaatttttaggtaggcactgtgtttatacatatatccattccttcttttttgattgtctttctgtttaatgggcagctacctctcttggcatctagcagaatgagctgctgcagtttacacaaaaagaatggagatcagagtactttttgtgccaccaacgtgtctgagaaatttgtagtgttactatcatcacacattacttttatttcatcgaatatttcaccttccggtcctgcgtgggccgagaggattgccgtacgcatgtctgtacgtatgcatgtaactcacagccccttcctgcccgaacatgttggaggccttttggaagctgtgcagacaacagtaacttcagcctgaatcatttctttcaattgtggacaagctgccaagaggcttgagtaggagaggagtgccgccgaggcggggcggggcggggcgtggagctgggctggcagtgggcgtggcggtgctgcccaggtgagccaccgctgcttctgcccagacacggtcgcctccacatccaggtctttgtgctcctcgcttgcctgttccttttccacgcattttccaggataactgtgactccaggtaagcaaggtggggtagcagggctggtgacttccttttttcagggaaattcataaatatcgttatttgagctgatttgagatggtgaacaaaatggacttaggtccattttggggctgttttcaaagacgggctgttgggttgagtactgtcgcctctcatcccccatgttggcagtatttccagctcccaaccctttgagcaccaggaacactgcagagggagtaaaatcacttaaccatacaaggtaagaatatgaagaagtcacgtggctcggaggttttggtggtagaggggtgcaaccgtgattcacggaggagaaaatacttctgaggacattttcaggcctactttggaactcagaatgaattttgcaatgctagtttcagaaagggtgtggtacccgcaaactggggaaagttgagaagtattggtgggtctggctggctcttctccctggctgacgttgtaaggctgagatttaggcatatggactgcccttctttttggcatttttaagcatcagatcgctgttcatctacttgcaactgcattcttctaagcggaaattattctcccttcagttttctgggtttcagcataactttaaacaagttacacatttcagatgcatattcttggacttataaattgtaatagctgcttgtagtttcttactcatatgctgtacactttttcttatggcttcatttaagcatatcatactaaaaaccaacatgccaggctattccagagacttgtaaccagatcctcagagctgggggctcttagacatatttcagcccagccccctcattctgt

SEQ ID NO: 145 - DNA, 2415 bp, Homo Sapiens
caaggatgtgggaacaggcaagtaattttcacattggactttcatcctagggagctgggttctagtcacagctctgagctgtgtgaccttgggtaggtctcatctccccggggttttgtttcaccagttgaacagtatgaggatgagtcacagctaacatttgttccatgatatttacccagcaccatacaagtgttatttctgtcctcccagttaacactgacgtgggtagtattatatgcccattttacagatgaggaaactgaagcctgaagaagttaaatacttatcccagaacacacagctggtaagtggcagacctggaattggaatctagttcagtttgattccccaacccatgctcttgaccactatactgttttttcaagtccagatctgaaatctcattttctgtgtggctgtgtgtttgggacaggggtaaccaattcctgactactctatatgctgcatagaacctggagaggatttttcaaagtaaatgaatctcgaaagctggattgcagagcaaacgagtgcagtcaattcagccaggggcttgcaagagggagaaagagaaaaagactgtggaatggaaagtttcccaacccaagcctttcccaaggggtagccattctctgttctacagtttagggcttgcatgtgctttttctggagtggaaaaatacataagttataaggaatttaacagacagaaaggcgcacagaggaatttaaagtgtgggctggggggcgaggcggtgggcgggaggcgagcgggcgcaggcggaacaccgttttccaagctaagccgccgcaaataaaaaggcgtaaagggagagaagttggtgctcaacgtgagccaggagcagcgtcccggctcctcccctgctcattttaaaagcacttcttgtattgtttttaaggtgagaaataggaaagaaaacgccggcttgtgcgctcgctgcctgcctctctggctgtctgcttttgcagggctgctgggagtttttaagctctgtgagaatcctgggagttggtgatgtcagactagttgggtcatttgaaggttagcagcccgggtagggttcaccgaaagttcactcgcatatattaggcaattcaatctttcattctgtgtgacagaagtagtaggaagtgagctgttcagaggcaggagggtctattctttgccaaaggggggaccagaattcccccatgcgagctgtttgaggactgggatgccgagaacgcgagcgatccgagcagggtttgtctgggcaccgtcggggtaggatccggaacgcattcggaaggctttttgcaagcatttacttggaaggagaacttgggatctttctgggaaccccccgccccggctggattggccgagcaagcctggaaaatggtaaatgatcatttggatcaattacaggcttttagctggcttgtctgtcataattcatgattcggggctgggaaaaagaccaacagcctacgtgccaaaaaaggggcagagtttgatggagttgggtggacttttctatgccatttgcctccacacctagaggataagcacttttgcagacattcagtgcaagggagatcatgtttgactgtatggatgttctgtcagtgagtcctgggcaaatcctggatttctacactgcgagtccgtcttcctgcatgctccaggagaaagctctcaaagcatgcttcagtggattgacccaaaccgaatggcagcatcggcacactgctcaatgtaggtttatttttttcccttcttctaccaagaaaaaaaaaattgtctctcttgcatgcaataaagacgttggaaataaactgcattggtagcaagacaaaggatttaatgatttaatgctgaaggggtgtgatatgctggcatgcatattgattccctttgctgaaaatttcctgttagatgttttcttcccaaataacccctcccgcccccatgctcctctccttaccaaccttatagtctcttgaaaacagtttttaaaatatgcataaaaatgtggggggtggggagtagagggtgaccacaagactttaaaacattcttcaagtagggcaatttgacacattttgcagtttttactaaaatgtatgcagagtggaatttaactttgctgttctttggattagctactagttgtataggtccccccaccccttgtgtattccaacagtccaaagtaattaaaatatgacattttccttgaaaggaatttagtttaattaaggtggctgctgctcccgaagttcataaaccaccagttcaagctgccgcttccaatgttttccttgctaaggaaaggcaatatttcttagcattgaccctgctgccacctttccaagtcactttgttggtctaagaagttgctgttttgc

SEQ ID NO: 146 - DNA, 5001 bp, Homo Sapiens
ttaggaagtttatctatgggaaatccatattcatggtgtcctgatgttgcagaggacatcctgagctggctggagtaacttgggacacaggtcaatcgactgtaatctaacttctgaggccattcagtaccctctacagtggccacctaaaaaaaaggcagccaggtgtggtggctcaagcctatatagatcccagaactttggaaggctgaggtgggaggatcacttgagccaaggagtttgaggccagcctgggcaacatgaagaaactctgtttctacaaaaaataaaaaaaattagccaggcatggtggtatgcacctgtagttccagcttcttgggaggctgaggtggaagaatgacatgagcccagcaagtcgctgcaatcagccgtgatcacgccgctgcactccagcctgggcgacaaaaagaaaaagaaaacggagcctgttcactgggtgtggtagacaaggtaaacttttctttacctcccatatcccacaaccttggatgtgctcacagtcatggtagtgttttgtaatgatgtagctgatgacaggtgtgatgttggagattcttctacctgactgctgctatcagtcctaccagcccccaacgtttggtgcttgttctaaagggcatgtcctaggagtcgctttaaactctcaaagtatcactctctatacaaacaagaagtgcaagtaagtagcctgagctcagcctcccaataggaatatttcattatcactagatcaagtctttccattacaatgactgatctgtctctgaatcctgtggattcatccttcaaaatgcccttttcttccagttctcatagctagtgccctaaaagtgacctgcagtacctcctgctgagacgaatgtaccagcttcctaactagcctgcactcccttcatccccccaagtcagtgccagaccaccttgcctgaaaaaccactttcagtgtgtctcacctcagcagaaatgtttctcagcttccaattaacaatcacatcaaacccctgctcttgtctgcgttttaagggtatctataggccgggcgccgtggctcctacctgtaatcccagcactttggaaggccgaggcgggcagatcacttgaggtcaggcgttcgagaccatcctgaccaacatagtgaaaccccgtctctaccaaaaatacaaaaaaaaaaaaaatagtggggcgtggaggtgcacgcctgtaattccagctactcgggaggctgaggcaggagaatcgcttgaacccgggaggcagaggttccagtgagccgacatcgcgacacagtactccagcctgagcgacagagcgaggctgtgtctcaaaaataaataaataataaattaaaaaaataagagtatctataacctggtcccagcctgaatttcctttttcaccccaacacgtagccctagttacattcttctgacgtctgtaaacaagcccagcccttcctgttgtgaagccaagttcaggtggttcctcttcgcctgactgttttcccattccacttaccggaagcctagtcatccttcggagggctgtacgggggttgcaagaagcaacggaaacggttcagcacctgctaccttccatcatattcttttcaataaaggggcaactcccgccaatggcagtgtagatttcctaacctctacacatggaagattcacaccattcaggattgttgtttaactgttgagagagcacttgatacttaacagcttactaggctacaagacagcgcaggaaagaatcctctgttgtccttttatgttatcctgaacagttggttcacagagttactgtaaacacacaaaacatgactgccagggcttagtagtgaggaaggtgggaactagtcctgactcagttaactgtgcccaggagaagctgcttaacctcaaaggatttcactattactagaatcaataataccaaccctaggggtaaaaataaagataaatgtgtgcaaatcctgcctgcagtctcgggcacgtcgtgggtgtccaagaactgttcttaggcagccggtggggacaaagtctgtgtgcctcctgtcctggaataggtcccaaggtcggcttacttgcaaagcaagggtacggcgcaagagtactgaatacgggttggaagggcgctggctctaccctcagctcataggccggctgggcggcgctgaccagcagctaggccccgtcttccctaggaacggccacgggggccctgggagggtatgaatgtctttttgcagtgaggcctctggaccccgcggccccccggcagcgcaaccaaaactcaggggcaggcgccgcagccgcctagtgcagccagatccccgccggcaccctcaggggcggagccggaggcagggccttcgggccgtaccaactccacgggggcaggggccgcctcccttcggccgcgcgccactcaagtacggcagacaggcagcgaggttgccgaggccgaggctagcctgcagcctcctttctcccgtgccctgggcgcggggtgtacggcaagcgcgggcgggcgggacaggcacgcagggcacccccggggttgggcgcggcgggcgcggggcggggcccgcggggggggggggcggggcggcggtgcccttgcggcgcagctggggtcgcggccctgctccccgcgctttcttaaggcccgcgggcggcgcaggagcggcactcgtggctgtggtggcttcggcagcggcttcagcagatcggcggcatcagcggtagcaccagcactagcagcatgttgagccgggcagtgtgcgggtgagaagaaaggggacccggtcacggccccaagggcgaaggggctcgcggcgggcagggcctccgcggcaatggcgacagtggccgcaccgggcctggcgggaccggggcacctgcaggcggttctcccgggagtgcccggcgcggcggctggagcggggatccgcagggaggggacgcggggactcgggggacgccgcgcgctgccgttcctcggcagcccagcctgcgtagacggtcccgcggcgctgactgaccgggctgtgctttctcgtcttcagcaccagcaggcagctggctccggttttggggtatctgggctccaggcagaagcacagcctccccgacctgccctacgactacggcgccctggaacctcacatcaacgcgcagatcatgcagctgcaccacagcaagcaccacgcggcctacgtgaacaacctgaacgtcaccgaggagaagtaccaggaggcgttggccaagggtaggttccaggctgagcggcgggaggcagtccccggcagaggcgaccccagggagccaggccccatacggacgggcctctccgtggaggagaactcgcttcgtatttgtaccggttccgagttttccaggcacgatagtctctcttttaaacacatggtctacctcattgtagaaggagtgcctcgatgggtttgaacacacttctgtcatctcagggaacttggggtcctgcgaaggagcttgccttactgttgtgagccacattccgttacacatattgccagcactggtgaattgtagggcctgaaaagaaagctctactgtgtcactcgttttttttgcaaattgaaattgttcttgttgtataatgtgctttggggaaatgtttggtctctcaggtaggtgtgccagccgtttgcaggagggctgagagcgcctgtccactggtggccagacatcatcgggtccgcaggtgtctctgagtgtcagggtcacctcctgatagaagtgggagtggtgtcttactgccaggtcacactgaaggtgggagacaggaggacactactccgtgctaggaaccatggtccttgtcatcttcctgagagcaaacggggtcgggactccagcctaggacttggagactccctgcatccccagctaccctgcaggtgaaacttcactgagcccacttgacttcaggtgggagaggaggaggcacaccgttgtggtgtgcgttaccaaaaaagcagtaacctaactgtggaacagttcaggatctttagacttgatacttttcttgatttcccttaggggtcaaagttcacaaggaaaatagccctttagtgggaaactgaaacaggcttgtttttatttactatttactcatatttgtaatgcaattaaaatatatgttgttaactttttttttttttctcaagagctcggttgataaaaccaggggtatgtggactttttgagtctgtgccttttgggggtgtgtatgggaatgttatgttttaacgttttttacaaaatagtattgtctttttaatttattcgttagtggtttgcacaaggaagataatcgatagtcatgttttttagactctctgtattgcttggtaagctacgtagtaaaaaatgtttacttttccttaaatgttttgaatttcggggttatgaaatttgttgagtaatttttagacagtcacatcttgttgactggaggcatctagtggaaaaatgcagtatttcagcctgattgtgtttgaagtaaatgattaaaagaggaggaagttaccacattctggaagatttacttgagacagacgaaccttgaattacgggaaaaggccccgtgatttaggaaataacaaatttgggaaacatgtaatggggagagactggggaataccccagttgtgaaagtacttcctgtaaggcaacatctgacaccaggaacctttctcttcagtattttaaaaacaacttaatttcagtcctttacttgtggaatcagagccttacttatgtaatacaacccactggaaaaaagctttttattgtattgtactatattgtttataagtgattgagtacctgcagagctttcttttacttaaacatattttaaaaattattaaaaagattttcatgtttgaaaacttggggaaaaaagataaaacaatgtcataatctcatc

SEQ ID NO: 147 - DNA, 2483 bp, Homo Sapiens
acatcaaatccagaaaaacagggtggggacacggcagggcccagcagcaccatcccctgaacacccacaaacactgtcccttcctcagcaggtggagccatctgctgtcctctgctcccatgtggccctcttcatacctaaagatgggaccaggatctgtgctggagaacagtcttatctccctccctctaccctgtcctggcacaatcaacgaacactttttttttttaaagacagagtttcactcttgtcgcccaggctggagtacaatggcacaatctcagctcactgcagcctccgcctcctgggttcaagtgattctcctgcctcagcctcccaagtagctgggattacaggcacacaccaccatgcccagctaatttttgtatttttagtacagatagggtttcaccatgttggtcaggctggtctcaaactcctgacctcaggtgatccacctgcctcagcttcccaaagtgctgggattaccggcgtgagccaccgcacctggccgtcaacacacaattaaatcttaaacacaaacctgcatattggctgaccacgtgcacctgcaaaacccttacctcccacccccaggaagagggggttctcgtccccacctctcattcccacccttgaaattgcgaagaggattataggtaacctgcaggcaccctcgccagagcgtctgtgcttccagacacttctccccattgccggcaacccggctccactgccgcgcccagcctcctctgttcactgctctggcctcggcgcctggaaaccgcgtgtccatcaaaacgtgaaggtgaacctcgtaagtttatgcaaactggacaggagggagagcagaggcagagatcaccgtgtccactcgacgtcctgagcgaaaagccacgtgtgcccacgtgacgatggagacaggaggaccagggctctgcctgcccccttttctgagcccctactgcattcagctctggggcctgggccctcgacggccaccacctcctcacctgggctcctgcgcagccaagcgcagtcccgcacgctcatcttccacgtcagctcctgcagcgagagcttggcatgcttccccagggagatgaacttcttggtgttcctgaggaagcggcgttcgttgtgcctggagccccagaggcctgggggcaccagccggcgcaggcaggcccgcacgaagccgtacacctgccaggggctgctgtgctggcggagcagctgcaccaggcgacgggggtctgtgtcctcctcctcgggggccgccacagagccctggggcttctcccgggcacagacaccggctgctggggtgaccgcagctcgcagcgggcagtgcgtcttgaggagcaccccgtaggggcactgcgcgtggttcccaagcagctccagaaacaggggccgcatttgccagtagcgctggggcaggcggggcaacctgcggggagtccctggcatccagggcctggaacccagaaagatggtctccacgagcctccgagcgccagtcaggctgggcctcagagagctgagtaggaaggagggccgcagctgctccttgtcgcctgaggagtagaggaagtgcttggtctcggcgtacaccgggggacaaggcgtgtcccagggacgtggtggccgcgatgtggatggggggcccgcgtggtgctggcggcccacggatgggtgggagtggcgcgtgccagagagcgcaccctccaaagaggtggcttcttcggcgggtctggcaggtgacaccacacagaaaccacggtcactcggtccacgcgtcctgcccgggtgggcccaggacccctgcccaacgggcgtccgctccggctcaggggcagcgccacgcctgggcctcttgggcaacggcagacttcggctggcactgcccccgcgcctcctcgcacccggggctggcaggcccagggggaccccggcctccctgacgctatggttccaggcccgttcgcatcccagacgccttcggggtccactagcgtgtggcgggggccgggcctgagtggcagcgccgagctggtacagcggcggcccgcacacctggtaggcgcagctgggagccaccagcacaaagagcgcgcagcgtgccagcaggtgaaccagcacgtcgtcgcccacgcggcgcagcagcagcccccacgccccgctcccccgcagtgcgtcggtcaccgtgttgggcaggtagctgcgcacgctggtggtgaaggcctcgggggggcccccgcgggccccgtccagcagcgcgaagccgaaggccagcacgttcttcgcgccgcgctcgcacagcctctgcagcactcgggccaccagctccttcaggcaggacacctgcgggggaagcgccctgagtcgcctgcgctgctctccgcatgtcgctggttccccccggccgccctcaaccccagccggacgccgaccccggggaggcccacctggcggaagga

SEQ ID NO: 148 - DNA, 2374 bp, Homo Sapiens
tgaaacccagagaggttaaaggatttcctcaaggtcacagagctagcaacaaacacagcccttactataaccttgtctactacagccttgtgtgttcgctctttccacagccacttccactacaccagagcctgttccagcacatgattctatttaacagatttctcctcttcttttttttcttaagcgccaaatacatgttaccaaaaaaagtgacacactgggtagcattttaaactcaagtgttttgccaactaaaactatactcaaatttcataagtatacaggcttagcccgtaaaacagaaaggcacaactattcatagttctttaagttccttttgaaattggtgtgtatgccctggaagttttaagaacaaccactgaaaacctattcaccaattctgaatggcttgtaaagtatcagcctcactttcattcttttcagagcccacagttatctcctccctggatatactttatcttgcagattatgcaaggcaatgtaactaacttcaaagtccctttagttccttttaaagcacaagaaaatctcccaaaacactgaacataaaattaacccttgggaagtttcagattctgagaacaggaaccacctcttaaccattctctctgactgcgatcatctaggtccttcattcaaaatgcattaattggaaatacctaaaagaaacgtgggagggggccggggggtcggaagaaagtggagaacagacatttacatatataaaaaaagggatctgatatatgaataacacttttgcccaacgtcaacttctcgcctcgactcaaggcctgacacaacttctgttgtcttcttgatcaccttccttgaagagaggggccaaagccggcacgttctgcggagactgtctctagacctaggaaggggcacaccagggcagcggacgatttgctccgcgtctctcaaaactactgccagcccaattagtaaaccgagagggcagccctgagatgcaggatggccagagagttgaaatgagtctgggagttaagagtgggatggggcggacgaacaggcgtggggagggtaaacaacgcaccaggagcgggagtgagaacagggtcgaggtggggtcagcgaaaggcaaaaggcgaagagaagaaggggacggggctccgggtgggatgggcggcagcaaagggggaggggacgcgagaaggctgggggagggggagaagggtccggggcggggcggaagggagcaaagaggcgggatgaagacggccaggccgggagggtctttacctgcagctccgcccgctccacctcccactgggctctctccacctcgaagcgggcccactcgtgctgcaggaagtgcaggatccccgggagactgtactgggctcgggccgcccccgccgcagccgccccgtcgccggccgcggcagcctccgccagaggcccgagccccttggcaccgccggcgcccgggtggttgttgctgaagaagacgccgggacccgcctgctcgtccatggcggccgcagatacccggggagctgccccggcgcccagcagcggaggcaacagcggcggcaagcagcgcctcctcctccctccgccgctcccgcccacaccccagtcagcagggagcagcctcctgggcgcgggggccggccgagcccgtgacgggccgggaaatgggtcaactgcggcgcgctggcggcccggggcttgccgggaaatgtagtcgcggggcggggcgcgggctagcgcggcccgggcggcctgtagggctgtgcctcagcttgggcgtggcctcgggcccgccccgccccggctcgccgcgtagggggccggctgggcggggagagcgggtttcctctggggccggctgggcgcgggcgggcgggtctccagtcttcctcgcacgcggaagttcgcgggcggcgcaccctgttgcattcaaaaacacacacacacacacacacacacacacacggaagttgtcacgccaagatacctgcccgagctgcacatcttttaaggcttcctggccgttctgtgaaggaacaggctcaaagcgagctacccggtgcggccgcgggaccggggttctcccgccagctgccctgcgtgctctcgcttcggcttcgtgttcggagtttctctcaccctagacgctcctccattctgccaatctgcgggtcgctgtcgctcttgcctttctcttttgactcgaggggctcaaacctgttacctgaccagttttcatttctaaggaacgccgatcacctttctaagacaacgccgcagctttctgctgctgcttccaaattgtggtttgttgacagcccatctgaaaaactgctccgttgaagtttct

SEQ ID NO: 149 - DNA, 2322 bp, Homo Sapiens
caggtctggtgcgcgcagagaacaactccaagcgcaccgacgcccgcgagctccttccaaacaccgaacgggatccagagcccgagcccacaggcggcggccgggggagggagcagggtgctggccgccgcccgggagtgttcgcgtcctgggtgacccctggaaggacgtggggcccaaactccggctggggttgggagagcagcccccagaggctctccgcgggatcctctgccgggcgggaccgtggctccacaggagaagtgggtggcaagccctgcttggcggaaagcagccgttcccctcctcctgggcctggggcggcgcccctcacccctgttccccgcccctcacccctgttccccgccggccacatcccctgccccttggattccaagcgccccgcgcgccgaggagcccagcgctagtggcggcggccaggagagacccgggtgtcaggaaagatgggccgtctgggggacagcagggagtccgggggaaacgcaggcgtcgggcacagagtcggcaccggcgtccccagctctgccgaagatcgcggtcgggtctggcccgcgggaggggccctggcgccggacctgcttcggccctgcgtgggcggcctcgccgggctctgcaggagcgacgcgcgccaaaaggcggcgggaaggaggcggggcagagcgcgcccgggaccccgacttggacgcggccagctggagaggcggagcgccgggaggagaccttggccccgccgcgactcggtggcccgcgctgccttcccgcgcgccgggctaaaaaggcgctaacgcccgcggccgcctactccccgcggcgcctcccctccccgcgcccatataacccgcctaggggccgggcagcccgccctgcctccccgcccgcgcacccgcccggaggctcgcgcgcccgcgaaggggacgcagcgaaaccggggcccgcgccaggccagccgggacggacgccgatgcccggggctgcgacggctgcaggtaggaggcccagggccggggggcggttcggctccgcgggcgggggctggagcgcagcgctgggcaggcacctgggctcgcagctccgaagctgggaggtgaggggagagcgatcggggacgagctgggacaaggcgacacaggggctccctcggagttggatcggcccctgggacttggcgctcgcgagaggctggagcggccagagtctagcctgcgaggagacgcgggtcctgccctcagcgccggccgcctttggcgccaaagacagccccgcaggggttccgggagggccctcctcctgctgtcccctctccaccccgggctccgagggccgttgggagggtaaccccgggaagaggccggggtgcggggcgcgggtgcaggtggaaatcgccagcaagctcctccccgcccgcgcgctccctccgacctgcagggctgtgccaatcccgaggcctcagcttccctgaggagccagggccaggcccccctctggacagggagaaggatctgggcgggggccttgacccatggagttggttactaagcggtttcgatggtttcccgagggacagctccctgtggctctgagtttgtctgtcgagggctcctggcctgtctccggagcggtcccaggtagagaaagcccgtgaagaaatggcccgggccggcctggagggagacacctcacgcccccttagctcctgggccgcctcctcctgcagcccctgcctttcccggggcttggacttggggagcgatgattacctttgctcagcttgtattttggcctggacgctaggagataagcccatgtagtatgcacacgtctgctacataaacaggggacagatagacgatcttcaaccagcaagggtgcagggaaaagcaatgcaccccaaacttctgaccagaggtcatttgcttccaaagatgctgccatctgtttattcactgtctggacatttggaaatggctcaggctcattaacacaatgctttggtttttgttgttttgttttttgttgctgtcattgctgtttatttgttcagccttagctctgggggaggagtaaacaaagcgcgtggcctctggcacttactgagcgctgagccacccctctttggatttattcggggaaagattaaaaagcatttcattaagaacaggacacggtgtttgaaatgttgccatatatgaatgtatgcattacgtatgtagtttttaaaataagataaaaagttggctgggcacggtagctcacgcctgtcatccctcacagcctttgggaggccaaggtgggtggatcacc

SEQ ID NO: 150 - DNA, 1100 bp, Homo Sapiens
agactgcatctcaataaataaataaacaaataaataaataaaggccgagcacggtggctcatgcctgtaatccctgcactttggtaggccgaggcagatggaacacttgaggtcaggagttcgataccagcctggccagcatagtgaaaacccgtctctactaaaaatacaaaaattagggccaggcgcggtggctcatgcctgtaatctcagcactttgggaggctgaggcgggcggatcacgaggtcaagagtttgagaccaacctggccaacatggtgaaaccccgtctctcctaaaaatacaaaaagtagccgggtgtggtggtgggcacctgtaatcccagctgctcgggaggctggggcaggagattcgcttgaacccgggaggcggaggttgcagtgagccgagatcgcaccactgcactccaccctgggcgacctggcaaggctccgtctcaaaaaaaaaaaaaaaaaaagaaaaagaaaataccgggcgtggtggcagacgcctgtagtcccagctacgcgggaagctgagtcacgagaatcgcttgaacccggatggcggagtttgcaatgaaccgacatcgtgcaactgcgctccggcctgggcgccaaagcgatactcggtctcaaaaagaaaaaaaagaaaacaggagaataatgaaattttacttatttattttatttattttttatttttttgagaccgagtctcgctctgtcacccaggctggagtgccctggcgcaatctcggctcactgcaacctctgcctcccgggttcaagcgattctcctgcctcagcctcccgagtagctgggactacaggcgcctgcaaccacgcccggctcatttttgtatgtttagtagagacggggtttcactatgttgcccgggctggtctcgaattcctgagctcaagtgatcctcccgccgctgctttccagcgtgctgggattacaggcgtgagccaccgcgctcggccaaaagttttaaatttcagtaagttccaatttatcaactttttccctgtatagattggtcttttggtgtcgtctaaaaactatttgcctggccctaggtcctgaggattttt

SEQ ID NO: 151 - DNA, 286 bp, Homo Sapiens
tttgcactaggctggaagtggccgccagtcccccgtgcaattccattctctggaaaagtggaatcagctggcattgcccagcgtgatttgtgaggctgagccccaacagtccaaagaagcaaatgggatgccacctccgcggggctcgctcctcgcgaggtgctcaccccgtatctgccatgcaaaacgagggagcgttaggaaggaatccgtcttgtaaagccattggtcctggtcatcagcctctacccaatgctttcgtgatgctgctgctgatctatttggg

SEQ ID NO: 152 - DNA, 2197 bp, Homo Sapiens
ttatattcagttttctgaagttttggttgcataaccaacctgtggaaggcatgaacacccatgtgcgccctaaccaaaggtttttctgaatcatccttcacatgagaattcctaatgggaccaagtacagtactgtggtccaacataaacacacaagtcaggctgagagaatctcagaaggttgtggaagggtctatctactttgggagcattttgcagaggaagaaactgaggtcctggcaggttgcattctcctgatggcaaaatgcagctcttcctatatgtataccctgaatctccgcccccttcccctcagatgccccctgtcagttcccccagctgctaaatatagctgtctgtggctggctgcgtatgcaaccgcacaccccattctatctgccctatctcggttacagtgtagtcctccccagggtcatcctatgtacacactacgtatttctagccaacgaggagggggaatcaaacagaaagagagacaaacagagatatatcggagtctggcacggggcacataaggcagcacattagagaaagccggcccctggatccgtctttcgcgtttattttaagcccagtcttccctgggccacctttagcagatcctcgtgcgcccccgccccctggccgtgaaactcagcctctatccagcagcgacgacaagtaaagtaaagttcagggaagctgctctttgggatcgctccaaatcgagttgtgcctggagtgatgtttaagccaatgtcagggcaaggcaacagtccctggccgtcctccagcacctttgtaatgcatatgagctcgggagaccagtacttaaagttggaggcccgggagcccaggagctggcggagggcgttcgtcctgggactgcacttgctcccgtcgggtcgcccggcttcaccggacccgcaggctcccggggcagggccggggccagagctcgcgtgtcggcgggacatgcgctgcgtcgcctctaacctcgggctgtgctctttttccaggtggcccgccggtttctgagccttctgccctgcggggacacggtctgcaccctgcccgcggccacggaccatgaccatgaccctccacaccaaagcatctgggatggccctactgcatcagatccaagggaacgagctggagcccctgaaccgtccgcagctcaagatccccctggagcggcccctgggcgaggtgtacctggacagcagcaagcccgccgtgtacaactaccccgagggcgccgcctacgagttcaacgccgcggccgccgccaacgcgcaggtctacggtcagaccggcctcccctacggccccgggtctgaggctgcggcgttcggctccaacggcctggggggtttccccccactcaacagcgtgtctccgagcccgctgatgctactgcacccgccgccgcagctgtcgcctttcctgcagccccacggccagcaggtgccctactacctggagaacgagcccagcggctacacggtgcgcgaggccggcccgccggcattctacaggtacccgcgcccgcgccgcccgtcggggtggccgccgcgcccggcaggagggagggagggagggagggagaagggagagcctagggagctgcgggagccgcgggacgcgcgacccgagggtgcgcgcagggagcccggggcgcgcggcccagcccgggggttctgcgtgcagcccgcgctgcgttcagagtcaagttctctcgccgggcagctgaaaaaaacgtactctccacccacttaccgtccgtgcgagaggcagacccgaaagcccgggcttcctaacaaaacacacgttggaaaaccagacaaagcagcagttatttgtgggggaaaacacctccaggcaaataaacacggggcgctttgagtcacttgggaaggtctcgctcttggcatttaaagttgggggtgtttggagttagcagagctcagcagagttttatttatccttttaatgtttttgtttaatgtgctccccaaatttcctttcatctagactatttgattggaaatatgtcagctatgatgatgactttctgggaagcgattcctgtcacccgctttcccctcctccccaccccacgtcctggggctttagagagcgattgggagttgaatgggtctgatttcggagttagctggctgagtccgcgctg

SEQ ID NO: 153 - DNA, 2436 bp, Homo Sapiens
gtgaatccccatctctattaaaaatacaaaaattagccgggggtggtggtgggtgcctgtagtcccagctactcgggaggctgaggcaggagaatcacctgaactcaggaggtggaggttgcagtgagtcaagatcgcaccactgtactgttgcctgggcaacgcaccgagactccgtctcaaaaaaaaaaaaaaaatgagagaacaggggagggtctagggctcagagctttggagaacagacctcagtagcaccaacactccaggatcaatgctacaaagacacgggttacaactaaactggagaacatggccaaggatgggaactcagcctgagcagggctgagccgagcagggctaagccaagtagggctgagccagaacacttcctccttttttctgaacaatctacctacatttcagctacagggctggctttacccagtccggcgggagggaggagagggctggtctgtgacttcagtgctgaggtttgatcaaggcaaagggaaacttcctattcccagaccctttgcaagaaagaatggcatattacttgccaccgacaggggttattattactaaatggagtcagtataaatgctttccaataaagcatgtccagcgctcgggctttagtttgcacgtccatgaattgtctgccacatccctcttctgaatggttggaaattgggcatctgttcctttaaacaggaaacatttcttgttcgagtgagtcatctctgttctgctttaggagtaaagtttaccctgcagttccttctgtggtgaagttttctctttctctcggagaccagattctgcctttctgctggagggaagtgttttcacaggttctcctccttttatcttttgtgttttttttcaagccctgctgaatttgctagtcaactcaacaggaagtgaggccatggagggaggcagaagagccagggtggttattgaaagtaaaagaaacttcttcctgggagcctttcccacccccttccctgctgagcacgtggagttaggcaggttaggggactcggagactgcgatggtgccaggaaagggtggagcgggtgagtgcctgttgccaaggtggcctcttcaacaggaaaccacaatatttttgtttcttgacttgctctagaaacagggctgtgggggtggggaagcaacttggatctgcccttctgaggacacctctgggtgctgcctggcccaggtctcctgtgtggtttctctctgagccgttgcctctgactttgctactttttcactctgagcagtctccagttcctctgctacctttttgtcctccaagcttccctgccgcctcgaatgcagatacacggtctccctcctgtggacccgtttggagagtccagaagactttatcaatccacttttttttctttttcatttggccctggggccgacggttaagtactttattctgtcattctgtcgaatcacgatgccctgaggtgcacagccccttccccctcttccgtgtctgaagggtttccttttatctctccacccccacccttgccctcctgccctctctcttgttccccaaagacagttctctaatgttttgatgtggattcgtgaatttatctgtatctttgcaaaatgtatttttcttttgtatgtgtacactgttttttaactatgcgatctcaggcaagtaattcctctgtgcctctgttatctcatcattaaatgattaataatgcctccagaggtgactgtgaggcttgaaggagataatacgcatacatcacttactacacgagttagcaattattattgcatattaatactattggtattttattttgctcattctgtttctatttcttttttatttatttattttttgagacaaagtcttgctctgtcacccaggctgcagtgcagtggtgcaatcacggctcactgcagcctcaacatcctgggatcaagcaattttcccatctcagccttcagattagctgggaccacaggcgcgtgctaccacacctggctaattaaaaaatttttcttcatagagatggtgtctcattttgttgcccaggctggtctcaaactcctatgctcaagggatcctcccaccttggcctctcaaagtgctaggattacatgcatgagccacggtggccatccaggcattgatattatgaggccatcttgacctagccctctctggtgaagagtccttttcagatacttcgttcagtcttctcagctatgagtccctaccctctgaaagcttatattctatttggggaaagacaaaaggcagtttcaaagaagagaggtgtttgattttcttttcctacttttaatatcagaaaacatttcatctaactctcagtatgaaggcaatattttgtttactggtatatccctagagcccaacatggt

SEQ ID NO: 154 - DNA, 2488 bp, Homo Sapiens
tctccatctaagcccaaagcagtagaagaagggctgaggtcaatcattagctaagcagtttctacttttcttcccactcgcagggcctgtagggtagtgggaagagctctgggttacagatctagaaaccttagattttcatattggctctgctgtggaattgttataatacatttctactctcctggtttcagtttccctgttgaactagatggtatgggaatctccaagttcctcacctgtgagattctttgaatcctgattcttctccatcccaacaccacagcagttctccacatcctcctaaaccagtgatcctccctcccaggtcttgaccttgccttgggaccctctactgcacatcagaagtccaatggctttctctgcctacccctcgcacagataggtgagccttgggttgcaggaaaggcccagctgatcatgggcctcttgccccaccctaccacgaggctcacagacagtgatgaaggcctggatacatagactgcaggacaaggtcagactggctggtgagaaagggcattctccagcaagaattctcttccctaaccaagcagagatggggattgctgcttactgcaggttcctgtcttacgtccttctcatatctgattcactgatccacagttttttccccactaatctttttcctcctaggtatttcctacttgtttacatcattgtacactccctggctgccccattccctttctgggttcagtctcctccaatttctaaactacccatgcccctgttctttttctcccctggctacactccctttcctgtgatcagtgttctttatccaaaccctcctcctacctccaaatcacatatccctcttcctggaaagagcctcccacacagctgcctccttccaccacctccctaccgtggtctctaaccagatttggaccaccaaagccccctctgaacaggccccacctgctctaggccaggctgccatctccgcgctcccctattccccagtcttaaccaggagggatgcggcaggagtgctgcgtggggctaggcacgccaccagccagtccccaagccaacatcctgagccccgcggcttgctcaccgagtgacttcatgtagtcatcgaaattcttgctgtccactagcttccaggtgcccaggaaagcgtccaccatagtgatgctgggctaggctgagagaagctacaagagagcaggcgtgcaagggctccgacggcggctccctgcccgggctgccgctttaaatagccctcgcatcacatgaggagacgtggcccacgcccccggctcccgaaataggaagccccaggctagggctcacccaggaggggctggtgcgcccatcccccaacccaccgaggtgggtggggaccagccagtggcgccctgctagcctgcgtcagcgccagtgcctggcccccgagtccctaccccaggctggtaggaccttctccctttcctggcctctaggcactctggaatctgagaaggaagcagccaacaccagcccgagagctagggcgcatgccatggtggatatcttcccgtcccccagtccctctttgagcttagcgtcagagcagagatgagactagaaaagcaaaacgcccttgggctggtgcccacgccggggaaagctctggttgacttctggcacgggcatctgtcctcgttttacaagtgaggagtccgaggctcacaggggaactgacaaggtctcaagaaataggagggggtgaatggagctcagattgcaagcttagtctagcgggcttcagagctcgcgctctcccttcactctcactgcctggtggcggagacagtcaccagcggctcggtctgcggctgagctgaccttgtcctctgcctgttttgagcaaaagcctgacccttcgcgccccgcccgcctcacacgtgcttgcccctccctgcggaatgtctcctgctggccctcctccgtccccaccccaccccaccatctagctccccacccgcccctgcaagtgctctgggcttttccggtttcttcgcacagctccgagctttagctcaggtcgttcccagctcccctcctgcagaaattctgccaattcggtcagctcttcaaggcccatggctgccttccccacctgccgccctttctttggcctgtgcacactagcaagccgcctgcacttttgggtaatttgctgcctcctttcgagagcctgttgtgcggtggtttgtcactgtatagtttactaagcactttcagtaaaaataagacctgccttgtcttgctatttattgcatgctgagggctttgggtgtattgtttcattgaactttttattttattattattttttagagacaaagtctctcgctgtgtctcccaggctggagtactgtgacgccatcatagctcactgcagcctcaaactccggggctcaggggatcctcctaccttagcctccccagc

SEQ ID NO: 155 - DNA, 2250 bp, Homo Sapiens
ccagggtgtccacatagaaggtgctcagaaaaataccttgaattggcctagcttggtaagaacatgggctttggcagcaggaagttcaaatacctgctctactctttattattagtaatgtgatcttggacaacccacatagccttgctgagacctgttttatttgtaaaacatctcttggagttgctgtgaggataaaatgacaacatatataaagagccaggcttcttctagaagaatgtccttgggtagcatgtacatttccatccttccttttagagagtgggggtaataggataccccctcctccaggggtatcccctctttctagggacctacccaagctaggcctttcttccagtgaaacgtgcatcccgagggcttctaggatgaagtagtccactggaaggcaccagctcttccttttatctctccagagctggacagtgcaccaggggccggtactggttccccagctaggagacaccttgggcggggctttgctcgccggaagcacgcagagcgtggggaggagggccccctctgcctgtgtttgtgccaacagcacccgcgctgccgcgtcgggttccggcggccggagtcacacatgatgtcacagacaatgacacaagccggtgtctcattccgacacagcgtccgagctgcacaatgtcacacccgggtgccaaacacttggccccgcgcgacccggccctacgcctcctgccgccgctctccgcgtctccgggggaggtggcccggttcggccgggcagggggctggcgggcgagccccgcgggcgggctggcgagcgggtgatgtcacgggcagcggtgggtgggtcactcggaggtgaggcgccgccaggcgagttcagcgagagttcagccgcattgcattaggcaaatgaggcccggcctgggtgggggtgtgtgttaaggggaggacaccgggaccacccccctcttccccgccccaccacctcctccaccacggcttcgctcggccagggactgaccaaaccttgggggagcctgggagccggaactggtacaagggaggacgcccgcccctcttccgtccttgtcccctcgcagccccctcctctccctgtactcggcgtccctctgtactctgtgtactcctcatctggagcctttcccccttcctgcttctctcctctcctcccccttcccaggctgcccccacttgcctgtccacatgccgcctctccctctcggttccctgcgtttctcccgctgcagccggacgcgccgggaatgggttaagccaggggcggtgcctggacggggcggggcggtggaaagggggtggtgcccggaggggagggggcgcgcagagctggggtgggggggccgtggcgcgtaccaccagagaccgagcgagtcgccagctgcccctggcctggcgggggcggaaccgcgcgggatccccacccccacccggaatcctcgccacggagaatccctggagaagccccggatccccggctgggaggaggaagtgctcgttgacccccagccccgcgctgatcccgcccccggcctgcggacttggggagccgctgtactctgcctcggacgccacgagactctagacgggagtcccctcgaggtgaagccgctgagttcccgggccccgccaggcttccctgggagagccgacggaccccccctcccagcacacacaacttccctgcttttcaccgggactggcggagcggccggcggacttagacgcggggacttcagggcagggggcgccccctgcccgggtcaccagtcggggcgaggggacgtctcctctcccccagctgctctgctcggatggcgccgccggctgagtgacgggggcggcgcgcaggacttcccagctcggacctcttgccttcgaggggaaagatgtacgagagtgtagaagtggggggtcccacccctaatcccttcctagtggtggatttttataaccagaaccgggcctgtttgctcccagagaaggggctccccgccccgggtccgtactccaccccgctccggactccgctttggaatggctcaaaccactgtacgtaccggcctctcagtctgctgttgtagggggtgggagtgggcggtagggcttccactactactcgggggtgagagtcccggggtgtagtggaggtcctgtctctacctttcacttaacccgtgttgcccttgctggacaattgaaccctcccggccgcac

SEQ ID NO: 156 - DNA, 2441 bp, Homo Sapiens
ctgtcctccaaaatgttgcctaccacaccaaaacacaatcctgctttttaaacagcgagtaaaattaaatcaaccttatcttcctaaatagaagtccactcaaagttttttcacaaaaatgacattcacttgacttaatattgtccttccaataagaataacacgcagggtgttagagggcagttgttggactcctcttcagcaaataaaggagaccagttagagcttagcttggtctgcccaggaaaggaggaacgcagcttgctgacatggctaaggaatgccaattaatacattttaaaacccctatcatcttgcctgagacgtgtacatcttcccaggccctcaaagttcaatcagaaagtgtattcaactccattgtcatttcacccatagtggggaagtccatcgaggaaaaccatagggaaataaaatgtttttcagttattcatattagcacaatcaacccagagctcacggcacaaactaaataagttaacttgccagtgtcttgaatgaagacatttaatcaaagcatgcattttccaactttccagtagctttcaggacagttggttttggtgatcgttttttggtcttttattgttctcaacacgactggtttctcaccgcaggatttcaaacaaaatgagacaattaaaccacacctcgagcgaaggggcgcttaccttgcagataaacacaccggccttgccttctctaaaatgcggacacgtgcttttcccgcattagggggggtctcccggcgcgcgccccgccgccacctgttgaggaaagcgagcgcacctcctgcagctcaggctccgggcgccagccctgccccgcagccccagagcccgtcgcagctcgggtggtccctccccggcccagcgctcgccgcctgctcttcgccctgcaagtttcaagaggcagttatttctcgcagcctccgcgcttgcaactgcctcctggcgggggagtgggtgtccaaaaagccagcagctggagaaactgaaaagatcacaagcgacttaacgataagccccttcttccttttaaagaccgagaggagggtagaggggagtagtgcctgagcccacgtgaccgagccagggagcccgacggtctcaggaacgcccgacgccgcgcgtgacctctaagtgggagcaccctcgaaccgactcctggtccacccacaaggatagtggcgcacagatggcgctccccgcagccccagtctcagatttaagaggtctggagtagggcctgagaatatgcatttccaaccaggtcctgggggatgccgacactgatacagccagtctggggaccacacttcgaggatcacgtcctcagcccctgactcacataagtgtcattcagaacagatgtctgattctaaggagccagtggtgaaaccagagaggctttgggtttgtcaaatccccagcagcaaacgtaacctcgggccctggagtggcaaagccgtggactagaggtggagggagtgggttctcagctctcaagaggtcactgggaaggcctttcgcgttagatcaaagatcccaggtacttcctcgaactcacttgaagtggcaccggggagacctgtgcctccggccacggcgcccttctccgctggaggcacctgcccacccctcttctcgggcgaaggcccctcgcgccccctggtggcagccccagttcccccagcttaatggggtgttcccctcacccaccccagcaggagccccagggtgcgagactaggaccacagtcttaactggctttaaggcagctgttgctgatgaaaatgaaaaggaaagtagcatgtgacccacaggccattgtgagaaccccccagtgtcacatctgtgcctaattaatcatcaaaccatctactcaggtggcataagggacatggtttttgagggttgtgatccagatctctaatagaggaagacgagggggggcatttggagggaaagttttacagtaccagcctcagctgtttggtgtttagccaaaatagagagacgcaagtgtgctctgggttgataaagatgaggtccacaggtaatgaagacaggctccaaagatggagaagcatctgcttcatcagctaaacaatagctgtgaaaagtctccactgccccaccctaagtccaattttcattaaagctgagagtcctggtttctctcaggttgaaaggcagagtctccctgtccttgaggcagagaagttagtttggacgggaagagtgtgtcgctggcaaataactgcagcagacaacatgccaatctcagcctccctgtctcctgtcctggggtctctcaaagtacccagtccccatatgctcttcctccttgccaccttatggagaaaatgttaaatgatggtttaaaaaaatcagcttcatggccaggcatggtggctcaca

SEQ ID NO: 157 - DNA, 2378 bp, Homo Sapiens
atcctgagattttagctgactttttctgttctgtaatcagaggggactgtgatttgggccaatttcttcctcatgggcttcagtggagtcagctgtggaatggaacatcaattcccaccccataggcatgttgtgaggtttcgctaagaaacagccataaaagggccttaagagttatgatgattgttttaaccatttagtagggagggggcatccagcggtgttgctcccacgtaccgatgtcacgtggggcggggaggcggggcggagaacggagagcgtcctctcattctccacccccttcctccaagtccagcgcagggggaggtggctgcgactgactgaggggctagggaaggctggccaggggcgtgggcgtggctggggacggcttgggggtggggctgcgcaggaggctggaggagccccgcgggacccagaggcggggcgtcggcccggggaccactgctcctccggggcgtggctgcaggaggctggaggagccccgcgggacccagaggcggggcgtcggccggggaccgctgctcctccggggcgtggctgctgccgagcatctcccagctcagccgagcccgtgcccaggccacgctttgttccagccgccgcctcctctaccctacggcgtccggagccatccctcgcctgctcgctctctcctttcgcccactccctgcatctgggcctgcatcacctttgccaaccgctcccccgatcctgccgacactcctcccccaaacttctgaccggcacccttgcctggtacccttctctccattcctccccctccatcttctttccccgacccctctcgggtccctcttttcccaaaacccgggtctctccgcgtggccccgcctccaggccggggatgtcccccgcggccccgcgcccatggtcctgacgctgcttctctccgcctacaagctgtgtcgcttcttcgccatgtcgggcccacggcggggcgccgagcggctggcggtgcctgggccagatgggggcggtggcacgggcccatggtgggctgcgggtggcccgggcccgcgaaagtgtcgccgggggcaggcaccgaggtgcaggacgccctggagcgcgcgctgccggagctgcagcaggccttgtccgcgctgaagcaggcgggcggcgcgcgggccgtgggcgccggcctggccgaggtcttccaactggtggaggaggcctggctgctgcggccgtgggccgcgaggtagcccagggtctgtgcgacgccatccgcctcgatggcggcctcgacctgctgttgcggctgctgcaggcgccggagttggagacgcgtgtgcaggccgcgcgcctgctggagcagatcctggtggctgagaaccggtgagcgcgccaggccggggttgggagagcgccgcgtggtgtggacagttaagcgcctgcgttcccgtgtgccttgcgccgtgcctttgcctccctcacctctctgactgcctgcactacatctctgttaggggtcagcctgtctgtttcacagataaggaaactgagccttgggaaagtttagtgacttgctcagtggatcacagtgaactaagatttgctcccagggctagtggggtgaggaatggagttacaggacaggagtccgtccctggctctatggatggagatggcatcctattgccaattctccctctcccccgccccccaagcccacagctctccttcccaccggcttgggttcccgtctatgacaccttctctcgccatcatcccatccctctcccaatgagagaagaagggaaacacaacgctcagaaaagagggagggagacctctcctttccctcctccccaggctgtaaggcgtgctggcctgaggctgcttactcccttcttgccgccccaatccaacttctgctccatccttcattctggttcttgcaacaggccagacatgatctcattctgcagctgctgatgggaaacagttttctgctgggaggcatgggtgggggaagaggacaccggggtgcagagcccggcggggaccaggcagagtgtgtgttctctcccttcaccccacttagcaccaagatgccgcaagagggtcaaacagaggcctggttgccactcttgcatgtctcttgggatctctcctggagtatgaagacctccaaggactcactttccctcccttctgatgccagagcagaccaagctgtcacactccagtctcatgctgaagtctccagcttctcaagcttagaagagtttttggaagagtcactttcagctcatgcagctctcacaagtgtgaagggagtgggttgggggtgttttccttgccattttcgaaaagaaaaaaattacctggtg

SEQ ID NO: 158 - DNA, 2444 bp, Homo Sapiens
cagaccccaggtgtcctggagctctgcagatcagagaggctagtactggaagcctgggcccatgcccccagcagcccccagcccagggggcccccaaggctgaacagcaagctcaggatcatcttggtggtggggcaggctcagctcacactcagccttggcaagtagctccagaaactgctagtgacgttgtcttcaagttaaatctcaggaggaaaagaaaatacgaggacaacaaagagaggaagtggcctgggccggcctacccggtgggtcttgtcctgccccccaactaccctggctggccccacaggggccgccaaccacacaagccagttcctgtccctgaggacttggctcagggactctgggaatgtggtagacatggggtggccccaccaaatgcatccttatgggaacctgctccctgggagccatgaaaagagcgtggacttcgaggtggggccacaggaagtggtcaggtccatctcaggggacctgctgcccatccacactgctggccaggaaatggggggcaattcatgcctcctcagcaccttcagcactgggcggctcaaagaagggaagggactattctggggtcacacagcatgcagccagaggccaaggcatgaggaagtccttcatttccccacccccacccacctcagatcctccaaccggtttcatggcagcccagggtccagcggcatccaggatgctggtgggtagctgcacagcccaggccgcgggaggttggctgctctcacctaacaggcctatgtggccctgacccctacctaggaagctggggacaatggccaaggcgcctcccctctctgtgcctgtctgtccaggtgcagcatagacacagcacccctggggccaagagcacccagccagggctgcccccatgggtgggcagggcagtaaatgaatgagggacaggttgggaggtggccagccccctccagcccatggagggcacggggcaggagagctgggctgagccagcaggagcccagggagcctggtctctgccttcctatcctggaggaaggtgaggctgaacctccttccctccctccctccctccccgcccccactgcacgcagggctggctgggctccagctggcctccgcatcaatatttcatcggcgtcaataggaggcatcggggacagccgctgcggcagcactcgagccagctcaagcccgcagctcgcagggagatccagctccgtcctgcctgcagcagcacaaccctgcacacccaccatggatgtcttcaagaagggcttctccatcgccaaggagggcgtggtgggtgcggtggaaaagaccaagcagggggtgacggaagcagctgagaagaccaaggagggggtcatgtatgtgggtaagtggggcatggcagggtgggacagtgtggtggccaaagggtgagtgcccagttaccttcgccagaccttactccccagccccagggaggcattttgggagggggcgaggccctggctatcaaggtggggtctccagaccctggagcacccacaatgccctgtgcacacctatgtgtgtttgtctttggcctcctcggggcctctgggtgtcagagaccgcagacagggctggctacctgtctgtgcacgcacacacacattcccaagcataccagcctcccctgagcctggagcccctgaagccatgagcagcctgtgctcaggtggcccccaccctctccacacgggagcggctacagccaggtcacggatcccctccctccccagagagaaggggcaggctgggggatgaaacctaggctcagtgttccctcccccgcatcctctcctggcactctccagaggaggaaggggaggtcaagccaatgactcagctctggcccatcctgtcctgttgctgcttctgaggcccggccacacccgggcaggggctggaccctgggtctagccagtgtccctacctcaggcctgctctctcttgtcccccacattctgtcctgtccccttcccatccatccacttcttccagacacagcaggaagaggccctctgaaggggccgccggcccccagacaccatccttacccccccaccgaccccacagtttgtccagctgttctgttgtgtttgtcctgaccgcccccaacacctcgagggaggtctgggctgacagctccatttcctccccaggagccaagaccaaggagaatgttgtacagagcgtgacctcaggtgagaagccccagggccaggggacacatgggggataggacccctggggctcctgcatcctagtgctggggctcaaacctagagtcctgccttacccccaactggggtcccaagccctacagacccctgcagaccatgaggctaaactagggtgggcgtctccttacccccaccagcatcagaggtgcc

SEQ ID NO: 159 - DNA, 2001 bp, Homo Sapiens
gtaccacggtggccgtccccttctgttctgtgcagtggacttcctggctcctccttagccttggggcccccacagccctcggcttggcttccctccccatagccaggccctgggtaactccaggggaaagtgaccctgaggccccccacttctccccgtgtcctgcacaggccttgggctttcggcggtgctgtctgccgcagccccacgccttcctgggagagtggcccaggccccccttcctgagtgtgactgcgctgccgtctgcgaggcctgcgcgggtctcccccgggctgtccctgctgggatggggactggtggccccgggccacgtcctggatccggcttgctccttggtacaagcccgtacgggtcacggtcaggcaggagggcgggcggcggggtcccgggggcgccgagttcggggccgtgcggtccccaagagcaggctgtgcgtgtccctgttggagccccacgaaggcggcccagggccacccctgagggcgcgtgggcccgacccgcgtcccggatccagcttgcggccaggaatgcaggtgttccagggtgccaaaaggaaaacgcacaaggcctcgtcgaggagggggggtcaggaggggaccgggggtgggaagaacgcgggggagagggatggcagggtgcccgcccgagggaccgacacctccgcgagtggcaccccaggatgctgacgccggcgggggtgggggcccgaggggcggtcggggtcagggggcggccccaggggtagggccgcagcacgaggggccgcgtgaccccggcggtgaccgggtggggagaggccggcgccggggctgggagacggccgtgggtgggagggtgccccgtggggacgctcctgccgcagcgcccggccacgcgcgaggccccgccctcaggacgcgttcggcgggacggacccgcccaccccgcagccgcgcgcccgccgcgccgccttgtgggcgctgtagtcccggagtccgcgtgcgcggggccgggtccgggagccccagggcagccgccccgccgagtcgcaggtaccggtggggaacggggccacggggccgcgtgtcgggggctgcggggtgtctcggggccctggggtgagtgcggggcgcgggccgaggtttgcagggccctgtgaggtgagtgtgggggctggcgctggggtccgcggggccctggggagggtgcggggcgtgggccggggtctgcggtctgcagcctggggtccgcggggccctggggagggtgcggggcgtgggccggggtctgcggtctgcagcctggggtctggggggccctggggagggtgcggggcgtggccggggtctgcggtctgcagcctggggtctggggggccctggggagggtgcggggcgtgggccggggtctccgcgggggtcgcggtggcccgggcgcctggcagaaccgttgctgtgcagcgggtttcccgccgctcgctttccgccgcagcctgcgaatggggtggggagtcccggcccccagcctgccctccgcgtcatcctggggcgccaagtcccacccccgggtctggaggaaagcgtggatccggcgttcgcgcccaggcacgtgttgcttcgggacgggccagccggtgggtgaaccctgccagccacgcgtggggcgggcccctggcacatctccagaccattgtctcctgtgccagaagctttgtaggtgcaacttccccttggagcagctgtgggtgcggatccagcggagcaatcccgaggcgtctcagagagagcctggacagccgctggagcctttcccgagtgggtccttccaacaccgctacagcaggaaagccatccccctagggtcctgtccatcggaaactcctgtcctggggagtctggcctgcctggcctcaggacacaggccaactaagctggccccgaaatccagaatgcatccagagggaaggtgggataaagtccttggaggcgcctgttggccgcc

SEQ ID NO: 160 - DNA, 2002 bp, Homo Sapiens
tcctcaccccgaaaggagtcacctccttgcagttccccagttgcgaaaagaggaggaagttggctgggccgggggccgcggggggcaccctccgcagatggcgggacccccctgccggccatggcaaaaacgaggcttgtctctcccaccgcccccaaccttagtccttggcacattgttgaaagtaattgaataaaatcggaaattcgagaaggcgttcgttcggattggtgagattttgaggggagaaagaagcggggacttcgccggcaccagcggcgccccctcctcggccaccgttaacccccattccagagggcactgccccgccacccagcctaggtccccctgcgagagcctcgcgggcccgcgcagcctccgcgactcgaacagatcttcagtccttggaggaatgcctgtttctctaacaataaaaaattaaagaagcgctcataaatgccaagtcctctcgcactatgcggagtacagaggacaacgaccacagccatccctgaaccccgcccacggcacagcgccggagccggggtctggggcgccgcttcctggggggtcccgactctcagccgcccccgcttcacccgggccgccaaggggctgggggaggcggcgctcggggtaaccgggggagactcagggcgctgggggcacttggggaactcatgggggctcaaaggaactaggagatcgggacctcgaaggggacttggggggttcggggctttcgggggcggtcgggggttcgcggacccgggaagctctgaggacccagaggccgggcgcgctccgcccgcggcgccgccccctccgtaactttcccagtctccgagggaagaggcggggtgtggggtgcggttaaaaggcgccacggcgggagacaggtgttgcggccccgcagcgcccgcgcgctcctctccccgactcggagcccctcggcggcgcccggcccaggacccgcctaggagcgcaggagccccagcgcagagaccccaacgccgagacccccgccccggccccgccgcgcttcctcccgacgcaggtgagcccgccggccccggactgcccggccaggaacctggcggcggggagggaccgcgagacccagagcggttgcccggccgcgtgggtctcggggaaccggggggctggaccaacacacgtccttgggccggggggcgggggccgccttctggagcgggcgtttctgcggccgagctccggagctggaatggggcggccggggaagtggacgcgatggcaccgcccggggtgcgagtggggccgggcgcgcgcgggaggggaaaaaggcgcgggcgagccgccagcgcgaggtttgtggtgtcgccgatgtcccttcggggtactctagcgcagccgcctggctacttgacccactgccaccaaacgttttaaattcaccgaaagcttagcttcgaagcaaagctccgtttcgccggtgaagcaggaagccttcgctgcaggaactgacctttacctcttggagcggcttctgcagaaaaatccccgggcagagatttgggcggagtttgcctagaactaacgcggagccagccgatcccggcctaccccggggccaagatttcagtggcttccctttttcctaaacacttcacgagggtctgtttccgggctgtgctccccgcctagaaggaaaatttttaggacccttgttcgcgaagaggtggtgtgcggctgagacccgcgtcctcaggacggttccatcagtgcctcgatcctgccccactggaggaggaaggcagcccgaacagcgctcacctaactaacagctgctgagagctgggttccgtggccatgcacctgggactgccttgagaagcgtggtacggccgtgtccccatgtgaccttagagtccctttcgaaactgctgtgcacagtcggtcacaatttcagacactggtgagaagggtggaggaaccctctggggacagccaggcaaggtcg

SEQ ID NO: 161 - DNA, 2430 bp, Homo Sapiens
agttgcaactccaatgaaccgtgatcatgccactgcactccagcctaggtgacagagtgagatgctgtctctaaaacaaaaaacaaagtgaaactcttgattggcataattttgtttctctatcagctttatttttaaaaaaattacataagtaaaacatgtctctttagctattatctcttaaatcagattaccttctgtaataattctatgggaattattctacgggagcacagtcattcacgcttgtaaccccagcactttgggatgccaaggtgggaggactgcttgagcccaggactttgcaaccagcctgagcaacatagaccccgtctctacaataataataataataataaaaataaaaaaattaaccgggcatgatggtgtgtgcctgtagtccatgctacttgggaggctgaagtgggaagatcccttgagccaaggaggtagaggctgcaagtgagccatgatagcaccaccgcattcaagcctgggcaagagtgaggccctgtctcaataaaaacccgcaaaaaactttgggagcatcgtacggttgccagtgaataaggttataagataaaaaacaggatgctcaattaaattcagctaaacaagcgctgtatatttttagtgtaagtatatccaaaatattaatgaggtatacttacactaaaacaaatattcattgtttacctgaaatgcaaatttaaataggcatcctgtattttcatttgctaaacctggcaatcctaccagcactttaacatgaagccatgagggttgcctggattcatgctggtaggtaagcaccaatccattcggttgcctcagacaggacagaaaccattccctctaaaaaaatcgtttactttgacgataggtagcaacgaagcacggaagaatcttgaccctttgaggaacccgtaactgacgcaagtgccataaatgctactttgattgattctccgccccctccattcttctcttcctgcaattgctctatcacttcttccctctcaagtcccgccctttcagctacctccaactgctgaggaaccggttgcctaaaaggagccggcaaaagcgcctacgtggagtccagaggagcggaagtagtcagatttgactgagagccgtaaagcgcggctggctctcgttttccggataacgactacagctccgactgtcagtgccggccttcctcgtgtgaggggatctgccggacccctgcaaattcaatttctttcccattccgggcccttccctatcgtcgcccccttcaccttggatcatgttcaagaagtaaggacatgctgtggcctccatcggctgctcacaaaggcggtggggtgggggtggggaagagggcgagagctaagatcctctttctctctcccccgcccctgccatcctgactccctaaggttttctatagtactatgctctcactcccaacttgaacacttctttaagctttccatccgtagtccttaattgggtttcagtccctccactcccattgttttttctccttacccctctttctcttttgccccctcccccaattctgtctccattcctagggttctaccaatcacatccgtgcactgtgatttagaggcatattctctgtagctgagaggggagccctgcgctcactgccatatgtttattagttatgaactgaataaaggaaggcttgacttcctgggtcatgggagtgaaggagtctgggtgacaggaagcaagcggcctgtcatgcctattgcctagctgccagattaaccttgccttgaaaataacgattgccccataggctattcagtgtaaggaagacaaaaattccttgggaacctactagtgggtttgccttccagatttggtagacgcaaaaagcaaagggggaacatgggcaaaggaaggtgggttttgtgcatgaaattttgagcaaaaacgaatagggatcttagaaatcattattatcatcacttaaaaaaaatctcagcagattacatagcctagcaggggccgattttctatgttatgcttgggttggtcttttgtatctcaagaattgagggttttgttttctgatctcaggttttattattggtgggagcctgtgtttcttcctgggtagaattgaataagattttccaggaaaggcatttgtgtagctaattacagattatggtgcaaagtatgtctcatattcctccccctaaccccagctaattgctgtatacttgacagtttatttcaatattgtattaagacattggttttgtgctggacagagtaaaagggagatggtatttttttttaaaagaacaatttatttcataattaagtatctaaatacttggttgggaataaatgactaattagaacagtacctttaggtattctgatacctctacttagaaa

SEQ ID NO: 162 - DNA, 1123 bp, Artificial Sequence
  chemically treated genomic DNA (Homo sapiens)
ggggatttggatatttttattaggggtttgttggagagttggaatggggtaggtgttagaatttgtgggtaggaggttataggaagtttggaggttttgtttgtattttaggtagtaaaggaggtttggtgaggttttatttgtttattcgttcggtggttttgaggggtggggagggagtagttttagggggagtagggtgagaggttgggaacggtttagtggtggggttttagagttaggtgaaatcgaggtttttttagagtcgagtcggattcggaataggagtcgcggttttgcgtcggggcgggtgtggtttaggtagttatttggttatagatagatagtggcggttatatatattttcgtttttgtattcgtggttaggttggggtattcgcgcgttaggcggaatgtaggggcgttttgggttcgtatatttttttatgttcgatacgtcgttgttgttagagtttgtttcgtcgcgttttcgttttcggatatttgcgttttcgtttgtttttgggtttgagttcgttttagttttcgttttcgtaggatttgttgtaatttatttgttgttgtcgtagtcgttgttttcgttttgagtattgagttcgtttagttcgtcggcgtcgagcgtagggttcgtttttattttaggtttttcgcgcggttttattcgttgttatatatttagatattttattttgtttattttgttcgatttcgtaaggtcgttatcggagtttatcggggtttagggaagttttgtgattgtgatttagttatagatggagaaggttagatcgtcggttgattgattagtttaggttagttcggggaggttaagggttacgtttgaaagttcgtagtttattttttttttattgtagcggatattttttttgattttttattttagtatatgaattttatttagttgggttttagataggttttatagtatcgttatgtgagttttaggtatagtgagttagatgaagatatgggtttggtagagtggtttggggcggtttttgatttttatttttataatggaagagattgtagttttttgagagagttttgcgaattgagggaatgtattttggttgttttg

SEQ ID NO: 163 - DNA, 1123 bp, Artificial Sequence
  chemically treated genomic DNA (Homo sapiens)
taaaatagttagaatgtatttttttaattcgtagaatttttttaaaaggttgtagttttttttattgtaagagtagaggttagggatcgttttaggttattttgttagatttatgtttttatttaatttattgtgtttgaagtttatatgacggtgttgtggggtttgtttggggtttagttgggtggggtttatgtattggggtgagggattaagaagggtgttcgttgtagtagaaagaaggtgggttgcggatttttagacgtggtttttaattttttcgaattgatttaggttagttagttagtcggcggtttgattttttttatttgtgattgagttatagttatagggtttttttagatttcggtgagtttcggtaacgattttgcgaggtcgggtagagtgggtagggtgaaatatttgggtgtgtggtagcgggtggggtcgcgcggggggtttgggatgggggcgggttttgcgttcggcgtcggcgaattgggcgggtttagtgtttagagcggaggtagcggttgcggtagtagtaggtgggttgtagtagattttgcggggacggggattgggacgggtttaggtttaagaataggcgaaggcgtaggtgttcggggacgggggcgcggcggagtaggttttagtagtagcggcgtgtcggatatggggaggtgtgcgggtttagggcgtttttgtatttcgtttggcgcgcggatattttagtttggttacgggtgtaggggcgggggtgtatgtagtcgttattgtttgtttgtggttaggtggttgtttgggttatattcgtttcgacgtagagtcgcggtttttgtttcgggttcggttcgattttggggaagtttcggttttatttggttttgggattttattattgagtcgtttttagttttttattttgttttttttggagttgttttttttttattttttagggttatcgagcgggtgagtaggtggggttttattaggttttttttgttgtttgggatgtagatagggtttttaggttttttgtgattttttgtttataggttttgatatttgttttattttagttttttagtaggtttttggtgagggtgtttaggttttt

SEQ ID NO: 164 - DNA, 933 bp, Artificial Sequence
  chemically treated genomic DNA (Homo sapiens)
ttattaattttacgttttttaaattggtataattggtgataattttagagttatttgttatcgtattaaagtttgatagagaaggatgatttataggagtagttttgttgtgtttgaggattgtttgatatttgaaatgagtttcggattagtttttggttgaagtttatttaggtttttttcgcgaaggttaagttattagagttaattattatttttgttttattttgtttaaatatcgtcgtcggggttgataattgtatttagtgaatatttgtattggaattcggagtatttatttttttttatttgtagtttgaggaattttgattttttggtgatttttagaagtttttggacgtagttgttcgtgaggcggatttgttcgtcgtcggtttcggggttggacgatacgttcggagttttagggaggtcgcgaggagtttgtttttcggttaggaagtgatcgttgtttgcgtcgcggtttttaaggataatttttgggcggtaattatttttttttatttaggagattaatttttttgttgaggttttatttaaggttgtagtatttatttattgaggtttttaagaaatttgtttgttttaggaaattttttattgagatttgtttcgtattgttatttggtggtaagatataaaaatatattttttacggtgggattagattgcgcgtttgtttcgtttttatttcgtttttttttcggtggtggggtagagggatggtggaaagggaattaagagttagtttttagaagtgtaggtatttgggattgagattggagtggggttatatttttttttttgtttttagtattagttatagttttgttattgtgtttttagttttttttttttttgtagatattggttatttgtgaaattaattgtattttttttttgtattgtttt

SEQ ID NO: 165 - DNA, 933 bp, Artificial Sequence
  chemically treated genomic DNA (Homo sapiens)
aagataatgtaaagagggaatataattagttttataagtggttaatgtttgtaaagaggaaagaaattagaggtatagtgatagagttatggttggtattgaaaatagagaaggaggtgtagttttattttaattttaattttagatatttatatttttgggaattagtttttggttttttttttattatttttttattttattatcggggagagggcggggtgggggcggagtaggcgcgtaatttgattttatcgtggagggtgtgtttttatattttattattaggtggtagtgcggggtaggttttagtaggaggttttttaggataggtaggttttttaggaattttagtgagtgagtgttatagttttaggtggaattttaataaagaaattgattttttgggtggaggaagatggttgtcgtttaggggttgtttttaagggtcgcgacgtagatagcggttattttttggtcgaggggtaggtttttcgcggtttttttgggatttcgggcgtgtcgtttagtttcgaggtcggcgacgggtagattcgttttacggatagttgcgtttagaggtttttggaaattattaaaggattagaattttttaggttgtaggtggagggaggtagatgtttcggattttagtatagatgtttattggatatagttattaatttcgacgacggtatttgaatagggtggggtaagagtggtggttgattttgatagtttagttttcgcgaaaggggtttaggtggattttagttaagaattgattcgaagtttattttaagtgttaaataatttttaagtatagtaaggttgtttttgtgggttatttttttttgttaaattttgatgcgatgataggtgattttgagattgttattagttgtattaatttgaggaacgtggaattagtag

SEQ ID NO: 166 - DNA, 660 bp, Artificial Sequence
  chemically treated genomic DNA (Homo sapiens)
tttcgttttttgggtttaagcgattttttttttttagttttttgggtaagtgggattataggcgtttattattacgtttggttaatttttgtagagagagttttgttatgttggttaggttgagttggagtaatgttttttttattttatggagtttttatttattatagttgttagttttttttaattttaggaattttcgttttaagggaaataggatagatagcgttcgtgttttattttgtttatttttagatgaggaaatagttattaaggtttcgtgtaaattcgtcgtttatttaatagtttatattatttgttttgttttagtttttcgttcgttagttggtgtttttggtagttagtaggttcgcgggggtttcgttttagttaggttgggggtcgggggttgggttttaggaattttgttgttgttgttggggttgttttaagttagcgtggatagaagtttagagtttaggggtattttagggttgaggggtttaggttggtttttgggtttcgggtttagggtagttatttagggtgtgtgtttgtagttaattagggttgtggggaggaaggttttcggtattgttatagtttgtaggttttatgagtttggttttggggttgggaaggtgggagtttttggtttta

SEQ ID NO: 167 - DNA, 660 bp, Artificial Sequence
  chemically treated genomic DNA (Homo sapiens)
tggagttagagatttttatttttttaattttaggattaggtttatgggatttgtagattgtggtagtgtcggggatttttttttttataattttgattggttgtaggtatatattttgggtgattgttttgagttcgagatttaagggttagtttgagttttttagttttgaggtgtttttgagttttgggtttttgtttacgttagtttggggtagttttaatagtagtagtagagtttttgaggtttagttttcggtttttagtttggttgagacggggttttcgcggatttgttggttgttaggaatattagttggcgagcgggaagttggagtaaggtaagtgatgtgggttgttgggtgggcggcgagtttgtacgggattttggtgattgtttttttatttgaaaatgagtagagtgggatacgggcgttgtttgttttgttttttttggggcgggggtttttaggattaggggaaattgatagttgtggtaggtggaggttttatgaggtgagaggagtattgttttagtttagtttggttaatatggtaaaattttttttataaaaattagttaggcgtggtggtgggcgtttgtagttttatttatttaagaggttgagggaggagaatcgtttgaatttaggaggcggag

SEQ ID NO: 168 - DNA, 684 bp, Artificial Sequence
  chemically treated genomic DNA (Homo sapiens)
tataaaagttagttgggcgtggtgatgggtatttgtaattttagttatttaggaggttgaggtaggagaattgtttgaatttaggaggcggaggttgtagtgagtcgagatcgtgttattgaattttagtttgagcgacgagagagaaattttgttttaaaaaagaaaaaaaaaaagatattttaaaaggttaatttttacgaagggttaggggttttataggtgagtggagttttagtagtttttttagttttgcgtgtttatgtattggttttttttttggttttatatttagtgtttaaggggttgtagtgagacggggtttgggtcgcggagttgcgtttggttttgttgttttataagggtatcgtggttgttagtttgtttttgtaattgttgtagagttacgtagggttataggtggtggttggttgtgggatttattttttgtgtatgatatttttaggtattcggttgggtgcggttttggtagttagtagggtttttgtattagttggtttagtttgtgttagagggtatggtggttggtatttttttttatattatttttttggaaatttttttaggagttggcgatttttgagtaaaggatttttaaggttattttgtttttagaagggtgtgttttgtttattggtttgttttttatttatatttaggggg

SEQ ID NO: 169 - DNA, 684 bp, Artificial Sequence
  chemically treated genomic DNA (Homo sapiens)
ttttttagatatggatgaagagtaggttagtgagtagggtatatttttttaggagtagaatgattttgaggattttttgtttagaagtcgttagtttttggaaagatttttagaaaggtggtatagaggaaggtgttagttattatgttttttagtatagattgggttagttggtgtagaggttttgttgattgttagagtcgtatttagtcggatgtttagaagtgttatgtataagaagtggattttatagttagttattatttgtaattttacgtggttttgtagtagttgtagggataggttgatagttacggtgtttttgtggagtagtaaagttaggcgtagtttcgcggtttaagtttcgttttattgtaattttttgaatattgagtatagagttagggagaagattagtatatgggtacgtagagttgagggggttgttggggttttatttatttgtgggatttttggtttttcgtgaagattggttttttgaggtattttttttttttttttttttgagatagagtttttttttcgtcgtttaggttggagtttaatggtacgatttcggtttattgtaattttcgttttttgggtttaagtaatttttttgttttagttttttgagtagttgggattatagatgtttattattacgtttagttagtttttgta

SEQ ID NO: 170 - DNA, 615 bp, Artificial Sequence
  chemically treated genomic DNA (Homo sapiens)
ttgtttttaatttttttttttttaagtaagtttaaaatttttatgagtaaaagagtttaaagaggtaagaggatattggcgttttaattgttttttttttttttaattttttttttttttttttttttggttggttttatggattatttgggagataaatttatagtggtttagatttatatgatttagtggatgggtatcgtgaggaggtttttttaggaagtttttaatttggtgattattacggtgggttacgaacggacgagtgtagagtcggttagtcggattttttttaagcgtatttttttttttcgatatttggtttttcggagtcgggaattttttcgtcgtttttttgttcgtagttaatagagattttttttattgaggaaaaggtatatagattcggaatcgttagatattgtaagtttattatgttttaaaaaatattaaaataatattgaaagttttttttttttagtttttttagggagggggttttagatattaaatcggggaagttattttttttagaatagttgttagttaaagtttaggtattttttgttttttgtatttgggaaagaggtacgtagtaataattttttttttttg

SEQ ID NO: 171 - DNA, 615 bp, Artificial Sequence
  chemically treated genomic DNA (Homo sapiens)
taggagagaggaattattgttacgtgttttttttttaggtataggggataggaagtgtttgggttttgattgataattattttggaagaagtaattttttcggtttgatgtttgggattttttttttgggaggattggaggggaggagtttttagtgttgttttaatattttttaaaatataataagtttataatatttggcggtttcgaatttgtatgttttttttttagtgaagaaaatttttgttggttgcgagtagagaagcggcggaaggattttcgatttcgggaagttaggtgtcggaaggaggaagtacgtttgaagggggttcggttggtcgattttgtattcgttcgttcgtggtttatcgtggtggttattaaattgagggttttttggaaggatttttttacggtgtttatttattgggttatgtgggtttgggttattgtgagtttattttttaggtaatttatggggttagttaggaggagagggaagaaggaagttagggagggagagagtaattaaaacgttagtgtttttttgtttttttggatttttttgtttatggaagttttgggtttgtttggaggaaaaaaaattaaaaatag

SEQ ID NO: 172 - DNA, 550 bp, Artificial Sequence
  chemically treated genomic DNA (Homo sapiens)
tattagggatgttgtgagtttgttagaaggtgttgggggcgggtatagttatcgtttattattatttttaacggggtatcggtagttacgtggtcggaaggggtttatggcgtaatggttcggaaggtagtgatattatcgttttcgttttaagaattattcggttttttggggaagattggttgttggggagggttaaggggttaggtatttaggtttagcgattttacggtattttcgtcgtttttttaggtatttgttgtcgggttttggtaggggtttgtgtttgtggtagcgtacgtgggattggggtttttgtgtggttgtgtatttgggtttgtgtgcggcgtgagggagatttgtttcgtttattatggggattttggtttgtatgtgggggtttttgggttggtgagatttagggttgtagatgacgttatatggttgtgtgcgtatgtggttatgtgggtgtggttgtgtatgttgtgtgattgtgtgggttttggggtttttaggtttggttgattttttatttatttcgggtaagttg

SEQ ID NO: 173 - DNA, 550 bp, Artificial Sequence
  chemically treated genomic DNA (Homo sapiens)
tagtttgttcgggatgaatagaaagttagttaggtttgggggttttagggtttatataattatatagtatgtatagttatatttatatggttatatgcgtatatagttatatgacgttatttatagttttggattttattagtttaggaatttttatatgtagattagagtttttatggtgaacggaataggttttttttacgtcgtatatagatttagatgtatagttatatagaaattttagttttacgtgcgttgttataggtataggtttttgttagagttcggtagtagatatttggggaggcggcgagggtgtcgtggggtcgttaagtttgggtgtttggttttttggttttttttaatagttagttttttttaaagggtcggatggtttttaggacgggaacgatggtgttattgtttttcgggttattgcgttataggtttttttcgattacgtggttgtcggtgtttcgttgggggtggtggtgagcggtaattgtattcgtttttaatattttttgataggtttatagtatttttggtg

SEQ ID NO: 174 - DNA, 623 bp, Artificial Sequence
  chemically treated genomic DNA (Homo sapiens)
cgtttatgttttgtttttgttatttttttttagttgtttgagggttggttggtgtgagtttaggtttttgtagggtatgttaggagtaagttgtgatttggtttcgggttgtggagtttatgttattttttattgaggattttgggttgttttgtttcgcgtacgggtattcgggttttgatagttcgtcgggttttgggttattagaggttttgaattgcgttttggtgatagttagttttttgtatggggtacgtatagatttgggtttaggttggggtatcgagatttttatatttagtagtcgcggtgaggttggtttgtttgtttttcggggttatttttgtcgtgtcgtttttttttttttttttgttttttttgttggttgtttttttttcgttttttttgggtaggtacggtcgggtgggggtgaggttttggtaaagttttttttgttttttagtttagtggcgtttatatgtgacggtgcgggggtagtttcgtgaaaagtttttttgtgttttttttttaattaagaaatagtagtaggtttcgggggtttaggttttacgttttttttgaacgttggtcgtggttataggcggttggatgggtaggtttag

SEQ ID NO: 175 - DNA, 623 bp, Artificial Sequence
  chemically treated genomic DNA (Homo sapiens)
ttaggtttgtttatttagtcgtttgtgattacggttagcgtttagagaggacgtggggtttgggttttcggagtttgttgttattttttaattagggaggagatataaaggggttttttacgaggttgttttcgtatcgttatatgtgagcgttattgggttggaaaatagagggggttttgttagaattttatttttattcggtcgtgtttgtttagagagggcgggggaggagtaattaatagagggggtaggggagagggaggagacggtacggtagaggtggtttcgggaagtaggtaggttagttttatcgcggttgttggatgtggggatttcggtgttttagtttaggtttaggtttgtgcgtgttttatgtaaggggttgattgttattaggacgtaatttaaggtttttggtggtttagggttcggcgggttattagaattcggatgttcgtacgcgggatagagtagtttaggatttttagtggagagtagtatgggttttatagttcggggttaggttatagtttgtttttggtatattttataggagtttgggtttatattagttagtttttaggtagttgaggaaggatagtagaggtagggtatgggcg

SEQ ID NO: 176 - DNA, 682 bp, Artificial Sequence
  chemically treated genomic DNA (Homo sapiens)
cgcgttaggtttatgttttgtaattatataacgtgttttgttatttttgtaatttgtgttgtttttttttacgaaggtataggtatatttgtttagtttttggttacgtgggtatttggcgttgagtatttatttgttcgtgttgattgatgtttttttttagtttttattttttttttagaagttttttttttttgtttcgagaggggttgagttagtcgtggtttttttttatttcgattttagtggagataagtcggggaagtttttgggagttgcgcgggtgagtagagttgagattcggtatggttgtattggtcgggttattgtagggtgattggcggttcggtttgataatacgtttatttgagttatttttggtaaaggttattaggttttaggatggaatacgtatgggggaaatgtttttttcgtgatacgtttatttcgttttaaagtgagacgagggagggagggcgcggttgttaggtaatgaagtttagagtttattagagttgagggattgatgtgttgcgtatgggttgggttttatttttaggaagtttaggataaaattttgtttatgttagagggttttggttaaattttgttttgtgtgtttgggtgaagttttgtttttataagtggttttagtttttttagagtaagaattatttgtatt

SEQ ID NO: 177 - DNA, 682 bp, Artificial Sequence
  chemically treated genomic DNA (Homo sapiens)
aatataaataatttttattttgaaggaattaaaattatttgtgaagataggattttatttaaatatataggatagaatttggttaaagttttttaatatgaatagggttttgttttgagttttttggaaatgagatttagtttatacgtaatatattaattttttaattttagtaaattttagattttattatttggtagtcgcgttttttttttttcgttttattttagagcgaggtgggcgtgttacggaagaggtattttttttatgcgtgttttattttggagtttggtaatttttgttaaagatgatttaggtaaacgtgttattaagtcgagtcgttagttattttgtagtgattcggttagtatagttatgtcgggttttagttttgtttattcgcgtagtttttagaaattttttcggtttgtttttattggaatcgggatggaagggagttacggttggtttagtttttttcggagtagaaagaggaaatttttgaaaagaagatgggggttgggggaggatattaattagtacggataagtaagtatttagcgttaggtgtttacgtggttaggaattaaatagatgtgtttgtgttttcgtaaaggagggtaatataggttataaaaataataagatacgttatgtgattataaagtataggtttggcgcg

SEQ ID NO: 178 - DNA, 626 bp, Artificial Sequence
  chemically treated genomic DNA (Homo sapiens)
tagaggggatttttgtagagttgttttcgttttagggtttagtttgtgtttgatttaaatagtttttgtttttttttgaggatgagttgggtgtattttttttttgtaggaagatgagggttagagatggaggtttatgttagggttatagagtttggaattttttttggagttaaaatagttttgttttatttattttgcgtattttattttttgttttagtttcgtcgggttcgttttgtatgtaaggcggggttgggatttagggtttgagtttcgttttttggatattcggtttatcgtttgttaaaggttttgtggttggaggtttcggtttttttatttttttatagggttttagggtcgatttaggtttgcgggttaggaatgtgttaacggggtaatttgggttttgttggtttacgtaggtatttgtggattttgagaggggattgggtggggaggggcggggaggggcggggcggggcggtgtcgtagagtgtagggcgggcggggttaggttagtagggagtgagtttgtttggtcgtttcgtttcggagttattgtattgttggttgtagatataggttgtattatgaagttagtttttttgttttgggttttg

SEQ ID NO: 179 - DNA, 626 bp, Artificial Sequence
  chemically treated genomic DNA (Homo sapiens)
tagggtttagggtaggagggttggttttatggtgtagtttgtgtttgtagttagtagtgtagtggtttcgaggcgaggcggttagataagtttattttttgttggtttggtttcgttcgttttgtattttgcggtatcgtttcgtttcgttttttttcgtttttttttatttagtttttttttaaagtttataggtgtttgcgtggattagtaaggtttaagttgtttcgttagtatatttttggttcgtaggtttggatcggttttgggattttgtgggagggtgaggaggtcggagtttttagttataggatttttggtaggcgatgagtcggatgtttagagggcgaagtttagattttgggttttagtttcgttttgtatgtagggcgagttcggcggggttgaagtagaggatgggatgcgtagggtgaataaggtagggttgttttagttttagggaggattttagattttgtggttttgatatagatttttatttttagtttttatttttttgtaggaaggaggtgtatttaatttatttttagggggaggtaggagttgtttgggttagatataggttgagttttggggcggaggtagttttgtaggggttttttttg

SEQ ID NO: 180 - DNA, 694 bp, Artificial Sequence
  chemically treated genomic DNA (Homo sapiens)
taattattattattattatcgtcgttattattaatgtattttgtaaatttatatataatttgtaaatttttttttgaaataagagagagagggtaattgaaattatttaaggtagtatttggaatacgtaggttaaagattgagttagggagggattgttattatatgggttgtggggaggtagagtttttttgtgttttcgagagtattttttttcggggttttattagtttttaattcgtttttcgaatttttatttttttttttgttttgcgtttttggaaatttagatagcggttttattttcgtgatttatttagtaggaatgtgggagttttcgaattgttttagttaaagttttttaattttttttcggtgatgaatgggtgaggtttttaaatgaaatgtggaggtttttagttttagttcgcggtttttttttttttcggcgtaattatttttgtgtagaatatgttaagtgttttgtttttcgggaatttgtttcgtatgtaaatatttggtgattaagcgaggtttatttaattaagtattttgtaatgatttttaaattaaagaatagtggattaggagtttagttcgtgttggtgatgggaaaggtagttttatattataaggaggtagatagtgatttggtgtggggaggcggtcgggttaagcggggtagagtaggcgt

SEQ ID NO: 181 - DNA, 694 bp, Artificial Sequence
  chemically treated genomic DNA (Homo sapiens)
gcgtttattttgtttcgtttggttcggtcgtttttttatattagattattgtttgtttttttgtgatatgaagttgttttttttattattagtacgaattggatttttaatttattgttttttggtttaagagttattataaagtgtttaattaagtaagtttcgtttaattattaaatgtttgtatgcgaaataagttttcgggaagtagggtatttgatatgttttgtatagaaataattacgtcgaggagggggagggtcgcgggttgggattgggagtttttatattttatttgagggttttatttatttattatcgaaggggaattaaaaggttttagttggagtaattcgagaatttttatatttttgttggatgaattacgggagtggggtcgttgtttgggtttttaaaggcgtagagtaaggggagaggtgggaattcgagaggcgagttgggggttggtggggtttcggggaggggtgttttcggggatataggggagttttgtttttttatagtttatgtgataataatttttttttggtttagtttttggtttgcgtgttttaagtgttgttttagatagttttaattgtttttttttttttattttaggaggaggtttgtaaattgtatatgaatttgtagaatatattggtggtggcggcggtggtggtggtggtggtta

SEQ ID NO: 182 - DNA, 701 bp, Artificial Sequence
  chemically treated genomic DNA (Homo sapiens)
tggagtagattttttcgcgaagtatattgcggatggttgtatttggaattatatcggtatgtaggagggatagttttagggttagtagtttgtgagggagtttcggattcggttagagtaggagtttggtttggggttaagtttattttatggatttttttttttgtttttttaggagtagtttattgaaatgtgtttttcgtttatagaagtatcgtgatatatagacgttttatgatatattgtatatattaggggttttgtgttttttaggaagagggtttttatttgaagcggggttcgatggtcgttacgtgtcggtttatgttttttttggttttgtcgatgtttagggatatggagcgttgtagtaggttggagaagatttttatttggttagagttgtagtatttggcgattttaaatcgttgtattaggaattgagcgaaaagaggaagacgttgtggtggtggggttgagtcgggttaattttggggtcggtagagatagttgaggaggggttttgggttgattggtcgagtttgtcgaaggttttgggttcggttatttttattttaggaatagttttggttttttaggtggagtattttatagttttcgtgggggaataggtacgtacgtcgatttagatgtagtggggggttatttcggggggatagggtttgggttgatttgttttt

SEQ ID NO: 183 - DNA, 701 bp, Artificial Sequence
  chemically treated genomic DNA (Homo sapiens)
ggaagtaagttaatttaaattttgttttttcgaagtgattttttattatatttggatcgacgtacgtgtttgtttttttacgaaggttgtggggtgttttatttggggggttaggattgtttttggggtgggggtagtcgagtttaaggttttcggtaagttcggttagttagtttagaatttttttttagttgtttttgtcggttttagggttagttcggtttagttttattattatagcgttttttttttttcgtttagtttttggtgtagcggtttgagatcgttaagtattgtagttttgattaagtggagattttttttagtttgttgtagcgttttatgtttttgaatatcggtagggttaaggggagtatgaatcggtacgtggcggttatcgggtttcgttttaagtgagggttttttttttggggagtatagggtttttggtgtgtatagtgtgttatggggcgtttgtgtattacggtatttttgtagacggggaatatattttagtgagttgtttttggaagggtagggaagagagtttataaggtgaatttggttttaggttaggtttttgttttgatcgggttcggggtttttttataggttgttgattttggggttgttttttttgtatgtcgatgtggttttaaatgtaattattcgtaatgtgtttcgcgagaagatttatttta

SEQ ID NO: 184 - DNA, 698 bp, Artificial Sequence
  chemically treated genomic DNA (Homo sapiens)
taatgagtgtgtagatcgttgtgtgattaagtgggttagtgcgaaaggtggggggtagaggtcgggtgagttttttgggatgcgggtagtaaggatagggttgtggtgtgaattaagatatggtgttttttgtttttgttttttttttgtagggagaggggttattttggttttgagtatttttaattttatgtgaattacgcggacgggtggatagttggagggttagtagtagtagtaggagtttttgtttatttgggggtttcgagtgttggtatgatttgattttatggtgtgggcggggttcgggtttatttggaggagtaggatatgtcgtcggattatagttgggggtgttagatttaggttacgttatatttggtgttagagtttaagatttaggaatagaaattgtgtatggggttaagttggtcgtagtttaatatttaggtgattttaggtttaaagtatgtttttggttttcgagacgggtttcgtagttgtagtttatgttttggattttgttagttgggtttggtatatttttgttgtttgtttttgtttttaggtttattatttttcgttttgttattagggagttatttttagttagtttgttattgtggttatttttttgttttaagtttttttatggtttttatcgttaggattttttatgatttattttaggtaggaag

SEQ ID NO: 185 - DNA, 698 bp, Artificial Sequence
  chemically treated genomic DNA (Homo sapiens)
ttttttgtttaagatgagttatggggaattttggcgatgggagttatggaagggtttagagtaggggagtggttatagtaataggttaattgggagtagttttttggtgatagggcgggaagtagtgagtttggaggtaggggtaggtagtaggggtgtgttaagtttagttgataaggtttaggatataggttgtaattgcgaggttcgtttcgggggttaggagtatgttttgggtttgaggttatttggatattgggttgcggttaatttggttttatatatagtttttatttttgggttttgggttttgatattaaatatggcgtggtttgagtttggtatttttaattgtggttcgacgatatattttgtttttttaagtgggttcggatttcgtttatattatggagttagattatgttagtattcggggtttttaagtgggtagaggtttttgttgttgttattggttttttaattgtttattcgttcgcgtggtttatatggggttaaaagtatttaggattaaaatagtttttttttttgtagaagaaagataggggtagggggtattatgttttggtttatattatagttttgtttttgttattcgtattttagggagtttattcggtttttgttttttatttttcgtattggtttatttggttatatagcgatttatatatttattg

SEQ ID NO: 186 - DNA, 641 bp, Artificial Sequence
  chemically treated genomic DNA (Homo sapiens)
gtcgttattgatggtaatgaataggtattttttaaataggtgaaggatatatagggagttgttgttttttatggagaagtaggtgtaggtgttcgagagtttttttagtatcgttatggaggagatgatgatcggggttaggagggggttgagttggttttgtagggtagggagttttttttttttattttttgattgttcgaattttagttggagattttttttaaattttttattcgtttagtagaagagggtttttgtgtttttaatggttattaagatgtattttattttggtaaggagtatagtggagcgtttagatagttagaggtttagaaagggttgtagtagatagattttgtgattgttttatcggagagtagtataatatttttggttttgtaaatgcggatcgcggcgtgtatagtatttcgtttgcgggatagaaatgttttttgaattgaaaaagggggattataggtgtttgttaggttttttatatatatatatttttttatgtttgtgtttagaagtgagatatatcgttatttttgttttttgattggtttttttagttttttgagatagagttttttttttttatttaggttggagtgtagtggttcgattttggtttattg

SEQ ID NO: 187 - DNA, 641 bp, Artificial Sequence
  chemically treated genomic DNA (Homo sapiens)
tagtgagttaagatcgagttattgtattttagtttgggtaagagagggagattttgttttaaaaaattaaaaaggttaattagaaaatagaaataacggtgtattttatttttagatatagatatagggggatgtatgtatatggagggtttggtaggtatttgtagttttttttttttagtttagaaaatatttttgtttcgtaggcggggtgttgtgtacgtcgcgattcgtatttgtaggattagggatgttgtgttgtttttcgatgaggtagttatagagtttgtttgttgtagttttttttgaatttttggttgtttggacgttttattgtgttttttattaagatgaagtgtattttggtggttattgagggtatagaggtttttttttattggacggatgaggagtttgaagagagtttttagttgaagttcgggtagttagagaatgaggaagaagagttttttgttttataggattagtttagtttttttttagtttcggttattattttttttatgacgatgttggagaagttttcggatatttatatttgtttttttatggaaaatagtaattttttgtatgttttttatttgtttggagaatgtttgtttattgttattaatggcgat

SEQ ID NO: 188 - DNA, 675 bp, Artificial Sequence
  chemically treated genomic DNA (Homo sapiens)
atgtagagagaggtaggagggaggaaggagaatgagggggtggtagggagagtgatagagagggattgtgttatagatggtgatatggagttcgtgaaggagggagtaagtagggaggggttgagggtcggagagtaggtgtggggggtgggggcggggtgtaggttaagggaggaggttcggagagggagtaggaggggcgtagattttgttatcggggagattttagttatttacgttcgttggttttggtttttgtagggagttggagagaagaatgtgtttagtgtttaggggagtcgaggttgttagttagtagttagagtagttcgtgaggttattgcggtataggtttttcggggtagtagttgtgttttaaggtaaggttgggtgtggggttggttagttcgggagtttatagtttagttttgtagtcgggtatatcggtcgtagtacggattattggggaggtcgggtgggggttattagttttgggattggttatatttggagagttttaggtagggtgaggagtggaaggatagaatagagaattaatattttaggttttgagggtaaaattattgtgtagtgagaaaatagatttttattattttgtaattgataaaatttaaaatagaataataataattgaggttagtattttgtaatgta

SEQ ID NO: 189 - DNA, 675 bp, Artificial Sequence
  chemically treated genomic DNA (Homo sapiens)
tatattataaaatattggttttaattattattattttattttgagttttgttagttataaaatagtaaaaatttgtttttttattgtataatgattttgtttttaaagtttaaaatattggttttttgttttgtttttttattttttattttgtttggggttttttagatgtaattaattttaggattaatgatttttattcggtttttttagtggttcgtgttgcggtcggtgtgttcgattgtagggttggattgtggattttcgggttggttagttttatatttagttttgttttgggatatagttgttgtttcgggggatttgtgtcgtagtggttttacgagttgttttggttattggttggtagtttcggtttttttgagtattgagtatatttttttttttaattttttgtaggagttaaggttagcgggcgtgggtggttgaaattttttcggtaatagggtttgcgttttttttgtttttttttcgggtttttttttttaatttgtatttcgtttttattttttatatttgtttttcggtttttagtttttttttgtttatttttttttttacgggttttatgttattatttgtggtatagtttttttttgttattttttttgttatttttttattttttttttttttttttgtttttttttgtat

SEQ ID NO: 190 - DNA, 1023 bp, Artificial Sequence
  chemically treated genomic DNA (Homo sapiens)
ttggtttgagtgatagattggtgtaggtggttagtagtttaatttgtattgagcgtttattgggtttttatagcgattttgaattgtgtttttgtttatagtgattcggtcggttcgggtatggtagatttagtggcgggtatcgcgggttcggcggttaagagcgtgcggttatttcgttttagtgaggtttacgtggaggttatgaaggaggatttggtcgagtggtttaatgttttgtacggtttgggtttttcgggtggtggcgatggttttttgatagggttggttacgggtacgattttgtgttaatatgttaacgtcgtgatcgaggttgttcgtgtattggtagtcgttcgttcggttcgaggtgtggttttttaggcgtatagtgtagtgtttggtttttttatggcgcgcgataacgtggttatttttatcggttggtgtcgcgtggagttgggtgtgtcggaggtgtttatgtttgagattgaggatttggtgttgcgtaagaacgagaagagcgtggtgttgtgtttgttggaggtggcgcggcgtggggtacgtttgggtttgttggttttacgtttcgtgtagtttgagtaggagattgagcgggagttgcgtgttgtatttttagtttttaacgtttttgtcgttggggaggatattattgaaatcgttttcgtattagggatttttgttcgcggttttcgtatgatatttagcgatttgcgtaatttcgacgagttggtgagttttttagtattaggtgttagggattcgatagtatagttagtgtttgtaatttgtttttgaattttttagggtttattttgttatttgtagaatagtttgttttataaaaagagtgtatatgttgagtattaaatcgaggaatgtatatttgattttaaggaaatgggtagtttatagagagggaggtgtcggggagatgacgtagtttagtcgggtttgggataggatgcgggtttttggtacgatttttttttattttgtgtg

SEQ ID NO: 191 - DNA, 1023 bp, Artificial Sequence
  chemically treated genomic DNA (Homo sapiens)
tatataaagtgagggaagatcgtgttaggagttcgtattttgttttaggttcggttgggttgcgttattttttcggtatttttttttttgtgggttatttatttttttggggttaggtatatatttttcggtttggtgtttaatatgtgtattttttttgtggggtagattgttttgtagatagtagggtggattttgggaggtttagggatagattgtaggtattggttgtgttgtcgggtttttggtatttggtgttgggggatttattagttcgtcgaggttgcgtaggtcgttgggtgttatgcgggggtcgcgggtaggagtttttggtgcgggggcggttttagtggtgttttttttagcggtaggggcgttgggggttgggggtgtagtacgtagttttcgtttaattttttgtttaaattgtacgaggcgtggggttagtaggtttaggcgtgttttacgtcgcgttatttttagtaggtatagtattacgtttttttcgtttttgcgtagtattaggtttttagttttaaatatgagtattttcggtatatttagttttacgcggtattagtcgatgaaggtggttacgttgtcgcgcgttatgaaggagttaggtattatattgtgcgtttggaaggttatatttcgggtcgggcgggcggttgttaatgtacgggtagtttcggttacggcgttggtatgttggtatagggtcgtgttcgtggttagttttgttaggaagttatcgttattattcgggagatttaggtcgtataaggtattgagttattcggttaggtttttttttatggtttttacgtaggttttattggagcgaaatggtcgtacgtttttggtcgtcgagttcgcgatgttcgttattgggtttgttatgttcggatcggtcgagttattgtgggtaggaatatagtttaggatcgttgtggggatttagtaagcgtttagtataaattaagttgttggttatttgtattagtttgttatttaggttaa

SEQ ID NO: 192 - DNA, 1843 bp, Artificial Sequence
  chemically treated genomic DNA (Homo sapiens)
agttttgttgtttttcgtattttttggtaattttattgtatgaaattttttaaatttttttttacgttaagtgttaaaatagtttagtttaagtgtttttaggatttttacggagtttgatcgtaaagaggtgagtatatttaagtttttatttttagtttagttttttgtattagagttttagggttgattttgtagaggggaagtagtttttttttagaggtaggtatatagtaggtgtttaagtaataggatttttgttatttttatatttttggaagaatttgtttattttttattttttgttcgtttttaaggatcgttattttgaatttggtaaggcggttttttttatttttattgaatgaatgaggaaattgaggtagggtgcgggggtcgggaggagaggagtattgttcgaggttttcgggggaggttagggaaattttagttcggtaggttttcgggttttcggtttttagggttttttttttaatttattttcggtttttttaaggtttttatttacgcggacgagttttttagtttgtcgtagagttagtcgttttgggtttcgggtattaatatttttattacgtttttagcggagaagcgtagtagcgtgtggttggcgtttttcgagtgggagattagggcgcggatttttttggcgttttcgtcgtcgttcgggcgttcgttaaaggagttggagcgcgagttttgggcgttgtcgttgtagagcgaggttgtgggcgggagagcgcggcggtacgtgggtaggaagttttttttggcgtttgttttcgattttttttgttgtagttttattttcgcgtttttttcggtttttttgtcgtttcggggcgggggtatttataggtcgacggcgtgcggggtagggagcgacggtttggttttagttgggacgcgggtttcgcgtcgggttcggtgtcgtaggagtcggagtcgtgtcggttgcggggggagttgaatttttttaggggtttcgggggttgcgggggagatgggtaggggagggtggggcgggggggggggggggcggggtcgcgttttagtttagtttttatttttagttttaggcgtcggcgtaggggttttgggggcggagatcgggttattacgggggcgcggagaacgcgtcggggcggaagggtaggtcgggggatgtagcgtagagcgggagtttggggggtaggaggttttaggttgggggtttgaggtttcgggttttcgcggggggcggcgggggcgcgaacggcggcgggggcgtttagggttttattatgtttaggtaggtgggcgttaggcggttcgaggggtagggcggttttagcgcggggtttagtaggtcgggggagtgggcgcgcgacgggttgcggttggttttagattgttttttttatagtagtacgcggttttggagtatttttcgggtttggtcgggcggggatacgggggttagttaggttcgggcggttttttgaattttggggatttaaaatgatattttcgatttgagagtttaggttttattagttcgggacgatcggattttttagttggaaggagttagaagttagtttatcgtttaattcgtattttttatttttggtaaaggtatttttattttttacgaagagttttttttgatttttcgtttttcgcgttaatgtgtgtgttttgagcggggttgtttttatcgtttagttttaggggtaggggtggtatttaggtttggttatttaattattttatttttttttttgtagcgataggtttaggaatggcgtttagatagaaattacgattaaagaatttagtt

SEQ ID NO: 193 - DNA, 1843 bp, Artificial Sequence
  chemically treated genomic DNA (Homo sapiens)
gattgggttttttggtcgtagtttttatttaagcgttatttttgagtttatcgttgtaggaaggaggatggggtgattgagtggttaggtttgggtgttatttttatttttgaagttgggcggtgaggatagtttcgtttaaagtatatatattgacgcgggaagcggggggttagaggaagtttttcgtggaaaatggaggtgtttttgttaaaagtagagggtgcgggttggacggtgagttggtttttggttttttttagttagaaaattcggtcgtttcgagttggtagggtttgagtttttaggtcgagggtgttattttgggtttttaggatttagggagtcgttcggatttggttgattttcgtgttttcgttcggttaggttcgggggatgttttagaatcgcgtgttgttgtggaaggagtagtttgaggttagtcgtagttcgtcgcgcgtttattttttcggtttgttgggtttcgcgttggggtcgttttatttttcgggtcgtttgacgtttatttgtttggatatggtgaggttttgggcgttttcgtcgtcgttcgcgttttcgtcgtttttcgcgggggttcggggttttaggtttttagtttggagttttttgttttttaggttttcgttttacgttgtatttttcggtttgttttttcgtttcggcgcgtttttcgcgttttcgtggtggttcggttttcgtttttagaatttttacgtcgacgtttgggattgggggtgggggttggattagggcgcggtttcgttttttttttttttcgttttatttttttttgtttatttttttcgtagttttcgaggtttttgggagagtttagtttttttcgtagtcggtacggtttcggtttttacggtatcgagttcgacgcgaggttcgcgttttagttagagttagatcgtcgttttttgtttcgtacgtcgtcggtttgtgagtgttttcgtttcggggcggtaggagggtcgggagaggcgcgggggtggggttgtagtaggagggatcgagggtagacgttaggaagaattttttgtttacgtgtcgtcgcgttttttcgtttatagtttcgttttatagcggtagcgtttaaagttcgcgttttaatttttttggcgagcgttcgggcggcggcgggggcgttaggagagttcgcgttttggttttttattcggagggcgttaattatacgttgttgcgttttttcgttggggacgtggtggaggtgttggtgttcgaggtttagaacggttggttttacggtaagttggagggttcgttcgcgtgagtgggagttttggaggggtcgggggtgggttgagaagaaggttttgggggtcgggaattcggggatttgtcggattgaggtttttttggtttttttcgggggtttcggataatgttttttttttttcgattttcgtattttgttttagtttttttatttatttagtgggagtaggaagagtcgttttattaagtttaggatgacggtttttgagagcgggtagaggatgggggatgggtaggtttttttaaaagtgtggaaatggtagaaattttattgtttgagtatttattgtgtgtttgtttttgggaggaggttgttttttttttgtagagttagttttggaattttgatgtagggggttgggttgggagtaggggtttaaatgtgtttatttttttgcggttaggtttcgtggaaattttgaaagtatttaaattgggttgttttgatatttgacgtggaggaggatttggggagttttatatagtgaggttgttagaaagtgcggaggatagtagggtt

SEQ ID NO: 194 - DNA, 770 bp, Artificial Sequence
  chemically treated genomic DNA (Homo sapiens)
gagttttaggataggatgaggtttcgtagtagtagatttgtttcgtagttttttattttttatttttttaaagatttttatttgaatttcgttttttttaaattttttttgagttttttatttgattgttttagtttttttgaatttttagttaattttttggttttttttaagcgtttttttcgtatttttttgattatagtagttggtggtatagtgtgcgtatttgtgggtaggagttagtgaaggtttttttttttttttttaaagttttaggttttacggtttgttattcgtaaaattttaattacgagggggcgtttttttgttcgtcgtttcgtagggagattcggtttaggtcgttggagtttcgagttttagggtttttgtgatggaagggcgggcgcggtttttatatttggttttttagttttatttaaggaggattgttagatagtttcgttttgaggtgtaggaggtcgggtcgtttcggttattttgaatttattcgaagttagagggttcgagttcggggggcggtcgggtgtttatttttagagtttgtttagcgttttgttgagtttagcgttgtgtaggtgcgggtattggttcgcgagttttttgcgcgttgtttgagtttatattatgaaggcgtttatgggtcgtttgacgtgcggtttgtttttgttggcgtcgttgacgcgtacgggtatgggtattagcgtttagtcgtagtcgttgagtatttggttgacggtttcgcggatgta

SEQ ID NO: 195 - DNA, 770 bp, Artificial Sequence
  chemically treated genomic DNA (Homo sapiens)
tgtattcgcgaggtcgttagttaggtgtttagcggttacgattggacgttggtgtttatgttcgtgcgcgttaacggcgttagtaaaagtaagtcgtacgttaagcggtttatgaacgtttttatggtgtgggtttaggtagcgcgtaggaagttcgcggattagtattcgtatttgtataacgttgagtttagtaagacgttgggtaagttttggaggtgagtattcgatcgtttttcgggttcgggttttttagtttcgggtggatttagggtagtcgaggcggttcggttttttgtattttagagcgggattgtttggtagttttttttggatagggttggaagattaggtgtgggggtcgcgttcgtttttttattataaggattttggaattcggaattttagcggtttaggtcgggtttttttacggggcggcgggtaggaaggcgttttttcgtggttggaattttgcgggtggtagatcgtggggtttggggttttggagggagggaaggaggtttttattaatttttgtttatagatacgtatattatgttattagttgttgtggttaggaggatacgagggaaacgtttggaaagaattaaagggttggttggagatttagggaaattgaggtagttagatggagaatttaggggaggtttaaagaaaacggaatttagatgagagtttttggaagagtgagggatgaagaattgcgggataaatttgttgttgcgggattttattttattttagggttt

SEQ ID NO: 196 - DNA, 696 bp, Artificial Sequence
  chemically treated genomic DNA (Homo sapiens)
aaagggaggaagagggaggttagaaggcgttagtcgagttagcgaagtttttataggagaggaagtgggttaggggaataggaaggagggttgggttggtttttgggtttgtttttgtttcgggtatgtggtgagtttagttttttgtttgtaatgaggaggaggaagatgaatagtgtttttgttaattttggttttttcggtttatgggatgggagatgttattattttacgtatttattttagttagttttatataggtcgatcggggaggttttttttgagtttaatttgataagttttgaggagtgagttgtatttattttgttttgtttgggatagggtggggggtttttgggtagggggttgggggttgtaggagtacggtgggcggtcgttttgtatttgtttgaggaaggattatttttttcgttaagtttttgtttggttgtgttcgtttttagtttttgtgtttttttttaattcgttatttcgtaagggttggtttaagggtttttttttatagggttcgtattttttgtttaggttggtatgttgacgtgtttttagaatttggtttttattttttttttgtgtttttaggtttagagaaaatgaggggtttagtgagtttggggttttttagatcgtgacgtttttttttgttttttttgtgtaggtttgggaggcgatgga

SEQ ID NO: 197 - DNA, 696 bp, Artificial Sequence
  chemically treated genomic DNA (Homo sapiens)
tttatcgttttttaagtttgtatagaggaggtaggagagggcgttacggtttgagaagttttaaatttattgagttttttattttttttagatttggaggtatagaaggagggtagaagttaggttttggggatacgttagtatgttagtttaggtagggggtacgggttttgtgagaaagagtttttgagttaatttttgcggggtgacgggttagaaaaaggtatagaagttgagggcgggtatagttaagtaaaggtttggcggaggaagtggtttttttttaggtaggtgtagagcggtcgtttatcgtgtttttgtagtttttagttttttatttagggattttttattttattttagataggataaagtaggtatagtttattttttagagtttgttaggttgagtttaagggaaattttttcggtcggtttgtgtggggttggttgaggtggatacgtggaatggtgatattttttattttataaatcggaagggttagggttgatagaggtattgtttattttttttttttttattataggtagaaggttgggtttattatatgttcgggataggggtagatttagaggttagtttagtttttttttttgtttttttggtttatttttttttttgtgaaggtttcgttggttcggttggcgttttttggttttttttttttttttttt

SEQ ID NO: 198 - DNA, 1078 bp, Artificial Sequence
  chemically treated genomic DNA (Homo sapiens)
gttttttgttttagattgtggtttcggttaggaaaggaggcgcgagcgtgtggttggagaattttatattaaatattttggttttttgagtggaaattatattggtttaggaaaaggaagggggtgagaaggttggttggttggatggttgttttaagtaatgcgaaaagtaaatttacgaaattattttttgaaaataaagtgcgagggttgtgttattttggttgtagtagggtcgtatttgtttttttaattaatgtattattttttttagaaatagaataaagataaaagcggatgtataataaattattttagtttgttagcgttttgagagatgaaaaatttcgtttagagataggattgtgggtttataaaaaaattataaagtttaggtattttgttaagtttttagaacgttgtcgggtcgttttttttttttttatgtttagtcgtgcgtggttgtcgggatagcgtttatttcggtaggcgacgagttagtgtgggaatttaggggtcgttttagtttcgttggggtgttgagttgtagggagtggtttgtatcgattttttttttttttatttacgttatttaaaagtatattagaggggttttgagatgaaattcgtatattttttagagtttttttagattaatgcgcggatgagaacgtgtttattgcggggatgcgttcggttgcggatgtgaagaaattttttcgtaggagtagcgattttgttatatgggtttcgtatacggagttttcgttagttcggggtttcggtttcgggaagtatttgggaggcggcggggaaggttggttttggttggtttgatatacgtttcggggttcgttttttatgggttaggtttggtgttttatttattattgttgggaagttatggaggttttttaagggtgatttgcgaggtgggggtgtttgtttttttttttgaggtaagaggggtttggttttatcgtttgtcgtaaaaaaggaggagtagtttaggtttgtacgtggttttgagtagttcgtcggaaggttttagtttggtttttttatttcgttttttttt

SEQ ID NO: 199 - DNA, 1078 bp, Artificial Sequence
  chemically treated genomic DNA (Homo sapiens)
gaagggaaacggaataaaaagattaggttggaatttttcggcgagttgtttagggttacgtgtagatttgagttgtttttttttttttacggtaagcggtgggattagattttttttattttaagagggaaggtaggtatttttatttcgtaggttatttttgagaagtttttatggttttttagtagtggtaggtggagtattaggtttggtttatgaaggacgagtttcgaggcgtgtgttagattagttagggttaatttttttcgtcgttttttaggtgtttttcgaggtcgaggtttcgggttggcgggggtttcgtgtgcggggtttatatggtagggtcgttgtttttgcggaggggtttttttatattcgtagtcgggcgtattttcgtaatgggtacgtttttattcgcgtattggtttgggaaggttttgagaagtgtgcggattttattttaaaatttttttagtgtgtttttgagtggcgtgaatgggggagaggggagtcggtgtaggttattttttgtaatttaatattttagcgaaattgaggcggtttttgggtttttatattgattcgtcgtttgtcggagtgagcgttgtttcggtagttacgtacggttgagtatggagaaggaaagggcgattcggtagcgttttaggggtttggtagagtgtttgggttttatggtttttttgtaaatttataattttatttttgggcgaggttttttattttttagagcgttggtaggttgaaatgatttattatgtattcgtttttgtttttgttttatttttggaaaaggtggtatattggttagggaagtaggtacgattttgttgtagttaggatggtatagttttcgtattttgtttttaaaaggtggtttcgtgggtttatttttcgtattatttgaagtagttatttagttaattaatttttttattttttttttttttttgagttagtgtgatttttatttaggaaattagggtgtttggtgtagagttttttagttatacgttcgcgtttttttttttgatcgaggttatagtttgaggtaaagggt

SEQ ID NO: 200 - DNA, 1245 bp, Artificial Sequence
  chemically treated genomic DNA (Homo sapiens)
agttattgttagaggttttagtttttttatttttagtggaattggtaaggtttttttttgtttttgtgaagtttaaaatggtatataggaaaggattaatagagatgaattattattattattattattatgttagttattatttttattatcggatagtgtttagaagttgaatttttttgtaatttgagggtataatgaggttttttagagaattattcgtgggtgggggagggggaggcggaaatttgttgaaaattttgttgttatttgagatttagtgtatttttttaaaatgcgtgtgatgaggacgtttttttttttggtaggcgtttgtggtagtggagatattagtgtgttataagattttttttttttttcgcgagtggtggtttaggttggggagtagttttgttttttttgtttaatatgcgtttttttaatttttagtattttcgatcgcgaggattaggttagtttacgggtcggtagtttggcggcgttcgagaaacggtaggtcgagaagaagaaagagttgatgaaggcgtagagtttgtttaagattttagttttttaggcgcgtaaggttatgattgagaagttggagaaggagggcgcggtcgggtgagttgtagaagtgggttgggtagtggggggcggggcgtgataggtagtggggggcggggtttgatagttggttcggtagaggcgggaagatcgcgcggttagatttgtggtgtaaaggttcgaaggttatggaaggcggggtttgggatttattgggtgggtttatcgaggtatgttttttatagtcgtgtgatttggttttgatatcgtttttatagtagttttggcggatttcgcgtagtcgtgtagcgatttattagtttcggggtttttaacgttaatagtattaagtagatgttgttggattggtgtcgagttaagattcgcggttacgaggtgagtttcgggaggttagggggtttggaggtttttttagattttagtttaatattttttttttagtagagtttttattatttagtatattttttgttattgtgtggttttatagggaatatggaaaggtttttggggtgaggaaattgaggtttaaagaggatataaggtaagttttagattttagaattagtgatgaagtaatagggttttttgggtggtgggtagggtttaaggtcggattttatttttggagttttttttttgttgttttgtaggagg

SEQ ID NO: 201 - DNA, 1245 bp, Artificial Sequence
  chemically treated genomic DNA (Homo sapiens)
ttttttatagagtaataaggaggggattttaagagtgggattcggttttgaattttgtttattatttaagaggttttgttattttattattgattttggaatttagggtttgttttgtgttttttttgagttttagtttttttattttaagagtttttttatgttttttgtgaggttatatagtggtaggaagtgtattgggtaataggagttttgttaagaaggaggtgttgagttggggtttggggaggtttttaggttttttggtttttcggggtttatttcgtagtcgcgagttttggttcgatattagtttagtagtatttgtttgatgttgttggcgttggggatttcgaagttggtggatcgttgtacggttgcgcggggttcgttagggttgttgtaggggcggtgttaggattaggttatacgattataaggggtatgtttcggtgggtttatttagtggattttaggtttcgttttttatgattttcgggtttttgtattatagatttagtcgcgcggttttttcgtttttgtcgggttaattattaagtttcgttttttattgtttattacgtttcgttttttattgtttagtttatttttgtagtttattcggtcgcgttttttttttttagttttttaattatggttttgcgcgtttgggaggttgaggttttgggtagattttgcgtttttattagttttttttttttttcggtttgtcgtttttcgagcgtcgttaggttgtcggttcgtgggttggtttggttttcgcggtcgaagatgttaggggttggggaggcgtatgttaggtagggagagtagggttgttttttagtttggattattattcgcgaggaggagggggggttttgtagtatattagtatttttattgttataaacgtttgttagggagggaggcgtttttattatacgtattttagaggagtatattgagttttaaatgatagtaaggtttttaataggttttcgttttttttttttttatttacgagtagttttttgagaagttttattgtatttttaagttataggggagtttagtttttgggtattattcgataataaaaatgatgattagtataataatagtaataataataatttatttttgttgatttttttttgtgtgttattttaaattttataagagtagggaggggttttattaattttattaaaggtgaggaaattgagatttttggtagtaatt

SEQ ID NO: 202 - DNA, 691 bp, Artificial Sequence
  chemically treated genomic DNA (Homo sapiens)
atggggttttggtagggttggggattttatgttgggtggaaattttaagaagttagttaagggtttgtaggaggggttttggtagagagaagtattagaatgtaagggtaggtaaagttatttttatagaaggtgattgtgggttgagtttgaggttttttttagatggggaagagagaatagtatattttttttgtttacgtttcggtattttatttaagaattagttgttcgttagttatttgttatcggagatagttttgttggcggtttttagaaaaagcgaagtagttagaggatgaatcgttattcggggaatatatttgtatataggataggaatggatgggagtggggagcgttttggggttattgtttaaacgttatttttatggtttttaagatttgtattagtagtttagtcgttgatgaattataattttcggataagttgtagaggtttttttcgttttatgtgtttatttttgtcgtttatattgggggatttatgttttttggggttaggaggagaaaataatgagttattggggataagagaaaaataaaaatgttttgtatgtgtaaaattatttaaaatggaggtttttagaggatatttaaattttagttaattagttagaaagggttttgttgggggtatattttatgtgtttttgttatttttggatgta

SEQ ID NO: 203 - DNA, 691 bp, Artificial Sequence
  chemically treated genomic DNA (Homo sapiens)
tgtatttaaagatagtaaagatatataaaatatatttttagtaaaattttttttggttagttggttgggatttgagtgttttttaaaagtttttattttaggtggttttgtatatatagggtatttttgttttttttttgtttttagtgatttattattttttttttttagttttaggaagtataaattttttagtatgagcggtaggggtgaatatatggaacgaggggggtttttgtagtttgttcgagaattataatttattagcggttgagttgttgatgtaagttttggagattatgaggatggcgtttgaatagtagttttagggcgttttttatttttatttatttttgttttgtgtgtaggtgtgtttttcgaataacgatttattttttggttgtttcgttttttttgaaagtcgttaatagagttgttttcgatgataggtgattaacgggtagttgatttttgagtgagatatcgaggcgtgggtaggagaggtgtgttgtttttttttttttatttgggaagggttttaggtttagtttatagttattttttgtgagggtggttttatttgtttttgtattttaatgtttttttttgttagggttttttttgtagatttttggttggttttttggggtttttatttaatatgggatttttagttttgttagaattttat

SEQ ID NO: 204 - DNA, 699 bp, Artificial Sequence
  chemically treated genomic DNA (Homo sapiens)
agtagtgatggtagtgttttaaggaatttgggtttaggtattgattttgaggagttggcgatgtaggtatggggtatttacgtagggttttagtaatttttgggaaggagaattcggggtttgaaggtgaggcgagtggatttaggattggataatttgggggttttagggaagtgagatttgaagtagttaggttatatcgggttttcggtagtaggtagagggtttttcgtgggaagtttttggtcgttggtatttggtagttgttttttgtagaggtattgggcgtagagttgtgtttatcgttttgaaatttgcgacgtttagtagttttgttttagttttattatagtttttgaacgtgcgtcgtattggtttttagtagtgtataattttgggttgaatacgtagtagagtagagtaaaaagatggcgttttcgcgtcggtttttttttagatataagataagaaggggtgaggagggagtttttgaatacgagggttggggtgggttttttttcgtttcgttttcgtttcgtttagttttgtttcggttttattttttaatttgtttcgttggttttgaatcgaggagggagtttgttagaattcgttataaagatgcgtattcgttttttgattattgtgtgggttgtttaaaaacgtgtattatattagttattttatttatattttttt

SEQ ID NO: 205 - DNA, 699 bp, Artificial Sequence
  chemically treated genomic DNA (Homo sapiens)
ggggaggtgtaaatgagatggttgatgtaatatacgtttttaaatagtttatataatggttagggggcgggtgcgtatttttgtgacgagttttggtaggtttttttttcgatttagagttagcggagtaggttgggaggtgaagtcggagtagggttgggcgaggcgggggcgaggcgaggaggagtttattttaattttcgtgtttaaaagttttttttttatttttttttgttttgtgtttagaaagaagtcggcgcggagacgttatttttttattttgttttgttgcgtatttagtttaaaattgtgtattgttggaggttaatgcggcgtacgtttaaaagttatgatgaggttggaatagggttgttaagcgtcgtagattttaggacggtgagtatagttttgcgtttagtgtttttgtagggagtagttgttaaatgttagcggttagaaattttttacggggagttttttatttgttgtcgaaggttcggtgtgatttggttgttttagattttatttttttgggatttttaagttatttagttttgggtttattcgttttatttttagatttcgggtttttttttttaaaggttgttggagttttgcgtggatgttttatatttgtatcgttagttttttagggttagtgtttgagtttaggttttttaaggtattgttattattgtt

SEQ ID NO: 206 - DNA, 494 bp, Artificial Sequence
  chemically treated genomic DNA (Homo sapiens)
ttttcgttcggagaggggaacgtgaaggaggtgaggagggagtagtgtaggaggatttgggttttttttttttttttttttttatttttcgagggtttaattagttggtgaaggtttttaattagtaaaggaggaagtagtcggggtcggtgagggtgaggtcggtagttaggtaggaaggtagtaggaggaggaggaagcggaggcggtattttttgagaggcgtatgtttagtgagtcgtgaagatggtagggttggcggagcggtcgtcgtatttgattttttttttttttttaggatatgtgatggcgtttagtttggagttgggataaggtttttgtagtcgatatttttataggagaagttttgggattggggtagtagtaaggcgtttatgttatatatcgtttttcgaggaaacgcggtttagcgattttttgattgcggattttgtgggaaatttcgttaataaatgttaaagatatatttcgag

SEQ ID NO: 207 - DNA, 494 bp, Artificial Sequence
  chemically treated genomic DNA (Homo sapiens)
ttcggagtgtgtttttaatatttattgacggggttttttatagggttcgtagttaaagaatcgttgaatcgcgttttttcgagagacggtgtgtggtatgggcgttttgttgttgttttagttttagagttttttttgtaggggtgtcggttataggaattttattttagttttaaattggacgttattatatattttaaaaaaaggggagagattagatgcggcggtcgtttcgttagttttgttatttttacgatttattgagtatgcgttttttagaaggtgtcgttttcgtttttttttttttttgttgtttttttgtttggttgtcggttttatttttatcggtttcggttgtttttttttttgttggttaagaatttttattagttggttaagttttcggagaatggaaaagggaaagaaggagagatttaaatttttttgtattattttttttttattttttttacgttttttttttcggacggaga

SEQ ID NO: 208 - DNA, 1362 bp, Artificial Sequence
  chemically treated genomic DNA (Homo sapiens)
aattattagagtaaattatttaatttatttgtgtatatatttttagattttttatatacgttgtaaaaaaaatagatcgtattattttgttggttttttaagttgttttttgtaagtaatgtattgtgagtatttttttatggttataattattatatataaaagaaaaaaataggttttataataaatagttaaaagatattttgatttgaaattaatgaagaagggttttttggttttgtttttgtattttttgtataatgttgaaattggtaattttgtagtaaatattaatattttttgaggatttgttgaagatgaatgtgataaaaaataagaaattttattttttttattatatagttttaattaatatcgttggttttgtttgagattaagtaaacgttggttttagtgtttaagtttttttttggggttttacggttttgggtttggtatttttgttgggtatttcgtagggttttcgagacgtgtcgcgatttacgggattttacggaagtttttttttatcgtaagttttttggaggtagggaaaggagtcgggattcgagtttagttggttttaagagaagggcggtggttcgtacggcgcgggcggttttgtttattgtagttggggagatgtaggttggtcgttcgggcgcggcggcgggaggggttgcgggtttgtggggcggggtggtggtttcgtgttgttggatttttatggagatgattttgtttttgttttattttttttcggagttgcggttcgagttggcgtattcgatttttattgcgcggttttaagaggagatagtcgttattgtatcgggttttatagttattttttagaggtaaagttcgtggtttttgagtcgttagttttttttttggggtcgttcggggtatatcgtttgggtcggtttagttttttagtgtagtcgtttaggaagattttaagtagcgttgaggggcgtagggtttttttttcgcgattttggagttttttagtagttttggaattaattaagattttgaagaggttttggggagaaataaaatttacgcgtagggtagggtttgtatcgggttatgttaagtaaatttttattttttttagagaattgatttgggatcgaagtaaagtttttgaatattttggaaaacgttgatttttataggtttatattaattgtttttttttttttgatagttttttttttttttttttttatggggtttaaaaatgtagggagtagggtgggggttgggttgggggaatgagggaggaatataaaaaatttattgtgaatataggttttggttataaggatagttttaagagttaatatgttaaga

SEQ ID NO: 209 - DNA, 1362 bp, Artificial Sequence
  chemically treated genomic DNA (Homo sapiens)
ttttagtatattaatttttagagttatttttataattaagatttatatttatagtagattttttgtattttttttttatttttttaatttagtttttattttattttttatatttttggattttataggaggaaagagggagagaattgttagaaggaagaaggtagttggtgtgaatttatgaaaattagcgttttttaaagtgtttaagaattttatttcgattttaaattagttttttggaggaggtaagagtttatttggtatggttcgatgtaaattttattttacgcgtggattttgtttttttttagagtttttttagaattttggttaattttagagttgttaagggattttagggtcgcggagggagggttttgcgttttttagcgttgtttagggtttttttgggcgattgtattgggaaattaagtcggtttaggcgatgtgtttcgggcggttttaagaaaaagattagcggtttagaagttacgggttttatttttaggaagtggttatgaggttcggtatagtggcggttgtttttttttggaatcgcgtagtgaaaatcgagtgcgttaattcgggtcgtagtttcggagaggggtggggtagggatagggttatttttatagggatttaataatacggagttattatttcgttttataggttcgtagtttttttcgtcgtcgcgttcggacggttaatttgtatttttttagttgtagtgagtaaagtcgttcgcgtcgtgcgagttatcgttttttttttgaggttagttaggttcgggtttcggtttttttttttgtttttagggagtttgcggtgggagaaagttttcgtggggtttcgtgggtcgcggtacgtttcggaagttttgcgaggtgtttagtagaggtgttagatttaaggtcgtgggattttaagaagagatttggatattgaagttaacgtttgtttgattttaaataaagttagcgatgttaattaaggttgtgtgatgaggaaagtggagttttttattttttgttatatttatttttagtagatttttagaaaatgttaatatttattgtagaattattaattttagtattatataggaggtataaaaataaaattaaaaaatttttttttattagttttaggttaaaatgttttttaattatttattgtgaagtttgttttttttttttgtatgtaatagttatggttatgaaaagatgtttatagtatattatttataaaaagtagtttagaaaattagtagaatggtacgatttattttttttgtaacgtgtgtaagaaatttgggagtatgtatataaataggttaaatggtttgttttggtagtt

SEQ ID NO: 210 - DNA, 1362 bp, Artificial Sequence; identical to SEQ ID NO: 208
  chemically treated genomic DNA (Homo sapiens)

SEQ ID NO: 211 - DNA, 1362 bp, Artificial Sequence; identical to SEQ ID NO: 209
  chemically treated genomic DNA (Homo sapiens)

SEQ ID NO: 212 - DNA, 659 bp, Artificial Sequence
  chemically treated genomic DNA (Homo sapiens)
atatatttttttatagtttttgttttttatttaagtaggttttagggtttatggtaagatgatttttttggggagaaagagtttgagatttagaaatttaatttgtataatgaattttggtttttttttttttttagggatttgattttttttttttttttttttttttttttgttataggattttatgttttattttagcgtagtttggttgattgatgttttattttttatatgtattgatatgacgtgtgattgtttaggtatagttggagaagttggagaagatagtattttatttttttttttagaattaattattgattggagggttaatgttttaattttgatgtgatttagtaggttatgcgagggttgtttttaataggagtagtgtttttttttttttgcgtagtttttgatttagttcggtatgttttttggtgatattgttgttcgttatatggtttagtgttgtaaatatttttatataattatatttgtttatttaatttttaagtgtttttttaatagagaaaataattattttatgagtttaaaatttgtaaattttttgtattttttaaaagattttttttaattataaaaattttttttatgttttattttaatattttataaattttgtttagtttgttg

SEQ ID NO: 213 - DNA, 659 bp, Artificial Sequence
  chemically treated genomic DNA (Homo sapiens)
taataagttaaataaaatttataaagtattagaataaaatataaggggaatttttgtaattgaagaaagttttttagaaaatataagggatttgtagattttgagtttataaagtgattgttttttttattaaaaagatatttaaaaattgaatgaataaatgtaattatataaaaatatttgtagtattgggttatgtggcgagtagtagtgttattaggaaatatgtcgagttgggttaggaattgcgtaaggaggaggagatattgtttttgttgaaggtagttttcgtatgatttgttgaattatattaaggttgaagtattggttttttaattaatgattagttttgggagaggggatgaggtgttgttttttttaatttttttaattgtgtttgaatagttatacgttatgttagtgtatatagagaatgaagtattagttaattaaattacgttggagtggagtatagagttttgtgatagaagaggaggaggaagagaaagaagaattagatttttaaaggagggaaaaagttaggatttattatataaattaaatttttaagttttaggttttttttttttaaggaaattattttgttatgagttttagggtttgtttgaatggagagtaagaattataggaggatgtgt

SEQ ID NO: 214 - DNA, 518 bp, Artificial Sequence
  chemically treated genomic DNA (Homo sapiens)
aggttgaggtaggagaatcgtttgaattcgggaggtagaggttgcggtgagcggagatcgcgttattgtatattagttagggaaacgagagtgaaatttcgttttaaaaataaataaataaataaataaaaaacgttttagtaatagtgtttttaagaatttggttttttagttttttggtagagaagatttattgttgtcgttagtttttaagatggtatttgttggaggcggtaggtagaggttttaagtgtggattttaattttcgtggggattgaatttttgcggttgttgtttgtttaggtacgtttgttttttatgaattttttttatttatagggttttaaattttatgtcggcgggaggaggaaggagattgggtataatttattagattttcgattgtaagagttggaggtcgtttgcgggtttatttgtattcgggtttgtttttatttttttagaatgtaaattttttgagggaatgtgtcgtcgttattttttagttttttgagtg

SEQ ID NO: 215 - DNA, 518 bp, Artificial Sequence
  chemically treated genomic DNA (Homo sapiens)
tatttaaaggattgaaagatggcgacgatatatttttttagaggatttatattttggaagggtggggataggttcgggtatagataagttcgtaggcggtttttagtttttatagtcgaaagtttgatgagttatgtttagtttttttttttttttcgtcggtatgaggtttggggttttgtggatgaaggaagtttatgggaggtaaacgtgtttgggtaagtaatagtcgtagagatttagtttttacgggggttagaatttatatttagggtttttgtttatcgtttttagtaaatgttattttgaggattagcggtagtagtaggttttttttgttagagaattggaaggttaggtttttgagggtattgttattaaggcgttttttgtttgtttgtttgtttgtttttgagacggagttttattttcgtttttttggttggtgtgtaatggcgcgattttcgtttatcgtaatttttgtttttcgggtttaagcgatttttttgttttagttt

SEQ ID NO: 216 - DNA, 675 bp, Artificial Sequence
  chemically treated genomic DNA (Homo sapiens)
gttgattttacggttaggtttttttttacgttttcgttattttaaatgcgggtatcgcggcgttaaatttgttttttttattgttgttaataatcgtagtttggtcgaatttagtgatttatttttgttttaattttttttggtttttcggtagcgtttaacgtgtgcgatttttttttttttttgtttttagtttttttcgggattcgcgaggcgtttttttttttattttttttttaggagtgtgtttttagtttcgtatttgttttttttatttttagtgtattttcgtcgtaggtattattttttgatttgttatgttattcgtttttttttttattgtatttacgttttattatttgttttggttcgtataatgttagttttgtaaggggtttttttaaggttttatttttaattgattaatgtcgaggatggggagtaatgcgtgtattagagggggttgggtatacgtaggtttgttgttggatggaggagaggtagtattttttgtatgtttgggtggtttttatttttaggtttgcgataagtattttttatttttttattttttgacggagttagttttatttattacgtggacgtgggtgttgtttgtggattaaggttagtgttttgttggttttttttattgtttggtattagtattatata

SEQ ID NO: 217 - DNA, 675 bp, Artificial Sequence
  chemically treated genomic DNA (Homo sapiens)
tatgtaatgttggtgttaaataataagaaaaattaataaaatattgattttggtttatagataatatttacgtttacgtggtgggtgggattggtttcgttagaggatgggaagatgagaagtgtttgtcgtaggtttggagatggggattatttaggtatgtaggggatgttgttttttttttatttaataataagtttgcgtgtgtttagttttttttggtatacgtattgttttttattttcggtattgattaattgaaaataagattttggaagaattttttgtaaagttgatattgtacgagttaaggtaggtaataaagcgtagatatagtgagggagggggcggatggtatgataagttagagggtgatgtttgcggcggggatgtattgagaatagagagggtaggtgcggggttggagatatatttttgagagggagatgggagagagggcgtttcgcggatttcgaggaaggttgaagataggagaagggaggggtcgtatacgttaaacgttgtcgaaaggttaggagagattaagatagaaatgaattattggattcggttaggttgcggttattgataatagtgggaagagtaggtttggcgtcgcggtgttcgtatttggggtggcgagaacgtgaaggaggatttggtcgtggggttagt

SEQ ID NO: 218 - DNA, 699 bp, Artificial Sequence
  chemically treated genomic DNA (Homo sapiens)
gtttaaatttaggagattttttgagatgtcgtttaatatttttatgttttatattaaaagttaatggaatatgtagggggcggtttgagaatttagaatatgttttgttttttattatttttattttatttttttttagggaggtagcggacgttggagttttttaggttagaagtttaggggtaggggtatggtgggggcgttttttttatttcgagaaaacgtagcggtggttacggggaggggcgttattatgtagtatttaggtttggattttagttagtagtattagtttttttttattttcgggtagcgatatcgttggtgtagatcgttttaggtgcgttttcgtttagttttattgtttttagttttagtttgggttcgtttttagtttgttggagttgttggatgtgtttaggtttttaggtattttggtttttttttattcgtttcgcgaagatcgagggaaagtagacgcgttttcgcggtaattcggagtttgtagttcgtagggattttatcgttttaggtgtaggcgtgtatatgttagttgtagaaaatattatattaaattagtttgagggagttaaagtaaattataatattttaggcgttagagatttttttattatagaatttgtttgtttggatagtatgatattttttttataagattttattaataagttgtataaa

SEQ ID NO: 219 - DNA, 699 bp, Artificial Sequence
  chemically treated genomic DNA (Homo sapiens)
tttgtgtagtttattaataaaattttgtggaaaaggtgttatgttatttaaataggtaaattttgtaataggagagtttttgacgtttgaaatattatagtttgttttgatttttttagattggtttggtgtgatattttttgtaattggtatgtatacgtttgtatttggggcggtggggtttttgcgggttgtaggtttcgggttgtcgcggagacgcgtttgttttttttcggttttcgcggggcgggtggggggaggttagggtgtttggaggtttgaatatatttaatagttttagtaggttgagggcgagtttaagttggggttgaggatagtagagttgaacgaagacgtatttgagacggtttatattagcggtgtcgttgttcgaaagtgagagaaggttgatattgttagttggaatttaggtttgggtgttgtatggtggcgttttttttcgtgattatcgttgcgttttttcggggtgagaaaggcgtttttattatgtttttgtttttggatttttggtttaagaagttttagcgttcgttatttttttgggagggagtggggtgggggtggtggggagtaggatatgttttggatttttaggtcgttttttgtatgttttattgatttttagtatgggatatggagatattaagcggtattttagagaattttttgggtttagat

SEQ ID NO: 220 - DNA, 698 bp, Artificial Sequence
  chemically treated genomic DNA (Homo sapiens)
tattagtttatttattaattttttttaaaaataaatttagattttttttattttttataattaaaattttttaattatagaggagagttgtgtgtatttatttagttatgtttttgttttttttttttttttttttttttttgtttttattttttttttttttttttttttttttttttttagttttttttttgggatatcgagggataaagttgtaaggtattattatagattttttattttttttttttgtttattagaacgttaataagagatataatatttagaaaatagagagtagagatttttttggattaaatagtattttttttttttgtttttgtttttttgtgatttaagggagaaatgattttttttttttaagtgattttatttttttttgttaagaattcgtggatatgttatttggttagagtttagtttgtagttattacgtaggtaatttatttacgttagattataatttatttaattcgtttgtgttttagttaaatgtgtattagagtaaaagtttagatttgattatgggtaagtttaatgattaatataagttatttaggttttttttttagggtttgttagtaatgattaaaggaaaagtgttttatatttttttttatttattgtatgtgttttagataagaattttaagtaaaagtttatttagtgagataaat

SEQ ID NO: 221 - DNA, 698 bp, Artificial Sequence
  chemically treated genomic DNA (Homo sapiens)
gtttgttttattgggtggatttttatttaaaatttttatttggggtatatgtagtaagtggagaaaaatgtaagatattttttttttggttattattaataagttttgaggaaaaagtttgagtggtttatgttaattattaaatttatttatggttaggtttgaatttttattttggtatatatttggttgggatataaacgagttaggtgagttatagtttaacgtgagtgagttatttgcgtggtggttgtaggttgagttttaattagataatatgtttacggatttttgatagagagaaataagattatttagaaagaaaggattattttttttttgagttataaggagatagaaatagaaaaaaaaggtattgtttgatttagaaaagtttttgttttttgttttttaggtgttgtattttttgttaacgttttggtgaataaaaggaagaaatgggagatttatagtagtgttttgtaattttgtttttcgatgttttaaaggagaagttgagagggaagggaggaagaagggaagagggagtgagagtagagagaggagagagagagaggagaataaaaatatgattaaataaatgtatatagtttttttttgtggttgaaaaattttagttatgagaaataaagagagtttgagtttatttttaggaagaattagtggatagattaata

SEQ ID NO: 222 - DNA, 695 bp, Artificial Sequence
  chemically treated genomic DNA (Homo sapiens)
ggttttatggagtttttttatagtaagaaattaggtttgtaatagggtgtaatagagtgatattttatatttgatgttttgtaaatgtagagtttgtaaatgttttttttttgatgtttttttaaggtaagttataaatgaagttttattgttttaaaaaagtagtttgttaatagttgtttaggttttttatgggattgcgttttattgagtatttgaagaaagtatttattggaaatgggtttttttgggagattgtttggatttcgagtgtttggcgtttatgtttttatatttggttgttgttttttgtttttttttggttgtaggtgtgagtgtttgtttgtttaaatttcgtttagtattgtttggaaaaataaaataatatggttatttgtttgggtattgaatgttttttttgaattttggttttgtttattggtttagaggcggaatgggtggggtaagtttcggtgtgagtttgggaagtttcgagaagacgttatgggttgggtttgttaggttggggttgtttttggttttaatttttttggaatgttttgagggttaggagcgttgttattgatggttatgggagttgttaggttgtggtttttttttttatagagaatgttagaggtattcgggaaggtatttgttagggttttgatagatgtaaagtaagttttatttat

SEQ ID NO: 223 - DNA, 695 bp, Artificial Sequence
  chemically treated genomic DNA (Homo sapiens)
atggataaggtttattttatatttgttagagttttggtaaatgttttttcgagtgtttttggtattttttgtgagaaagagagttatagtttgataatttttatagttattaatggtaacgtttttgatttttaagatattttaaaaggattaaaattaagagtaattttaatttaatagatttagtttatagcgttttttcgaaattttttaaatttatatcgaaatttgttttatttatttcgtttttgggttaatgggtaggattaaaatttaggaagaatatttaatgtttagataagtaattatgttgttttgtttttttaagtagtgttgagcgaggtttaaataaataagtatttatatttgtagttaaggaagggtaagaagtagtagttaggtgtgggaatatgaacgttagatattcgggatttagatagttttttaggagagtttatttttagtgaatattttttttaggtgtttagtgaagcgtagttttatggggagtttgggtaattgttggtaagttatttttttaaagtagtaagattttatttatgatttattttgagaaagtattaaaagagaggtatttgtagattttgtatttatagggtattaggtgtggggtgttattttattatattttgttataagtttggttttttgttatgggaagattttataggatt

SEQ ID NO: 224 - DNA, 695 bp, Artificial Sequence
  chemically treated genomic DNA (Homo sapiens)
gattttaaattatttttttttaaagatttttgagggagatattgtatttggttattgtagtttagagtaggtttggttacggttatgagtatgttgagttattatgtttatcgtggatgatattttggagtaggttggggagtttggttggttttagaagtaagttttttttattttatgtttgttgtcggttgtttttgcgtttatttgtgtgggtatcgtttttttgggttttatatttgattattattgttagagttttggggtggttgagttgagttagcgttgtggttggagttttgcggaggagttgaattatatagtgttaggtttggggttcgcgggcgaggttttttttggttagtgtaggcgttatgaagtggattggaattagagcgtttttagttgtgtagattttttggttagtttggttattaataggagttatttgtcgttgggtttttgttaggatggttgggtgtatgatacgttcggtttttttatcgttattgaggtaaaaaagtttttgtaatatgggagtttttgggatagggagaaatataaagtaaattttatgaagtttagttttatattaggaaagaggtagggggttatgtttattgtgtagttcgtgggtgtttggttgtgttttaggtacggggtatttttttttttagtttaatttattataaatt

SEQ ID NO: 225 - DNA, 695 bp, Artificial Sequence
  chemically treated genomic DNA (Homo sapiens)
agtttgtggtggattaaattagagaagagaatgtttcgtgtttgggatatagttagatatttacgaattgtataataaatatagttttttattttttttttgatatggaattgaattttataggatttgttttatatttttttttgttttaggaatttttatgttatagaggtttttttattttagtgacgatggaagagtcgggcgtgttatatatttagttattttggtagggatttagcggtaggtggtttttgttggtggttaggttagttagggggtttatatagttgagggcgttttggttttagtttattttatagcgtttgtattggttaaggaaggtttcgttcgcgggttttaggtttggtattgtatagtttagttttttcgtagggttttagttatagcgttggtttagtttagttattttaggattttggtagtggtggttaggtgtgaaatttaggaagacgatgtttatatagatgggcgtaaaggtagtcgatagtaggtataagatgaggaaggtttgtttttggaattagttagattttttaatttgttttagaatgttatttacggtgggtatgatggtttagtatgtttatggtcgtggttagatttgttttgggttgtagtggttaggtgtaatgttttttttagagatttttgaaaaggagtggtttgaaatt

SEQ ID NO: 226 - DNA, 685 bp, Artificial Sequence
  chemically treated genomic DNA (Homo sapiens)
tagtttgttatttttttataggatatgagggttgataattattttattgtatggttttggggattgatgaataaaggttaatatgtggaaaagggtaattaaagaaagaagagttatttttaggttaattagtataagttttttcgttggtatgttttaatatattaaaatagtagtaaaaataatttgtatattggtatcgaaggtatagataaatttgtcgaggatttttattacggtagagggatgttttatatgagtttttagtagattaattaagtttttgttagttttatttggaaatgatgttgtttttttggggttatgtagagaagtttatgttgatgaaatgagttgttttagaatggtagttttcgggtagtagagtttgggtttaaggaaggttgaaagaaggggtggcgtggagttgttaggtgtaaatgttaggttagtaatgtagtttagtttgtatggacgtgtttcgtttaggaagttgtgatttggttgtattttttattttaggtgagatggaaggttgaattttattttattttttggtgaggttgatgttttttggtgtttataattttttttgtaaatatttgaaaggaatttattattttaatgttggaagagacgtttatttttttttaagaggatttgagtggattttgattgtaggttt

SEQ ID NO: 227 - DNA, 685 bp, Artificial Sequence
  chemically treated genomic DNA (Homo sapiens)
aggtttgtaattaagatttatttaggtttttttaagaaggaatagacgttttttttagtattaaaatggtaaattttttttaagtatttataaagaaagttataaatattaggaaatattaattttattaggaggtgaggtagagtttaattttttattttatttgaagtggaaaatgtagttaagttataattttttaggcgaagtacgtttatgtaagttggattgtattgttggtttgatatttgtatttggtagttttacgttatttttttttttaattttttttgagtttaggttttgttgttcgggaattgttattttaggatagtttattttattaatatgaatttttttgtatagttttaagaggatagtattatttttaaatggaattagtaagaatttaattaatttattaaggatttatataaagtatttttttgtcgtggtaagggttttcggtaagtttatttgtgttttcgatgttaatgtgtagattgtttttattgttgttttagtgtattagggtatattagcgaggagatttgtattaattaatttggaggtggtttttttttttttagttgtttttttttatatgttagtttttgtttattagtttttaggattatgtaatgaggtgattattagtttttatgttttgtaaagagatagtagatta

SEQ ID NO: 228 - DNA, 589 bp, Artificial Sequence
  chemically treated genomic DNA (Homo sapiens)
gttttggggttattatttgttgatttttaatatagaatatttttgagttatgttagggtttttaattagttaggttatttaagtttagattgaattgggatatggttttagaattttttttaatattgtatgtttgttataatgtgggtagggagaggttgttggttttgtagtagttatttgatggttgtttaaaggatcgtgaatttagttattattagtattttttttatttttttagatttgggtgtagttggtttagttttttatttttagtttcgggaaagttttttttttagattttcgtttttttttaataagtttgtatgttgtgttaaggagtaatcgtttttgttgttacgaatttatttgtttttgtgaatttacgtgttttttatttttgttttatttagaatagagaatataattattttaatattttatgtattttttataagtttatagagttttaatggaagtttggagagataatggtagtttatatagtagaagtaatagtatttgtttagtgttattgtttaagttattattatagttaatatttttaggaaatttattttttttgtta

SEQ ID NO: 229 - DNA, 589 bp, Artificial Sequence
  chemically treated genomic DNA (Homo sapiens)
tggtaaaagaaataaattttttggaagtgttagttatgatgatgatttaaataatgatattgagtagatgttgttatttttgttgtgtaaattgttattgtttttttaaatttttattaaaattttgtaggtttataaaaaatatataaaatattaaaataattgtattttttgttttggatgaggtaaggatgaagggtacgtgaatttataagggtaagtgaattcgtagtagtagaagcgattgttttttggtataatatgtaagtttgttgaggaggagcggaaatttgggagagagattttttcgaggttggggatggaggattgagttaattgtatttagatttgaaagagtagggaaaatgttggtgataattgagtttacggttttttaagtagttattaggtggttattgtagagttaatagtttttttttatttatattatggtaggtatgtagtgttgagaaggattttgaaattatgttttagtttaatttgagtttggatgatttaattgattaaggattttgatatgatttagaagtgttttatgttgggggttagtaaatgatggttttagggt

SEQ ID NO: 230 - DNA, 627 bp, Artificial Sequence
  chemically treated genomic DNA (Homo sapiens)
taatatatagtttttttttaatatagatgttttttagatgtttaatagtggtttaattttttttatttttatagtgtttttaaagtttgttggtatataaatatgaatgaatgaataatgtagaatttatttaagaaattttaaggagagagaggaggagatttatattatatagtaaataatttaataaatttgttaaacgttatgtatgtgaataggcgtttttttttttttgattttttttttttatatagaatttagtgtttttttttcgtttttcgttatagtatttatcgtttttttttttttacgtcggggagtagtcgaggtttgtgttttttagcggatttgttaaattattttttttagtatgttgtttttttttttttatagattatttgttaagaaaatatattttttatgtcgttaatttatatatatatgtgtattatatatatgtttatataatgagagattgttaggaaaattattattatatatatatgtattatatatattatatatatatatatatgtattatatatatatttgtatatatatgtatatggaaaattgttaggaaaaatagtatagtggtagtgttagtgttggttgtttttcggtgg

SEQ ID NO: 231 - DNA, 627 bp, Artificial Sequence
  chemically treated genomic DNA (Homo sapiens)
ttatcgaaagataattagtattaatattattattgtgttgttttttttaataattttttatatgtatgtgtgtgtaggtatatatataatgtatatgtatgtatatgtaatatatataatgtatgtatatgtggtagtgatttttttaataattttttattgtataaatatatatataatgtatatgtatatgtaaattaacgatatgaaaaatgtatttttttaatagatgatttgtggaagggagagagtagtatgttggaggggatgatttggtaagttcgttgaagaatataagtttcgattgtttttcggcgtggaagaaggaaggcgataaatattgtaacggaggacgaggaaggagtattgagttttatgtggaaagaaagggttaaaaagaggaaaacgtttatttatatgtatggcgtttaatagatttattaggttgtttgttgtgtgatgtaaatttttttttttttttttttgaaattttttgagtgaattttatattgtttatttatttatgtttatgtgttagtaagttttgggagtattgtaaaaataaaaaaggttagattattgttagatatttgggaaatatttatgttagagaaggattatatatta

SEQ ID NO: 232 - DNA, 796 bp, Artificial Sequence
  chemically treated genomic DNA (Homo sapiens)
taattttaaataaatgaattgtgatgtgttttatttttttgtgtaagtggaagatgttaatatatgtgtattatgagaaaggattttataattttttttttttgggttttgttgagacgtttttttgatttagagagaattttttaggattagtaagaaaagtatgttattattttttaaattttataatttaggaaatagtttattattttataaaattataaaagcgaattatttgagtttttttattatttgtttttttttttttaagttggttttgtataaatatgatgtacgtttattgggtgataagtttgtcgtaagtgaaacgtttataggtattataggaatgatttggtgtttcgtttattttattagaattttaattggggtgtgtaggagaggattttataaatggtaaggtaatttttggtagtttgtttgttagtattgttcgtgttatttttagaggagtttgagaagaggtagaggaaggcgaaatatggttggtgagtgtatggtattttttttattaggtttttgttagaagtttgtgttttttttgggttagtttgttaagttagagtgttcggttaggatagttgtttgttttgggggttttgaaggttagattttttattttagggtgttagttagaggcggtttttttttagtggtggttgggtttttttagtatatttttggggtagaatattattggaatgtagttttgaataatgggtagggtgtttagtgtagttggatatcgtatttttttaggtagaggataagtttt

SEQ ID NO: 233 - DNA, 796 bp, Artificial Sequence
  chemically treated genomic DNA (Homo sapiens)
aaagtttgttttttgtttaaggagatgcgatgtttagttgtattgaatattttgtttattatttagagttatattttaatgatgttttattttaagaatatgttagagggatttaattattattgagaaagagtcgtttttggttagtattttaaaataggaagtttggtttttagagtttttaaggtaggtagttgttttggtcggatattttggtttggtaggttggtttaggggaagtataggtttttggtaaggatttgatggagaagatgttatgtatttattagttatgtttcgtttttttttgtttttttttaggtttttttgggaatggtacggatagtgttgatagataggttgttaaggattgttttattatttatagaatttttttttatatattttaattagaattttaatgaagtgggcgaggtattaggttatttttgtagtgtttgtaaacgttttatttacgatagatttgttatttaatggacgtgtattatgtttgtataagattagtttggggagaagggggtagataataaagaaatttaaatagttcgtttttataattttataaaatgatggattattttttggattgtagggtttaggaaatgatgatatgttttttttgttgattttgggaagttttttttgaattaaagaaacgttttagtagaatttagaagaagaaaattgtgaggtttttttttatgatatatatgtattagtattttttatttgtatagggaagtgagatatattatagtttatttgtttagggttg

SEQ ID NO: 234 - DNA, 744 bp, Artificial Sequence
  chemically treated genomic DNA (Homo sapiens)
ttttttttttttagataatgttgtggttgcgttttttttttcgttagttcgtttaggttttcgtcgttagcgattttttcgggttgggggtggggaggtggggggggagtgtagggttggggaggatgagttggttttttttatttttttgttgttgttttttttaagagggatggagatttggtttaagtttttcggtttattcggagttgtgatagttatttttagggaatagttacgttgttttattaagtttatttttagcggtttggattttttaggtagaggttgtgggattttgttttttttaatattttagtttatttttaaaagggtttgagtcggataggggttaaataggttttttcgatttggcgggtcggttagacgtgatagtaatgttaaggaggttaagtttttttgtttattttttattttttttttttttatttttggattttttggcgtttttagtatatagaggtttttgagtagttcggttgtaggttttttatttatttagagtttttttttttacgtgtttatttttaattttgtagtgtttgcggattaaaggggaagggagttttaggttaatttttaaggtatagttagattagtttatttagtttggaagttaagtattttttattaaatttattgtttggattttggaatgtgttttttttagaaataatgttataaatggtgatttgttttttaggttagttataaaagtttgtt

SEQ ID NO: 235 - DNA, 744 bp, Artificial Sequence
  chemically treated genomic DNA (Homo sapiens)
aatagatttttgtggttggtttgggaagtagattattatttataatattgtttttaagggagatatattttaagatttaaataatgaatttagtaaagaatgtttggtttttaggttggatgagttggtttggttgtattttgggggttggtttgaggttttttttttttttggttcgtagatattgtagggttggggataggtacgtgagggggagaattttgagtagatagggaatttgtagtcgggttgtttaagggtttttgtgtattgggggcgttaggaggtttagggatggaaaagggggaggtgagaaatggataaagaaatttggtttttttggtattgttgttacgtttggtcggttcgttaagtcgaaggggtttgtttagtttttgttcggtttaaatttttttgggaataagttgggatgttagaaaaaataaaattttataatttttgtttggggaatttaggtcgttggaggtgggtttggtagggtagcgtgattgttttttgggagtggttgttatagtttcgggtgaatcgaggagtttgggttaagtttttattttttttggagagggtagtagtaaggaggtgaggggagttagtttattttttttaattttgtattttttttttatttttttatttttagttcggaagaatcgttggcggcgggagtttggacgagttggcggggaaggggacgtagttatagtattgtttgggagggagggg

SEQ ID NO: 236 - DNA, 1218 bp, Artificial Sequence
  chemically treated genomic DNA (Homo sapiens)
ttttaaaagtgttggtttatttataattagtgagttgtattttttttgtggtattggttagattttataaattgtagttttttgtttatttataatggatttagatttttggatgagatgtattatatatgtgtgaaggattagagggtattttttaataataataggaataatattgttttgtgttgttaaattgtagatttttttttttaaagatttaaagtttattatagatataatttgattgttgttgtattgtaatagtgtttttttttttttttttatttaggtagattttttttttgattaaagatggtatgaatatttttttatgttatgatttatttgataaatagtttaggatgttataaaagtaaagtaggagatgttttaaataattagtggtagaaagtttgttgttgttcgggtgttaattttgttagaaagtttagatatttgtgggttgtattgtaaatttttgtatagatgtgtgtgaggttgagttttagttatacgtttgtaatagtattaggaaatattttgttatgttatttttttgggtgattttttatgattaaaagaaaaaaaaagttatatttttgttttgtgaaattgagttcgaattttgggtagtttagtagtaattagtatatgtttgaattatagttgcgcgggatggtttgtattatatattaatggtaattattgttttaaatatggaaattaaatattttaggtttaggttgattttaatttgcgggtaggaaacgtttgatttattttaagataagtttaaaagtgtgtggagttttttttggggttataaattttgtttatatttatatgtattttttttgagatagttttttgaggttttttggtagttatttttttgaacgtgggaagagattgggatttttaggaatgtaaaaaaggagaaattaaaatgtttttagaaaattttagggtgtggttggtttagagatttaatttaatagttttaagatttaaaagatgagtattaaattatatttggtttttttttttttaggtatgagatatttatatttatttagaattagtttttaatttggaagttttttgtgtttttagtatttttagattttgtattaaattttttgtaaatttttttaataatgagtagttatgtatagtattatagttgtggttttgatgtttttattattagttgattat

SEQ ID NO: 237 - DNA, 1218 bp, Artificial Sequence
  chemically treated genomic DNA (Homo sapiens)
atgattaattgataatagaagtattaagattataattataatgttatatataattatttattattaggagagtttataaaaaatttggtataagatttgagaatgttgggaatataagaagtttttaaattaggaattgattttgggtaaatgtggatgttttatgtttgaagagagggaagttaagtatagtttgatatttattttttgagttttggaattgttggattgggtttttggattaattatattttggaattttttgaggatattttgatttttttttttttgtatttttagggattttaatttttttttacgtttaagaaggtggttgttaagagattttaagggattgttttaaaagaaatatatatgaatgtgaataggatttgtagttttagagaaaattttatatatttttaaatttattttgggatagattagacgttttttattcgtagattggaattagtttgaatttaaagtatttaatttttatatttaaagtagtagttgttattggtatataatataaattatttcgcgtagttgtgatttaggtatatattgattattattaaattatttagaattcgagtttaattttataagatagaaatatgatttttttttttttttggttatagaagattatttaaggaagtagtatgataaaatgttttttgatgttgttataggcgtatggttgaaatttaattttatatatatttgtatagaaatttatagtgtaatttataaatatttgagttttttggtaagattaatattcgagtagtagtaagttttttgttattaattatttaagatattttttgttttgtttttgtaatattttgagttgtttattaaataggttataatatgagaaagtatttatgttatttttaattaagaaaaaaatttgtttggatgaggagagaaggaaaaatattgttgtaatatagtaataattaaattatgtttataatgggttttaaatttttagaagaaaagatttatagtttagtagtataaagtagtattatttttgttgttattaaaaagtgttttttaattttttatatatatgtaatatattttatttaaggatttaagtttattataaataaataagaagttatagtttataaaatttggttaatgttataaaagagatataatttattggttataagtaagttaatatttttagaa

SEQ ID NO: 238 - DNA, 1016 bp, Artificial Sequence
  chemically treated genomic DNA (Homo sapiens)
aattgttattttgtttttaagatgggttatatattagtttttatttttatttttttagtttttgtttatgttatttagataattatgatggtttttttttagttattattttgtagattagttttgtattattggataaatggaattttatagttttcgtttggaataatttagttttcggaattttttatttaatatgatgtttgtggaatttattatgtagttgtatatagtaatattttatttatttttttgttgaatattattttattatttttgttagtttgaatggattttttttttatagttaagtaggttatgattaagggagataatgaagtatggaattgttttttttagagaaattataggtatggaataagaattttttgaggaggttttttttgttttttttttattaagttgcgatattatttttatatttagagaattttagagtaatatcgagtttcgttgagtgggtttagagttttatatggtagttgttttagtttttggtacgaggttaaaggatgatagtttttatttttttttatgtttttttgtttaattttagggaatatttttttattttgtgattgtttatatttgaaaattttatttatattttataattttttattagtttaatgttatgtggtgttaattttttgtatgttgtagtgttgagttgtaaatttgttttttttttgtagtaatttaaagtgttcgtaaagttttgaggtagataatgttattttgttatgtatgtttatataatattagtaaattatttattgtgtttttgtttattttttagatatggtggttgttttgtagaattaaaatttttgttatttttttttataattagttaataaatttaagttgagttaaggagttaggtgaagttattgtgatttgggtaaggtttttatcgatagatatgtgtttttagatataagatgtgtttttagatatataattttgtttggttagagtagaatagaatgggt

SEQ ID NO: 239 - DNA, 1016 bp, Artificial Sequence
  chemically treated genomic DNA (Homo sapiens)
atttattttattttattttggttaaatagaattgtatgtttgaaagtatattttgtgtttgaaagtatatgtttatcgatgggaattttgtttaaattatagtggttttatttggttttttagtttaatttgaatttattaattaattatgaaaaaagataatagaaattttgattttataaagtaattattatgtttggaagatagataaagatataatgaatgatttgttgatattatatgaatatatatgataaaataatattgtttgttttaagattttacgggtattttggattattgtaagaaaagggtaggtttgtagtttaatattgtagtatgtaaagggttaatattatatggtattgggttgatggaagattgtagagtgtgagtaagatttttagatatgagtaattatagggtaaagaaatattttttaaggttgggtaaaagaatatgaaagaagataagaattgttattttttggtttcgtgttaggaattgagatagttgttatatggaattttgaatttatttagcgaaattcggtgttgttttgaagttttttgaatatgaaaataatgtcgtagtttgatgaagaaaggatagaaaaggtttttttagggaatttttattttatgtttgtggtttttttggaaaagataattttatgttttattattttttttagttatggtttatttgattgtaagaaagaaatttatttaaattggtaaaagtaatggaataatatttagtaaaagaataaataaaatattgttgtatgtaattatatggtgaattttataagtattatgttaagtaagagatttcgaagattaaattattttaaacgaaaattataggattttatttatttaataatgtaaaattaatttatagggtaataattaaggagaggttattatagttgtttgggtggtatggataagagttggagaaatagaaatagagattagtatatggtttattttgagaataagatggtagtt

SEQ ID NO: 240 - DNA, 708 bp, Artificial Sequence
  chemically treated genomic DNA (Homo sapiens)
gataaaaagaatatttgttttatttttttattattaggtatttaaatttagttttaaataggtatataaatagttgggtattttaggttgatgatatttatttttagggtaagtggttaattttttttttaagttcgaataataaatgtttaattatttttttattttttttaaatagtaatgtgttttgtatttagtttgtgtttgtttgtcggtgtagagttgatattatttgattttattttatagagattttgtgtttgttagatgtttaaataagtggttgatttagggtaaaaatattagttaagttatttgttttatttagttaaagaattagtgtaggtaaagtaggcgagttagtagtttagcgtaggtaaagttgcgtgttttcgaatgatttttttagtcgttatttttgggagggttgggtttttggggtatttttaaaggaattgttttgggtttaaggtaatatttttttttagtagtttttttttttttatttttagtggttattttaattattttaataggtaattttaaagttagttagaagtaattttagtttattaagtttgaatgtgaaaaggagtaagtaaagatttgagtttttttttgtttttttttttatgagtaatatgtgattttttaaaaattattgtagtaagaatatttaatatgaaatttatttttttaataaatttt

SEQ ID NO: 241 - DNA, 708 bp, Artificial Sequence
  chemically treated genomic DNA (Homo sapiens)
aaaatttgttaagagggtagattttatgttaggtgtttttattataataatttttaaaagattatatgttatttataagaaaagaaataagagaaagtttaggtttttgtttgtttttttttatatttaagtttgataaattaaaattgtttttggttggttttaaggttgtttgttgaagtagttgagataattattggaaatggggaaggagaagttgttgagagagaatgttgttttgagtttaaggtagtttttttaggagtgttttaaaagtttagtttttttaggaatgacggttggaaagattattcgaggatacgtagttttgtttacgttgggttattgattcgtttattttatttgtattgattttttaattgagtgaaataaatggtttgattaatatttttgttttgaattaattatttatttggatatttagtaaatatagggtttttgtgaaataggattaggtaatgttagttttgtatcggtagatagatatagattggatgtagagtatattattgtttaggaaaaataaaaagatgattaggtatttattattcgagtttaggaaggaaattagttatttgttttgagagtggatattattaatttgaaatgtttagttatttgtatatttatttaaaattgagtttgaatgtttggtagtaggaagatggaataaatgttttttttatt

SEQ ID NO: 242 - DNA, 837 bp, Artificial Sequence
  chemically treated genomic DNA (Homo sapiens)
tttttataagagtaattattattaatggttattgtttggaagttggatttggaaatgatatgttggatggttatagttttgttagatgaggtgtgcgtgtgatgataagtgggaaatagtttgatttaagggatattttagtttatggttagtatagtaatgattttgggaagtttgaagttatgttttttgttgagtaataaggtatagggcgtagaaggggtaaaataagttagggagtttagttaatatgtgagatggaaatttaaggatagggatagagtacgtataaagtttagggatatagttttttgttggatattttgtttgtattaattggtaaattagattgtataataggaaagaagtttgtgatagtaaaaggggtcgaaaacgggaaggatatttagagggtaggaattatgacggggttttgcggttttgtgggtagtagggagagtgtatttttggtttgcgggtttcgtgagttggaagaaattaggaaagggaagttgagtatttaattttatatagattataggttaatcgtgtttatttagtgtttgaaagtgagaagttgttaaggttttgtgatagttttgaaatcgtaggtattagaggatagaaattttgagtttagagggaggtaggtatttttatttgtttaatttggtttttaatagtttttaattttttaatatttttaagtagaattagattaagtagaagtgtttataatagttttttaatttagtttgtatttttttttttttttttttgttttgggggttatgtgttattaggagtagaggttgtgaatgttttagaaattttttt

SEQ ID NO: 243 - DNA, 837 bp, Artificial Sequence
  chemically treated genomic DNA (Homo sapiens)
aaagggatttttggaatatttataatttttgtttttaatggtatatggtttttaggataaaagaaagagagagaagatataggttaaattggagaattattatgagtatttttgtttaatttgattttgtttgggaatattgaagagttggaagttgttgaagattaaattgggtagatgggagtgtttgtttttttttgggtttaggatttttattttttaatgtttgcggttttaaggttgttataaagttttgataattttttatttttaaatattaaatgggtacgattagtttgtgatttatgtaggattaaatgtttagttttttttttttgattttttttagtttacgagattcgtaggttaaaaatatattttttttgttgtttataaggtcgtagagtttcgttatagtttttgttttttgagtgtttttttcgttttcgattttttttgttattataagttttttttttgttgtgtagtttaatttattagttagtataggtaaaatgtttagtaaaaagttgtgtttttgggttttgtgcgtgttttgtttttatttttaagtttttattttatatgttaattggattttttgatttattttgttttttttgcgttttgtattttattgtttaatagaagatatagttttaggttttttaagattattattgtgttggttatggattaaagtgttttttaaattaagttgttttttatttattattatacgtatattttatttaataagattatgattatttagtatgttatttttaggtttaatttttaggtagtgattattgatggtaattgtttttataagag

SEQ ID NO: 244 - DNA, 1348 bp, Artificial Sequence
  chemically treated genomic DNA (Homo sapiens)
attattttattttttttttttttttttttttattaaaaaaaaaaaataatggttagaatattggtttttataatattagtttttgttttggtagattaaaagaggtagaatttttttagtataattttgttttttaaatattttaaaagtatttaattatttggttttgtattatttataaaattttgtagttatgaagaaagtttttttttttaaatttagtttatttttttaaattaaaagtgtttttataaataagaagagaagttgtttttgttaaaattttgggtttatttaggattaatggagtttttttgtttcgtaggaaaattttttgtttttagattagttgttaaagttgaatattatagatgatttttttaaagcgattttgaaaaattatatgttggaatttaaattttttaaattttatatataagattagaattttatattttaatagttatataattttataaagaattatttttgatttttttggtagattattattgtagaaggaataaaaaaaggttttataaaagtattttatttgtattgttggtagatgatttataaatgtcgtatagatacgggttgattattggtttatagaagaagtattaaatgaacgacgagatatttgttggtaaatatatagtaaataaaaaatgtaatttagagttaaatatgtgtatagtgtgggttttatttttgtttataaattaagtaatgtgttttgttaattattagtagagttattgattttagatgtgtattatatagttataattttgttagagagtagattatataagttgttttttttttggttgttttattttgttttattttaagagttcgtaaattgacgatcgggataaaaattataattgatattatttgtgggaaatattttataaaataataggtttagatgtaggattaaagttatgtggtagtaaaatattttattgaaaaggggttaggttttatgattttttaagaaaatagatgtgttttttttttttttgtttgttttttaattttttttttttaaataaatttttttttaattattaacgtttttttttttttgtttttttacgattgtattggagagagtttataaatggattatagatgtaggtttgtattttaaaattttaattgttataatttttggaataaaataaatgaaatatttggaaaaattatattgaattattgtaaaggtaatgatgattatgtaaatatgtttgtttgatatttatttagtatttttgggtatgagtatatgattttttagatattttaagttggagtttagggagtaggaagtaattta

SEQ ID NO: 245 - DNA, 1348 bp, Artificial Sequence
  chemically treated genomic DNA (Homo sapiens)
taaattattttttattttttgaattttagtttgaggtatttgggagattatatgtttatgtttaaagatgttagataaatgttaagtagatatgtttgtataattattattatttttataatagtttaatgtaatttttttaaatgttttatttattttattttagagattgtgatagttagaattttgaagtataagtttatatttgtaatttatttatgaattttttttagtgtaatcgtgaggagatagagaggaaaaaacgttggtggttggggggggatttatttggagaaaaaaaattgaaaaataagtagagggaaaaagagtatatttgtttttttaagaaattatggaatttggtttttttttagtggggtattttattattatatggttttaattttatatttgggtttgttgttttatgaaatattttttatagatgatgttaattataatttttgtttcggtcgttaatttacggatttttggaataagataaaatgaaataattagaaaaagaataatttatgtggtttattttttgataaaattatagttgtgtgatatatatttaaaattaataattttgttaatgattagtagaatatattgtttggtttatgagtagagatggggtttatattgtgtatatgtttggttttgagttgtattttttgtttgttgtgtatttattagtagatgtttcgtcgtttatttaatgttttttttatgagttagtagttagttcgtgtttgtgcgatatttataagttatttgttaataatataggtggaatgtttttatgaagtttttttttgttttttttgtagtgatgatttattagagaaattaggggtaattttttatagagttatatggttattaagatgtggagttttgattttgtgtgtaaagtttaagaaatttagattttagtatatggttttttagaatcgttttgaaagaattatttgtggtgtttaattttagtagttggtttgagggtaaaaggtttttttacgaaataaagaaattttattagttttaagtagatttaaagttttgatagaaatagtttttttttttatttatagggatatttttaatttagggagataaattgaatttaaaaaaaagaattttttttataattataagattttgtaagtaatataaagttagataattggatatttttaaaatgtttggagggtaaaattgtgttgggaagattttgttttttttggtttgttagagtagggattaatgttatagaagttagtattttggttattattttttttttttaataagaaagaaagaaaaggaaagatgaaataat

SEQ ID NO: 246 - DNA, 1125 bp, Artificial Sequence
  chemically treated genomic DNA (Homo sapiens)
tttaagttattggtttaatggtttaatttttgaggagatagaatttaagtaggtagatttgtatatttttatatgatatttattattttttttttcgtgtgttttttttttttttttttttttttttttattttttttttttgtttttttaaattttttagttaattttttttttgttttttagtttttgtttatatagaaaatttggttttagagaatagtatttaaatagtttttaattaaaatgtattacgtgtggtaatgtaaaaaattattagaatagtttttttttatttaaaatatgatttttgtttattgttttggtttttttgtttttgtgttttaggttaaatattatttagatttttgcgaggttaggtgtttttttattaattatttgaaaggtttagagaatggtatttatattaaagttagttttaatgataaaggatatttggttacggtaaatataagtattttttagtttttcgttttatttggtaaaaagttatttttattttagttataatataataaaggattaattgatgggagtattttttttattttttaaaaaataaattgagttaattttacgagtttatttagaggaattaattagggaataggaaatttttaaagttatttttaaattgatattgaataaagtttagggaatagatggttttttatttgaattttttaaaatttttagtattttattaatttttttataggaatgaaaaaaaattgttaaatgaatttgagtaaattattttattaggtgtttagtttttttaagattttttttgtattaagaaaaaaagaaaatataataggtattttttttattgatattattataattttatttgtatatgtgagttttttttttagggtttattttaaattttttttgtatttttgattattaagttgggggaatgatttttttaattggtgtagttgattatgtataattgtttagagtataaggatagtgttaatatatataaagtcgagaatgaggttattgtttaagtaaaatagaaaaatagaaaataatttttgttattttgttttagatatttggagatttttggggtaagagatggagaggataaa

SEQ ID NO: 247 - DNA, 1125 bp, Artificial Sequence
  chemically treated genomic DNA (Homo sapiens)
tttattttttttattttttgttttagaaatttttagatatttgaaataaaatgataaaaattgttttttatttttttattttgtttgaataatggttttattttcgattttgtgtgtgttgatattgtttttgtgttttgagtagttgtgtatgattagttgtattaattaagagaattatttttttagtttggtagttagaaatgtaggggaagtttagaatgagttttgggggaagaatttatatgtataaatgaaattatagtaatattagtagagaggatatttgttgtatttttttttttttttagtgtaaaaggaattttaggggaattgaatatttggtgaaatagtttgtttaaatttatttagtaatttttttttatttttataggggaattagtagagtgttaaaggttttaaagaatttagatgaaaagttatttgttttttgggttttgtttaatgttaatttaaggatggttttggagattttttattttttaattaatttttttagatgagttcgtggggttggtttaatttattttttgaaagatggaaaaaatgtttttattaattagttttttgttatgttgtgattgagatggaaatagttttttgttaaatggagcgaggagttgagagatgtttgtgtttgtcgtggttaggtgttttttgttattaggattggttttgatgtaagtattattttttgggttttttagataattggtgagaaagtatttggtttcgtagaaatttgagtaatatttagtttgaagtataaagatagggaaattaaagtagtgaataggagttatattttaaatagaaaaaaattgttttaataattttttgtattattatacgtaatgtattttagttggaggttgtttgagtattgttttttagaattagattttttgtgtggataaggattagggggtagggaaagggttaattgaggggtttggagaaatagaaaagggaaatagagaaaaagaggagggggaaaaagagatatacgagaggagaggtgatgggtgttatgtaaaagtgtatagatttgtttgtttaaattttatttttttaaagattggattattgagttagtggtttgag

SEQ ID NO: 248 - DNA, 793 bp, Artificial Sequence
  chemically treated genomic DNA (Homo sapiens)
aaatgtatcgggtaaattttgatgtataataaaggttgagagtttgagatttagggatttaattaattatgtaagatgtttaaaatggaacgttgatttttatatgatatttgttaaatgtagaaaattttgtttggatttggaaataaaaatgtgagtatgaagtttcggtaaaataaatttttttgaaaaatattaatattttataattatttttttattaaaataaaatagtgttaagtatatagttttttttaagtaataaatttttaaaattaaagtgaaattttgaaattatttttttaaatagtattcgttcggtagatagatggtatgttttattttatttttcgtttttatttggtggagtttatggggtattttgagaattaatgggtaattaagaattgggtgttaatttaggtatttgatttggaaattgagtttttgaaaattattaattttaaatatagcgtaagttttttttattatgttattttagaaattggtaataagaatattttaaaaatatttagaaatgtaggagttagattttttgggttgtaggtggaggatatatagttgttaggaaatggaagatatttgttatgtttttgagtttttttttggcgggtagtggatggaggataataaggtttgttgtagtattaatttgggtattaaatagtaataaataaatgtgatttaagagtattgttgggagatttttttgaaagagtatgtatagtagtttttggtagtaaggaattaaggttggtagttttaagttatt

SEQ ID NO: 249 - DNA, 793 bp, Artificial Sequence
  chemically treated genomic DNA (Homo sapiens)
aatggtttagggttattagttttgattttttattattaaggattattgtgtatgtttttttagaaaggttttttaataatgtttttaaattatatttatttattattatttagtatttagattaatattatagtagattttattgttttttatttattattcgttaaaggggggtttagggatatagtaggtgttttttattttttggtagttgtgtgttttttatttgtagtttagaaaatttggtttttgtatttttaaatatttttagagtgtttttattattagtttttgggatagtataataaggagggtttgcgttatatttggaattgatggtttttaaagatttaatttttaaattaaatatttaaattggtatttaatttttaattatttattgatttttaaaatattttatgaattttattaagtagaaacgggaaatgaaataaaatatgttatttgtttatcggacggatgttatttgaaggagtggttttaaaattttattttggttttaaagatttgttatttggaagaagttatgtatttggtattattttattttgatggaaaaataattgtagagtattagtgttttttaagagagtttattttatcgaagttttatgtttatatttttgtttttaaatttagataaaattttttatatttgataagtattatgtgaagattaacgttttattttaagtattttgtatgattgattggatttttaagttttaagtttttaatttttattgtgtattagaatttattcgatatattt

SEQ ID NO: 250 - DNA, 936 bp, Artificial Sequence
  chemically treated genomic DNA (Homo sapiens)
attttgttgtagttataggttttgtgattgaggaatttatttttaaagaaagtgtattgggatatattttaaaagttgatgtatgatagtatggggtagataaaggttaaaaagataaggttatgattaagtaggggagaaatatatagatatttatgtaaatatttagggtatgagtaagaatttggggaaagatttggagttaggaggaggtgggtgtttggtaggcggtgagattttaataggtagaggtagaagtgaagggtaaagggaaattttgggttatacggggaaattagatttgtttgtttgtttaatattgtggtttttagtgggatttaaagtcgatgttttaatgtaggacggttatgttagtgttgattagaataatgtattttttagggttatattaaaaaattatgtttagtgttttatttgtatttttaaaatatgtatatatatgtgtgggttagaaaaggttgcgtttaggatatgtatttttatgtgaatcgtaggtaattgtataagtaaataggaagttgcgtaggtatgtaggtagttgtttgttgagaggtgcgtgtgggtatgggtaggcgtgggttttgtttgtttgagtataattttaaaggttttttttgatggaagggagggtaagtaagtttttgggtatttgtttttttaattgttgttgtcgtttgttttttttaaggttttttttttgggtagggttatgttagggagtatttgtggttgtaagaaaaaggtgtcgttttaaggtttttgttaattgtcgagttggtgaataaacgttttgaaattttttttgttgagaattttattttttggttttttttttgattttatggtttagtttttttagtttattttttgttttttttttttgtttgttttttagatgttttttcgtgaatttgt

SEQ ID NO: 251 - DNA, 936 bp, Artificial Sequence
  chemically treated genomic DNA (Homo sapiens)
ataggtttacgggaaaatatttgaggaataaatagaagaagaagatagggaataaattggggaaattgggttatagaattaggaagagaattaggagatggaatttttagtaaagagaattttaaaacgtttatttattagttcggtagttagtaaagattttgaaacggtattttttttttatagttataaatattttttgatatggttttgtttagaaaggaaattttgagaaggataaacgatagtagtagttagggaagtaggtgtttagaggtttgtttgtttttttttttattaggagaagtttttaaaattgtatttaaatagataaggtttacgtttgtttatgtttatacgtattttttaataggtagttgtttgtatatttacgtaattttttgtttgtttgtgtaattatttacggtttatataagaatgtatgttttgagcgtagttttttttggtttatatatgtatgtgtatattttgaaggtgtaaatgaggtattgagtatagttttttaatgtagttttaaggggtatattattttgattagtattaatatagtcgttttatattaaggtatcgattttaggttttattggaggttatagtgttaaataagtaaataaatttagttttttcgtgtggtttaaagtttttttttgttttttatttttatttttgtttattaaagttttatcgtttgttaagtatttatttttttttaattttaagtttttttttagatttttgtttatattttaggtatttatataggtatttgtgtgttttttttttatttaattatgattttgtttttttaatttttgtttgttttatattattatgtattaatttttgaaatgtgttttagtgtattttttttgggaatgagttttttagttatagagtttgtgattgtagtagagt

SEQ ID NO: 252 - DNA, 940 bp, Artificial Sequence
  chemically treated genomic DNA (Homo sapiens)
atggatttgtttttagaggggtatgaaggtggttgtgattttataagtagaatggaagtgatttgatttatatcgggtttgggaaaattggtttaggtgtggtaaaggtatagagtgtgaaataggtggggaaaataaatttaagattttgaatttttttatggtttttaaaggggaagttatgggtatagtgaatggaggggttgtttttagtttatttggcgttgtggtgaattgttttagggtttggtatattgttattattttaagatagatgggaaataaatattattagtatgtcgataagtgtttgtttttttttagtattagggttaagaaaaataaagtggggagggtattaagttttggagtaagtttttaaaaggtttttttttttgaattttttacggttgtttatttataatagttataattataatagagaggaaaagattttaattatttttgggatatattttgttaaaattatatttaagtattttttatttgtaagcgagaagtattattttttattatgtttttaaagtagcgtggggaagttgtgtgtataaattaaggtgttgttgtggtttgttgttttttgtgaatttttggaaaggattattaagaaggatgttttgataattgtttgttaggtaatttgtataagaggaaagaggtttttttgaagattattaaaaatgatttattattattggttatatatatatatgttgttttattatttaaaagtataaattatatattggtaagtaattgtgtttattagattattttaggttttgggaggagtagagaggtataaagtgtggtgattatttttaaggaaagtgtattttaattagggagataagaataattatacgtgtagtagttaaaagttatataaaagtttatgattaagtggtgagttgtgaat

SEQ ID NO: 253 - DNA, 940 bp, Artificial Sequence
  chemically treated genomic DNA (Homo sapiens)
atttataatttattatttaattataggtttttgtatagtttttaattattgtacgtgtaattgtttttgtttttttaattaaaatgtattttttttgggaataattattatattttgtatttttttattttttttagggtttaaaatagtttgataaatataattatttgttaatgtatgatttatgtttttaagtaataaaataatatgtatgtgtatgattaatagtaatgaattatttttaatgatttttagaaaggtttttttttttttatgtaaattgtttggtagatagttattagagtattttttttggtgattttttttagaagtttataaaagataataggttatagtaatattttggtttatgtatataatttttttacgttgttttaaaggtataataaaagataatgtttttcgtttataaataaaaagtgtttaaatgtaattttgataaaatgtgttttaggggtgattgaagtttttttttttttgttgtgattgtaattgttataaatagataatcgtaagagatttaaaaggggaaattttttaaaggtttattttagggtttgatattttttttattttattttttttagttttaatgttgaaggaaaataaatatttatcgatatattaatggtgtttattttttatttgttttggaatggtggtaatgtgttaagttttgagatagtttattatagcgttaagtgagttgaaggtagtttttttatttattgtatttatggttttttttttgggggttatggaaaagtttaggattttgaatttattttttttatttgttttatattttgtatttttgttatatttaagttaatttttttaggttcggtgtagattaaattatttttattttgtttatgaagttatagttatttttatgtttttttagaaataggtttat

SEQ ID NO: 254 - DNA, 851 bp, Artificial Sequence
  chemically treated genomic DNA (Homo sapiens)
aaaatggatttttttgttgtatgtttagaaaattagatattattattatttgattatttatttattggtatagtttgttttatttattaaagaaaagataaggttgaaattggatttatttaatgtatgttcgtggttttatgtgtttgtagataataagtagttttgggtgtttgtttagggttgattttttaggttataattggtattattttgatttttttttggatgagtttatatcgttatggagtttgtagttttaaataagaaaatatttataaaaatgagaggggtaaaatgttttttttggaagtagtaggggagggggtaggaaggggaggtttttgtttatttatggaaaatggacgtgtgttttatggtagtcgtagtttaagtaaatataaattttgaattagagattatattcgttatttttttagtattagtaatattaaattaaaatatagttttatttggttaattttaaagtaggatgtgggtgttagttttgaaaattatatgatcgggtttttagtagatattattagggttatgtttttgttttaagtaagaaagttataaaggtaatattttttgtagtattattattatgtttagtaaatagatgtaattataataatagttaattttagagataatagtttattatagaaaaaggttaagagggttttttattttttatgcgtagaatttgagttattttatattataattttattgagagaagaggtattaaaagagagataatgagaatttagggtataggtttaggtagtggggttgggtggggaaagaatttttttatttttttatgagttttagagtcggtt

SEQ ID NO: 255 - DNA, 851 bp, Artificial Sequence
  chemically treated genomic DNA (Homo sapiens)
ggtcgattttagaatttataagaagatgggaggattttttttttatttagttttattatttgagtttatgttttaggtttttattgttttttttttaatgtttttttttttaatagagttgtaatatgggatagtttagattttacgtatgaagagtaaaagatttttttgatttttttttgtagtgaattgttgtttttgaagttaattgttgttatggttgtatttgtttgttaaatataatgatggtattataaggagtattgtttttgtgatttttttgtttaagataaaagtatagttttggtggtgtttgttggaaattcgattatgtggtttttaaggttggtatttatattttattttggggttagttaaataaaattatattttggtttggtattgttagtgttgaggaaatggcgggtatgatttttggtttagagtttatgtttatttaaattgcggttattatgagatatacgtttattttttatgagtgaataaaagttttttttttttgtttttttttttattgtttttaaagggaatattttgttttttttatttttgtaggtgtttttttatttaaagttatagattttataacgatgtgggtttatttaaagaaaaattaaaatgatgttaattatagtttagaaagttaattttgaataaatatttaaggttgtttattatttatagatatataaagttacgaatatgtattgaatagatttaattttaattttgttttttttttaataagtgaaataagttgtattagtaagtaaataattaagtggtgataatatttggttttttaagtatgtagtagaaagatttatttt

SEQ ID NO: 256 - DNA, 1072 bp, Artificial Sequence
  chemically treated genomic DNA (Homo sapiens)
aataagtatttttagtttatgattatttttgagtaaatgaggatagtaatagtataagatttttagtggtatttttaatgaaagaattatataataatttttgattattttttgtttttatgtgtttataattttattgttaatattaagagagtgtattttgttgttattaattttggttatatttttataagtatatatagtaggttattattttgttttataaatagaagttgattaagttgtttattttgtaggatttataataaattatagtttaatatagtagtagaatgtaaggatttagaaggtttaaaatttataagtttaggaagatatttaattaatagaaattaaagtttaaatttgatttatttatttattggaaattttgggttgttaaataatatttaagtttattttgtaattagattaaagttttgggttttgtgggggtcggagattggaattttattttaaaaagaaacgtgtaaggtattttgttttttattaagaagtgtaatgagtaggttttatttatgatttttagttttaaatgattgaattggtattagtgttaaaaaaattgaaaatgttttaatatgtattaatcgtttaatggatgtgttgtttgtttgaaaagggcggggtggtatttaggttgtttaatgattttatatttttttatggtaaaatatttgtgatttgattatgttgtaattaaagagttatataaataatatttttggaaaggaataaacgggtttttttgaaagagggattttggttagttttagttggtattttaggtttttttatgaggagaaaatttttatttttaggtaaatttttttttttgttttttagaagttgtttttagttttatgtttgtttgtgtgtgtgttgtgagtgtagattatgggagatggggagtgggtagagggaggattttttaaaaaataaatgatatttttaatagataattttaaaataggttgaaatataagtaataaagataagtattttaaatttagaaaaggtttgggattttgaagttaaaaagtttagtaat

SEQ ID NO: 257 - DNA, 1072 bp, Artificial Sequence
  chemically treated genomic DNA (Homo sapiens)
attattaggttttttggttttaagattttaagttttttttaaatttaaagtgtttgtttttattatttgtattttaatttgttttaaaattgtttattaaagatgttatttattttttaaaaaattttttttttgtttattttttattttttatgatttatatttataatatatatataggtaggtataaaattaagggtaatttttaagaggtagagagaggagtttatttgggggtgagagttttttttttatgaaggggtttgagatattagttggagttgattaaaattttttttttaaggaagttcgtttgtttttttttaaagatattgtttatgtaattttttaattatagtataattaaattataagtattttgttatgggaaaatgtaaagttattaagtaatttaaatattatttcgttttttttaggtagataatatatttattaagcgattaatgtatgttaagatatttttaatttttttggtattaatgttagtttaattatttgggattggggattataggtgaaatttatttattatattttttgatgggaagtagagtgttttatacgtttttttttaaaatagaattttaattttcggtttttataaggtttagagttttaatttgattgtaaaataagtttggatattgtttgatagtttagaatttttagtaggtggatgagttagatttgaattttaatttttgttaattgggtgtttttttgagtttgtagattttaggttttttaaatttttatattttgttgttatattgggttgtggtttgttgtgggttttatagaatggataatttaattaatttttgtttgtaaaataaaatagtgatttgttatatgtatttgtgaagatgtggttagagttgataatagtaagatatatttttttagtgttagtagtaaaattatggatatataaagataaagagtaattagggattgttgtataatttttttattgaaaatgttattaaaaattttatattgttattatttttatttgtttaaaaatagttatggattgggggtatttatt

SEQ ID NO: 258 - DNA, 795 bp, Artificial Sequence
  chemically treated genomic DNA (Homo sapiens)
ttataattatatatttggtagttggatggttattagtgttgtaggatgattagtaggtgttttttttttttcgtaggttagtttgggttggtggtttattttgtggttataagagagtgagaaaaagtgtgtaatattttttgaagtttaagtttagaattgatatatgtttatttttgttatatttgattagttaaagtaagttttaggttagtttaggtatagtaggcgaggaattagattttattttttgatgagaggagttgtaaagttatgtgtaagtttaggaagatttcgtggttattttagtagtcgattaggttatttagttagttttttggagttatatatgtgggttggtttttttaagtttttttcgtttaaaaagttagatagagtttgtttttttagtagggcgtatatcgtaggtttgggtgggttgtttgtttttgtgtttgttttgatttttagttatttttaggatgttttttttatggaggagaacgatttagttttgtttgttatgtgtattaagatgagttataagagagtattgtttttttgtaatgtaagaaatgtaatgtagttagaggttttgaaatttggtggggatagcggtagtagagattgtgatagtttcgggatataggaggttattttggtttttagttttaggtgtttggagttattagatagttaaagttgtataaggtataggtatgatttgttaggttgtttagttaggttagggatgatagggtacgtttattttattagttaattagagataatttt

SEQ ID NO: 259 - DNA, 795 bp, Artificial Sequence
  chemically treated genomic DNA (Homo sapiens)
gggattgtttttgattagttggtgaggtgaacgtgttttgttatttttggtttggttgggtaatttggtaggttatgtttgtgttttgtgtaattttggttgtttggtagttttaggtatttaagattgaagattaaggtggttttttgtgtttcgaggttgttatagtttttgttgtcgttgtttttattagattttagagtttttgattatattgtattttttgtattataagaaagtaatgtttttttgtagtttattttaatatatatggtagatagaattgagtcgtttttttttatgaaagaaatattttggaaatagttaaaagttaaaataaatataaaaataaataatttatttaggtttgcgatatgcgttttgttggaaaaataaattttgtttggttttttgggcggagaagatttgggaaggttagtttatatgtgtggttttagaaaattggttgagtagtttaatcgattgttaaaatggttacggagtttttttaggtttgtatatgattttatagttttttttattaaggggtggagtttagtttttcgtttgttatatttgggttggtttgggatttgttttgattaattaaatgtggtagaaatgaatatgtgttagttttgaatttaggttttaaggggtgttgtatatttttttttatttttttgtgattataaagtgaattattagtttaggttagtttgcgggaggaggagaatatttgttagttattttgtagtattgatagttatttaattattagatgtgtgattgtgg

SEQ ID NO: 260 - DNA, 706 bp, Artificial Sequence
  chemically treated genomic DNA (Homo sapiens)
ttttatttttagtatagtttatatataatgtaagtgtttaaaagtcgaattgtagtattgagttgaggggtggttagtttcggtgagttttggtgttttattatggtttttttatggttgtttttattttttttttagaaaagttattgagaaatggaattttttgatattatttttagttaaagttgttgaaaatagtttagaggagtgaattttatagagttttatgtttcgtttagatttttggggttttttgttttatggagtttgtagagtcgcgtttagattttttattttggatcgttattcggtatcggttttttttacgtagtttttttgtttttattgtaatttgattttttgttaaattattttttttttggttttaaatttttgtcgggaaagagatgaaattagtatttggagagttggaaagggaaaaatagttgttttttataaaatgggttagggagggggaagcggagtagtatagttggattttggtgggaaagttagagtttggtgggaacgtatagtttatagtaggagagataaatatataaatttagaggggtttagcggtagtagtttaggggtttgtttgttaatggtattttgtgtcgtattttttagatatagttatattttatatttatattaattattttagggttgtagagattttttttattttagagaggtaggt

SEQ ID NO: 261 - DNA, 706 bp, Artificial Sequence
  chemically treated genomic DNA (Homo sapiens)
gtttatttttttaaaatggagaaaatttttatagttttaggatggttaatgtggatatgagatgtgattgtatttgaagaatacggtataaggtgttattggtaagtaagtttttgagttgttgtcgttgggtttttttaggtttgtgtgtttgttttttttgttgtgagttgtacgtttttattagattttggtttttttattaagatttagttgtgttgtttcgtttttttttttttagtttattttgtgaaaagtagttgtttttttttttttagttttttaagtgttgattttatttttttttcgataaaagtttgaagttaggagggaaatggtttggtagaaagttagattgtagtgggagtaagaagattacgtggaggaggtcgatgtcgggtagcggtttaggatgaggggtttggacgcggttttgtagattttatgagataagaagttttaggaatttaggcggggtatagggttttgtggaatttatttttttgagttgtttttagtaattttagttaggggtgatgttaaagagttttattttttaatagtttttttggaagaggggtggagatagttatggggaaattatgatgagatattagggtttatcggggttgattattttttaatttagtgttatagttcgatttttgagtatttatattgtgtgtggattgtgttggggatggaa

SEQ ID NO: 262 - DNA, 982 bp, Artificial Sequence
  chemically treated genomic DNA (Homo sapiens)
ttgaatattattaaattgatttaaaatatttttttaatttgtttaattaagaagttggaatttaaaaaattttattaggagtgtttcgtgtgttttttgtaatatttagtttgttatgaagttaattagttgtgttatagtcgaatgttagtaaaagaatgttaagttgtaaaaggagattagaagtatattttgtgatttattttttggtaggtggtattgtttgtttgaaattatatattagtgttattatatatagttaagagggtttttagaatggattattttattgttttttttttatttaagaattttattttttgatatagatggatgtagggatgggagtcggggtagtttgggagatggaatttggcggtttaggtgttgaagggtcgagatagatttaggatggttaatgataggaaatttatttggttgtttaaatacggtgttaggtaattagtagttatttaggtaatcgatggggttggggaagtttagtaagaggtgatagcgggttttgatgataggattgatttgttttcggaggtaggttatggaagtaggtattatttagagacgtaggtaggtggttggttttggggacgtttgttagttgtagggatgggacgttaggttttgggaagagtaagagtaagatagtattttaggattagggtaattggagttcgtggatgttgttaagaaggaggtgggtattggggaaagagatgtaggagcgagtaggtggtttaggatgttaggttcggtaggattttaagagtaagtagatttcggggtagttgaagggttaagaattgtggtgttgtgaagtggtttttaggattttttaggttttttttttaggaaggtttattaaagggttttaggtgtgaaaatagcggattatggaagtgggaataggacgggatatttttaagttgggagtttttggttagaagttattggattggaaatt

SEQ ID NO: 263 - DNA, 982 bp, Artificial Sequence
  chemically treated genomic DNA (Homo sapiens)
agtttttaatttaataatttttaattagggatttttaatttgaaaatatttcgttttgtttttatttttatggttcgttgtttttatatttaggattttttggtaggtttttttgagagagaaatttaagaagttttgagaattattttatagtattatagtttttgattttttagttgtttcggggtttgtttgtttttggaattttgtcggatttggtattttggattatttattcgtttttgtatttttttttttagtgtttattttttttttgataatatttacgggttttagttgttttggttttggaatgttgttttgtttttgttttttttaaggtttggcgttttatttttgtagttgatagacgtttttaaggttagttatttgtttgcgtttttgaatagtgtttgtttttatggtttgttttcgagggtaagttagttttgttattaggattcgttgttattttttgttggatttttttagttttatcggttgtttgggtgattgttagttgtttagtatcgtatttaaatagttagatgggttttttgttattggttattttgggtttatttcgattttttaatatttggatcgttaggttttattttttaggttatttcggtttttatttttgtatttatttgtgttaggagataaaatttttagataaaaaaaaaatagtaagataatttattttaagaatttttttggttatgtgtaataatattgatgtataattttaaataagtaatgttatttattaagaaatgggttataaaatgtgtttttgatttttttttatagtttggtatttttttgttggtattcgattataatatagttaattggttttatgataaattagatgttataaaaggtatacgaggtatttttaataaaattttttaaattttaattttttagttaagtaaattaagaaaatattttaaattaatttaatgatgtttaa

SEQ ID NO: 264 - DNA, 929 bp, Artificial Sequence
  chemically treated genomic DNA (Homo sapiens)
ttttagatagataagtaaataatttttgtaaattcgagttatatttttttttttttttttaaaatttagtttaatataattgaaaattgaagtttgattttttaagtttataagggataaaagagagataggatagatagaaataattggtaacgaggagttattgggttttggttttatgggagataatagtggttttatagaaggtaatggtggatttttagttaattgaagtttgggtggaatttagttgtataattaagaagttgaatttgttttattttatttttttataatataaagagtgtgaaaaggttattttaatgtttagagagtggttttttttggaaaatattttcgaatatattatggagtagtgttaattgtagtataaaatgttttagaaattttgtaatttatgagtttaatggtatatttgaggattacgaggtttttttcgtttatttataatagttcggtgattgatttagtagagaggaagtaaaatgaataattttgattattttttaatattttttttgttttgttgattttagagttttaggggtatagtatttgtaggaattgtatgtttttttggtaatattttaaaattaaatttaaaagatgaagaagaaaaatggttattagatagttataaatatgttattatttgtaaatggtattgttttgtggatatgaagttttttattgtttatttgtttttaagtttaacgatttatatataaaggtgtaaggatttattgatattgtgttttttttttgttgatattattagttcgagaattaaggataatggatagttgtatataagtttaagttttgtatttattttttagtttttttttttattttttagttgtgtttgttttttttttgaaatttgtaaagtaggaataataataaag

SEQ ID NO: 265 - DNA, 929 bp, Artificial Sequence
  chemically treated genomic DNA (Homo sapiens)
ttttattattatttttattttatagattttaaaaaaaaaataaatataattgaaggatggaaagggaaattaagaagtagatgtagaatttgaatttatatatagttatttattgtttttagttttcgggttaatggtgttaatagagaggaagtataatgttaataagtttttatatttttatatgtggatcgttgaatttaaaaatagatgagtaatgaagagttttatatttataaagtaatattatttgtaaataatgatatatttataattatttaataattattttttttttttattttttgagtttgattttaaagtattgttaaaaagatatataatttttgtaaatgttgtatttttaaagttttgaagttagtaagataggaaaaatgttaaaaggtgattaagattgtttattttgttttttttttgttaaattagttatcgggttattatgagtggacggaaaaaatttcgtaatttttaggtgtgttattaaatttataaattgtaagatttttaggatattttatattatagttgatattgttttatggtatgttcggggatattttttaagagaagttattttttgaatattaaaatgatttttttatattttttatgttatagaaaaataaaataaaatagatttagttttttaattatgtagttaagttttatttaagttttagttgattaagagtttattattgttttttatgaaattattattgttttttatggagttaaagtttagtaatttttcgttgttagttatttttatttattttgttttttttttattttttataggtttggagagttagattttagtttttaattatattaagttgaattttaaaagaaaggggaaaagtgtggttcgagtttgtaaaggttatttatttatttatttagaa

SEQ ID NO: 266 - DNA, 892 bp, Artificial Sequence
  chemically treated genomic DNA (Homo sapiens)
aaaataaaattaatatttgaatgaatattgaaatttttttaaaaaaagataaatgagggggaaattatataagtaagtaaggttttatatatatggtgttttagaaattaattagtggatagatttagaatttatatttttttttttaaaatgttttttggtagaagttattttgtaggataaattggaattaaaagagttatgaaaattgtataatgggatgaaggggttttttttgttggggaatagatagttgatatgttggatggggttagggtttaaataaaggtttttgttgagtgggagtaggtataagatagatggtttgttaaatattgttagtatgtttgcgtagtgtcgtgcggcggttagagtttggataatggttattagggtattgtgtagtagcgtattggttaattttagtttagttaaagttattgtttatttttgttggttttgtaaagattaaggtagtttttttgttttgaatgtattatagttgtttagtaaagtatttttgaagttttgtttgaatttttattgttaagaggggttaagtaaaaggtggttcgtgtaaggatttgttttaagtttatatgtgaagttgtttttttttaattaatttggattatttttgatttttatttttgggtaaaattttttagagttataggggtttttttttttagtgagtttttttttgtgtggttcgaaatgtatttgttggggatttatattttttagatttatattttttattgggattgatttatttgttatttttgtggaaaaaggtaaatattattgtaaattttattcggtgaattatggggaggcggtggttttaattaaacgtgtttgttttcggaagggggtttttggtttttta

SEQ ID NO: 267 - DNA, 892 bp, Artificial Sequence
  chemically treated genomic DNA (Homo sapiens)
taagaagttaagggttttttttcgaaagtaaatacgtttaattggaattatcgtttttttatgatttatcggatggaatttataatggtgtttatttttttttataaaagtagtaaatgaattaattttaataggaaatataaatttaggaaatataaatttttagtagatgtatttcgaattatataggaaaggatttattgagaaagaaggtttttgtaattttagagggttttgtttagaagtaagagttaagagtggtttagattagttgaggagaagtaattttatatatgagtttaaaataagtttttgtacgagttattttttgtttggttttttttagtagtgggaatttagataaaattttaggaatgttttgttgggtagttgtggtgtatttaaagtagagaaattgttttaatttttgtaaaattaataaagataagtaatagttttagttgggttgaaattagttaatgcgttgttatataatgttttggtgattattatttaggttttgatcgtcgtacggtattgcgtaagtatgttggtaatgtttaataaattatttgttttgtatttgtttttatttaataggggtttttgtttgaattttggttttatttagtatgttagttatttattttttaataggggaagtttttttattttattgtataatttttataatttttttgattttagtttgttttatagaatgatttttgttagagaatattttggaaagggagatatggattttgaatttgtttattgattagtttttagagtattatgtgtgtgaaattttatttgtttatgtgattttttttttatttgtttttttttaagagaattttaatatttatttaaatgttgattttatttt

SEQ ID NO: 268 - DNA, 798 bp, Artificial Sequence
  chemically treated genomic DNA (Homo sapiens)
gggatttgagaaggtttttggggaggcgatatttgatttgagatttgaagaatgaggagtttggtaaagatttggggttgattagtgttttaggaataagtaatagtaagggtaagggttttgaggtaggatagagttattaatagtttaaggagggaggtttttgggttggtgagagaaagggaaggggtttagttgggtagtgggtaggggaggagtttggattttatttttcgtgagatgtgttggttttggtggtagtgggggggtttgtagttttttgttataagggttgggggtgtggggatagttagagttaaaggttttttttttatagtttcggtagttttagtttagaggcgtcggtttggcggttggaagattgtattgtgggtatatttggggagtagttgtcgagttagggttagagtgggttacgtggtatagggtaggatcgttttggagtttataaggttaagatttttaggaggggtagtggagaatattttggacgagaatagtgcgttaacgaggaggaattgtgtattgtagacgtttaggtatacggttttttgtagttttatatagtttttgttttaggatagagtgtttgggtttaatgttattttttagttttgtgatttgaaataagttatttaatttttttgggttttatggttttagttgtgaaggggatatgatattattattatagttttataggttgttttttttttttttttttttttttttttttttttaattttttgagacgtagttttattttgttgtttaggt

SEQ ID NO: 269 - DNA, 798 bp, Artificial Sequence
  chemically treated genomic DNA (Homo sapiens)
gtttgggtaatagagtgagattgcgttttaaaaaattaaaaaaaaaaaaaaaaaaaaaaaaaaaaaaagaatagtttgtggaattgtggtagtaatattatgttttttttatagttgaggttatgagatttagagaggttgagtgatttgttttagattataaagttgggaggtggtattgaatttaggtattttgttttgaggtaggggttgtgtggggttgtagggggtcgtgtgtttggacgtttatagtgtatagttttttttcgttgacgtattgttttcgtttagagtgttttttattgttttttttaggagttttggttttgtaggttttaggacggttttgttttgtgttacgtgatttattttggttttggttcggtagttgttttttagatgtgtttatagtgtaattttttagtcgttaggtcggcgtttttgggttgggattgtcggagttgtgggggagagatttttggttttggttgtttttatatttttaatttttgtaataggagattataggtttttttattattattagaattagtatattttacggagaataagatttaaattttttttttgtttattatttaattgggtttttttttttttttttattagtttagaggtttttttttttaaattattaatagttttgttttgttttagggtttttgtttttgttgttatttgtttttagaatattgattagttttaggtttttgttagattttttattttttaagttttaggttaaatgtcgtttttttagaggtttttttagatttt

SEQ ID NO: 270 - DNA, 945 bp, Artificial Sequence
  chemically treated genomic DNA (Homo sapiens)
gtgttattttaggtatgttttggttttttttttgataagtatgaagttttttatgataatttagtgatatggaggtagatttgtatgatgttttgggtttgtgatttgaggttttaaggattagagggtaaggtagtagtatttggtttttatttttttttggtttaattgagttttgggggtttgcgtattgttttgagtgtttggttgaatttgtatattttgttggattaattttgatattgttttttttttatttttttcgatgaaggtcgttttattgaattttgtttgttggggaagttttttattgttgagagtagtagttaaaaaagttgttagttacgtggttgggtttttatttttgtagaggtaggttgagttatagtttggtggtgtggatttaggtaggaattggttaatattttgaattttgagttgttatttgtttcgtagtttgttgggatgtttagtttagataatatataaagttttttggatacgggataaatttaggtttatggaaagagtaggaaggttaaagtgtgtggtattttgggtaatgacgaaggcgtaattagggagttgatatgtttgttttaaagttaagaattttaggataatttgttatttagttgaagttagtgtagttgttataaaaaagtttggggataaaagtatgttttttatttgtttttttgtttttttgtatatttattttattttttaaagttgtagtaaaggttgttgatattggaaatgtttgatgatttttgttatttttttcgtaaatgaataagagtttgggtttaggttaaattatggttttatgtgttgaaagtattagttttttgaaatagttttataaatgttgatattttatttagattaggagggttaggggaaaggtttaagtaagtattaggttttattatgaaagaatga

SEQ ID NO: 271 - DNA, 945 bp, Artificial Sequence
  chemically treated genomic DNA (Homo sapiens)
ttatttttttatgataaaatttagtatttgtttaggttttttttttgatttttttggtttgagtgaaatgttagtatttgtgaagttgttttaggaagttgatatttttagtatatagagttatggtttggtttgagtttagatttttatttatttacgaggagaatagtaaaaattattaaatatttttaatgttagtaatttttattatagttttagaaaatagagtaggtgtgtaagaagatagggaaataagtaaaaagtatgtttttgtttttaggtttttttgtagtaattatattggttttagttggataataaattgttttggaatttttggttttggagtaaatatgttagttttttggttacgttttcgttattgtttaaagtattatatattttaatttttttgttttttttataggtttgggtttgtttcgtatttaggaaattttatatgttgtttaaattgagtattttagtaggttacgaggtagatggtagtttaggatttagaatgttgattaatttttatttggatttatattattaagttgtaatttagtttgtttttgtagaaataggagtttagttacgtggttaatagtttttttaattgttgtttttagtaatgaggaatttttttagtagataagatttagtaagacggtttttatcgagagaaatgaaaaggaagtaatattaagattgatttaataggatatataggtttaattaaatatttaagataatacgtaagtttttaaagtttaattaagttaggaggagatgaggattaggtgttgttattttgttttttagtttttgggattttaggttataaatttaggatattatgtaggtttgtttttatgttattagattgttataagaggttttatatttgttaggaaggaagttaggatatgtttgaggtggtat

SEQ ID NO: 272 - DNA, 776 bp, Artificial Sequence
  chemically treated genomic DNA (Homo sapiens)
tatatatatgtatgtatatatttagtgttttagataagggaggttatgtttaaggtagtttatttttaaatttttatttaaagaaattttgaatgttttttgggtttttgttggattttagaatttttgtttttatttttagttattgtaaatgaattttggttttatgtttatagtaattagttttagttttggtattattttaaaggaaaaatgttaaattatatttgttcgaggtttttggaatggtttaaaagtttagggaaaagggtgtatagggtaggaaagtggggtgagtgaggtattatttttttagttagaaagcgtagttttgttaggagttttttggttagtgttatttttttttgtatattgcgtcgttttaggtcgcgtagaagtcgtagtttttgtttagttaaaaggttttgggagggtaaaaagatagtatgagcggaaggttttagttaggcgtttttgagttttttttcgaggtcgtattaggttgtgtattaggagtttttttcggtatcgatttagggtattgggtcgggttatcgttttgcgttcggtatcgtggtaaaattgtttgtagtgagtagggatgtgtatagtagataggaattaaaggaaaggagaaggatagtgattttggggttatttgttttgagttgattttttatttttagttttttttatagtttttttagttttgggttttgaagaggtatttttttttttgtaaagttggtttatttttatttggattatttttaaaa

SEQ ID NO: 273 - DNA, 776 bp, Artificial Sequence
  chemically treated genomic DNA (Homo sapiens)
ttttgggagtggtttaaatagagataggttagttttgtaggagaaagggtgtttttttagagtttaagattgagagggttatgagggaggttgggggtgggaggttagtttagagtaagtggttttaaggttattgtttttttttttttttttgatttttgtttgttgtgtatatttttgtttattgtagatagttttgttacggtgtcgagcgtaggacgatgattcggtttaatgttttggatcgatgtcgagggaaatttttggtgtatagtttggtacggtttcgggaagggatttaggggcgtttagttggggtttttcgtttatgttgtttttttgtttttttagaattttttggttaagtaaggattgcgatttttacgcggtttgagacggcgtaatgtgtaaaagaaggtggtattggttaagaagtttttggtaaaattgcgttttttggttgaggaggtaatgttttatttattttatttttttattttgtatatttttttttttaagtttttgaattattttagaggtttcgggtaggtgtgatttaatattttttttttggaatgatgttagggttgggattaattgttgtgggtataggattaagatttatttgtagtagttaagggtgaggataagagttttagaatttagtagagatttagggaatatttaggatttttttggatgaagatttgagagtaggttgttttgagtatgattttttttgtttgaagtattaaatatatatatatatatatata

SEQ ID NO: 274 - DNA, 1597 bp, Artificial Sequence
  chemically treated genomic DNA (Homo sapiens)
tgatatttagattttatttaagattaattatgttagaatttttggggtgtgttttgggtatttatatatttttaaagttttttagtcgttttagtgtgggtttaaggattgttttagttttagattaattttaagagttttaagatgaatatttggggaaaaggagaagttatgagttttagataagagaaataatttgtttaaggttatataaggtggtgatggtaaagttcgttttgaaatttaggttttttttttgatcgtgggttaatttttttttgatgttgtatttttttttaaaaattagagtttaggtaggtaatgtttatagtattttattttaataatattggaaatcggtatagttagggttattatagtggtggggcgggagtttcgatggcgattaggggagttgtaagtttttcgttttatttaaattttgggtagtaatttagaaaatttaattaaagggggagaaatggggatatttcgcgttttttgttttttgttataatgagtgaaatatattaggttgtaaaaggaaatgttgtttgagacgtagtttcgatgttttattgttaagttttatttattgatgtaaacgtaatcgttggaaatcggagtttttattaatatatatatttttatatattcggggttttttttgtttttttttttttttttgggtttgtttatttattttttagggttagttttgttgttttttgggtatgtttatgttaagtttggagtttcgtatcggttttatatttttttatggtagataagattttaatagaattttattgttttttagagtttagtaatgtattttggaaattaggcggttatatattaaagttattgtttttttttataaatgggtttttttaaagttagtgattatgggggttttgataagtttttatgaagttttattttatatgttattggtgtgttaaaaggtgtaattttaggtttatattgtttattgttaggggttgatatatttaagtagtttttttatgaattaggtagtttaggtattttttttatttttggtattgatagatgagtaaaaggaagttatttagatggtgttatatagggttttagtttacgtggtgaatgatttttaatgtttggtttaatttatttttaaatgaaatttgttattgattttggattaaaaggataaattttatagttgttattattgatagagttatagtgtttaagtgatattttttaaggaggggagggagggtggtttgtttgagttaaggggagggtatggagattttttagggagtttggtttagtagtaaggggtagtgtaagattttatgtttagagggaagtttaaaaatattattttttttaattgaaatatttgacgtgatgtttatttttgagttttatttatataatggaaatagtagtgatatttgttttatggtatttatacgattattagaggtatgttagttgtttttagggatgggaggttttttattttttgtagtatttttagaatgaaatgagtgataggcgttatttattttagtgaatttttagagattgttttttgggt

SEQ ID NO: 275 - DNA, 1597 bp, Artificial Sequence
  chemically treated genomic DNA (Homo sapiens)
gtttaggaaatagtttttaggaatttattagagtgggtgacgtttgttatttattttattttgggaatgttgtaggagatggaaagttttttatttttggaggtaattaatatgtttttagtggtcgtgtggatgttatgaggtaaatattattgttatttttattatataaatgaggtttagaggtgagtattacgttaagtattttaattgggaaagatgatatttttaaatttttttttaagtatgggattttgtattgttttttattgttgagttaagttttttggagagtttttatattttttttttgatttagataggttatttttttttttttttttgagaggtgttatttgagtattgtggttttgttagtggtaatagttgtaagatttgtttttttaatttagaattaataataaattttatttaaaaataaattaaattaggtattggaaattatttattacgtgggttggagttttatatagtattatttaaatggtttttttttgtttatttattaatgttaagagtgggggaaatatttaggttgtttgatttatggagaaattatttaaatgtattagtttttaataatgagtaatgtaagtttggagttgtattttttagtatattaataatatgtggagtgaggttttatgagagtttattagagtttttatggttattggttttgagagagtttatttataagggggaataatggttttagtatgtagtcgtttaatttttagaatgtattattgagttttgaggagtaatggaattttattaaagttttatttgttatgggagggtatgaaatcggtgcggaattttaggtttggtatagatatgtttagaaagtagtagggttgattttaggaggtgggtgaataagtttagagggagaggggggagtaggaggggtttcggatgtgtgaaaatatgtgtgttaataagagtttcggtttttagcgattacgtttatattagtgaataaaatttggtaataaaatatcggagttgcgttttagatagtatttttttttatagtttggtgtattttatttattataataggaggtagggagcgcgaggtgtttttatttttttttttttaattaaattttttaaattattgtttaagatttggataaagcgaaagatttatagtttttttaatcgttatcgaggttttcgttttattattgtggtggttttgattgtatcggtttttaatattattaaagtgaaatattgtgggtattgtttgtttgggttttggtttttaaaaagagatgtagtattaggaagaaattggtttacggttaggaaagaggtttgggttttaggacgggttttgttattattattttgtgtgattttgggtaagttattttttttatttgagatttatgatttttttttttttttagatgtttattttgaggtttttagaattgatttggagttggggtagtttttggatttatattgggacgattggggagttttaagaatatatgggtgtttagggtatattttagagattttgatataattggttttaggtgagatttgggtatta

SEQ ID NO: 276 - DNA, 804 bp, Artificial Sequence
  chemically treated genomic DNA (Homo sapiens)
taaatattgttttagtgtttggtttagttttagtttaatgttgtattttgtatttgtttattgtaagatgtgaatgttttatttaatttttttggtagatgtatttttttttatatttttttaaaaattgaaagatgatttttttattttttatttagttttgaaagggaggtatagttaatgatttcgtacgtattttagaaattgatttttttagattttaatagaagttatttaagtgtatagatgtttgttggttttatatggaggttttgttggttatgaaaaaatatttttttttaattttttgtttaatttgttttaagttggtaatgaaatttgtgaatttgtgttttttttttataggaaaaatagaattttgattttttttaaaaattagaacgtaataggataatggagaaattagttttaatagtatattttttgttcgttttagagcggtgatgtaaatacgatgatgttatgtttttggggtttttgaggtttttgttaaaagtatagtagtttaggtggattcgtgtttatcgtatgtttttttggtggatttttgtcgataaattgtatgtttgtttttttgaaatagtattatgaagttgttaatgtttttgtataaagattattttattttgtttgttttggggataaagattttgtattaattattttgtttttttttggagcgaagagttgaagaggtaataggaaatgtttatttattgagtttttattgggtattaattgtggatatttatagaaggggtttgagtaagtatttttttattg

SEQ ID NO: 277 - DNA, 804 bp, Artificial Sequence
  chemically treated genomic DNA (Homo sapiens)
taatgaggagatatttatttaaattttttttgtgggtgtttatagttggtatttagtaagaatttagtaaataagtattttttgttgtttttttagtttttcgttttaggagagagtaaggtgattagtgtaaagtttttgtttttagggtaaatagaatggggtggtttttatgtaaagatattaataattttatgatgttattttagaagagtagatatataatttgtcgatagaaatttattaaagaagtatgcggtaggtacgaatttatttaagttgttatgtttttggtagaaattttaaagattttaaaagtatagtattatcgtgtttatattatcgttttgaaacgaataagaaatgtgttattgagattgatttttttattattttgttgcgttttgatttttaaaagagattaaaattttattttttttgtagaaagggaatatagatttatagattttattattaatttaaaataaattgagtaaaaaattagaggggaatgtttttttatagttagtaaggtttttatgtaaaattagtaaatatttgtgtatttgagtagtttttgttaaggtttaaggaagttagtttttggaatacgtgcgagattattgattgtgttttttttttaaaattgaataagaaatgaagaaattattttttagtttttaaaaaagtgtaaaaaaggatatatttgttaagaaagttggatggggtatttatattttataataaatagatgtagaatgtagtattgagttggaattgggttagatattggggtagtgtttg

SEQ ID NO: 278 - DNA, 838 bp, Artificial Sequence
  chemically treated genomic DNA (Homo sapiens)
gggaattttggagttgggatgttttaaatcgagtaaggggttaggtttttgaatttatgtatttattagatattggatatgggtttttgtttttttattcgtttaaaggtatgacgtggggtgaggtagttgattttggttgagggttgttagtagttatagggttaaaatcgttttgggtggtatgatttattatataaaatttgttaaaaattcgggtcgattttagttttggaaataatagtaggtaagacgtggtttgagtttgggtttatttagttgggtttggtttcgtttcgagggtttgtcgtttgttgtgattatagtaggattagtgttttagattttgtttaaagtttggcggttatcgtttgtttcgtagtttatttttcgtagtttttcgaggttttagcgattatgttattgaaaatttcgtttttattttgttaatttcgtagtaaattataggtttggggaggcgtgggttttttttttaaataagatttaattttatttagttgtttttatttttattttatatacgggtttttttttttttattatttcgggttcgggatttatggtttttttttgtaggtagttggtaattatggtaagttttttagggaggttttaggttggagtttttttagttttagattttagtacggtcggtcgtttttttttaggatgggagaggggagaggttagagatggtaggaatgggttttaggggttaaggtcgagaggttatagtaattttagtaattatgagaattttaatattattatatttgatttttataataattattattttttttattatatagatggg

SEQ ID NO: 279 - DNA, 838 bp, Artificial Sequence
  chemically treated genomic DNA (Homo sapiens)
tttatttatataatgggggaaatgatggttattgtgagggttagatgtggtagtgttgaagtttttatgattgttggggttattatgatttttcggttttggtttttgaagtttatttttgttatttttggtttttttttttttttattttaggagaaagcggtcggtcgtgttggagtttggggttaaggaggttttagtttgaagtttttttaaggagtttgttatggttattagttgtttgtaaagagaggttataaatttcgagttcggggtggtgggagggagggaattcgtgtgtggggtgggaatgggggtagttaagtggaattgaattttgtttaaggaggaggtttacgtttttttaggtttgtaatttattgcgaggttgataagatgaaagcggaatttttagtggtataatcgttgggatttcggggagttgcgggagatgagttgcgaggtaggcggtggtcgttaggttttaagtaagatttggggtattgattttgttgtgattatagtaagcgatagattttcggagcggggttaggtttagttggataagtttaggtttaggttacgttttgtttgttattgtttttagggttgaggtcggttcgagtttttagtaggttttatgtgatggattatattatttaggacggttttgattttgtagttgttgatagtttttagttaaagttagttgttttattttacgttatgtttttaggcgggtgaggggatagaaatttatgtttaatatttggtagatatatggatttaaaggtttggttttttgttcgatttggagtattttagttttagagttttt

SEQ ID NO: 280 - DNA, 938 bp, Artificial Sequence
  chemically treated genomic DNA (Homo sapiens)
tatttttattgtatagatgaagaagatgaggtataataatttgtgtaagtttatatagttaatgtgtcggagttaggttttgaatttcgatagtttgattttagattattttttttttttagtatttatgttttggtgttttttgtggtatatttagaagatggtttgtatgtgtatgtgtttatttttgtgtgtgtgtatgtatgtatgtttatgtaggattgggaatgtaggggagttagagtttagttaggaaggagagaggaaatatgatttttttgttgtatgtgggtatcgtaattttagttaggtaaagtgttggtttgttgtagtttatttttatgtttttatttagaagttttaatattagagttgatggtagaaaatgtgtagtaaaatgcggggaggtcgttgggtaatggtttttgtaaagtgttaattgtttattgagattgtagattttgtttatgttttaggatttgaattattgataggttttaatttatttcgggtttataaagcgggttttttttttaaataggtttttaattagttacgtttttttgggtttgttaagaagttttagtcgataagtatgtttgttgttttaattttttgaagttggtcgtgtggtttgattttggtttgttttaaggaaatttttatgtataatggttttggatgaaaatttatgagaattaagtgttgatttcgtgttgggtttttagttgggtgttttatatgtattgtttttgatttttatcgtttagagaagtaggtagtatttttttaaggatattttaattttagagaagttgaattaattgtttaagtgattattatgattatattttagattgttacgggttaaattgtgtttttttaaatttatgttttgaagttttagtttttagtattttggaatgtgatcgtatttg

SEQ ID NO: 281 - DNA, 938 bp, Artificial Sequence
  chemically treated genomic DNA (Homo sapiens)
taaatacggttatattttaaggtattgagagttagagttttaaagtatgaatttgagggaatatagtttagttcgtaatagtttgaagtataattatagtggttatttaaataattaatttaatttttttgaggttaggatgtttttgaagagatattatttgtttttttaagcggtaaggattagagataatgtatgtaaaatatttagttgggagtttagtacggagttagtatttgatttttatggatttttatttaagattattgtgtatggaagtttttttaaggtaagttagaattagattatacgattagttttaaagggttaaggtagtaaatatatttatcgattggagttttttggtaggtttagggaagcgtgattgattggaagtttgtttagaggaggagttcgttttgtgggttcgaaataaattagaatttgttaatagtttagattttggagtatggataaagtttgtagttttaataggtaattaatattttataggggttattatttagcggttttttcgtattttattgtatattttttgttattagttttggtattgaagtttttaaataaaaatataaaaatgagttataatagattagtattttgtttggttggagttacggtgtttatatgtaataaagagattatatttttttttttttttttaattggattttaatttttttgtatttttagttttgtataaatatgtatgtatgtatatatatagaaatgagtatatgtatatgtaggttattttttgagtgtgttataggaggtattagagtatggatattgggaggaagaggtggtttggagttagattgtcggagtttaaagtttgatttcggtatattaattgtgtgggtttgtataaattgttatgttttattttttttatttgtataatgggagta

SEQ ID NO: 282 - DNA, 816 bp, Artificial Sequence
  chemically treated genomic DNA (Homo sapiens)
taaattaggaaggtattaattggtgtatgttttgtaagtgttgttagaattagagttattgggttggttgataggagtttagagggtagtttttttttttttttgagtttgtttttttagttattttttttaaaagttgttgggttgatgtttgtattttggttggttttgatgttagttttgacggggttattttggaatttgtttgtataggttgtcgagggcgtgagaatttaagtagataatttttagttttattttttttgttgtgttaggttgttagtgttagttgaggaggtttttttttgtttttgtttgttttttttgattgttatgtaatgttcggtagtaggaggtaaatttttttttaatttttaggttcgttatagcgtatgaattttatcgtggggagttatagtgattgagtttagtagttaggttttatgttgagtgttataaattaggtttattattagttttttttggtagatgttatagttaagaatttgtttattgtttgcgagatttagtcgtttttgtatattgttaaattagggttgatagatttatcggggatttaggggatttttatgatattttggttgggtgttgttaggaattttattttgagagagtaggaggtgatatagtttttggtaaggtattttagatttgagattttatagtttgatgtacggggagtagaattagggtatgattatttgtaggttatttggattttttggtatggtggttttttgtgtgtttggttgtatacgtaagaatttttaggggatttgttaaaaaatatatatt

SEQ ID NO: 283 - DNA, 816 bp, Artificial Sequence
  chemically treated genomic DNA (Homo sapiens)
gatgtatattttttaataagttttttagaggtttttacgtgtatagttaggtatataagaggttattatattaggaaatttaggtagtttgtaggtgattatgttttgattttgtttttcgtatattaggttgtgagattttaggtttgagatgttttgttaagggttgtgttattttttgtttttttagaataagatttttggtaatatttagttagagtgttatgaagattttttaaattttcggtggatttgttagttttggtttaatagtatgtagaggcggttgggtttcgtaagtagtgggtaggtttttggttatggtatttgttaggagaagttggtaataggtttgatttatgatatttagtatgggatttggttgttgagtttaattattgtggttttttacggtggggtttatgcgttgtaacgggtttggaaattggagaggaatttattttttgttgtcgaatattatataataattaagggaaataagtagaggtaggagggggtttttttagttggtattggtagtttggtatagtaaaggaggtaggattgggagttgtttgtttgggtttttacgttttcgatagtttgtgtaagtaggttttagggtggtttcgttagagttggtattagagttagttaagatataagtattagtttagtaatttttagaagggatggttggggagataggtttagaggaggaaaagggttgttttttaaatttttgttagttagtttagtagttttaattttaatagtatttatagaatatgtattaattaatatttttttgatttg

SEQ ID NO: 284 - DNA, 1072 bp, Artificial Sequence
  chemically treated genomic DNA (Homo sapiens)
gggttatgtatttagtatagttattggtatagaataaatatttattatttgttaaatgaatgaatgaatgtgtatgcgtgtttgtgtgtgtgtgtgtgtatgtatgtttatatgtgagtgcgggtgtttgggtttttgagagtggggttattaatgtttgagtgggtgtgagggttttatatttgattatgtgtttaggtttttgtaagtttagaatttgattatgtagagataatgaatttttttgtatttttttgatttttatttgtgtttttatttattttttttagggttttttttgtttggggagttattttttttattagtttgtagttagtttttatttggatttttatttttgtgtgtttttcggaggatatagatggtaggagtacggaatcggaagtatttggtaatgaagtagtaatttatttcgtaattttttcgtatttatcgtaataatgtttgttttgatgggtttcgcgcgttgaatgtagtttttaatgtgtaatttagcgggaattgtggtgttttgtggtttttattacgtttatttattgttaagtgttgttgagaatttttttattcgggatgagggaattatttgttttagtaattgattttcgaaattttttttgggttggggtatttgcgaagtttttggtgatgtgttattgtttttggtttgtgttttggatatttatgtgttttgttgaagtatgtaaattgttataatgtgaggaaatgtgatataaaaataatttcggggtaataaatattagaggagttttaagattggtatagttttttttggttttgttttggggttagggagtattttttgtcggtagtgttggtagtaaaggtttgagatgttttggaatgattattgtttatttttttgtagttgtttagttggtttgttggagaagggcgggtgagattttttttaggaaggtaggaatagttggatgtggatcgtttttttttttcgtagttggttaatagaattataggttttgttttggttaaagggaatttgttatttttgattatttaggtggttgtatat

SEQ ID NO: 285 - DNA, 1072 bp, Artificial Sequence
  chemically treated genomic DNA (Homo sapiens)
gtgtgtagttatttgaatagttaggggtggtagattttttttagttagagtaaagtttgtggttttgttgattagttgcgaaaaaaggagacggtttatatttagttgtttttgtttttttaggaggggttttattcgtttttttttagtaggttagttgggtagttgtaggaggatgggtagtggttattttagggtattttaggtttttgttgttaatattgtcggtaagagatgttttttagttttaaggtaggattaggaaaggttgtgttaattttggagtttttttggtgtttgttgtttcggagttatttttatattatatttttttatattatggtaatttatatattttagtagagtatatgagtgtttaaaatataaattaggaataataatatattattaggagtttcgtagatattttaatttagagaaggtttcggaaattagttgttaaaataagtggtttttttatttcgagtgggagaatttttagtaatatttgataataagtggacgtgatgaggattataaagtattataattttcgttggattgtatattgaaagttgtatttagcgcgcggagtttattagagtaggtattgttgcgatgaatacgaagggattgcggaatgaattgttgttttattgttaagtgttttcgatttcgtgtttttgttatttgtgtttttcggaagatatatagaagtaaaggtttaaatgggggttggttataggttggtgaggagggtagttttttaggtaaggggagttttaaggaagatgagtgggagtataggtaggggttagaggagtgtaagaaaatttattgtttttgtatggttaagttttagatttatagaaatttaaatatataattagatgtaggatttttatatttatttaagtattaataattttatttttagaaatttaaatattcgtatttatatatggatatgtatgtatatatatatatatagatacgtatatatatttatttatttatttaataaatagtgagtgtttattttgtattagtgattatgttaagtatatggttt

SEQ ID NO: 286 - DNA, 1039 bp, Artificial Sequence
  chemically treated genomic DNA (Homo sapiens)
tatttgttagtttttgttatttttttagaaaagtttattgtaatttgtgtgtgtgtgtgtgtgtgtgtgtgtgtatattatagttatatgtatggaatattttttttgagttttttttaaagttttttagagggtaggatttttttgtagttgggcgtgcggtagataatagtttagtgtttgagtttttaagtgttgtgagggatgttagagttttaatcgagaattatttttttggtgttttattttgttttgtttggttttttttatttagtttttggagggttttttttagtttagtttgaaagagtatttagttttttagaggaggggtagtattttgttgtgatgtgagtttaattgtttttagattgagcgttttcgtgggataatagttttagtcggtgttttttgaattaatatgtttattgaaggattgaagatggtgattaggttcgatagtattagtttcggtgggatagtcgtagtgttatagagttgtatgggatcgtaaggagatttatttgtgtggaatggagatatatggtcggaattatttgtttttttttttttgtaattaaaatatttgggagtagtaaagggttggaaaatgaggagaaagtagtgaatatttttttttgtttagttttgaataatttagttatggggttggggtattagggggtataagttatttggtataggttggtttaggagttgtaatggtttaaaggttaggtaatttgtaaatgtgatttgggggttttgtttttggtgttttattttatttttttttgaaagtatgtagaattggtttttttttgaagttgtttttaaaatgttttataaaaaaaaaaaaaaaggttaaatgataacgaaagtgtagggtttattgttggagtttgatataggttatgatttttatttaagagttatatttttaatggatttaattaagttagtattaagatttttagtaaagatattaagtttggaaggaatggtgtttaagggtgttttttattttttttagaaggat

SEQ ID NO: 287 - DNA, 1039 bp, Artificial Sequence
  chemically treated genomic DNA (Homo sapiens)
gtttttttaagaaaagtaaaggatatttttaggtattattttttttaagtttgatgtttttgttaagggttttgatattggtttgattggatttattggaggtatagtttttagatgaaggttatagtttgtattaggttttaataatgagttttatattttcgttgttatttagtttttttttttttttttgtaaaatattttagaaatagttttagaaagaaattaattttatatgtttttaggaaaaaataaaataaagtattaaaaataaaatttttaagttatatttataagttatttggtttttgggttattgtaatttttggattagtttatattaggtggtttgtattttttgatgttttagttttatggttggattatttaaagttgagtaggaagagatgtttattgttttttttttattttttagttttttgttgtttttagatgttttaattatagaggaaagggagtagatgatttcggttatatgtttttattttatataaataaatttttttgcggttttatgtagttttgtggtattgcgattgttttatcgaaattgatgttgtcgggtttaattattatttttaattttttagtgagtatgttaatttagggaatatcggttgggattgttgttttacggaaacgtttaatttagaaataattagatttatattatagtaagatgttgttttttttttggggagttgggtgtttttttagattgagttgaaaaaagttttttaggaattgagtgggaagagttaggtagggtagggtgagatattaaggaaataattttcggttgagattttgatattttttatagtatttagaaatttaggtattgggttattatttatcgtacgtttagttgtaaaaaggttttgttttttgaggaattttgagaagaatttagaggggatgttttatatatgtagttgtagtatatatatatatatatatatatatatatataaattatagtgagtttttttgaggaaatagtaaaagttggtagata

SEQ ID NO: 288 - DNA, 1246 bp, Artificial Sequence
  chemically treated genomic DNA (Homo sapiens)
tttatgtgggaataataaaatgtgttttagatgtttgaaaaggttagtgttgaagggttaggggtatggggggagattttaggaggtgagggatattatttatttaatataagcgtgtttttttttttttttttgatttttttagtttgtaagatttcggtttgtagttgttagggaatatgttaaagtttaggtttaggaggggttagggtaggtgaaaggggaagaggtatttggattaattattggttgtttttaaatgtttaaagttggtatttatatatttgattttttttatagttttttttttttagatttaacgtttaggtttttttgattttaaaattgggttatttgaatgttaaattttcgataattttttaatagaggtgtttattaatttgtgttaaattagagtttagcgtttttggaaatatatgtgatatttatatgaatattaaatgtttttattaggtatagtatttatatgatgaatattaaatgtagagtttaacgtagggatatagatttcgtttcgaggatttgttaatatatttttgcgtttttttagcggtatcggttagttttgtttgttgtttatttttaggtgatgagatgtggtaattgtggtattggttgaaataaataaatggtattttaattattaagtttagagatggagtagtaaaggaggttatagttgattatttaggagttagtaaaaggatgtttatttagtatgtaagacgatttttaaatattttataaaaggcgataattttttttgattaaagaatatattatttataagtgattttaatgttttttttttttttttttttattgttatttttttgttttttatttttattgtatgttgtagtatttgtttagtgatgaagtttttcgtaataaataatttataaagtaatttataagtatattatttttagtaataagataagatttggaagaaagtgttttattgatatatatatatatatatatatacgttttttggtttataagtagtaagttattagaatattaataattaaggtttatgggtttggggtgaagggtgttataagttatagtgttggagtttttatatataagttatgtaaagtgtttgaagtgtatttgtataataaataagagaaaatttattaaaaatagtttttttttttaatttttgtatatagttgttatggttttgtttatatggcgtgatattaagtgaaga

SEQ ID NO: 289 - DNA, 1246 bp, Artificial Sequence
  chemically treated genomic DNA (Homo sapiens)
tttttatttagtattacgttatgtggataaagttatggtagttgtgtataaggattaagagaaaaggttgtttttagtgagtttttttttatttattatgtaaatatattttagatattttatatggtttatgtataagggttttagtattatggtttataatattttttattttaagtttatggattttagttattggtgttttgatagtttgttatttataagttaaggggcgtgtgtgtgtgtgtgtgtgtgtattagtaaaatatttttttttaggttttattttattgttaagaataatgtatttgtaaattgttttataaattatttattacgaggggttttattattgaataagtgttataatatatagtgaaaatggggggtaggaggatggtagtgaaggagggagagaagaaggtattggaattatttataaataatatattttttggttaaagaaagttatcgttttttatgaagtgtttggaagtcgttttgtatattaagtgggtatttttttgttgatttttgagtgattagttatagttttttttgttgttttatttttgaatttggtgattaggatgttatttatttattttagttaatgttataattgttatattttattatttggaaataaatagtaaatagggttgatcggtatcgttgaggaaacgtaaagatgtgttggtaagttttcgaagcgaaatttgtgtttttgcgttgggttttgtatttggtatttattatgtaagtgttgtgtttaatgaaggtatttggtatttatgtgggtgttatatgtatttttagggacgttgggttttaatttagtataggttaatggatatttttattaaagggttatcgaaagtttgatatttaaataatttagttttaaaattagagaaatttagacgttaaatttgaaggagagaaattgtgagagaagttaagtatataaatgttaattttagatatttgagagtaattaatggttgatttaagtgttttttttttttttatttattttgattttttttgggtttaggttttggtatattttttgatagttgtaggtcgaaattttgtagattggggaggttagggagagaaggaagggtacgtttgtattaaatgaatggtgttttttattttttaaaatttttttttatgtttttggttttttagtattaatttttttaggtatttaaggtatattttattatttttatataaa

SEQ ID NO: 290 - DNA, 976 bp, Artificial Sequence
  chemically treated genomic DNA (Homo sapiens)
tttgtgtattttttatttatttttttttattaataatattatatataattatagtatagtgttaaaatgaggaaattaatatagtattatattgttaatttgattatagaatttgtttagattttattaggatttacgtgtatttttgtgcgtatatgtatgcgtgtgtgtgtggtttatttttatttttaaggattgtttttttttataatttttatgttaaggttatggagttttagttattgttaggtagaggtggagttatatatgattgcgtttttatataattatattttttttatttaagaatatttattttatatggagaaatagattatgtttattaattattttagaaagtatgtaattttattagattaagttttgtttttgggtattgattaatagagggaacggttttttagcgatttagaatttttacgatacggtttgtggagattatattttggggttagttgtttaaatgtattgttggaattttaggtagaaatgtgtaatggtatgttaagggttgttgagttgttatagtttaagtagggttatttgtggtttttaaagagaggttgtaattttttatggtatttataaattttagtttttaagagttagggagaaaatgtaattatgttgtttgatcgagttaattttttttttattttgttttttttttatttttattattattttatttttaattttgagtagtttgtatagttgttttagggtaaagaatatggtatgagatattatttttagtattattttagggttagataaaatggttaggtattttttttgatttaatgagggaaagttttagaaagttgttgataaagtagaaattttttaatttgaggttttgaatatttattgttttttttgagtaagatagaaaagttttatttattggttggggtatttttaatggtagttgtaggttagggatagttatgtt

SEQ ID NO: 291 - DNA, 976 bp, Artificial Sequence
  chemically treated genomic DNA (Homo sapiens)
gatatgattgtttttggtttatagttgttattaaaagtattttagttaataagtaaaatttttttgttttgtttagaaagaataatgaatgtttaggattttaaattagaaagtttttattttgttaataattttttgggatttttttttattgaattagaagggatgtttggttattttatttggttttgaggtaatgttaaaggtaatgttttatgttatgttttttgttttgggatagttatgtagattatttagggttgggggtagagtgatggtgggagtgggagaggggtaaggtggggaaagagttagttcggttaaatagtatggttgtattttttttttgatttttgaaggttgagatttgtggatattataaaaggttatagtttttttttggaagttataaataattttgtttggattatgatagtttagtagtttttggtatgttattatatatttttgtttggaattttagtagtgtatttgagtagttggttttaaagtatggtttttatagatcgtgtcgtaggggttttgggtcgttggggagtcgttttttttattagttaatgtttagagatagagtttgatttaatgaaattatatattttttggagtgattaataaatatggtttatttttttatatgggatgaatatttttaaatgaaaggaatgtgattatgtgggggcgtagttatgtatagttttatttttgtttagtaatggttaaaattttatgattttggtatagagattgtaaggaaagatagtttttaaaaatagaggtaaattatatatatacgtatatatgtacgtataagagtatacgtaagttttggtaaaatttggataaattttgtaattaagttaatagtatgatattatgttaatttttttattttgatattgtattgtggttatgtgtgatattattaatggaggaaggtgagtaaagggtatatagg

SEQ ID NO: 292 - DNA, 1061 bp, Artificial Sequence
  chemically treated genomic DNA (Homo sapiens)
tgtgtgattttttatgggggatatagaagggggagtttagtcggggattttgagttttagttgtttttggaatatgattgtatagatcgcggtttgaaaggaagtggtagagaagaaaaatttaaaatggttgttaatagtttgttttttggaggttttagagtttcgggggttatggatgtatggttacgtagggtgagtaattgtgatgagagaatagaaaggaaatttaaataagagaatttaaagtagagatgagttaaaaattagtaatacgaattattataagtgggtagttacgttcggtaggagatttaggtaaagcgagggtaaattttttagtttttttttgtggaaaatttataaagtttagattggagaaaacgtattgatagttttgaagttggtattttaagttggaatgtttttttaaagtagtatataacggtataatttaataattttgattattgtggaaaaatgttatgtgttaatagcgattttttataattttgtttagaaaatttgaaagaaatgtaaaaaatggatttgtagttttggtagtaggtagagaaatagtagtagagggttgtaggttagtaattgatgttttaaatattattgagtgttttgtttgtaattttaggggagaatgataataattaaaagtataaatttataagttatttttgaggaggaaaatgttgaatgtatttaaagtgaagggggtttgttgaaatgtttaagtttttttagcgagtttttagatatgtaatgattagttttatgtttatagagtgattttttttttaaatgttttaaagtgttataaaatggaatagattattaatttatgagattttttgggagttagtgatgaaattataattatatgatatttttatatgtttagattttatttgattgtatcggtttttgttataaatagtatagtatattgtttaaaaggatgaaatgaaatttttttttttttttttaattgatttggggttttattacgaggtagatttgagtttgagtttgtatttattttttttagt

SEQ ID NO: 293 - DNA, 1061 bp, Artificial Sequence
  chemically treated genomic DNA (Homo sapiens)
attaaaaagggtggatgtagatttaagtttaaatttgtttcgtagtaaagttttaagttagttgggagaaggaggaaaggttttattttatttttttaaatagtgtattgtgttgtttgtaataaaggtcggtataattaagtaaggtttgaatatgtgggaatgttatatggttatagttttattattggtttttagggaattttatgggttaataatttattttattttgtggtattttggaatatttgaggagaaagttattttgtgaatataaaattaattattgtatatttgaaagttcgttggaaaaatttaagtattttaataaattttttttattttaagtgtatttagtatttttttttttagaaatgatttgtaagtttgtgtttttaattattattatttttttttgaaattataggtaaagtatttagtgatatttgaaatattaattattggtttgtagttttttgttattgtttttttgtttgttgttagggttgtaaatttattttttgtattttttttagattttttgaataaaattatggaaaatcgttgttggtatatggtatttttttataatggttagagttattgaattgtgtcgttatgtgttattttgagaagatattttaatttaaaatgttagttttaaaattattagtacgttttttttaatttgagttttataaattttttataggaaaaggttaagaagtttgttttcgttttgtttggattttttgtcgagcgtaattatttatttgtgatggttcgtgttgttgatttttagtttatttttgttttgagtttttttatttggattttttttttgtttttttattataattgtttattttgcgtggttatgtatttatggttttcggaattttgaggtttttagagggtaaattattggtagttattttgaattttttttttttgttatttttttttaggtcgcgatttgtgtagttatgttttaaaggtaattggaatttaaaattttcgattagatttttttttttgtattttttatggaggattatata

SEQ ID NO: 294 - DNA, 1052 bp, Artificial Sequence
  chemically treated genomic DNA (Homo sapiens)
attgattttatagaattaggtaagtttttataagggtagatattagagttaattttttttaggatagttttggggaatatttggtttttgggttttagatatttggtttttgaattaaggaggttttattaagaaggttagaaagggggtattgtcggtaattacggtagtgagatggatgggtaatacggggttttttgggttgggtgtagtttttattttgttttgttttgtagaggagttcggttttgttgggtatagtttattatggcgagtatgtaaataattatagtataggggttattttagttagtttaggaaaggtataagagtatgataaatatatgtaatttgtaaattggttagttttttgtaataatttagaggttttagttaggagtaatagaaattttttaattattgatgtttaaggttggtattgttgttggttgaatattttatgtataaatgaatttttattaggttattcgttgtttttgatgaggtttttgtgggttttattgttcggcgtttagtagggtttcgttaatgggttttatgacggatgatgtatcgttttgtagtttaaataatgtagtgtggaataggtttagtgttggtgtattttatttatatattaattgagtggttattttgaatatgaagaaatatgagaggggaagtggttggtattgaatattttatggttatgagttttataggaagcgaatgtttttagtttagagttaggtttggttatgtgtgtaagagagaattggtattaatagtttaggagacgaggtaagaataattttttaagttaggaggggagttattaattggaattgatgagttttttattatttggatatagtttgttggtgtttttttaagttagtaaaatatttgttttttgtttgtattttttggtttttagaaatttttgtagagaagggagtttgtttaagttattatacgttgattttttaagttatgtggatggaatagaagttagtatgtagtggaaaatagtatagtttatcgagaaaggg

SEQ ID NO: 295 - DNA, 1052 bp, Artificial Sequence
  chemically treated genomic DNA (Homo sapiens)
ttttttttcgatggattatgttgttttttattgtatattaatttttgttttatttatatgatttggaaagttagcgtgtgatggtttgaataaatttttttttttgtagaagtttttgggaattagaaggtataggtaggaagtagatattttgttgatttgaaaaagtattagtaggttgtgtttagatgatagggggtttattaattttagttagtggttttttttttggtttgggggattatttttgtttcgttttttggattattaatgttagtttttttttatatatatggttagatttaattttgggttggggatattcgttttttgtggggtttatggttatgaaatatttagtgttagttatttttttttttatatttttttatatttagagtggttatttaattgatatgtaaataaagtgtattagtattgagtttgttttatattgtattatttaagttgtaaaacgatgtattattcgttatggggtttattggcgggattttgttgggcgtcgggtaataaagtttataagagttttattagaagtagcgggtggtttagtggaagtttatttatgtatgaaatatttagttagtaatagtgttagttttaaatattagtaattggggggtttttattgtttttaattagagtttttaaattattgtaaaagattggttaatttataaattatatatatttgttatgtttttgtattttttttgaattaattgaaatggtttttgtgttgtggttgtttgtatattcgttatggtgagttgtgtttagtagagtcgggtttttttgtagagtagaatagggtggaagttgtatttagtttaggaagtttcgtgttgtttatttattttattgtcgtgattgtcggtagtgttttttttttggtttttttagtggggtttttttggtttagaggttaagtgtttgaagtttaggggttaaatattttttagggttattttgagaagggttggttttgatgtttgtttttgtggggatttgtttagttttgtgaggttaat

SEQ ID NO: 296 - DNA, 787 bp, Artificial Sequence
  chemically treated genomic DNA (Homo sapiens)
tttgaaattttattttaatatgaaaaaaaaaaaaataaatttaaaattaaaaattaaaataatatggggaatatttttttttaaaaattattatattttttatgtaatgtttgtttgttatgaattattgtataaattaagtttcgtttaatgtattaaggttataaaattaatttggttaatatgttgattattatatagtggttttgttttttatagtaattttgatattatttttttaaggtagtaatagaagggttttttttatttattttttatgtgtttttgatattattttgcgtttttggatttttttattgtatgttttttagaaataaattaagttcgaataagttgttttagttaatgaagtgcgtttttggtttttttttcgtggtttagaattattcggtaaaatattaattgttttaggatgtatttttttttagttttgaaatattgtaatattaagttattataaataaagagtattgagataataatatataagaacgtgtataaatggaaattattgtaatttttttttaaattaaggacgtgtggacgttttatgaataaatatttaggatatttggataaatatatattatgtgtttatatagataaaaatagaaaggagtatttttttttattttatttttttattttaagttatataagtttttcgtagggtataagtttagggtaattattgtttagaaatgtaaattatgtaatttaaaatgatttaagtttttaaatattttttatttaagttttatatttt

SEQ ID NO: 297 - DNA, 787 bp, Artificial Sequence
  chemically treated genomic DNA (Homo sapiens)
gggatgtaggatttaggtggggagtgtttgagggtttgagttattttgagttgtatggtttatatttttgagtagtgattgttttgggtttgtgttttgcgagaaatttatgtgatttggggtgggggagtgaggtaggaaggaatgtttttttttgtttttatttatgtgaatatatagtatatatttatttagatattttaaatgtttatttatgaggcgtttatacgtttttaatttaaaaaaggattatagtagtttttatttatatacgtttttgtgtgttgttattttaatgttttttatttgtggtaatttagtattgtaatattttaaaattaagagaaaatgtattttaaaataattggtattttgtcggataattttgaattacggagaaggagttaaaagcgtattttattagttggaataatttattcgagtttaatttgtttttaagagatatatagtggaaaaatttagaagcgtaaaatagtattaaagatatatagaaaatgaatgaaaagggtttttttgttgttgttttggaaagatggtattaaagttgttgtagaggatagagttattatgtaatgattaatatattaattaagttggttttgtgattttgatatattgagcggggtttgatttgtgtagtggtttatgataggtaaatattgtatgggaagtgtggtaatttttggaaaaaaatgttttttatgttgttttggtttttggttttgagtttgttttttttttttttatattgaagtaagattttaga

SEQ ID NO: 298 - DNA, 871 bp, Artificial Sequence
  chemically treated genomic DNA (Homo sapiens)
gaggaaattgaggtttaggttgttttgcgttgttgtttagaatttagggaagtttaggatgtttttttttaagttatgttggggtgtttaggtttagtggagaagcggggtatggttatatgaatgatatgtagttggtagtatatagtaggtatataagtgtttgttgaatgaatatttatatgaaattggaaaggagttttttaaagatggagttagtaggagatagtgaagttgtttgtgcgggtcgggggagtttgtttttgtttttgttttagtttatttttggtttggtttgagtattttgagaagtgggtttaggagaggtttttggatttttgggtttttggatagttagggtgagggcgttttgttatatttttaggagagagtatatttaaaataatttttttttttaaaaatttagtgttaacggattttagatgttcgtttgttatataatggggtttgttttaatagcgttaatttttagatgtgtagtttggaattaagaagtttattggttttttgaggatattgtgagttaagttgagagttgttcgggggagagatatggacgtgtagaattagggatgggagaggagttagggtgtttttttgttgtttattgggttgtttatttgttttgtagttgtttttagattgaaagataggaagggtgttttcgttttttttttttttagttttgattttgagtaggggtttttaggggataattatagataggtagtttggggagggtttgttttggaatttggtttaagtaggtttagttggatgagtttggagaagtttttggtttttttgtttttgaatggaaaatagaataacgttattttatttagagagg

SEQ ID NO: 299 - DNA, 871 bp, Artificial Sequence
  chemically treated genomic DNA (Homo sapiens)
tttttttgggtagaatggcgttattttattttttatttaaagatagggaggttaaggatttttttaggtttatttagttaggtttgtttgaattagattttaaagtagattttttttaagttgtttgtttatgattgttttttgggagtttttgtttagagttaggattgaaaaaaaaggaagcgggaatattttttttgttttttagtttggggatagttgtagggtaggtgagtagtttagtgggtagtaagaaggtattttggttttttttttatttttggttttgtacgtttatgtttttttttcgggtagtttttagtttggtttatagtgtttttagggggttaatgggttttttgattttaggttgtatatttggaagttgacgttattaaaataaattttattatataataaacggatatttggaattcgttagtattgagtttttagaaaaagaaattgttttggatgtgtttttttttaagaatgtggtaaagcgtttttattttggttgtttaggaatttagggatttaggggttttttttgggtttattttttaaggtatttaggttaggttagaggtgggttggggtagagatagagatagattttttcggttcgtataggtaattttattgttttttgttggttttatttttggaaggtttttttttaattttatgtaaatatttatttagtaaatatttgtgtgtttattatgtgttgttaattgtatattatttatatggttatgtttcgtttttttattgagtttaagtattttaatatggtttaagaaaaaatattttggatttttttggattttaaatagtaacgtaaaatagtttgagttttagttttttt

SEQ ID NO: 300 - DNA, 866 bp, Artificial Sequence
  chemically treated genomic DNA (Homo sapiens)
aatatattattagattatgatatttttttattataatagtttaaggtggtgtttttgttatgatagtttgtttattttttttttagagtgtatgttaaaataattttttattgtaattagtggattttttagtagttttttttttttttttatttttttttggagttcggttttttataataagtttttaggtgtatttggagttgttatttgtaaatgtggtaggatttttttttattagatttttgtttttgtttttttttttgaagagtaaatatgttgtattagaaggaattagtggtttattgttattggtaaagtcgaggtagtgggaggattattttttttttgggtttagtaatttttttagtggttagtagatagtagtataatggttagttagtgtgaaattgtgtaaattgttttataaataattcgtaatgtataggtaatagggagaggttatagtttatggataaatgattttttgttatttcggggtattaaattagggataattcggattttattatggggatttattaattattatgggtttttcgtacgtaagtttgttgggatttaggtttgtttggtgttttttgtggtattatgatgggggtaaaatatttttaagtagggttatgagaaagagaatgtaagtatttttaataaattagttaggggtgaattttgtaggagttaagtattttttttgtggaatttgttttttgaagaaatttttttgaagcgtagagaaaaatataataattttaataattaatatgtattgggtatttattttgtgttaggtattgtgttaagtttttttttttttttttttttttttgagatggagtttcgtt

SEQ ID NO: 301 - DNA, 866 bp, Artificial Sequence
  chemically treated genomic DNA (Homo sapiens)
agcgagattttattttaaaaaaaaaaaaaaaaaaaaaaagatttagtatagtgtttggtatagagtaaatgtttaatatatgttaattgttaaggttattatgtttttttttgcgttttaaagagatttttttagaaagtaagttttatagagaaaatatttggtttttatagggtttatttttggttggtttgttaaaggtatttatatttttttttttatggttttgtttggaagtgttttgtttttattatgatgttataagaagtattaagtaggtttgagttttagtaggtttgcgtgcgggaaatttatagtagttaatgaatttttatggtgaggttcggattatttttggtttaatatttcgaaatggtagggagttatttatttatgagttatggtttttttttgttgtttgtgtattacgagttatttatgaggtaatttgtatagttttatattggttggttattatgttgttgtttgttaattattaggagggttgttgaatttagagaaaaaatggtttttttattgtttcggttttgttagtgataatgagttattgattttttttagtgtagtatgtttgttttttagggaagagaatagggataaaagtttgatgaagagaaattttgttatatttataggtagtaattttaaatgtatttgggggtttgttatgaaaggtcggattttagaaaaaaataaaaaaaaaagagagattattgggaaatttattggttgtagtgagaggttattttaatatgtattttgaaaggagagtaggtaggttgttatgatagggatattattttggattattgtgatgagaaaatgttataatttggtgatgtgtt

SEQ ID NO: 302 - DNA, 716 bp, Artificial Sequence
  chemically treated genomic DNA (Homo sapiens)
ttaagttttttaagttttttatgtcgttttattttttttagtattgttgatttaattttagggggattttttttttgacgtttttatgtttcgttttttttttttgtagattttttggtagtttttttgtgtagaatagttattcggttttattttttttgtaaggtcggagttgttgttttatttttttgatttatatataataataaaaaaaattatttttgttatgtgtttttttatttttattaagtggttgaaatttaatttgattgttcgagtatttttggttggatttgggttggagtcgatgggattttatgagggttgtaaaagttaagtttttaatatgttttaaataaattggcgtgtaaaggagaaacgttagaagaaggaatatggttgtagacgggaggtttgggaatgttagtcgtagtattggggtataggtggttttaataatgtatataagtttggttgtaagttgtttttataagagtagaagaggttgtagaattatttttaggaggttgagattaaatttttcggtttttgagtgtatatagttttgtatggtttttaaaatatagattttaggattatttataataatataaatttgtggttaattttgttgaatttttatttagatttaagttgtgttgttagtagaaatgtaattgcgttagagaaaaattgtttatattttttgagatatt

SEQ ID NO: 303 - DNA, 716 bp, Artificial Sequence
  chemically treated genomic DNA (Homo sapiens)
agtattttaagaaatataaatagtttttttttaacgtaattgtatttttattgataatatagtttgggtttaaatgaaaatttagtagaattaattataggtttatattgttatggatgattttggaatttgtattttaaaagttatgtaaaattgtgtgtatttaggagtcgagaagtttgattttaattttttgagagtggttttgtagttttttttgtttttgtagaagtaatttatagttaaatttgtgtgtattattaaagttatttgtgttttagtattacggttagtatttttaagtttttcgtttgtagttatgtttttttttttaacgttttttttttatacgttaatttgtttgagatatgttaaaagtttgatttttataatttttataaaattttatcgattttaatttaaatttagttagaagtgttcggataattagattgagttttaattatttgatggagataaagaaatatatagtaagaatgattttttttattgttatatatgagttaagggaataaaatagtaatttcggttttgtaagggagatagaatcggatggttgttttgtataaaagggttgttaaagaatttgtagagggaagaaacgaggtatggaggcgttaagagaaaggtttttttgaggttaaattaataatgttggggagaatggggcggtatgaggagtttgaaaagtttga

SEQ ID NO: 304 - DNA, 777 bp, Artificial Sequence
  chemically treated genomic DNA (Homo sapiens)
gatcgaggtttgttatttggtttttttgaggtttagtttttttgtttgtaaaatggtattttaatggtatttaatttacggaggtgtttggggggataaggttagttattttgtaggtaggtggggtttttggttttttttacggggttttgggatttttggtttcggaatttttaaggtttagtttttttagggttcgtatggttttttttttgttgggataatttatagttttagggttatagttgttgttgttttatttttttttttttttcgattttttttttttttattttggttttatttttttagaattagtttgtttttgttttttgtttttacggttttataaatgagttacgggtttgatttgatttaatttcgttgtaattgttatttttttaagtttgtttttttttattcggttatttacgagattataaaaatttaaataggacggggttttttttagttcggttttttggtttttcgggatttcgggttagggttagtagtttttggagattgaggtggggtttgtggagtttttgtggggagggatttggtgtttttagtaggattgggtatttcgagtttcgggttgtagttttgttgttggatagttttgagagaattgttcgagttttttgatttttttagtattttttttagtaggttttagaatagggaattaaaatttaggtatttttgggttagaaggtgaaaggatgagtaaggtggtttggtgttggtttcggtgaattggagagaataggt

SEQ ID NO: 305 - DNA, 777 bp, Artificial Sequence
  chemically treated genomic DNA (Homo sapiens)
gtttgttttttttagtttatcggagttagtattaggttattttatttatttttttattttttggtttagaggtgtttgggttttggttttttgttttaaagtttgttaaggaggatgttggggaaattagaaagttcgaataatttttttaaggttgtttagtaatagagttgtagttcgggattcgggatatttagttttgttggggatattaagtttttttttatagaagttttatagattttattttagtttttaggagttgttgattttggttcggagtttcgggggattaggaggtcgggttggggaaggtttcgttttgtttaggtttttgtggtttcgtgagtaatcgagtggaaaaaaataagtttgaaaagataataattataacgaaattaaattaaattagattcgtgatttatttatggagtcgtaaaaatagaaaataaaaataagttggttttggagaagtgaggttagggtgaggaagggagaagtcggggaagggaaaaaaataaagtaatagtagttatggttttgggattgtaaattattttagtaaggagggaattatgcgggttttggaggggttgggttttgggggtttcggagttaggagttttaggatttcgtgggagaggttagagattttatttgtttgtaggatggttgattttgtttttttaaatattttcgtgagttgggtattattagggtgttattttgtagataaggaagttgagttttagagggattaagtgataaatttcgatt

SEQ ID NO: 306 - DNA, 878 bp, Artificial Sequence
  chemically treated genomic DNA (Homo sapiens)
ttgtttttttaaatgtattttaagggttttttattttgattattgtttagtggtattgttgtagaggaagtaggagggtgtttggtggagtttgggaggtttatgaatttttgtatttggagaaatgttaatgttgagtttatatttttttttttgtagtatagaagattattattaggtttgtgtgtagaagtttaagtagttagagggggtttttgcgaggtttgtgggatttttttggttagaagatgggttatggtggaggaaggttatgttaaatggttgtgatttattgtttatagggaagagtacgtaatatatatttaggagggtttaggtagtcggaattgtggcggttttatatttttaaagtgaattttaaatttgatttatttatgtcgtttttatagtaataggaaaattgtttcgatttatagttacggaagattttgtaaaagaaattgtaggaggaaaaaaagataatgttaggaaaaaaaaaaatttaatgaagtattatttttttatttatttagttaattgagaataatagtttgtgtatttggtaattaaatgggaagtggtatttcgtgttgtaatatgaatttgtttatattaagtgatttatttttttgtttagatatattgtattgagaattttttttaagtagaaagttattaaaaatgtgagaataagtagtttttattaatttgaagtatttggggatttagaggaatgataaatgtaaatagtttagaatttagaaattgttttgaatatttaaattttagattttgggaatgtgtgtatgtttttagttagttagatgtagataatttttttttttgtgaggtttttttttatttatattttgtttgga

SEQ ID NO: 307 - DNA, 878 bp, Artificial Sequence
  chemically treated genomic DNA (Homo sapiens)
tttagataagatataagtgaaaagagattttatagaaagaaaaattatttatatttgattaattgaagatatgtatatatttttagagtttagagtttaaatgtttaagatagtttttggattttgggttgtttgtatttattatttttttaagtttttaaatgttttaggttagtgaggattgtttgtttttatatttttaatagttttttatttgaagaaagtttttagtatagtgtgtttaaataaaaaaataaattatttaatgtgagtaggtttatgttgtaatacgaaatgttattttttatttgattgttaaatgtataaattgttatttttagttgattgaataagtgaaagaatggtattttattaaattttttttttttttggtattatttttttttttttttatagttttttttatagagtttttcgtggttataggtcggaatagtttttttgttgttatgagaacggtataaataagttaagtttaaaatttattttgggggtatggagtcgttatagtttcggttatttaagtttttttgggtgtgtgttgcgtatttttttttataggtagtggattatagttatttaatatggtttttttttattatggtttattttttggttagaaaaattttataagtttcgtagaggttttttttaattgtttgggtttttatatatagatttagtaatggttttttgtgttgtaaggagagaaatataagtttaatattaatatttttttaagtgtagaaatttatgggttttttaaattttattaagtatttttttattttttttataataatgttattgagtaatgattaaaatgaggagtttttggaatatatttggaagggtag

SEQ ID NO: 308 - DNA, 906 bp, Artificial Sequence
  chemically treated genomic DNA (Homo sapiens)
atttttgggattattgaaaagttttataattatttataaatatgtaaagggtgtttataagattggagtaagggtggtggtatggggtaaagttagtagtgtttttttaggtgtttcgtgatagaggagaagggtgtatttggtttgttgtagtttgagtagattttggggttgaaagttatttttttgattatgtgtttagattttataaaattatagttcgggtttattggttgggtaatattatttgaagtgagtagaataatttaaatttttttattcgtaatataaaaggaaggggttatttgttttagggatgggtacgttttggtgtaatttggtagagtattttagtaattttattagatgttaggttagggtaaaagtggaaatgcgtttgtttagtatattttgggttgattatttggagtgtatgtttttgatttatttgtatataatttatttagggggtgttgtaagagttatgcgatggttaaaggaatttaatgcgttttttattatgttttttaaataagtttttttacgttgattgttttttggaattaagaagttttatttttttagtttcgtgatagattttaaaatgagatttttataaatttgagaataagttttagttttggttttaggattatttgttttgattttaagggttagttgaggagtgtgaaggttaggatgagttatggggtgagtgaaaattgtagttgggaaagtttcgttttgaggagtttgtatttatgtttttatatattttgaagtaattagtttttatttgtatttgtggtttttttgtttttttggttttatgaggagatagtagttttgttatttattttttgagagatagtgtggtaaagttagggatagtatgggttttagaat

SEQ ID NO: 309 - DNA, 906 bp, Artificial Sequence
  chemically treated genomic DNA (Homo sapiens)
gttttagagtttatgttgtttttaattttgttatattgttttttaaaaagtaagtgatagagttattgtttttttatgagattaaagaaataaaaagattataggtgtaggtgggggttggttgttttagggtgtatagagatataagtataagttttttaagacgaggtttttttagttataatttttatttattttatggtttattttagtttttatattttttaattaatttttagggttagagtagatagttttggagttaaagttagaatttgtttttagatttatgaaagttttattttgaagtttgttacggggttggaagaatgaagttttttggttttaagagataattaacgtagagagatttgtttaaaaaatataataaaagacgtattgggtttttttggttatcgtatagtttttgtaatattttttggatgagttatgtgtaaatgaattagaaatatgtattttaagtaattaatttaagatgtattgggtagacgtatttttatttttgttttaatttgatatttgatagagttgttgagatgttttgttaaattgtattagggcgtgtttatttttgagataaataattttttttttttgtgttacgaatggggaggtttgaattattttgtttattttaaatgatgttgtttagttaatgggttcgggttgtggttttgtggagtttggatatatggttaagagggtgatttttaattttagagtttatttaggttgtagtaggttaagtgtattttttttttttgttacgggatatttagaagggtattattagttttattttatgttattatttttattttagttttgtaggtattttttgtatatttgtaaataattgtggagttttttagtaattttaaaagt

SEQ ID NO: 310 - DNA, 744 bp, Artificial Sequence
  chemically treated genomic DNA (Homo sapiens)
atgggattataagttaaggaatgaggaagtttttagaagttggaaaaggtaaaaaaagaatttttgttttttataagagtttttagaaggagtatagttttgttgatattttgtttttagatttttgatttttagaattgtaagagaatgaatttgtgttgttttaagttattaagtcggtggttatttgttatagtagttatagaaaattgtttattgtaggatgaaaagttatttttttttggtattttttaaaggttaatttaagagtatggattgttttgtattttttaggagtattattgtaaagtcgatttattattttttttatttgtttcgtattatcgtgttggggtttattaacgttttgttatcgggtgttttgtgcgtaagtagaagtgtgttaagaattaatcgttttgatttttattttttgttggtgttttgttattcgtgggttgtttggtttgatatatgaattattttttagttgtttggtgttggggaggtatagttattagtttttaaatattttagatatatgttaattgtaattttaatatatattttttttttatcgttattttggaattgttttattggtaatgtatgaaatatgaataagaggaaataattgataaggtattattgttgattaaggggttaatttttgaggaagattaaaaatagatgtttttgaagaagaaagaattgaggaagtgaattttttttttttttaatttt

SEQ ID NO: 311 - DNA, 744 bp, Artificial Sequence
  chemically treated genomic DNA (Homo sapiens)
agagttaagaggagagaagatttatttttttagtttttttttttttaaggatatttgtttttaattttttttaaaggttagttttttagttaatagtggtgttttgttaattatttttttttgtttatattttatgtattgttaatggaatagttttagggtgacggtagaaaaaaaatgtgtgttgaaattgtaattggtatatgtttgaaatatttgggggttggtgattgtgtttttttagtattaggtagttggagagtaatttatatgttaagttaagtagtttacgaatgataaaatattaatagggaataaaggttagagcgattgatttttaatatatttttatttacgtatagagtattcgatgatagggcgttaatgagttttagtacggtgatgcggaataaatgaaaaaagtaatgaatcgattttgtaatagtgtttttggaagatatagaataatttatgtttttagattagtttttgagaaatattaggagaaagtggttttttattttgtagtgggtagttttttgtggttgttgtaatagatggttatcgatttagtggtttaaaataatataaatttatttttttatagttttaggaattagaggtttaaaagtagggtgttagtagggttgtgttttttttagaggtttttgtagggggtagggattttttttttgttttttttagtttttggaggtttttttattttttggtttatgattttat

SEQ ID NO: 312 - DNA, 1032 bp, Artificial Sequence
  chemically treated genomic DNA (Homo sapiens)
aaaaagaaaagaaaagaagaaaagaaaatataaaatgtttagttatttaggatataattgtgtggtttgatcgtttagttgtattattttttttatttggaaagtgttttagtgattatagaagttgttagaatttttaaaagtaagaagaaagtgatgggaaaatgtgttaaatttataatgggagaatattgtgttattagaaaattatatgattttggtaattttaggagtatggaagaaagattttaaataagtttttgattatgtatttttttttaaatttttttgaatgttgaagaaatgttaaattttattaagttttatagttagatttaatatagatataaatttttttaatgttcgttttagttaaaagtgagcggaatattatcgttaaattagtgtatgtgggagaattatttgaggaaaattaaaataggtatagttgggaatattaagtcgtggttatattagacgtaagtaggcgtaatagtaaaattttttaggttttaatggattgggttattttgttttttagtttttatatagatgagttttgttttggggtaatatggttgtagtttgagagtttatttgaaggagtttattttttttttattagtttatgagtatagtgtaattttagttaatattgttatatagtttttagttgggttatttggttaaatgtttttagggaaagtagtaagatagaataaaaggataaatgtaatgcggttttttgttttgagtttttgtagttgtggaattatattggtagttaattattattacgttgtattcgtgattataaatttttgttatttaagatgttatttaagttttataagaaatattttgttttttgtggtataatttttttgaggtcgggtttgtgtataattataattatagagatttgttttttgtgtttcgtggatatgttagtaggtatatagtgttatttgtgtgaaattgaaaatgatattttttattggtgggtgaattgggaaatagtattttgtttat

SEQ ID NO: 313 - DNA, 1032 bp, Artificial Sequence
  chemically treated genomic DNA (Homo sapiens)
atagatagggtgttgttttttagtttatttattagtagggaatgttatttttaattttatataaatggtattatatatttattagtatgtttacgaagtataagaaataggtttttatggttatagttgtgtataaattcgattttaaggaaattgtgttatagaagataagatgttttttgtgagatttgaataatattttaaataataggagtttatgattacgagtataacgtggtaatgattaattgttaatgtaattttatagttataggaatttagaataagaaatcgtattgtatttgtttttttattttgttttgttattttttttgaaggtatttaattaaataatttagttaggagttgtgtaatagtattagttgaaattgtattgtgtttatggattaatgaaagagaaatgagtttttttagatagatttttaaattgtaattatattgttttagaataaagtttatttgtatggaaattgagaagtaaaatagtttagtttattagagtttaaagaattttgttattgcgtttatttgcgtttaatatggttacggtttaatgtttttaattgtgtttattttgattttttttaagtaatttttttatatgtattggtttaacgataatgtttcgtttatttttgattgaaacgaatattaaagggatttatgtttatattaaatttggttgtaaaatttaatgaaatttaatatttttttagtatttaaaaaaatttagaaaaagatatatagttagaaatttgtttgaaattttttttttatatttttaaggttgttagggttatataattttttagtgatatagtgtttttttattgtggatttgatatatttttttattattttttttttgtttttggaaattttagtaatttttgtagttattggagtattttttagataagaggagtgatataattgaacggttaggttatatagttgtgttttgggtggttggatattttatgtttttttttttttttttttttttttttt

SEQ ID NO: 314 - DNA, 874 bp, Artificial Sequence
  chemically treated genomic DNA (Homo sapiens)
ggttttattatgttggttaggttggtttttaatttttgatttcgtgatttgttcgttttagttttttaaagttttgggattataggcgtgagttatcgcgtttagtttaattttgtttttataggtattggtttttattttttagttattggtttttttttttttgtaatttaggtttgtaatataattttttagttttttaaggaaaatagaattaaagatttttaatagaagattttagtttattaatatagttaatagttattaaagttatttaggtatcggtttaataaaaaattaaagggttgtagtaagtgattagatttttattatttatttttgtgagatgggttttagagggtttcgtttttgttgatattaattatttttatcggtagtttgttaatatataagtagtttatagtagaatattgtagattgtagggtatttttaggttatatagttttaagtttttagaataggaattgaggtttggaagaaggttagtgtagcgtatttagcgaatggataaattgaattattattttataaggttgtaagtttatgtattaatggaattaatatggaattagagttaaattattgttttaaatatttaatgtatgttaagaaatttatttaattattaagtatcgaaattataatatttttaaatgaatttataaagtaaaatagttgaattaatgatttgtaaggattttttggtagataaattttattgggaattaatatattattgttattaagaaagtaggtttaataaatgaataaaagaaatttagttaggtagagaggtttttgtttgtaattttagtattttgggaggttgaggtaggaggatcgttcgcggtt

SEQ ID NO: 315 - DNA, 874 bp, Artificial Sequence
  chemically treated genomic DNA (Homo sapiens)
ggtcgcgggcgatttttttgttttagttttttaaagtgttgggattatagataagaatttttttgtttggttgggttttttttatttatttgttggatttgtttttttggtagtagtggtgtattgatttttagtaggatttatttgttaggagatttttatagattattagtttagttgttttgttttgtgaatttatttgaaagtattataatttcggtatttagtaattagatggattttttgatatgtattagatatttaaggtagtaatttaattttggttttatgttgattttattagtatatgggtttgtagttttgtgaaatgatgatttagtttatttattcgttgagtgcgttgtattgatttttttttaagttttagtttttgttttaggaatttgaggttatgtagtttgaaaatgttttgtagtttgtagtgttttattgtgaattgtttgtgtgttggtaggttatcggtaagaatggttggtgttagtagggacggggttttttgagatttattttataaagatgagtggtgaaaatttgattatttgttgtagttttttagttttttattaagtcgatgtttgagtagttttaatagttattagttatgttagtagattgagattttttgttagaagtttttagttttgttttttttgggggattaagaaattatattgtaggtttgaattataggaaggggagaattaatggttagggaatgagagttaatatttgtaaaagtagagttgggttgggcgcggtggtttacgtttataattttaggattttgggaggttgaggcgggtagattacgaggttaggagttagagattagtttgattaatatggtgaaatt

SEQ ID NO: 316 - DNA, 938 bp, Artificial Sequence
  chemically treated genomic DNA (Homo sapiens)
ttgaaagataaaagggcgatattatagaaatggaaaatattgtgtttgaggttgtgtatggtgtagtggaaggttatagtttaggggttggttattttgtgtttgagttttttttagttcgtttttgagaagtattgggattttaaattagttataattaagtttcggattttatatttgtaaagtgaggatagggagatttatttgatggggttgttgtgaaggtgaagagagaggaagtttgttaaagtaattaaataatattcggtatgtggagttttgtgtttcgttttgtttcgaaattttttttggtgttgatttgaatgtttttttttgattcggttaatagttgtgttatttttggttagtgatttgtggttgggttgttagtcgatgataggtagttttttaagtaggttataataaggtggtaattgattttgtttttcgaggatgtttgttcgggttttgttagaagttaagggttttttgatgtggggtttcggttttatattgtggtattttgaataattttttatgggttggtaaaaggcgttttatattttagataggttttaggaggatgatttgttttttttaaggagaattgagaatttttagatgattggaaggttttgtatttttattttagtattttcgatagatttttttatatgtggtaaatatagttatagttggaggtttattgtcggttgttaataggtagtgaattgttgttgaattagatagtttacgtatagggtatttttattattatagaaagttttgttggttagagtatttaaagtatattcggtttttttttttagttattttgtttattttttgtttgtatttttttttggtatttgtgttgttgttattttagttttagtttttaatgtttaataatattttgatagattaatagagttgtg

SEQ ID NO: 317 - DNA, 938 bp, Artificial Sequence
  chemically treated genomic DNA (Homo sapiens)
tataattttattgatttattaggatgttattaggtattgggggttggaattggggtggtagtagtataaatattaaggaggaatgtaagtaagagataaatagggtggttagggggagaggtcgaatatgttttagatgttttgattaatagaattttttgtgatgatggaaatgttttatacgtggattgtttgatttagtaatagtttattgtttgttaataatcgataatggatttttagttatgattgtgtttgttatatgtgggagaatttatcggaggtgttaaaatgagagtatagaattttttaattatttgagaatttttagttttttttgaagaaagtaaattatttttttggggtttatttgaagtgtgaaacgttttttgttagtttataaagaattgtttagagtgttatagtgtgaaatcgaaattttatattagggagtttttggtttttagtagaattcgaatagatattttcggggagtaaggttaattgttattttgttgtgatttgtttggggaattgtttgttatcggttggtagtttagttatagattattagttaaaaatggtataattgttgatcgaattagagagaaatatttaggttagtattaggaaaggtttcgaagtagggcgaggtatagagttttatatgtcgggtgttgtttaattgttttgatagattttttttttttttatttttataataattttattaagtaggtttttttatttttattttgtagatgtgaagttcgaagtttagttgtaattaatttgaagttttagtattttttagaaacgggttggaggggatttaaatatagagtgattagtttttgaattgtggttttttattatattatgtataattttaaatatagtattttttatttttataatgtcgtttttttgttttttaa

SEQ ID NO: 318 - DNA, 782 bp, Artificial Sequence
  chemically treated genomic DNA (Homo sapiens)
gttgattttttttatatttattttttgtaatagtttttttagttatatcgtttgattgttataggaaaggatgttgtagattttttttgagtggtgattaagtgaaatgtattaaagaaatgaggatagtgagtaattaagatgtttgaagtaatattggaaagggagttaggtttgagttatttttttttgtagttagtgtgtagtggaagtggttcgtgggtgttttatatttggattggagagtaaagtataattttagcgttaagggaagttttttatgtttttggaatagtgttttatatttttttgaaaaggtaataaaatatgtgtattcgttgattaggaataaatgttaaagcgtttattatgatggaagtgttcgatttttatggttttgataagtcgttataggattttatgaatttttaatggttggtttatatttaggggtttttagtttttgagggtggtaaaaggtttatagagatgttatttttttagtatattggtttttgttaagatcggtgtttatttaaagtatttttcgtttttcgaatgtatagagattttgttgataataagaaatttttttgggtttgaaattagatgaaaagattttttatttagaaagtgtttattaatttatttaaaaatatgatttggattatttattatatgttagggtttattttgggtatattgaggaataagatagggtttttgatttttgagtttgtattttagttaggggatataggtattaggtaagaaaataaata

SEQ ID NO: 319 - DNA, 782 bp, Artificial Sequence
  chemically treated genomic DNA (Homo sapiens)
tatttgtttttttatttagtgtttgtattttttaattagaatgtaagtttagaggttagggattttgttttattttttagtgtgtttagaataagttttgatatgtagtggatgatttagattatatttttaaataaattaataaatattttttgagtgggaggtttttttatttaattttaggtttaagaaagttttttgttgttagtagaatttttgtatattcgaaagacgagaggtgttttaaatagatatcggttttggtagaagttagtgtgttaggagaatagtatttttgtggattttttattatttttagaaattgaaagtttttaaatataggttagttattaaagatttatgagattttgtggcgatttattagagttatggaaatcggatatttttattatggtggacgttttgatatttgtttttaattagcgaatgtatatattttattatttttttagggaagtatggggtattattttagaagtataagaggttttttttagcgttgggattatgttttgttttttaatttaaatatggaatatttacgagttatttttattgtatattggttgtaaaaagaggtggtttagatttgattttttttttagtgttgttttaggtattttagttgtttattgtttttatttttttggtgtattttatttaattattatttaggagaggtttgtagtatttttttttgtggtaattagacggtgtggttaaaagaattattgtagggaataggtatgggaggaattaat

SEQ ID NO: 320 - DNA, 1229 bp, Artificial Sequence
  chemically treated genomic DNA (Homo sapiens)
atttaaattttatgtgttatgatgtagatatttataggataagtaagaataataaaatttttagttttgttttttagtataagataattgaagatatttgtggtgaaaagtatttttgttattaggaagatagataatagttagtaattaatgtttttttgttgtataagttaaaaagtttattaaatttattttttttttagtgtatatataagaatatatttggatatttttgtaaatttatatttaagaatagtgttttttaaatcggttatttgaaagaaatttaaaggaaaaagtagatatttttataatatgtttttgttttgttgtagtttgtaattgtgaatttttgtaaattgttataattttggatgaatgatgggaatataataggttgtagaattggagaacgttaaatttttgtttttaatggtaaaatatgttttttttatttttattagaatgtgtgatttatgttatttgaaattaaattttaaatataatgagttattagtgtaatagtttattattaatagcggttttataaataatatatttttattatatatatgtagttcgttgtgaagttagtaaaaggtattttaggttatcgaagttttgttgcgttagcgcggttgtagattagaaggatatttttatgtgaattaagatggatgttaattttttttgtcgagagttaggttggtcgtttttttttgtatatatggtagatggattggttaattagcgtttgttgagttttgggtttgaaattatagagaagttagataattgcggttatgtagtttttgtttacgagtgtaaataagataaataattatttgttatttgggaaaaaaattaaaatgtttattttggatttttattaaagtgttaatggttttataaaatagttgtgtaaatttaggtttttttagtaagtattattttagggggtttgtaaagaaaggaatatatatgaaaaaattaatttttaaaaattttttttatattttagtattgagaagaaaatagaggaggttttatttttattttgtaaatacgtttgagaataaatgatttttaattgggagatatattcgagaataaatagtagtttaatatttatttttttttttttttttggtgttatttaaaaaattgagtattattgtagttcgattttttgttttaggagattaaagtattttttttgattgggtatt

SEQ ID NO: 321 - DNA, 1229 bp, Artificial Sequence
  chemically treated genomic DNA (Homo sapiens)
aatgtttagttagagaaaatgttttaattttttaaaatagagaatcgggttataataatatttagttttttaaatgatattaaaaaaaaaaaaaaaaataggtattaaattattatttgttttcgaatatgttttttagttaaaaattatttgtttttaaacgtgtttgtaaaataaaagtgagattttttttattttttttttaatattgaaatatgaggggaatttttaaaaattaatttttttatgtatatttttttttttataggttttttaaaatgatatttgttgaaaaagtttggatttatatagttgttttataaagttattgatattttaataaaagtttaaaataaatattttaattttttttttaaataataagtgattgtttgttttgtttgtattcgtgaataaaggttgtatagtcgtagttgtttagtttttttgtaattttaggtttaagatttagtagacgttgattaattaatttatttattatatgtgtagaaagagacggttagtttgattttcggtagggaaaattggtatttattttggtttatatggagatgtttttttaatttatagtcgcgttggcgtaataaaatttcgatggtttgaaatattttttgttggttttatagcgagttgtatgtgtatgataagaatgtattatttataagatcgttgttagtaatgagttattatattaatggtttattgtgtttggaatttgattttaaatggtatggattatatattttgatgaaaatgagaaaaatatgttttgttattaggaataaagatttaacgttttttaattttataatttgttatatttttattatttatttagggttgtaataatttataaaagtttataattatagattataatagagtaaggatatattgtggaagtgtttgtttttttttttgagttttttttaaataatcgatttgagaaatattatttttaaatatgaatttgtaggagtatttaaatgtatttttgtgtatgtattgaaaaaaaaatggatttaatggattttttaatttgtataatagaaaggtattgattgttggttgttatttatttttttggtgatagaagtattttttattataagtgtttttaattattttatattggagaataaaattgaaggttttgttgtttttgtttgttttgtaaatatttatattatgatatataaggtttagat

SEQ ID NO: 322 - DNA, 878 bp, Artificial Sequence
  chemically treated genomic DNA (Homo sapiens)
agttaagtacgttgtgttttttacggacgagatcgtgttttacgattattttattttttgtatcgggtagtagtattaggtaaggtcgggtatagggggcgtaagttacgtgtttggagagttttatgaaagttatttatatgtttattggggtatatatattttgggtaaagagtatttttttgtttggatagttgttgttttaaatttataaaagtattttttagggttcgtatatataattagaattatgttcgtaaatttttttagaaatttattttaagaaaaatattttgttcgaggataaaaattatagtaagttggagaaatgttattttttaagttgttgtttaaaagtttaatatatattgttcgttttagtagaatttagacgtaattaggtatgtatttgtggtaaattaatttatgttttaagaggttaatatttggttgtggtaatgggttttcgtaaaagtattgtaaatacgtgtattttttgtcgatttttattttattttgttttttagttatgaaaataggaaatttgattgattggttttttagtgtttatgttttttttttagttaaattttttatttatatttgagtaaagtattgttggataatattgaagttgtttaatgttttagggtagtagattttaatattttattttgtaatatgtatgagtgttttatgtagtttatagtagtaaggtatttttttagtgataagaggtttattttaatttaaggatgaagttttagattaagtttgtgaaatttatggtttatgggtttaaggtggttttgaatgtggtttaatataaatttgtaaatttttttaaaatattatgatttttttttttgtagtttttt

SEQ ID NO: 323 - DNA, 878 bp, Artificial Sequence
  chemically treated genomic DNA (Homo sapiens)
aaaaaattgtaaaaaaaaaagttataatgttttaagaaagtttataaatttgtgttgagttatatttaaagttattttgggtttatgggttatgggttttataaatttggtttaagattttatttttgagttagagtaagttttttgttattggagaaatattttattgttgtaaattatatgaaatatttatgtatattataaagtggaatattaaaatttgttgttttaagatattgaatagttttagtgttatttagtaatgttttatttaaatgtggatggagagtttaattaaaaggaaagtatggatattgggaaattaattaattagattttttatttttataattgagagataaaataaaataagggtcgatagaaggtgtacgtgtttgtaatatttttgcgagagtttattgttatagttaaatgttagttttttgaggtataaattaatttattataaatgtatgtttggttgcgtttggattttgttagggcgagtagtatgtgttagatttttggataatagtttaaagaatgatatttttttaatttgttgtgatttttattttcgagtagaatgttttttttggaatgggtttttgggagggtttgcggatataattttggttatgtgtgcgggttttgaagggtgtttttatgaatttagagtagtagttgtttaggtagagggatgttttttatttagagtgtgtgtgttttagtaaatatatgaatggtttttatggagttttttagatacgtggtttgcgttttttgtgttcggttttatttggtattgttgttcggtgtagaggatgaggtggtcgtagggtacgatttcgttcgtggaaagtataacgtgtttggtt

SEQ ID NO: 324 - DNA, 703 bp, Artificial Sequence
  chemically treated genomic DNA (Homo sapiens)
tgtgagtttgggaggtggtgtagtttaggttatacgggatagggtttttagatagttttgttaaggcggttgttatttattagagcgttttgggtagggtttggattttagatttaggatagaaaggtaggttggggaggttatatttgttatggttagtttattttttgggttttagatcgtagtttatttttaggtttttattttttgcgttttcgtagtttttgttcgtttttttttttttagttgttttatttagtagttttcgttataatttgtttttttcgtatggaggttttagaggtttttattaaggttggcggttaaaggtcggtttagtacgtgtcgtgttttatcggtttattttaagattttgtttttttaggtttgggtaataaaaaagggggcggttttagcgttcgttggttttttgtagttttatatataaaagggtaggcgataaagatatttttcgggatggtaggtgttggtgtcggattttttttcgagtgtacgggtagaagaaaggtaaggttgggttttttcgggtagcgtagatatgtaggggtaggagtgtgggtagggttttcggggaggggaaggtttaggagggcgaggagtattgatgtagggttcgttatcgagggtagtcgattagaaaagttttattttttttttaaagtagggtggttggataaattta

SEQ ID NO: 325 - DNA, 703 bp, Artificial Sequence
  chemically treated genomic DNA (Homo sapiens)
tggatttgtttagttattttgttttggggagggggtgggatttttttaatcggttgttttcggtagcggattttgtattagtgtttttcgtttttttgggttttttttttttcgggggttttgtttatatttttgtttttgtatgtttgcgttgttcggggaagtttagttttgttttttttttgttcgtgtattcggggaggaattcgatattaatatttgttatttcggaaaatgtttttgtcgtttgtttttttgtgtgtggggttgtagggagttagcgggcgttggggtcgtttttttttttgttgtttaggtttgaaggagtagggttttgagatgggtcgataagatacggtacgtgttgggtcggtttttgatcgttagttttaatggaggtttttgagatttttatgcggggagggtaggttgtggcgggggttgttgaatggaatagttggggaaggaaaagcggataaaagttgcgggagcgtagagggtggagatttaggaatgggttgcggtttaggatttagaggataggttggttatggtaggtgtgatttttttagtttgtttttttgttttgggtttggggtttaggttttgtttagagcgttttgatggatggtagtcgttttggtaaggttgtttgaaaattttgtttcgtgtggtttgggttgtattattttttaggtttata

SEQ ID NO: 326 - DNA, 905 bp, Artificial Sequence
  chemically treated genomic DNA (Homo sapiens)
agatgaatggaaaaaataaagatttgtttaggaaaaagaattaaagattttattgaataagaaagaaataaggttgttatagttttagggagaggagttatttttgaagatgtgaaaattcgtagtagaatttagtaatgagattttaaagttatgggtttaagaggggatattttggtattattaaatatatatgttaattgaaaatgaaagtatattttatttgtgaaagaatgagatataaaattatttttttttaggtagtttagttttttttattaaatgttgatagttatagcgagtagagatggtgaatgttattgagattattgttttattgaagtggacgtttattttaaaaagttattatttgtttgatttagggtgaattttttttaacgggtatattgtatattgtgtggtaattttttttttgaaataagttatttgatgagaagaatgaaaattttggtttaaatggttgtggaaacgtttattagttgattacggtttgattttggaatttttagtcggtttgggaatggtaaatataatatgtggtaagttttttatttataattttttaggtataggaataggttttttgattgtttatgagggatagaaaaagtagatggtaggtgagttggtttttattatttagaaaagtagtggttataagatgaaggttttatttgataaatttgatttagtttgtagaggatattataggagaatttaggagggataaaggggttgcgatgaatcgtttttgagggtgttttttaaagatatttttattgtgtttatatttttttttaattatataagataatggtattttttagttttttatgtgtttttgttgtagagttttaattgttaatttagttaagggtttttaa

SEQ ID NO: 327 - DNA, 905 bp, Artificial Sequence
  chemically treated genomic DNA (Homo sapiens)
ttgggagtttttggttgagttaatagttggaattttgtagtaaaggtatatagaagattgaaaaatattattgttttatatgattaaaaaaaaatgtaagtatagtaggggtatttttggaaagtatttttaggaacggtttatcgtagtttttttgttttttttgggtttttttgtgatgttttttgtaggttaaattaaatttgttaagtggagtttttattttgtggttattgtttttttgagtgatgagggttaatttatttgttatttgttttttttattttttatgggtaattaaagagtttatttttgtgtttagagggttgtaaatgggaagtttgttatatgttatgtttattatttttaagtcgattaaagattttaaaattaaatcgtggttaattgatagacgtttttataattatttgagttaaggtttttattttttttattaaataatttgttttagggaaaaggttgttatataatatgtagtgtgttcgttaggaggagtttattttgaattaaatagatggtggttttttaaaataaacgtttattttaatagaataatagttttaatggtatttattatttttattcgttgtaattattagtatttgatggagagaattgggttgtttaagaaaaaataattttgtattttatttttttataagtgaaatgtatttttatttttagttaatatatgtgtttgatagtattagagtgtttttttttagatttatgattttggaattttattgttaaattttgttacgaatttttatatttttaaaaatgatttttttttttaaagttataataattttgttttttttttgtttagtgggatttttggtttttttttttggatagatttttattttttttatttattt

SEQ ID NO: 328 - DNA, 753 bp, Artificial Sequence
  chemically treated genomic DNA (Homo sapiens)
ttaatatgaataataaatttgttgtttattattttaaagttttaaaagagagtttttagaagggtaatttttagtttttttaggagaataatttgaaatgaaaatgaagattatatatattattaagttgaaaaatataatgttattttttttgagggatggtttaatatgttaatgtttaatttaagaattttaaaaacgtttttttattagtaattttaaaataaaaataagtcgttatataaagtatggttaaaatattattaaaggtatgataaggatcgaaattgtagttaatttagtatatagtatatagattattggattgttttagttttttttatgattaatattaattgatatggttgaattgattttgtagtaaggtgttttaattgttgaaatttattacgtgggtcgtgttttagagtttcggttttttcgtggatatgtttgtaattttgtaggattgattttattagtatagttagaggtttggtaagtgttcgatattaggtaaggttggattttatatttacggttttttataaaatgttagatgtgatatggggtttttttaatttttattattaattaatataattaaaattttaagatataattttttaaaagtataaaatttagaaaatttaaaatatttataaaataataaatttgatattataatttttaaagaggtttagtaatataataatataattttgtgtttatgatgaaaaattttttgaaaat

SEQ ID NO: 329 - DNA, 753 bp, Artificial Sequence
  chemically treated genomic DNA (Homo sapiens)
atttttaaagaattttttattatgagtataaaattgtattattgtattattaggtttttttggaaattataatgttaaatttattattttgtaaatgttttaagttttttaaattttgtatttttgaaaaattgtattttgaaattttggttatgttgattaataataagagttgaaggaattttatattatatttagtattttgtggagaatcgtgggtatggaatttagttttgtttggtgtcgggtatttgttaagtttttgattgtgttaatggggttaattttgtagaattgtaggtatgtttacgaagaggtcgggattttggagtacggtttacgtgatgagttttaataattggagtattttgttgtagaattaatttagttatgttaattggtattgattatgggaagagttggaataatttaatgatttgtgtgttgtgtattaaattggttgtagtttcgatttttgttatatttttagtggtattttagttatgttttatgtagcgatttgtttttgttttagaattattaatagaagggcgtttttaaagtttttaaattaaatattagtatattaagttattttttaagaggaatgatattgtgttttttagtttgatagtatgtataatttttatttttattttaagttgtttttttgaaggagttgaaagttatttttttgaaaatttttttttaaagttttgaaataataggtaatagatttattgtttatattgg

SEQ ID NO: 330 - DNA, 1053 bp, Artificial Sequence
  chemically treated genomic DNA (Homo sapiens)
aaaaattattttatttaataatttatttttttaaaaaattttgtatgtgtttataaattattttttttaagatttttttttttttatatgggttttagtttttataaattttgatatttatatttttaaaattattgtataatgtttaatttagtagagtttatatatggtaaatagtttagtaagtattaatttaaagttttagtattttagtagattttttttttatattagaaataaatagataaatagataagtgaaaaaggaaggaaggaagaaaaaaaaatatgaattatgttttttttaggttaatgtttaagtttgttttaattacgttttttgatatattttaaggtttatattagttaaggtaaatattttaagggatcgagtagatggatgttgtagtttagaaagtgtgtggtaaatttaggatttaagagtggaataaaagatttattttttttataattaagtttttgattaatgttttaggttttttagtatatatttgtaattatttatagaggtatttattgtgttgggatttgtttcggaatattaggtattaagttattcggtagtagatggaagtatatttttgttgatatatgttgtaatgaaaggattcgtgtaaatttggttagtaaggtagtagaatgttatgtatttgaagattaataatgtaaataattatgatgttaattttgttatgtttgtgttaattttatttgttgagatgtggaattaaattttgaagtttgtgggttttaaaaatttttagtatatatttgaattaaataagtttttttttattattggaatttagagttttaattaaaaaatgtttttttaggttaaatttatgggaattatgaattaaattttttaataagttaatattataatttgtaaatgaatttattttgtattgtaagatttgtatgtgtaaaggtaataatttgtaaaatggggtatttaaaaaatatgattaagttgttatattgatgttaaagatagtagataggtatgtagttgagataaagttatatg

SEQ ID NO: 331 - DNA, 1053 bp, Artificial Sequence
  chemically treated genomic DNA (Homo sapiens)
tatgtgattttattttagttatatgtttatttgttgtttttagtattagtatagtaatttagttatattttttgaatgttttattttatagattgttgtttttatatatataaattttataatgtaaaatggatttatttataaattgtggtattagtttgttaaaggatttagtttataatttttataaatttagtttagaaaagtattttttaattaaaattttaaattttagtggtgaaaaggggtttatttgatttaagtatgtgttaaagatttttaaagtttataagttttaaggtttagttttatattttaatagatggaattaatataagtataataaagttaatattatggttgtttgtattattaatttttaaatgtatggtattttgttattttgttagttaggtttgtacgaatttttttattgtaatatatgttaatagaaatgtgtttttatttgttgtcggatagtttgatgtttgatatttcgagataagttttagtataatgagtatttttgtgagtaattataggtgtgtgttgaggagtttagggtattaattagaggtttaattatgaaaaaggtggattttttgttttatttttggattttgagtttattatatattttttaaattgtagtatttatttgttcggttttttagaatgtttgttttgattgatatggattttaaagtgtattaaaggacgtgattaaagtaggtttaaatattaatttggaagaagtatggtttatgttttttttttttttttttttttttttttatttatttatttatttgtttatttttgatgtaggaaaaaagtttgttgaaatgttaaaattttaaattagtatttgttaaattatttattatatgtgaattttattgaattaagtattatatagtaattttaagaatgtaaatattaagatttgtagaaattaagatttatgtaaagaaaaaaaagttttaggaaaaatggtttgtgaatatatataaagttttttaggaagataagttgttaaatgaggtaattttt

SEQ ID NO: 332 - DNA, 902 bp, Artificial Sequence
  chemically treated genomic DNA (Homo sapiens)
ttgttgagatgtggaattaaattttgaagtttgtgggttttaaaaatttttagtatatatttgaattaaataagtttttttttattattggaatttagagttttaattaaaaaatgtttttttaggttaaatttatgggaattatgaattaaattttttaataagttaatattataatttgtaaatgaatttattttgtattgtaagatttgtatgtgtaaaggtaataatttgtaaaatggggtatttaaaaaatatgattaagttgttatattgatgttaaagatagtagataggtatgtagttgagataaagttatatggtttttttattttttggattttagttaattattttaacggaatttgttattatgagtaagaaggttggaaagagagggtaaaataatagatggttagtttattttattttgttatttacgtaagatagcgttttgaggagatatagcgtttgtgtgaagtcgttaaagatagtattgggggagggtaaatgggggggttaaagagggaattatatgattagttagttaaattatggttatatgtttgttttcgttgtttttttatattgaagtggaataattcgaagattgtatttttgtgataatattttaaaattaggaataattacgtggtatttaaagaagagtcgttgtatatttttaatagtgggatatttataaaatgttttatttatttttaatttagtagaattttttttttattatttttattatatattaagatatagttataatagaagtttttgaaaaatataataaaaatttgaaattttttttatagtttttagggttttatatatatatgggaaagaatgatgtttttagatatgagttatttatgtgtaatttttatgttttt

SEQ ID NO: 333 - DNA, 902 bp, Artificial Sequence
  chemically treated genomic DNA (Homo sapiens)
aaaggtatgaggattgtatatgaatgatttatgtttgagagtattatttttttttatgtatatataaagttttggaggttgtgaggaaggttttagatttttattatattttttaaagatttttgttatagttgtgttttaatgtatggtggggatggtgaaagaaggattttattgagttagaaatgagtggggtattttgtggatgttttattattgagaatatgtagcggtttttttttgagtattacgtggttatttttaattttaaaatgttattataaagatatagttttcgagttgttttattttagtgtggagaagtaacggaagtaggtatatggttataatttggttgattggttatatagttttttttttaatttttttatttatttttttttagtgttgtttttggcgattttatataggcgttgtgtttttttagggcgttgttttacgtgggtggtagggtagggtaggttagttatttgttattttgttttttttttttaatttttttgtttatagtagtaggtttcgttgaagtgattggttgaggtttagggggtgagggagttatgtgattttattttagttatatgtttatttgttgtttttagtattagtatagtaatttagttatattttttgaatgttttattttatagattgttgtttttatatatataaattttataatgtaaaatggatttatttataaattgtggtattagtttgttaaaggatttagtttataatttttataaatttagtttagaaaagtattttttaattaaaattttaaattttagtggtgaaaaggggtttatttgatttaagtatgtgttaaagatttttaaagtttataagttttaaggtttagttttatattttaatag

SEQ ID NO: 334 - DNA, 894 bp, Artificial Sequence
  chemically treated genomic DNA (Homo sapiens)
ttcgtagttatttttaagtggggagtcgaaattttaaagtttgatttttttttttgttgaatagaaggggagatgtgtaagaacgatataattttattttagatattaatttagaggaagaggatgggagttattatattgatttttaaaaggggataagagatttatatttatatttttaagtttattatagattattaattacgatgtaatttgttataatagggggattttttttgaagagatggtgttaaaatttgattatgaggtttttttatgtgaagagagaaaagggggtgtttggggattatttacgagaatttggggagggttttaattgtataaattagttgtgggttatagaatgtttgtttagtttattagtatttgttgtttatagtgattatttatttaatagattggtcgtgaataagatgatgggattagcgggtttatgttttagagagttttgtttattattaatatgagttacgttttgtttaggaattattttttttgttgaagaaatattgcgatgtaatatgataaatacgtttttattacgagtgtagatttgtttagaaagatttgtattaaggtggttgtattttgtatgaattatatgttggggaggggtaggtagtattaaaaattagttttatttgagtttttaagttattatggtatatgtgtttgttttattataaattttaaaggtttgtgacgtttggtttttattgtttaagttttttttttttttgtaagggtggaattatttgtttgtaatattagtaattattatgtattttggaattgagtagagagtgtgttcgagtgtgtatgtttagattggagggaattatttttatttttaaagttaaattttattttttt

SEQ ID NO: 335 - DNA, 894 bp, Artificial Sequence
  chemically treated genomic DNA (Homo sapiens)
gggggagtagaatttgattttgaaggtaggggtaattttttttaatttaaatatgtatattcgagtatattttttgtttaattttaaggtgtatagtaattgttggtattataaataggtaattttatttttgtaaaggaggaggggatttaaataatgaaagttagacgttataggtttttgaggtttatagtgaagtaggtatatatgttataatgatttgaaggtttaagtgggattagtttttagtgttatttatttttttttagtatgtgatttatgtaaaatgtagttattttaatgtagatttttttagataaatttatattcgtgatggggacgtgtttattatattatatcgtagtgtttttttaataagaggaatggtttttgaataggacgtagtttatgttaatgatgagtaaagttttttggggtatgaattcgttgattttattattttgtttacggttagtttgttggatgaatggttattgtaagtagtaggtgttaatgagttgagtaagtattttgtggtttatagttagtttgtgtagttggagttttttttagattttcgtggataatttttagatatttttttttttttttttatatggaaaagttttatgattaaattttggtattatttttttaaagggaatttttttgttgtagtaggttgtatcgtggttggtaatttgtggtaagtttgggagtatgaatgtgggttttttgtttttttttgagagttagtgtggtaatttttattttttttttttggattagtatttggaatggagttgtgtcgtttttgtatatttttttttttatttaataagagaaagaattagattttaagatttcggttttttatttgggaatggttgcgaa

SEQ ID NO: 336 - DNA, 796 bp, Artificial Sequence
  chemically treated genomic DNA (Homo sapiens)
tttttatgaggtttttttaggagggttatttttgaggttaatttgttggggtttagtgtgatgaaagtagggtgggtttgtttttagtttatggttgcgtgggtagtagagatatgttttgaggggttttggggaagtagttcgggatgtatttttttttagtatttttataaaattaggttttttttattgtggtaaagggcgatttttttatttgggtaggattcggagtttattatttgtgtttagaatgtttacgggtagggaaggattgtcgtgttcgtttatttgaatatggggtaatgtgttgttatttaaatggaggaattagtgatgaatgggggaaattgtttttttttttgtttcgtttttagaaggagataaaaattttttttattttagtaaataatgtttttatgtgggcgttagtgtttcgtagttcgtataagtttagttttgtgcgaattattaatcgttatatcgcgttttggggtttatagttagtggtattttttttcggtgggcgatttttattagtttttaggttaggttcggagaacgggaaggtttattatttttgggattataggttaggtatacggttattggaggttagtaggttttgcgtgtagattgtttttcgtgtttagaggtgtggttgttggaggtagtgtcgtttttatgagattttgttatagtagtagttaggcgggggatgggaggggtattaataatttatatataatagggcgacgggggaggagggggtgggagattgttggagttacggtttatt

SEQ ID NO: 337 - DNA, 796 bp, Artificial Sequence
  chemically treated genomic DNA (Homo sapiens)
ggtgggtcgtggttttagtagttttttatttttttttttttcgtcgttttgttgtgtgtgaattattgatgttttttttatttttcgtttggttgttgttgtgatagagttttatggaggcggtattgtttttagtagttatatttttggatacggaaggtagtttgtacgtagggtttgttggtttttagtggtcgtgtatttggtttgtggttttagggatggtgggttttttcgtttttcgagtttagtttgggagttggtgggagtcgtttatcgggagagggtgttattggttgtgggttttagagcgcggtgtggcgattggtggttcgtatagagttgggtttgtgcgggttgcggggtattggcgtttatataagggtattgtttgttgaggtaaaaggggtttttgtttttttttggagacgggatagagggaggaataattttttttatttattattaatttttttatttgaatagtagtatattgttttatgtttaaatagacggatacggtagtttttttttgttcgtaggtattttgggtataggtggtgggtttcgggttttgtttagatgaaggagtcgttttttgttatagtggggagggtttggttttgtggaaatgttgagagggggtgtatttcgggttgtttttttaaggttttttaggatatgtttttgttgtttacgtagttatgggttgggggtaggtttattttgtttttattatattgggttttagtaggttggttttaagggtgatttttttggaggggttttatggaag

SEQ ID NO: 338 - DNA, 887 bp, Artificial Sequence
  chemically treated genomic DNA (Homo sapiens)
agaggttgtttaggtatatattagttttttatttatgaggttttttatttttaatataattaatgtttttttaatagattttatattattatttgtgtaaagttaggagtaagtgtttaatatttgatagtattttttgtttataaagtttgtaattaaattaaggaggaggaagttttgtttttatggagttgagggttgagttgggagatgatattagtgttttttagttaggtattaaagcgttgcgaggataaggatgttaggagttatttatgagatttgggtagtagcggttttgagtttttaaggtttttttttaatatgtagatggtgaagtgatttttttttgtaattttgttatatttttaggtattaatttttagaataattttgttttttttttttttgttgtgagtatttgtaatagtttgattttttagaaatttttatagagagtaaaagtgttttaaatagttggagatggagttgtgcgtatgtattgtttgttttagatagaaattaaacgttttgagaaaaattaaacgttattaagacgtgaagtgagttttgatatgattaaggtgagtgtaatttagtttttaatattttatattatacgttttattttatttgattatttttttaattgtattttttatttattgattttttaggtttgtgggaatgtttttatttatttaattttagttattaatataaatatatttatatatagatagaaatacggttgtgttatttttatttttagatttttgtttgtgttattttttttaattagaatggttttttttttatttgttttttttgttttgttttgttttgttttgagatagagttttattttgttatttaggttggagtgt

SEQ ID NO: 339 - DNA, 887 bp, Artificial Sequence
  chemically treated genomic DNA (Homo sapiens)
gtattttagtttgggtgatagggtgagattttgttttaaaataaaataaaataaaataaaaaaaataagtaaaaggaaagttattttagttgggaaaaatggtatagataaaagtttggaaatgagaatggtataatcgtgtttttgtttgtgtatgaatgtgtttgtgttggtggttagggttgggtgggtggaggtatttttatagatttggagggttagtgaatagaaaatgtagttaaaagggtgattaggtggggtgagacgtgtggtgtaaagtgttggaggttaggttatatttattttaattatattaaggtttattttacgttttagtaacgtttggttttttttaaaacgtttgatttttatttagagtagatagtatatgcgtatagttttatttttagttatttgaaatatttttattttttgtaggaatttttagggagttaaattgttataagtgtttatagtagggaaaagaaagatagaattgttttggagattgatgtttgaggatgtggtagaattataggaaggggttattttattatttatatgttgaaggagagttttggaagtttagggtcgttgttgtttaggttttatggatggtttttggtatttttgttttcgtagcgttttgatgtttggttggaaggtattgatgttattttttagtttagtttttagttttatgaaggtaagatttttttttttttaatttagttgtaaattttgtgagtagagggtgttgttagatgttaaatatttatttttggttttgtatagatgatggtgtggagtttgttaagagggtattggttgtgttagaagtgaaaagttttatggataagaaattggtgtgtgtttgaataattttt

SEQ ID NO: 340 - DNA, 794 bp, Artificial Sequence
  chemically treated genomic DNA (Homo sapiens)
ggttattttgaatataattatttaggagagagttaggtttggtattgtttgtaattagttttttattaagttttagggtagtttatttttatagtaagaattttaggattttagggtgttagttagaaatgggggaagggtttaggagtttttggatgtttttttgttaggagttgatttagtatttttgttattaattttttggatgatcgtggataatttttttttttgagttttagttttttaatttgtaaaagataggttttaaagagataagtttttttttgttttagtttagtaattaagttgggtattgtttcgattatcggtggagatagttaggagggggttggtttttttagggttttagagatagaggtgtattgaagttggagtttgtaatttaggtagtagattcgaaatttttgttggattcgagggttagggaggttttcgggatgtaaataaattttttgtgtttttagagtagagtagagagtttacgttgtagttttattttagttgattagattagttttgggtgttggttttttgtttttttttagttttttttatcgatttttaaggaagttattttttagattaggttagtttgttttatagacggtttcggtagggtttttttaaggtaaggagtatttttattttgggtagtcgggttagttatgtgttatatttgtttttacgtttagaggttagagtgatatcgttagttttcgtaggtttggttattgattgttgggttttattaagttattgtttttatatatatt

SEQ ID NO: 341 - DNA, 794 bp, Artificial Sequence
  chemically treated genomic DNA (Homo sapiens)
ggtatgtgtggaaatagtgatttggtgaagtttagtagttagtggttaggtttgcggggattggcggtgttattttagtttttgggcgtgggggtagatgtggtatatggttggttcggttatttagagtggggatattttttgttttggagaagttttgtcggagtcgtttgtgggatagattgatttggtttggaggatggtttttttgggggtcggtgagggaggttgggaagaggtaggaagttagtatttagggttgatttaattagttgagataaggttgtagcgtgggttttttattttgttttgagaatataggaggtttgtttatatttcgagagtttttttagttttcggatttagtagggatttcggatttgttgtttagattataagttttaattttaatgtatttttgtttttgaggttttgagggagttagtttttttttggttgtttttatcggtaatcggagtaatgtttagtttggttattgggttgggatagagggaggtttgtttttttgagatttgttttttatagattggaaaattgaggtttagagaagggaattgtttacgattatttagggagttagtaataagggtgttgggttagtttttggtagggagatatttagaggtttttgaattttttttttatttttagttggtattttaggattttggagtttttgttgtgggaatgggttgttttgaggtttggtgaaaagttggttgtaggtagtgttaggtttggtttttttttgagtgattgtgtttagagtaatt

SEQ ID NO: 342 - DNA, 785 bp, Artificial Sequence
  chemically treated genomic DNA (Homo sapiens)
aattttgtcgtatatttaaaatagattttattatttataggagttggttatgagtgttgattttataattttatttttttttaaaaaattaaaaattttataaaatttatatttagttgatagaggtttcgggggaaattatagttcggaaaacggattagttagagtatttagattttatggaaatgttgggaggttgttttgagggtgggtgtcgtgagaaggttcggggagaggtgggttagggttgttaatgggggtagggtcgcggaaggagttgtttgtgtggggttttggcgataatcgcggggtttagcggtttttgtgggtgttgataggagtttggcggtgagtgatggaggaggcggttgtaaaataggttatcgtcgggcgttcggggtttattttgcggatggtgttgttgttaagttatttttagaattcgataaggacggatgtttcgagcggttttttggggtggggggaattaggaagtagtgaattaattgaaatcgtggtgaagttttttttttttgaagagtgagagagcgtggtatgagagtgtgtgtttgtatttatatgtgtttatataagtattcgtatatacgagggatttagttggaaaggggataggtggtttttaaaagtttaagtttatatttttagggttggggggtggggtgggttaatgataatttttttttttatttagtggtaagaaattatattgttaggttgttaaaaagattttttgggatttggggcgggagtttatagttagatgg

SEQ ID NO: 343 - DNA, 785 bp, Artificial Sequence
  chemically treated genomic DNA (Homo sapiens)
ttatttaattgtgaattttcgttttaaattttaaaaagtttttttggtaatttaatagtatagttttttattattaagtgggggggaaggttgttattagtttattttattttttaattttaggaatatgagtttgggtttttaaaagttatttgttttttttttagttgagtttttcgtatgtacgagtgtttgtgtgggtatatatgaatgtaaatatatatttttatattacgtttttttattttttaggaagaaaggattttattacggttttagttaatttattgttttttggttttttttattttagggagtcgttcggagtattcgtttttgtcgaattttaaaggtagtttagtaatagtattattcgtagagtgaatttcgggcgttcgacggtaatttattttataatcgttttttttattatttatcgttaggtttttgttagtatttataggaatcgttgggtttcgcggttgtcgttaaggttttatataaatagtttttttcgcggttttgtttttattggtaattttggtttattttttttcgaatttttttacgatatttatttttaaagtaattttttagtatttttataaaatttgggtattttgattaattcgtttttcgaattataatttttttcgaggtttttgttagttggatgtggattttgtaggatttttaattttttaaaaaaagatagaattatggggttagtatttatgattaatttttgtaggtggtgagatttattttagatatacggtaggatt

SEQ ID NO: 344 - DNA, 776 bp, Artificial Sequence
  chemically treated genomic DNA (Homo sapiens)
gtttcggtttttagttttattgtattttatttgtgttaaggttacgggaatttttttatcgtttttgttagtagatgttatttagtatttattttaagatatttatattttgattcggaagagattagaagtattttgtagttcgtgtggataagttttttttttgatttatagtttttttattttcgtatttaggagagggatggtagcgttgagggtcgtgggatttttttttttggaggtttttttattttcgtggtttttgcgcggtttagttttttttcgagttggtttaaggggtaatttgatttaggttagttggtggagtatgaggtagcgtttagttgagcgttacggtattttattaagttcgaaatgtgatcgttattgttgttatattttagcgtttttaataatttttttataaatgagaaaaatagagtttttttaaatgttttttttttgatattaaggaaagcgtatggaattttgtttagaggtttgagttcgggtgattttaggagtggttttagagtttgaggaaaggtttggggggcggagggggtgtttttttagttttaggtaaagtagtgagttgggggttatttgttgttttttttgcgtttgggtttgtaaagttagcggttgtcgtttaaattttattttttttaatatgttaggattgtttattttaggttatttatttatatggttatggtttagaggttttagatttatatgtttagtggggttaaggatttaggtaacgtaaattg

SEQ ID NO: 345 - DNA, 776 bp, Artificial Sequence
  chemically treated genomic DNA (Homo sapiens)
tagtttacgttatttggatttttgattttattaggtatgtgagtttgagatttttgagttatggttatataaatggatggtttagaatgagtaattttgatatgttaaggaaaatgggatttaaacggtaatcgttgattttatagatttaggcgtagaggaaatagtagatagtttttagtttattgttttgtttgaaattggaaaaatatttttttcgttttttaggtttttttttaagttttggagttatttttggggttattcgggtttaggtttttgggtagggttttatgcgttttttttgatgttagaggaaaggtatttggggaggttttgttttttttatttgtaaggggattgttgggggcgttaaagtgtgataatagtagcgattatatttcggatttaataaaatatcgtgacgtttagttagacgttattttatattttattagttgatttggattaagttattttttgagttagttcggaggggagttggatcgcgtagaggttacgaggatgggggagtttttagggaagagaattttacgatttttagcgttgttattttttttttaggtacgagggtgaggggattgtaagttagaggggagatttgtttatacgaattgtagggtgtttttggtttttttcgggttaaagtatgagtattttggggtgggtgttgaatggtatttgttggtagagacggtggaagggttttcgtggttttgatataggtgaagtgtagtggggttgaggatcgggat

SEQ ID NO: 346 - DNA, 786 bp, Artificial Sequence
  chemically treated genomic DNA (Homo sapiens)
tttaacgatacgttttttagtatgtatttttattgttacgtgatatacgattgtatattgtttggaattggtatatagtaagtgtttattaagggttatatttttattatttattaatgggttcgttttttgttatagttaattttttgttgttaatatttggtttaatggagtttttttgtttttttggagaggattattagttttttatattttttttgtattttgtttcgtggtttagtaggtcggttattttttttgtaggtagttttacggtggaggttttacgcggttgtttttttatttgtttgagttaagtgtttttggggaacgattcggagtttgatgggaggaggagatttttttgtttttttttttagttttaaatttaattgaaattgttttgtaataattgtatttgtggtttgtgaaagttgtgtttcgtggcgattagggattgagattagttggtgaaaaatttggtataggggtatatacggtattattggggatattaagtaagttacggataatgggggagatagagggtttttgtaattagaaattattgggaatttcggttatttttttttgttgtagatatgttttcgttatgtcgggtcggcgtaggaatacgttgttttttttagtattagttttttttttttttagtaatataggtggtaatgtggtagagtgtttaaagcgtttttgtagttagattgtttgggtttgaattttggatttgttattttttagttgtgggattataaaggattttgtttt

SEQ ID NO: 347 - DNA, 786 bp, Artificial Sequence
  chemically treated genomic DNA (Homo sapiens)
gggataaagttttttgtggttttatagttaggaggtggtagatttaggatttaaatttagatagtttgattgtagagacgttttgggtattttgttatattattatttgtgttattgggaaaagggagaattgatgttgggaggaatagcgtgtttttacgtcggttcggtatggcggggatatgtttgtagtagggagaggtggtcgaggtttttagtggtttttggttgtaggagttttttgttttttttattgttcgtggtttgtttagtatttttagtgatgtcgtgtgtgtttttgtgttaggttttttattagttaattttagtttttggtcgttacgagatatagtttttatagattataaatgtaattattataaggtaattttagttagatttggggttgggagagaaaatagaagggttttttttttttattaggtttcgaatcgttttttaggagtatttaatttagataaatggggaagtagtcgcgtggagtttttatcgtagagttgtttgtaggggaagtggtcgatttgttgggttacgaagtagggtgtaggaaggatatggggagttagtgattttttttaagggggtagggggattttattaaattagatgttaatagtaagaagttggttataataggggacgggtttattggtggataatgaaaatataatttttagtaggtatttgttatgtgttagttttaagtaatgtatagtcgtgtgttacgtaataatggggatatatgttgagaaacgtgtcgttagg

SEQ ID NO: 348 - DNA, 793 bp, Artificial Sequence
  chemically treated genomic DNA (Homo sapiens)
ttgtaagtttggaaatttaagtttagtttttgggttggtggtttattggtcgtttgattttaaataggttgtttgtttttttcgagtttttatattattttaagtttataaggttaattatttttagaggtggggagaggttagagggtaggtaggttttgttgtgggtaggtaggttttgtttatttttatttttttaagggtgaggttttaaggtatgagttgtttttagtgtaaaagttggtattaatagtagtaatttataaatttttggagaggttcggtattttttatttagtgattgttgagtttgattgatggggttatgtcggtaaattagttattatttagtagagatattttttagagatgttaattgtttagtgtttatgcgtttttatttttttttggtataggcggttggttgtcgattttttgttattattgtttgataatagtgtttgatttgtttatatagattagggtttttgtatgtatgttgttagtatttaattattagttagtacggcgtatgaagtacggtttattaatgtttttgaggggagtaaataggtgttggtagaaatttattttcgtggataaatttgtggatacgtgtatttttatacgtgtttatttagtttttaagtataggaatgagttagtgttacgtgtgtatatgtattttgtgaattatttatacgtcggttaagaagtagttttagatatatacgtataggatggagtatatgtatgtatataataggtaatgttatatggggttgtgttagga

SEQ ID NO: 349 - DNA, 793 bp, Artificial Sequence
  chemically treated genomic DNA (Homo sapiens)
ttttaatataattttatgtagtattgtttgttatgtatatgtatgtattttattttgtgcgtatgtgtttgaggttgttttttagtcggcgtatgagtagtttatagaatgtatatgtatacgtgatattgatttatttttatatttgggggttaagtgggtacgtatgagggtgtacgtgtttatagatttgtttacgggaatagatttttgttagtatttgtttgttttttttaagagtattaatgaatcgtgttttatgcgtcgtgttggttggtagttagatgttaatagtatgtatgtaggggttttggtttgtgtagataaattaagtattgttattagataataatggtaggggatcgatagttagtcgtttgtgttagggaggggtggggacgtatgagtattgggtaattagtatttttaaagggtgtttttgttgaatggtggttaatttgtcgatatggttttattagttaaatttagtagttattgagtggggaatgtcgggtttttttaaagatttgtgagttgttgttgttggtgttagtttttgtattgggagtaatttatattttaagattttatttttaagaggataagggtgaatagagtttgtttgtttataatagagtttgtttgttttttgatttttttttatttttgaggatggttggttttgtgagtttgggatgatgtggaggttcggagagggtaagtaatttgtttagagttaaacggttagtgggttattaatttaggaattgagtttgggtttttagatttgtag

SEQ ID NO: 350 - DNA, 718 bp, Artificial Sequence
  chemically treated genomic DNA (Homo sapiens)
tggaggagattatcgagggtatgttttttaggttggaagagttttgtagtttggttgatttggtgagtggttgtttggaaggcgtgggtttaggtttaggttagattttaggtttttgttggagttttttgcggaagttattttggtggtgagttagtaattaggaggaatggggtagcggttagcgttgagaggaaagttacgtgtaaatatttttttttttttttttttttcgtttttttttttttatttaattttaagtgttttttgaggcggttattttgatttcgtttttttttcgagatggtttttatttcgtagaggagttaggagtggattataaggtggtattttcgggtatcgatgtagggagtcgtttagcggggacgttagattatatttaattttttttagttttgtatcgttttttgtgtaaatatggagatagttaggaaatggttttaggtttgcgaggtttaggaggagttttttgtttaggttatagttcgtggtggagttgggtatcgagtttttttttgaatttttttgttttttttgtttttattttttattttgtttggttggtttaaatttattagtttggttgaggaggaagatggaagataatggtttagaagataaagttttttacgttagagtttttagaaatcgtttttagaggttgggtgtagtggtttatatttgtaattttagtatt

SEQ ID NO: 351 - DNA, 718 bp, Artificial Sequence
  chemically treated genomic DNA (Homo sapiens)
agtgttgggattataggtgtgagttattgtatttagtttttagaggcgatttttagagattttggcgtgggaggttttgttttttgggttattgttttttatttttttttttagttaggttagtagatttgggttaattagatagagtaggaggtaaaagtagagagaatagaaggatttaggaaggaattcgatgtttaattttattacgggttgtggtttgggtaagaggttttttttaggtttcgtaggtttgaagttattttttggttgtttttatgtttgtataggggacggtgtagagttgaggaaagttaaatatagtttagcgttttcgttgaacggttttttgtatcggtgttcgagagtgttattttgtggtttatttttggtttttttgcggaataaaaattatttcgagggaaggacgagattaagatggtcgttttaggaagtatttggggttgagtgagagagagagagcgagagagagagagaggagggagtgtttgtacgtggttttttttttagcgttggtcgttgttttattttttttggttgttaatttattattaaaatggttttcgtagaaaattttagtaagggtttgaagtttggtttgggtttaaatttacgttttttaggtagttatttattaggttagttaggttgtaaaatttttttagtttgaggagtatgttttcgatggtttttttta

SEQ ID NO: 352 - DNA, 1055 bp, Artificial Sequence
  chemically treated genomic DNA (Homo sapiens)
tattaggtttattgttttagagaatattacgtcgggtataattaaatttagggagagaaataggtgggaagagtaggtgtttgttttaagatggtttcgattgttttagggtataaatttacggaaaaatatttaatttagaaaaaaaaaaattattttaagtatatgtatttatatttattaaataaagtttaaaatataatttttggggatttttaagtaataaaatgatttatgttaggatatgatgatttagtgggaaagagggaattttattatttacgcgttttttttaaaaaattaatttgttttttggataggtgatgggagtttttgttattagatcgttttaagaaaatcgtttagtaaaataaaataaaaaattttttttaaataatttaagttttaaagttgagtaatttgatgtaggttagtttttaatttacgttttcgtaggatatatagagttagggagttagttggttaagtttgggggtttgaattaagaaggatttattagtcgaaaaattttaaaattttgtgttatgtgaaggaattttttaaaatattggattttatttaggcgtagcgagtcgtttaaagttatggtaatttttttttcgttgttatattatttttatttttgtgtttttagatttttttttgttttgtaatgttttgttgggattttcgatttcgtttgaggttttgtggttaagggttagggtttttattgaagttaggaatagtttggattttttagcgtgaattttgtttgaagggttatatattttttaaattttagagaatatttaaatggttttttagtaattattgagaatgataaataggaaagattttgattgttttgtttggtttttttgttttttttgatatgattagaaaaaattattcgagttgacgataaatgttgttttgggattttatttttgttattagttgtgggttgatttggggtgtatgatttgatatttgtgagttttagttattttatttgtaaaatggggataatgttgttcgttttttagggttgg

SEQ ID NO: 353 - DNA, 1055 bp, Artificial Sequence
  chemically treated genomic DNA (Homo sapiens)
ttagttttgagaagcgggtagtattatttttattttatagatgaggtaattgaggtttatagatgttaagttatgtattttaggttagtttataattggtgatagaggtggaattttaaggtagtatttgtcgttaattcgagtaattttttttagttatgttagagaggatagagaaattaaatagaataattagggttttttttatttattatttttagtaattgttgaaaagttatttggatgttttttgaaatttaaaaaatgtgtaattttttaggtaaagtttacgttgggaagtttaggttgtttttgattttagtgggaattttggtttttggttatagggttttaggcggagtcgggggttttagtaaaatattgtaaaataggaaaaaatttaaggatataaaaataaaagtgatgtggtagcgggaaaggggttgttatggttttgagcgattcgttgcgtttgggtgggatttaatgttttggaaggtttttttatatgatatagagttttggaatttttcggttggtaaattttttttaatttaggtttttaggtttggttaattagttttttggttttgtgtgttttgcgggggcgtaggttggaaattggtttgtattagattatttagttttgaaatttaaattgtttgaagagaattttttgttttgttttgttggacgatttttttggaacggtttgatggtagaggtttttattatttgtttagaggataaattgattttttagaaaggacgcgtgggtggtggaatttttttttttttattgagttattatattttgatatgagttattttattatttggaggtttttaaaggttgtattttgagttttgtttaataaatataaatgtatatgtttaaaataatttttttttttttaaattaagtattttttcgtgaatttgtgttttggaataatcggaattattttagagtagatatttgttttttttatttgtttttttttttgggtttggttgtattcggcgtgatgttttttgaaataatagatttggta

SEQ ID NO: 354 - DNA, 829 bp, Artificial Sequence
  chemically treated genomic DNA (Homo sapiens)
tgtattttttattttaatattatttggttgaaattttcggtttagttttagattatttttgtttaatttttgtaaataaggttatatttgggtatttatggtttattttacgtttttttttatgatagacgttcgtttgagtttagtttttgtagttatcgttttttattaaagtagattttttttttttttttgtttacggaggagtgagggggaattgttgagaggaggggtagattggttagggagggggcgattgagaataggaagaagatggggtgagatttgagaggtacgttttggatataataaataagtttgttgttttgtttagaaagggattcgggatttttaattttattagagttttaaaagtattagtttaaagttaaagttagatatacgtaaagttgtagttttcgggggaatttagagtttaaaaataatattttttttgatttaaaaattataagggaatatttacggtatattttttgattaaaaaaggaaagtgaaaaataaggtttttttttttttttttttaattattataaaattaatttgtgtttattttattaagttacgatttttgttggttttaagcgagtttaatttatgttggttatagatacgaggggtcgggaagtttgggtatgttttagtgaattgaatcggttttttttgaatggttgttattttttttttttgttttttttagtataggaaagttattaaggagtcgtttacgttagtatatttattatttagatttttagggtattgtttatttgagaggttagatatagcggggtttattaaagttttaaag

SEQ ID NO: 355 - DNA, 829 bp, Artificial Sequence
  chemically treated genomic DNA (Homo sapiens)
ttttgaggttttggtgagtttcgttgtgtttggttttttagatgaatagtgttttgggagtttgggtgatggatgtgttggcgtaggcggttttttggtggtttttttgtgttaaaggaagtagaggaaggaaatgataattatttagaaaggatcggtttagtttattaggatatgtttaagtttttcggtttttcgtgtttgtggttaatatgaattgggttcgtttgaggttaatagaagtcgtgatttgatggaataggtataagttagttttatgatgattaagaaggaaaaaaagaaaattttattttttattttttttttttaattaagaagtatgtcgtgggtgtttttttgtggtttttgagttaaagagagtattgtttttgagttttgagttttttcgggggttgtagttttgcgtgtatttaattttaattttgaattaatgtttttagggttttggtgggattgggggtttcgggtttttttttgaataaggtagtaggtttgtttattgtgtttaaagcgtgttttttagattttattttattttttttttgtttttaatcgttttttttttggttaatttgtttttttttttagtagtttttttttattttttcgtgagtaaaggagggggaaggatttgttttggtggaaggcggtggttgtagaggttgggtttaggcgaacgtttattatggggggaggcgtggaataagttatgagtatttaaatgtggttttgtttgtagggattgaataagggtggtttggggttggatcgggggttttagttaagtaatattggggtgaaaaatgta

SEQ ID NO: 356 - DNA, 793 bp, Artificial Sequence
  chemically treated genomic DNA (Homo sapiens)
gttgtttggttttttaggaattagttgtagttgggattttttgtagtttttttcgtagtaagttggggtagttatgagttttgtttgtttaacgtggggttaggcgggtatgtttgttgtgtttggtagttttgatatttttagattttgttggaagatgttcgtggtttgaaagtttattttgtagtcgttttattttgggatgtagtttttgtattggtaggattaacgtaaatagaatttgtttggtttatttttcgtcgggttttaataggtttgtaacgttattgtttgttagggagagttattcggtgatattgttaattaaaattatgattttgggggtaagaaaaaattttaaaacgttgaagttattttttttaatagaaattttattttgaaggtgtttacggaggttaggttgattagaaaaatttataagttataaataagtttaaatagttttatttaatttatttaattcggtgtttggagtttttatggggagaggtgtttggtattaatatagggtgggggtggttatttttatttttagtttttgggttttagagttgagaggagggagagaattgaatttttttggaagaatgtggaattgttgagtagatgttttggaatttgttgatttaggtatttgggagtatagtttgatcggttatttttgcgttaagttatttatagtttaatggttatttttaattggaaatttattttaaagtggtggtagtgacgggggagtggttgtatttgtaatttattattttatatagag

SEQ ID NO: 357 - DNA, 793 bp, Artificial Sequence
  chemically treated genomic DNA (Homo sapiens)
ttttgtgtgaaataatggattatagatatagttattttttcgttattgttattattttaaaatgaatttttaattgaaaatagttattggattatagatagtttggcgtagagatggtcggttaggttgtatttttagatgtttgggttagtaaattttaaagtatttatttagtagttttatatttttttaagaaagtttagttttttttttttttttagttttgggatttaggggttagagatgagggtggttatttttattttgtgttgatgttaggtatttttttttatgaggattttaggtatcgagttaagtaaattaaataaaattatttgagtttatttatggtttgtgggtttttttggttagtttgattttcgtgagtatttttaaaataagatttttattagggaagatgattttagcgttttaaaatttttttttgtttttagagttatggttttaattaatagtattatcgagtggttttttttggtagatagtggcgttgtaggtttgttgaggttcggcgaggaatgagttaagtagattttgtttgcgttaattttgttagtgtagaagttgtattttagggtagagcgattataaaatgagtttttaggttacgagtattttttagtagaatttgggggtgttaaggttgttagatatagtaggtatgttcgtttgattttacgttggataggtagggtttatggttattttagtttgttgcggggaaggttgtagagaattttagttgtagttggtttttgagaggttaggtagt

SEQ ID NO: 358 - DNA, 860 bp, Artificial Sequence
  chemically treated genomic DNA (Homo sapiens)
agaaggggaatagattcggggagttatagtagatttttgtttgggttgattttgtttattagaggagttatcggggggttttggagtttggaagttttattgttttgttgaattagatagggtggaaatgtttggtgttattatatttaaaaatatttttatatgaaaatgttttatatgaaatttataagtaggaggtgttattggttgggaagatatttaaagtgaattattgagaagagggaatagatacgttatttatttttttaaggtaggtaatagtaaaaggtgaatgcgaggggaaaatattttatttaatgtaatagtgagtcgttttttttggtttttcgaataaatagtaattaaattatgtaagttgtgatagtaaaattgtttgaaaaattaatttttttattataattgtttagatatttatatttttataaataggagttaattttattcgtggtttttatgagtagaatgtgatacgggttgtgggtgcgtcgtaatttattacggttgtaggtgatagttgtaaaagtatacgtttaaaaaatgtattaatgtgttcggatgaatttgcgtttttggaggtgtttttttttgtagtagaattagagatggttatgatgttggagtcgtgaagggaggttggtattttggtgtttattggttaatgttttggaagcgaagtaatgtttagtatttagcggtattaatagattgtttgattttaattttgtttttagtttattaagaaagtatttggtggggttagggtttgttttggttatatttgtttagtttattttaaggttatttgtaggtattaggtttggtttaataataaaaaggat

SEQ ID NO: 359 - DNA, 860 bp, Artificial Sequence
  chemically treated genomic DNA (Homo sapiens)
gttttttttattattaagttagatttgatgtttgtaaatggttttggggtgggttaggtaggtgtggttagggtagattttggttttattaagtgtttttttggtgaattggaaatagagttgaagttagatagtttattgatatcgttgggtgttgagtattgtttcgtttttaaaatattaattagtaggtattaggatgttaatttttttttacggttttagtattatggttatttttaattttgttgtagaaaaagatatttttagaggcgtagatttattcggatatattagtgtattttttagacgtgtgtttttgtaattgttatttatagtcgtggtaaattacgacgtatttatagttcgtgttatattttgtttataaaagttacggataaagttaatttttatttataaaaatgtgggtatttaagtaattatggtgggaggattggttttttaagtaattttgttgttatagtttatatgatttaattattatttattcgagaaattaaaaaaagcgatttattgttatattagataaagtgtttttttttcgtatttattttttattgttgtttgttttgaaagaataaataacgtgtttgttttttttttttaatagtttattttagatatttttttagttaatggtattttttatttgtgggttttatgtgaaatatttttatgtgaaaatgtttttaaatgtgatgatattaggtatttttattttgtttggtttaatagagtaatgaaatttttagattttagagtttttcggtggtttttttgatggataggattaatttaggtaagggtttgttgtggtttttcggatttgtttttttttt

SEQ ID NO: 360 - DNA, 5907 bp, Artificial Sequence
  chemically treated genomic DNA (Homo sapiens)
gtcgtcggagtagggttttagcgtatcgcgagtttttgtttttttcgttttgtagcgtcgcgagtttttttttttttcgcgtttggtttcgtttgcgtttttttcggcgtgggtattcgtagattcgttaggaggttgacgagaggtgtttttatagagttttgtttttttttagatttttaaacgaaaagaaagagaaaagttaatttttcgtttttattttgtacgtatttggagagcggttggtggcgagcgattcgtataatcgtttttttcgcggcgtttttggacgggcggagagaattcgggtgattgagtttgaggttgagtttttttgggagcgatttatgttagttatttttatttttaagggggattcgcggtcgggtttacgcgcgaaggatgggtgttagggaaattgatttatagacgattcgtttcgcgagagattgataatttagttttgcgggttttcggggcgtttagattagtttttagttagaggatttggggttgtatagttttcggattttggagggggtggttcgggggtgggagattgcgagtattagtttacgtcggtttttttttattttgcggcggcgaggtgggaagggttaggatgcgagtttagtattttttttagaaatgtagtatttcgtttttttattttttttgttttcggcgtttttttttttacgcgttttttttcgttttttttttaagggcgttttttttttgtttttagtttacgtttgaatttttcggcgttttttttttttttttttagttttttttttacgttttttgttttcgggtattttttttttttaattttttattttcgtatcgtttgatttcgaggggcgggagcgtattgggttgcgtacgggtgggggcgtcgcgttagtttcgcgtagttgttttgacgtcgttgtcgtcgtcgtcgtcgtcgtcgtttttcgtagtttagttcgcgtttcgcggtagtttcgtagtgtattagttattatcgtcgtcgtcgtcgtttcgttagatttgttgttagtttgttcggtttagttttgagagagtttcgaacgttagttgcgagggttatgagttagagagtttcggggcgtcgcgcggagagtaagcggagatagcgattttgcgttttttagttttcgtttttttgtatcgcgtttttcgtattttcgggtttttttgtttttttcgttgtttttatcgtcgttatggttattttgtttcgtagtaagttgtttaacgtggttacgttcgtgtttaataagttttaggttaagatgagcggtatgttcgttaggatgggtttttaggcggttacggatgaggaggcggtgggtttcgcgtattgcgacgatttcgattttgagtatcgttagggtttgtagatggatattttgaaagtcgagggagagttttgcggggacgagggcgttgaagcgttcgtcgagggagatatttattattagcgaggtagcggagtttttttgtcgtttttcggttttaaggattaggtgggaggtggtggcgaattcgggggttacgataagtttaaaattacggcgtgggaggtaggttggaacgtgattaacgttatttaggtaagcgcgggatttttagttttgtttgttttttttttttttagtttagcgtgtcgggttttgttttcgatagtcgttcggtgatttcggtttggagatttttttttgtatttaggaatttttttttttttattttttttagttttgcgcggggatttacgtttttaggcggtgtttttcgttttaatttacgtttttttttaacggtattagttgtaagatcgttaggttgaagttcggtttgagatatttgttcggagatattgtaaaagtgaaggaaatggggggagggagtaggaagcgatgagaaagaaagaaaattaggattggagggtacggtttggttttggattttggaacggatttatagttgtatttttgggaggaaagaagaaggggaaatcgttgaggtcggagtttttttttttcgtatatacgtatagatacgtatacgtatataggtaggtatattatatgtttatagtttttttttttacgaataaaggcgtaggtataggcgtatacgatatgtatttatatatagattatagtattatttttaaatgtatttgcgtatatttttatagttttataaataaaagtatatatttgtatatattaaatatacgaatattcgtttgaatatatgtatatatatatgtatagatgtatgtagataggaattagtttgtttttttgggtgcggttttgttggagatatataggtatatatatacgaaagtatatatatgtttttatataaatatatttagttcgtaataatttagtattatttgtgtatagattcgtttttttcgttcgaaatttcggttgtatcgtaaagaggcggttagttttttttcgtgtgattttggcgaagttttttttagaggttaagaatggtttttgttttttaggttttttttttttatttttaattttttattttttattaggcggcgtaggatttttatatagggagtaggtttggagttttggtaacgattttcgagttagtaggggttggtaggtcgtagttttttgggtcgaaggagattttagttttaggtaatttcggttttttatagtttggtttcgcggcgtttttggagcgtattattattggggttacggaaggtaggttttttgggagtagaggttttttaggggttgttttatgtatcggggtaagtaggattttatcgggtttcgaatattagatggttcgatttaaggcgtttttcgtttcggggttcggcgagacggttttgttggattacggattcggggttgttttcgttttcgttgtgtttcgcgatttttcggggcgttttttaaggtttcgtttgataggttttaagggaggttagggtaggaggttggaggttcgtaggttttcgggattttggatttcgttagtttttagttttcgtgtggattttaaattttatagttttgttcgtttgattttgaagtttttggttttagatttttgttcggttcggttttttggtttttttggcgttttttcgttaagtttttttttttgtttgtttttttagtttttatttagtttttttttttaggtttcgttttcgttttattttaattttagttttgttttaagatttttaatttttagttttgttttttttttttcgcgcgttgttttttaagcgtttttatattgtttttgtttttgttttttaggggttttgttttatttttagtttttttttttttttattttatttttttttcgttttataattgtagtttttaacgtttttttttttggtttgagtttgagacgttcgagtttttttttttagttttcgtgttttattttagttttattataaatttcgtgtttattttttttattggtttaggtttagtttattattttttttagagttttttttcgattacgtttttttttgtttttttttatttttttttttaattttttattttgtttttgtttttagaaattatttcgaagtatttttttttttttttgtggtttttttttatttttagtttttttttattttagttttttcgttattattagttattagcgtattttttttttttagattcgtttatatatttttttttttttatttttggttcgatattcgggtttattattagtttttttatatttatttcgtagtttgtttttaatttttttttttcggcggtttagatttaatttttagtgtttttagcgtttttttcgggttatagcgttaagttacgtttttcgggttttttattcgttgttaagttcgttgagcgttcgcgtttggttgttttttcgttttatagggtatgttcgtgttgggtttattttacgttattttgtacggcggttatttggggttgttttttattattttcgtcgtcgttgtgtgttgttatatcggtaagatttttatcgcgtgtttgtacgaggagaatgaagacggcgaggtggtgcgcgtgcgggattcgtacgtggttatagttaacgtttgttgcgtttcgcgttttttaacgttgggcggtcgagtggtgaacgtagcgtagattatcgagttggtgatgacgtgtattttgtacgtggtggtgagtggtaattttatgtataatagtttttcggggttgttcgtgtcgtagaagttttggtttattatcgttacggtcgtgttgttgttttgcgttttttttaagaattttaaggtcgtgtttaagtttagtttgttgtgtattttggtttatttcgttattaatattttggttatagtttattgtttatcgcgggcgcgcgattgggtttgggagaaggttaagttttatatcgacgttaagaagttttttatttttattggtattatcgtgtttagttatacgttttagatttttttgttttcgttggagggtaatatgtagtagtttagcgagttttattgtatgatgaattggacgtatatcgtagtttgcgtgtttaagggttttttcgcgttcgtcgtttattttatttgggtcgacgagattaaggaggttattacggataatttgttcggttttattcgcgtcgtggttaatatttttttggtggttaaggcgttgttgttttattttttgttattttttgtcgttgtcgaggtgttggagaagtcgtttttttaggaaggtagtcgcgtttttttttcggtttgttatagcggcgacgggcgtttgaagttttgggggttgacgttgcgttgcgcgttcgtcgtttttacgttgtttatggttatttatgtgtcgtatttcgcgttgtttatgggttttatcggtagttttacgggcgtcggtttttgttttttgttgtttagttttttttatttgcgtttgttttggcgtaagttgttgtggtattaagtttttttcgacgtcgttattttcgttatcggcggtatttgtagcgtgttcggtttcgtgtattttttcgagggttttatcgaagtttatcgaattaacgcggaggattagggcgtaagggcgagttttcgtcgcgtttttgcgtttttttttttttttttttatttcgtttttattagtttagtgcgttttgtcgtcgcgttgggaggttaagttttaaatatttttggtttttagtttttgattattcggggatgggggggatgggaggggatagggatttacgatttatcgcgtttgcgtttttgttgtttttttttttttataatattttggttttggggggaggcggggtgtatttgcgggtagggttttttgtttttttaagtggggtttcgatattttggttttagttatcgagggggttgggaagggagggagagggggcgtagttcgtaggcgtggtaatttgattttgggggaatattttatatttatttagagttcggaatttatagcgtttagttatttttagtaagagcgttttttatttcggagacgttttaattttgtagcgggaaaggttgattgggaaatttattttgggtgggtaattttttttaacgaagtcggaaggcgagaagtcgcggcggggttagtttgtttgtcggtttttaggaatttaaatttttattttgtgtaatttattaggtgtggaattgttttattgtgcgtgtggtgtgttcgtggtgaataagatgaaatgtatattagaaaaaaatttatttttaatttagagtgcggtatataattatattcgtaaataaagaagagataaaggtttgcgcggttcggtgtcgggtttgtg

SEQ ID NO: 361 - DNA, 5907 bp, Artificial Sequence
  chemically treated genomic DNA (Homo sapiens)
tataaattcgatatcgggtcgcgtaagtttttgttttttttttatttgcggatataattatgtatcgtattttaaattagagatagatttttttttgatatatattttattttatttattacgagtatattatacgtatagtagaatagttttatatttgataaattgtataagatgagagtttagatttttgaaaatcggtaggtaagttggtttcgtcgcggtttttcgtttttcggtttcgttgaaggaaattgtttatttaaaatggattttttagttagtttttttcgttgtagggttgaaacgttttcggaatgggaagcgtttttgttggaaatggttggacgttgtagatttcgagttttggatggatgtgaaatatttttttaaggttaagttgttacgtttgcgagttgcgttttttttttttttttttttaattttttcgatgattggaattaaagtgtcggggttttatttggaaggatagagaattttgttcgtaaatgtatttcgtttttttttaaaattagggtgttgtggaaaagaaaggataatagaaacgtagacgcgatggatcgtgaatttttgtttttttttattttttttattttcgaataattagaaattaggaattagagatgtttaaagtttggttttttaacgcggcggtagggcgtattgggttggtgggggcggggtgaggggagaagggagagagcgtagaagcgcggcgggggttcgtttttgcgttttagtttttcgcgttggttcggtaggtttcgatgaggttttcgagggagtgtacgaagtcggatacgttgtagatgtcgtcgatgacgaagatggcgacgtcgaagaagatttggtgttatagtagtttgcgttagagtaggcgtaggtgaaagaggttgggtagtaagaaatagaggtcggcgttcgtgaggttgtcggtgaggtttatgagtagcgcgaagtgcggtatataaatggttatgagtagcgtgaagacgacgagcgcgtagcgtagcgttagtttttaggattttaggcgttcgtcgtcgttgtagtaggtcgggaaaaaggcgcggttgtttttttggaagagcgatttttttagtatttcgatagcggtaaagaatggtagaggataggataatagcgttttggttattagaaagatgttgattacggcgcggatggagtcgggtaggttattcgtgatgatttttttggtttcgtcggtttaggtgaggtaggcgacgagcgcgaagaggtttttgagtacgtaggttgcgatgtgcgtttagtttattatgtagtggaattcgttgggttgttgtatattgttttttagcgaaggtaggaagatttgagacgtgtagttgaatacgatgatgttaatggagatggggaattttttgacgtcgatgtagaatttgatttttttttaggtttagtcgcgcgttcgcgatagatagtaggttatgattaggatattgatgacgaagtgggttagagtgtatagtagattgaatttggatacggttttgaggtttttaaggaaggcgtaaggtagtagtacggtcgtggcgataatggattaggatttttgcgatacgggtagtttcgggaagttgttgtatatgaggttgttatttattattacgtataggatgtacgttattattagttcgatgatttgcgttacgtttattattcggtcgtttagcgttgggaagcgcggggcgtagtaggcgttggttatggttacgtacgagtttcgtacgcgtattatttcgtcgtttttatttttttcgtataggtacgcgatgaggattttgtcggtgtagtagtatataacggcggcgaagatgatgagaaataattttaggtagtcgtcgtgtaggatggcgtagggtaggtttagtacgaatatgttttgtggggcggagaggtaattagacgcggacgtttagcgaatttggtaacggatgaggggttcggggggcgtggtttaacgttgtggttcgaagggggcgttaaggatattgagaattgggtttgagtcgtcggggaggagaggttaagagtaggttgcggggtggatgtaggggaattaatagtgagttcgggtgtcgagttagagatggagagggagggatgtatggacggatttgagaaggaaaggtgcgttaatggttggtgatagcgagagggttagggtgggagagggttgagaatagggagaagttataggagggaagggagatatttcgggatggtttttggggataggaatagaatgaggagttgggggaggagatgagaagggatagaagggagcgtagtcggaaaggggttttaagaaaggtagtgagttgggtttgggttagtggaaagagtgggtacgggatttgtggtggggttggaatggggtacgggagttaaagaggaaaattcgggcgttttaggtttagattagaggaggaaacgttaaaggttgtagttgtgaggcgaaaaggaaatagggtagagagggagaggggttgaaggtggggtaaagtttttgggaggtaagaatagagataatgtgaagacgtttggggagtagcgcgcggggaggaggaagtagggttggaaattgagagttttaggataaggttggagttagagtgaggcgagggcgagatttaaggaaggggattaagtggaggttggggaggtaagtaggaggaggagtttggcgggaaggcgttagggaggttagaaagtcgaatcgagtaagagtttagaattagaagttttagggttaggcggatagggttgtagggtttagaatttatacggggattaagagttaacgaaatttagggtttcggaggtttacgagtttttagttttttgttttggttttttttggggtttattaaacggagttttgaaagacgtttcgggaagtcgcggggtatagcgaaggcgggagtagtttcgggttcgtgatttagtaaggtcgtttcgtcgggtttcggagcggaaagcgttttgggtcgggttatttggtgttcggggttcggtggagttttgtttatttcgatatatggaataatttttgggaggtttttgtttttagaaaatttgtttttcgtggttttagtgatagtgcgttttagggacgtcgcggggttaagttgtaagggatcggggttgtttagagttgaagtttttttcggtttagaaagttgcggtttgttagtttttgttagttcggaggtcgttgttaagattttaaatttgttttttatgtaggagttttgcgtcgtttggtggggagtggggggttaggaataaggggagagggtttagagagtaggggttatttttagtttttggagagggtttcgttagggttatacggggaggagttggtcgtttttttgcggtgtagtcgggatttcgggcgagaggggcgagtttgtgtataggtaatgttggattattgcggattaaatgtgtttgtgtgggagtatgtgtgtgttttcgtgtgtgtatatttgtatgtttttaatagggtcgtatttaagggagtaggttggtttttgtttgtatgtatttgtgtatgtgtgtgtgtatatgtttaaacgaatattcgtgtgtttggtatgtgtaggtatatgtttttgtttgtggagttgtaggggtgtacgtaggtgtatttggggatagtattgtggtttatatatagatatatgtcgtgtgcgtttgtgtttgcgtttttgttcgtgggaaggggggttgtgggtatgtggtgtgtttgtttatatacgtgtgcgtgtttatgcgtgtgtgcggggggaggagatttcgattttagcgattttttttttttttttttttttaaaaatgtagttgtgaattcgttttagagtttaagattaaatcgtgttttttaattttgatttttttttttttttatcgttttttgttttttttttttattttttttatttttgtagtgttttcggataggtgttttagatcgaattttagtttagcggttttgtagttggtgtcgttgggagggagcgtgggttagggcggaaaatatcgtttgggggcgtaggttttcgcgtagggttgggagggatggagaaagggagatttttgggtataggagggggtttttaggtcgagattatcgggcgattgtcgggggtagagttcggtacgttgagttgggaggggggaggataggtagaattgggaatttcgcgtttatttggatggcgttggttacgttttagtttgttttttacgtcgtgattttgggtttgtcgtggttttcgaattcgttattattttttatttggtttttggagtcggagggcggtagaggagtttcgttgtttcgttgataatggatgtttttttcgacgggcgttttagcgttttcgttttcgtagggttttttttcggtttttaggatgtttatttgtaggttttggcggtgtttaaagtcgaggtcgtcgtaatgcgcgaagtttatcgtttttttattcgtggtcgtttgaaaatttattttggcgaatatgtcgtttattttggtttgggatttgttggatacggacgtggttacgttggatagtttgttgcggagtaaggtggttatggcggcggtggggatagcggaaaggatagaaggattcgaggatgcggggaacgcgatgtaagaaggcgagggttggggggcgtaaagtcgttattttcgtttgtttttcgcgcggcgtttcggggttttttggtttatgattttcgtagttggcgttcgaggtttttttagggttggatcgggtaagttggtagtaggtttggcggagcggcggcggcggcggtggtggttagtgtattgcggagttgtcgcggggcgcgagttgggttgcggagggcggcggcggcggcggcggcggtagcggcgttagagtagttacgcgaagttggcgcggcgtttttattcgtgcgtagtttaatgcgttttcgtttttcggaattaggcggtgcgggggtgggggattggagagaggaaatattcggaggtaggggacgtgaggaaggggttaggagaagagaaagggggcgtcgagggatttagacgtgagttgggggtagaagaagggcgtttttgggaaggaggcgggagggagcgcgtgaaagagggagcgtcgagggtaggggaggtgggggggcgaagtgttgtatttttaggggaggtgttaagttcgtattttggttttttttatttcgtcgtcgtagggtgggagggggtcggcgtgggttgatgttcgtagttttttattttcggattattttttttagggttcgggagttgtgtagttttagattttttggttaaggattggtttgggcgtttcgaaagttcgtaggattgagttgttagtttttcgcggagcgggtcgtttataagttagtttttttggtatttatttttcgcgcgtaaattcggtcgcgagttttttttgaaggtagaagtggttggtatggatcgtttttaaggaagtttagttttaggtttagttattcgggtttttttcgttcgtttagggacgtcgcgagggaagcgattgtgcggatcgttcgttattagtcgttttttaaatgcgtgtagaatggaggcgaaaggttggttttttttttttttttcgtttgggggtttggaagaaggtaggattttatgaggatatttttcgttagttttttagcgggtttgcgaatgtttacgtcgagaggggcgtagacggggttaggcgcggaggaaagaagggttcgcggcgttgtaaggcggaggaagtagaggttcgcggtgcgttggggttttgtttcgacggt

SEQ ID NO: 362 - DNA, 2001 bp, Artificial Sequence
  chemically treated genomic DNA (Homo sapiens)
ggaattttatttacgttcggtttttttatttatttcgtttatagcgcgtgttttagtttagggcgtgcgtgcgttcggtgttcgatttcgggttgtgtgtgtttatttggcgagatgtcgagagcggggggagtgtttttgtcggtgtatttgggtttaggttaggggattttttttttttattttcgcgtgggtgtgggggtgtgttcgggttagggcgcgtgtgtttttgtgtttgtgcgtgcgtgtgcgggttagggtggtgggatcgcgtattagggtagggtgtttgcgtttgcgtttgggtttgtttggtttgtatgtcggcgcgatttcgatttggattcgtgtttttggatgtcgagaggttagcgtggtgggggtgtttagtttttcggaggagtattatgttttgatattttcgttttatcgttttaaagttggtttggggtttcgtagggagtggtttgtatggggagggttcgcgtgttgtgtttttgggaggggtaagagagtgggggcgtagggggcgggttaggtttttgggcgcggcgcgggttcgggggattcgcgcggttgacgttaggttattttttaaatagagtcggtagcgcgtttcgttcggtatttttcgaagagttagatcgcggtcggcgttagcgttatcgttcggtttattcgttagttcgtatagtcgcgtcgtcgtcgagcgtttcgtgagcggcgtttcgaggattaggaatggggtttcgggcgttgggcgcgtttcgaattcggcgtacgtaagagtttgggagcgttcgagtcgttcggttgttcggagttttatcgtttaggatcgggagatgttggaaatgtaatcgtttgtttttcgaggagtcgttgttttcgggattttttggtattgtgcgtattttggttagtagttttcggagaagacggcgtttttaacgttcgattcgcgtggtcgtggtagcgttacgcgagttttttaggcgatcgtagggttatagtagtttagtcgtcggtgttttttcggaaattatgattttcggcgcgggtttatggagttatggtttatagggttttgggtcgcgcggggttattttagtcgcggagggcgcgtaggttgtttttcgtttttacgttttcgtttttttgtatttatttgtgttatagttttttgtgttgttgcgacgatttgggtcggagtcgttttttcggcgcgtttcgttgttttcgcggttttagcgcgggcggttagaaatttttttagaagtttcgtttttgtgattttttcgggtcgacgtttagcgagtttagcgtttttagcgcgttcgtcgtcgtcgtgttcgtttttcgttttttcggttttaattatttcggtttatttaagttgggtattaagcggttgttttaagtttttattgtgggcgtgaagaaggggggtattcgggtcgtgttggagtttattcgagtatattcggacgtgcgggttttgggtacggaattttatttttttgataggaattacggtcgcgggttggattggtataggtaaggattaggagtttcgtttcgtgcgtcgggtttttgatcgtttttattgggagagttattcgttttttgtgtttttttttttttttaatttaatttattgtatgggtttaggttgatatatagggttatggggggttatagtagaatttatttagaattttttagtgataatttagacgggtagtttttggaattgtaaagggcgttttttcgttattggagtcgttggaaaaggattatttttagttaaatttaagtgttagttaaagggttaattttttttgtgattagtttttagggtgtttaaggaagggataggcgaggatttgtgttgtttgaatacggtattattttaattttttgtaggtttttgttggtatttagtttttgaaggattttgagaaagataaggtagtttagagattttttgtagtaaggttt

SEQ ID NO: 363 - DNA, 2001 bp, Artificial Sequence
  chemically treated genomic DNA (Homo sapiens)
gagttttgttgtaaggggtttttgaattgttttattttttttagggttttttaggggttgggtattagtaaagatttatagagggttaggatggtgtcgtgtttaggtagtataggttttcgtttgttttttttttgggtattttaagggttggttatagagggagttagttttttagttggtatttaggtttgattggagataatttttttttaacgattttagtgacgagggaacgttttttgtagttttagaaattgttcgtttagattattattgggaagttttgggtaaattttgttatagttttttatggttttgtgtgttagtttgaatttatataatgagttgggttaaaagaaagagaaaatataagagacggatggtttttttaatggaagcgattagagattcggcgtacggagcggagtttttggtttttatttgtattaatttagttcgcggtcgtagtttttgttaaagaagtggggtttcgtgtttaaggttcgtacgttcgggtgtattcggataaattttagtacggttcgggtgttttttttttttacgtttataatgagggtttggggtaatcgtttggtatttagtttgggtgagtcggagtggttggaatcggagaggcgaggggcgggtacggcggcggcgggcgcgttgggagcgttgggttcgttgggcgtcggttcggagggattataggggcgggatttttggagaagtttttggtcgttcgcgttggggtcgcggaggtagcgaggcgcgtcgaggaggcggtttcgatttaggtcgtcgtagtagtataggaagttgtaatataggtaagtgtaggagagcgagagcgtgaaggcgaagagtagtttgcgcgtttttcgcggttgaggtggtttcgcgcggtttaggattttataggttatggttttatgggttcgcgtcgggggttatggttttcgagggggtatcggcggttgagttgttgtggttttgcggtcgtttagagggttcgcgtggcgttgttacggttacgcgggtcgggcgttgggggcgtcgtttttttcgggggttgttgattagggtgcgtatagtgttagggggtttcgggggtagcggtttttcggggaataggcggttgtatttttagtatttttcggttttaggcgatggggtttcgggtagtcgggcggttcgggcgtttttaggtttttacgtgcgtcgggttcggagcgcgtttagcgttcgaagttttatttttgattttcggagcgtcgtttacgaaacgttcggcggcggcgcggttgtgcgggttggcgggtggatcggacggtggcgttggcgtcggtcgcgatttggtttttcgggaaatgtcgagcggagcgcgttgtcggttttatttaaggagtggtttgacgttagtcgcgcgggtttttcgagttcgcgtcgcgtttagggatttggttcgttttttgcgtttttatttttttattttttttagaaatatagtacgcgggttttttttatgtaggttattttttacggagttttaggttagttttggggcggtgaaacgaaggtgttaaggtatagtattttttcgggaggttggatatttttattacgttggtttttcgatatttagggatacgaatttaggtcgagatcgcgtcgatatgtagattagatagatttagacgtagacgtaggtattttgttttgatgcgcggttttattattttgattcgtatacgtacgtataggtatagaagtatacgcgttttagttcggatatatttttatatttacgcgggggtggggaggagaagttttttaatttgggtttagatatatcgataaggatatttttttcgttttcgatatttcgttaaatggatatatatagttcggaatcggatatcgagcgtacgtacgttttggattgggatacgcgttgtagacgggatgggtggaggagtcgagcgtgagtgagatttt

SEQ ID NO: 364 - DNA, 2448 bp, Artificial Sequence
  chemically treated genomic DNA (Homo sapiens)
ttgttttgtttttacgataaaagttaacgggtttttagtatttttattaaaaaatagttacgtagatagtgttttggtggttttgtttcgtattttaattttggggtgggggaaaggggttaacgttttcgtagttttaaatcgggttattatttgtttatcgagtcgaatatgatgcggttttgttcggcgcgttttcgttggttttgcgttcgcgttattttagtagggttcgtagtaggtgaaaggtgaggttaatggatagagaagggttgtttcgtcgcggtcgttcgtttgtcgtttcgagttttaatcggtcgggtttcgcgcgggcgagaagcgttcgttagtagtaagaggagcgcgcgggtttcgtattttggtttcgtgtttcggggttttagcgtagattcgggttttggattcggtcgtttcggggtttttttggttgtttttagggtatagttgtattaggagtagtagcgcggttagtagcgttgcgtttcgtttgttttatggtgtcgtcggttttggatatataggggtagcgtagggtgaggtgcgtttgggatagttgtaggcgtcgttttttttttcgcgttcgttcggcgattttttcggtcgtcgtttaatgttcgtagtttgttttttagttttagttattgcgttagtgttgttttattttttttatttagttttttttttcggaggagcgtggtggttgagttgagcggagttttggtgtagggggaggttgggcggacgttttgagttatttataggttgtcggcgagcgtttgtacggtttaagattgagttttagtttttgtttttcggggtaggttgaagacgttttggggaatatagggtttgtttcggcgtgtcgttagttttatatagtgttaggatagtttcgattgacgttagcgaagaatatgtattgattgtagaagtaatgatagttatagtttcgagtttgacggttggcgggtttcggagggcgtatttttttatattagttttcgtgtttttgggcgtagcgttggaagtagtattggacgtaggaaagcgagaagtcggttggggcgtaaagattgttttgggatttacgggagttttatcgtttcgtttagaatagttagtaatgattagggtcgtttttagattagattagttcgggtcgcgtgttttgatatacgaaagggaggcgggatcgtgaggttgtttatggtgttgatttcgttttttgtttttagaagtggttagaaatgtgagaacgttgtgtcgttggaatttattgtttttttgtagttattagttttgtaaatgtaggtattaggagtttatcgttggtatttagttaatatagtgggatttattgagaggtagtttgttataattaaagttttttagtatttttatttttttttagttttaggatttaaatttgtagggttgtttgataggtattatgtaatagagggtttttagtattcgagtgtttttagattataaatggttggtttatttgtttttgagtttgttaaagtagtttagtaaagtttagttttttttttgggaattatagtagtagtgtaattttgtttatgagtagtaaagaaatatgggtttaagtttttgttaatttttggtgtggataggttattttttttttattaattttagggtttttatttgtaagattgggtttggttaggcgcggtggtttacgtttgtaattttaatattttgggaggtcgaggtaggcggattacgaggttagtagtttgaaattagtttggttaatatggcgaaattttatttttattaaaaatataaaaattagtcgggcgtggcggtatgcgtttgtggttttagttatttaggaggttgaggtaggagaattgtttgaatttaggaggcggaagttgtagtgaggtaagatcgcgttattgtattttagtttgggagatagagtaagattttgttttaaaaaaaaaaaaaaaaaaaaaaaaaaaaattgggtttggtggttttttggtttttttttagttttagaaatgattttttaatagttttttgtttaaaaatttatttattattattgtagatttcggattatatatttaataatatatttattgaggtattatataaagggtttcgggagtttttaaagagttggagttataagaagtttaggtagggttagagtaataaatgtgtttatgaagagtggggatgagtggtatttgttgggatatgggtgtaaagttgataaggttatgaaggtttaatagatatttatggagtgtttagtatgtggtgggaataagattattattaagggttttaaagtagttagtgtatattttagagtgaagaggggtattgtagggtgttagtttttttaagttttgatcggtaatttaatttcgtggaaattgg

SEQ ID NO: 365 - DNA, 2448 bp, Artificial Sequence
  chemically treated genomic DNA (Homo sapiens)
ttagtttttacggggttgggttgtcggttagagtttaagaggattagtattttgtaatgtttttttttattttaaaatgtatattgattgttttagagtttttgataatagttttatttttattatatattaggtattttataaatatttgttgaatttttatgattttattaattttatatttatattttagtaaatgttatttatttttattttttatagatatatttgttattttaattttgtttaggttttttgtagttttagttttttagagattttcggaattttttatatggtgttttagtaaatatgttattaaatatgtaattcggaatttgtagtggtaatgagtaagtttttaagtagaaaattattggggagttatttttagagttggaaagaagttaagagattattaagtttaatttttttttttttttttttttttttttttgagatagggttttgttttgttttttaggttggagtgtagtggcgcgattttgttttattgtagttttcgttttttgggtttaagtagtttttttgttttagttttttgagtagttgggattataggcgtatatcgttacgttcggttaatttttgtatttttagtagagatggggtttcgttatattggttaggttggttttaaattattgatttcgtgattcgtttgtttcggttttttaaagtgttgggattataggcgtgagttatcgcgtttggttaagtttagttttataaatgaggattttgaggttggtaggagggaggtgatttgtttatattaggagttagtagaaatttgaatttatatttttttgttgtttatgggtagagttatattgttgttatgatttttaggagagaaattgaattttgttaaattattttggtaaatttaaaagtagatgggttagttatttgtggtttgaaagtattcggatgttagagattttttgttatatggtgtttgttagatagttttataaatttggattttggggttggaaaaagataagaatgttgggagattttggttgtggtagattgttttttagtgggttttattgtgttggttgagtgttagcggtggatttttgatgtttgtatttgtagaattgatagttgtagggaggtagtgggttttagcggtatagcgtttttatatttttggttatttttagaggtagaggacggggttagtattatggatagttttacggtttcgtttttttttcgtgtgttagaatacgcgattcggattagtttggtttggggacggttttagttattgttggttgttttaagcggggcgatgggattttcgtgggttttagagtagtttttacgttttagtcggtttttcgtttttttgcgtttagtgttgtttttagcgttacgtttaggggtacgaaggttggtgtagggaggtgcgtttttcggggttcgttagtcgttagattcgaagttgtggttgttattgtttttataattagtgtatgtttttcgttgacgttagtcggagttgttttggtattatataaggttggcgatacgtcgggatagattttgtgttttttaaggcgtttttagtttgtttcgagggatagagattggagtttaattttggatcgtatagacgttcgtcgataatttgtgagtggtttagagcgttcgtttagtttttttttgtattaggatttcgtttagtttagttattacgttttttcggggagggaggttgggtggaagggatggaatagtattggcgtagtggttggggttggagggtaggttgcgggtattgggcggcggtcggaggggtcgtcgggcgagcgcggggaggggagcggcgtttgtagttgttttaggcgtattttattttgcgttgtttttgtgtgtttagggtcggcggtattatgaggtaggcgggacgtagcgttgttggtcgcgttgttgtttttggtatagttgtgttttgggagtagttagaggagtttcgaggcggtcgggtttaggattcgagtttgcgttggagtttcggggtacggaattagggtgcggggttcgcgcgttttttttgttgttggcggacgtttttcgttcgcgcggggttcggtcgattgggattcgggacggtaggcgagcggtcgcggcgggataatttttttttgtttattgattttattttttatttgttgcggattttgttggagtggcgcggacgtagagttagcgggagcgcgtcgagtagaatcgtattatattcgattcggtgggtaagtgatggttcggtttggggttgcgaaaacgttgattttttttttttattttagagttgggatgcggggtagagttattagggtattgtttgcgtgattattttttaataaaagtattgaagattcgttggtttttgtcgtagaggtagggtag

SEQ ID NO: 366 - DNA, 2820 bp, Artificial Sequence
  chemically treated genomic DNA (Homo sapiens)
tttaggggataatatttaggtatgttaacggagtttaaaatgttaaggaaattatattataattttgtttagtatattataggttgttaaatcgaaatgttatgttagttaggagtgtagtaatttttattttttggttttatttaattaggaagttttagtagagcgaagtttgttaagcgttcgtcgttagaatttgaaggaattcgagcgagtaagaagagtgtttgatttattttatagaagtttgtttagaaatggaggagttagcgtttattgaagtcggtttcgttttcggttcgtttatatggagtttgattagttttagttatgtttatttcggtttgggagattcgtaaagtgtttttttttttaatttttttgtattattttgaagtttagggaagtaaagagaggggtatatttggattgtaaaattaatgttttttgtcgtttaggagagaagggaatgagagagagagagagatagatagatagagagagagagagagagagagagagagagagagagagagagagagaaattttattgaaatttagtttttttagaatttgtgtgatttggtttttaacgggagattagtgcgattttatggtatttttgttaggaattagcgatttttttgtagttattatttgatttattgttttttcgtttatttttttttataaagttattttttttttattttagtaagatttttttttttaatgatgataaagtttttgttttagtgttttttttaggattggtgtttttttaaaatagtgaatttagaaaattatttcgtttaatattttttaaaattttcgtagttttaatgtaagcgtaagtatgtaaaggttttttgttatatttgtattttttgtttattttagaattattttttattttcgggtttgtaatagttttttttgtttttttggatagaggtgggtggtattaggggtttagggtagtaggaggtgaggggttgaggaggtcgttagggtaggttggtttgtgttggatacgcgtgtttttttgcggagttaaagggtcggggacgggggttttggatttattagagtaattttagtcggtgggcgtttggtagttatttaaggaggtagggaaagtagcgagttttatcgggcgggttacgatgagtagtatgacgggtagtagtagtagttagtaaaagttttcgtaaagtgtttagttgttgtattgtcgcggggatttttatagtattatgattagttcgtgtaattttgtagtagtaaacggttttcgaggaatataggatcgcgggggtcgggtagcgggttattgagtatttcgcggacggcggtagtagaggcggcggcggtggtagtggtattcggcggggaagtagtagttaaattcgcgtatgatttcgagagttttagtaatatttagggattgggtttagtttcggagcgagagggtcgttcgttgagaagttgcgtcggagacgcgggaagttgttgttataaggagggagttttgggaagtcggaggataggaggagacgggagtttaggggtagacgagtggagttcgaggaggtagggtggagggagagttaaggcgtttcgtagttcggtagtcgtttttcgagttttgtcgttcgtatttttttggcgtttgggaagtagtaggtttttagttcgttcggggttacgtgggaagaggtagtcgggttttgattggtggagtaggatgtaggtttcgggagggaggggtcgacgaggaggtgtaaggatgtaaggaggaggcggtcgcggaagttatagatgggttcgttcgttaggcgttggttcgagtggggttaggcggggatggtttaaatgagaagttcgggttttagggtgggttattcgtatatttatatattattcgttttatttttcgttttaggacgttttttatcgaaggcggggttcggattagcgtttttttttcgcgcgtgatttcgggtcgcgagtgcgggtcgcggttgggtggcgttttttcgagttggagatggtgggggcggaggtgttagaggagtagtagtagtagggtagagaggggcgagtcggcgcgggagagggcgttttgttggcgatcggcgttttagcgtgcgggagcgcgtcgtttaggttgtagggggatgtaggttgggaatgtcgcggcggagaggttagggacgtttttttagggatttataggaaagagggtgagaggcgatggtgttagaatcgtttttgtcgatttggaagtaatagtagtattttttataagagcgtgtaattttaaggttgttcgtcgaggtagtttagttatttcggtaggcgttttttttttttttttttttttttttttttttttttaggtttttcgtagtttcgatttagtttaagcgttcgtaggtttgaatttttttttttattattcgtttttttttagttcgtagtttattagtgtgtttatttgggaggtgcggttagatgtgtttggaaggttagattggtcgggataagtggtttgagagaaagagaaaggtttttttgtatacgtcgcgggtgggttgtcgggagtatcggtcgggtagcggcgttcgggaaggggagagcgggttttatttgttggtttaggtagtgattttgcgttttttattcgggtttttgtcggatggtcggtgatttggggcgacgagagaaggtttaattcggtaggagtttttggttttgcgcgttttttttattttttttagcgggaagggtaaacggtatagcgggattcgtttttcg

SEQ ID NO: 367 - DNA, 2820 bp, Artificial Sequence
  chemically treated genomic DNA (Homo sapiens)
cggaaggcgggtttcgttatgtcgtttgtttttttcgttggagagaatgaaagaaacgcgtagagttagagatttttgtcgagttagattttttttcgtcgttttaggttatcggttattcggtaaagattcgagtaaggaacgtagggttattgtttgggttaataaatggagttcgttttttttttttcggacgtcgttgttcggtcgatgttttcggtaatttattcgcggcgtatgtagaggagttttttttttttttttagattatttgtttcgattaatttgattttttaaatatatttgatcgtattttttaggtggatatattaataggttacgggttggagaggagcgggtgatgaggagagggatttaaatttgcgaacgtttgggttgggtcggagttgcggggggtttgggaggagagaggggagaagagagaaggaaggagagcgtttgtcgggatggttgagttgtttcggcgagtagttttggggttgtacgtttttgtgggagatgttgttgttgtttttaggtcggtaagagcggttttaatattatcgttttttatttttttttttgtaaatttttagagaaacgtttttggttttttcgtcgcgatatttttagtttgtatttttttatagtttaggcggcgcgttttcgtacgttggagcgtcggtcgttagtaggacgttttttttcgcgtcgattcgtttttttttgttttgttgttgttgtttttttgatattttcgtttttattatttttagttcggagagacgttatttagtcgcggttcgtattcgcggttcggggttacgcgcggaagaggggcgttagttcggatttcgttttcggtagggggcgttttggagcggagagtgaggcgaatggtatatgagtgtgcgggtagtttattttgaagttcgagttttttatttgagttattttcgtttagttttattcgggttagcgtttggcgagcgagtttatttgtggttttcgcggtcgttttttttttgtatttttgtattttttcgtcgatttttttttttcgggatttgtattttgttttattaattagagttcgattgtttttttttacgtgatttcgggcgggttgaggatttgttgttttttaaacgttagagggatgcgggcggtagagttcgagaggcggttgtcgggttgcggggcgttttgattttttttttattttgttttttcgggttttattcgtttgtttttggattttcgtttttttttgtttttcggttttttagagttttttttttatggtagtagtttttcgcgttttcggcgtagttttttagcggacgattttttcgtttcggggttgagtttagtttttggatgttgttgaaattttcgagattatgcgcgggtttggttgttgttttttcgtcgggtgttattgttatcgtcgtcgtttttgttgtcgtcgttcgcgggatgtttagtagttcgttgttcggttttcgcgattttgtgtttttcggaagtcgtttgttgttgtagagttgtacgaattagttatggtgttgtgggagttttcgcggtagtgtagtagttggatattttgcgagggtttttgttggttgttgttgttgttcgttatgttatttatcgtagttcgttcggtgaagttcgttgttttttttatttttttaagtgattgttaaacgtttatcggttggaattgttttggtaagtttagaattttcgttttcgattttttaatttcgtagaagaatacgcgtatttagtatagattagtttattttagcggtttttttagttttttattttttattgttttagatttttaatattatttatttttatttagagaaataaggggaattgttgtaggttcgggggtgaggggtggttttgggatgggtagaaagtgtaggtgtagtaggaaatttttgtatgtttgcgtttatattggagttgcgaggattttgagaaatattaaacgggatggttttttgggtttattgttttgaaagagtattaattttaggggaaatattgaaatagaagttttgttattattaaagaaaaaagttttattaggatgaggaagaaataattttatgagaaagaatgagcgagaaagtaataaattaaatggtgattgtaggggaatcgttgatttttggtaaaggtgttatgaggtcgtattggtttttcgttgaagattaggttatatagattttagaggagttgggttttaatagaatttttttttttttttttttttttttttttttttttttttttttttttttatttatttattttttttttttttttattttttttttttttaggcggtaaaagatattggttttgtagtttagatatgtttttttttttgtttttttaagttttaaggtagtataggggagttgagaaaaagaatattttgcgggttttttaggtcggagtgggtatgattgaggttggttaggttttatgtaggcgagtcgagggcggaatcgattttagtgggcgttgatttttttatttttggataggtttttgtggagtgggttaggtattttttttgttcgttcgggtttttttagattttgacggcgaacgtttggtaggtttcgttttgttgaagttttttaattaaatagggttagaggatgggagttgttgtatttttagttggtatagtatttcggtttgatagtttgtagtatattgggtagaattgtggtgtaatttttttggtattttaaatttcgttaatatgtttgggtattgttttttagg

SEQ ID NO: 368 - DNA, 5907 bp, Artificial Sequence; identical to SEQ ID NO: 360
  chemically treated genomic DNA (Homo sapiens)

SEQ ID NO: 369 - DNA, 5907 bp, Artificial Sequence; identical to SEQ ID NO: 361
  chemically treated genomic DNA (Homo sapiens)

SEQ ID NO: 370 - DNA, 3685 bp, Artificial Sequence
  chemically treated genomic DNA (Homo sapiens)
taagttttttttttcggcgtataggtacgtagttataggttaagttgcgacgcgagtttcgcgcgcgggattttcgtaaaaggttcgttcgatgcgttgggcgggaatcgagttcgggttaattgtttggaaggtaattatgtttattattatattattaacgtcgtacggcgcgggtagtttcgtcgcgtcggttcggggtttttattagcgcgtcgtcgacgttcggggtaggtcggtttcgacgttcggttcgttcgttcgttcgtagtttcgcgttgtcgcggtttttttaaaggtcgtttcgcgttttatcggtgtaaggttagcgcggttgattcgttacgttcgtttgtttttgggggcgttttcgtttattcgtcgtttcgggtttttagagtttttttttaataggtgttcgggggggaaacggtcggcgtcggtagggtttttatttttacgttttttatcgggcgtagggtttcgtgtgtcgtagaaagtttttttcgataattattttgagtcggtagttcgttgggcgtcgtgtagggttagaggaggtttttcggttgtcgttattaagtcgcggacgagaagaaaagataggaggttaaggaggtttagaaggttaaagggttaggtaggttaggttcgagatggtattttgcgattagttggagggcggaggaaggagaaggagggtttataggttgggttcgaggcggcggtttaaaaagtacggttgttttttcgtcggggaatcgaatttcggtttttcgcgtgataggcggggatatttattattatattaacgaggacgacggcgacggtcgtcgggacgttagattttatttcgatcgcggacgtttagttttgttttgattttttttttcgacggtaggggtcgggcgcgtgttcgttttttattcgtcgttcgtcgttcgttattcgttatacgttattcgttatttgttattcgtttttcgttatcgttggtacgatttatttcgatatttaataaagtattttgcgatttcgttgggattcggagtcggagtcggatttcgataggtatcggagcggcgtggaattttttcgcgcgttttgtttgttgtttttaacgcggggatcgcgtcggggtaggaggaggcgcgggcgaaatagttaggtcgttgtttttaggacgcggtgggcgtacgttttgcggggttcggcgagcggaggcgcgggggttggggcgtgcgtcggcggcggtcggttcgacgcggattttttgggttcggggtggggacgcgggggcgtttacgttaacgttagtcggtttcgtttatttggcgttcgtttttttcgcgcggttcgtcggttgcgtatcgaatttagataggcgtcggttaagggcgtaggcgttcgcgtcgggttttagttatgttagcggcgaagcgtttcggcgcgtcgttaggatggtcgagcggtttaaggcgttgcgtttaggtcgtagttttttttggaggcgtgggttcgaattttatttttgataagtcgattttttggttcgttcgtcggagggtaacgtttatggtaattttggagtatttttggtcgttttttgttttgagtttttgttcgttttttagattttagtttttttgaagtaagtttttaaaacgtcgtcgttttttaggtacgttcgttttttttgtttattcgtcggttgtcgtagaaatagtttaggattatgcgttagcgttcgcgattttttattaattgtttttcggatagacgttttttttattattttatacgtttttttttttggttttatatatagcgagcgatcgcgattattttttacgtttttttttgtttatttttttcgttcgttttttttttattcgtttaaatagatatagtttagattttttttttatttttttttttttttttttttttttatcggttttcgtttatcgtttatcgttttgaatcgtcgttgcgttgtttagaggcgttttggtttgaatagttcgttcggttttattttttaatttttgatcgttgagtagtagcgagcgattcgttcgtggagtcgtatatacgttttttattagaggtacgttatttaatattttgttttttttttcgatttttcggatttcggtcgcgtattttattttgtcgatattttagttaggtcgtcgattttatttcgttatttgtgtttttttttcgttaatatttgtttgtcggtttatttgtagttcggacgtttgtcggttagaggtagcgggaattttgtatatagtcgggtaggcgagtttaaattcggaaagatagtttaagaggaattacgagcggaagttttagattttcgttattcgtttataaacgtttggtttcgtcgggattagttttgcgttatagcgtatttttacgcgggaagtcgcggtttgggtcgttttagttatatttagcgcgttttttttagggttagttagttgcggttttgtcgaagcgttttttcgtttttttttcgcgttttagtttttttattagtttagggggtcggattttaagtgcgagtcggtggcgtgggttagagcgtaggagcgaggcgtttacggatttggtttgcgtttttgagtcgtacgttacggttgcgagattcgttttttatcgtcgttttcgttcgttgatatatttatttcgttttttatttgttggtgatataagtgagaaggttggttttacggtggtgaaaaaaaaaaatattatacgaaagaaagaaagaaagaaagaaagaaagaaagaaagaaagaaagaaagaaagaaagatagaaagaaataataaaaataaaatataaaaattttgggtttgtgtcggggattcgcgtttagtaaggttcgttatagtaaatttgtttatacgggtattcgggcgcgggttacggtcggttttttttttggagatttcggcgggtagtttttcgattttgggcggtagagaaagcgtaagatgggacgagtcggttttttttttttcgtttttttttcgcgtttcgttttaggtttttcgacgtgacgagagtttttttttttgttcgttttatcgggttagtttttcgtggacgttgtaataggacggaggtttacggtaggcggtgattagtgaacggcggttggtggcgagtttcgttgtgttagttttcgttggcgtttgttatcggtgtatgggtggtttagtggtagaattttcgtttgttacgcgggaggttcgggttcgattttcggtttatgtagtacgtttttttattttggtgttgtagtagtattaaggcgtagttgcgttcgtttttgtcgtttttttatattcggggcgcgcgagcgagttcggtatcggttgcgtttttacgcgcgacggttttttgttttttttttcgtgtttttttcgattgatttagggatgagtttatttttcgtatttatatattttggtgataataatttttttagatacgagagcgcgttagatattagaatttggtagttttttggttttgtttttttttattgttttgttatcgtttttgttcgacgtattttattttacggaatatcgttaggtattacgggtttgtagttattcgtattattttttttttttatattttatcgtttcgtttttttt

SEQ ID NO: 371 - DNA, 3685 bp, Artificial Sequence
  chemically treated genomic DNA (Homo sapiens)
gagagaggcgaggcggtgaaatgtgaagagaaggggtggtgcgagtggttgtaagttcgtggtgtttggcggtgtttcgtgaagtgaaatgcgtcgggtagaggcggtggtagggtaatgaagagaaataggattaggaggttgttaagttttggtgtttggcgcgttttcgtgtttggaggggttgttgttattaaggtgtgtgggtgcggggggtaggtttatttttaagttagtcgagagaggtacggaagaaagggtagagggtcgtcgcgcgtgggagcgtagtcggtgtcggattcgttcgcgcgtttcgagtgtaaggaggcggtagaggcgagcgtagttacgttttggtgttgttgtagtattaaaatgggagggcgtgttgtatgggtcgggaatcgaattcgggtttttcgcgtggtaggcgagaattttattattgaattatttatgtatcgatggtaaacgttaacggaagttggtatagcggaattcgttattagtcgtcgtttattggttatcgtttgtcgtgggttttcgttttattgtagcgtttacgagaggttggttcgatggggcgagtagaaggggaggttttcgttacgtcgagggatttgaggcggggcgcggagggagagcggagggagagaggtcgattcgttttattttgcgttttttttgtcgtttagggtcgagagattgttcgtcggggtttttaggggaaggatcggtcgtggttcgcgttcgaatgttcgtgtgggtagatttgttgtggcgggttttgttgagcgcggattttcggtatagatttagagtttttgtgttttgtttttgttgtttttttttgtttttttttttttttttttttttttttttttttttttttttttttttttttttttttcgtgtggtgttttttttttttattatcgtggggttagtttttttatttgtgttattagtaggtgagaggcgggatgggtgtgttagcgagcgggggcggcgatggggaacgggtttcgtagtcgtggcgtgcggtttagaaacgtagattaggttcgtgggcgtttcgtttttgcgttttgatttacgttatcggttcgtatttggggttcggttttttgggttggtagggaggttggagcgcgagaaaggagcggaggagcgtttcggtagagtcgtagttggttgattttggagaaggcgcgttgggtgtggttgggacggtttaggtcgcggtttttcgcgtggggatgcgttgtggcgtagagttggtttcggcggggttaggcgtttgtgggcgggtgacggggatttagggttttcgttcgtgattttttttgggttgttttttcgggtttggattcgtttgttcggttgtgtgtagggttttcgttgtttttggtcggtaggcgttcgggttgtaggtgggtcggtaggtaggtgttagcgggaagggagtataggtagcgaggtgggatcggcgatttggttagggtgtcggtagaatggaatgcgcggtcggggttcgaggggtcggaggaaaggataggatgttggatggcgtgtttttggtgggagacgtgtgtgcggttttacgagcgagtcgttcgttgttgtttagcggttagaagttggagggtgaaatcgggcgggttgtttaggttaggacgtttttgggtagcgtagcggcgatttaaggcggtgggcggtgggcggaggtcggtgggaggaaggagggaaaaggaggaataggggaagaatttgggttgtgtttgtttgggcgagtgaggagaaggcgggcggaggagataggtagggaagagcgtggaaggtggtcgcggtcgttcgttgtgtgtggggttagggaagagggcgtgtgaggtggtggggagggcgtttgttcgaagggtaattggtagagggtcgcgggcgttggcgtatggttttgggttgtttttgcgatagtcggcgggtgggtaggaagaacggacgtgtttgagaagcggcggcgttttggaggtttgttttaagggggttggagtttggagagcgggtaagggtttaaggtaggaagcggttaaaggtgttttagggttgttatgggcgttgtttttcggcgggcgggttaaaaggtcggtttgttaggagtgggattcgaatttacgtttttaggggagattgcgatttgaacgtagcgttttagatcgttcggttattttgacggcgcgtcggggcgtttcgtcgttggtatggttgggattcggcgcgaacgtttgcgtttttggtcggcgtttgtttgggttcggtgcgtaatcgacggatcgcgcggggggagcgggcgttaagtgaacggagtcggttggcgttggcgtggacgttttcgcgtttttatttcggatttaaagggttcgcgtcgggtcggtcgtcgtcggcgtacgttttagttttcgcgttttcgttcgtcgaatttcgtagggcgtgcgtttatcgcgttttaggagtagcggtttgattgtttcgttcgcgtttttttttgtttcggcgcgattttcgcgttggagatagtaggtagggcgcgcggggaggttttacgtcgtttcggtatttgtcggggttcggtttcggtttcgggttttagcgggatcgtagggtgttttgttgggtgtcggggtaggtcgtgttaacggtggcggggggcgggtggtaggtgacgggtggcgtgtggcgggtggcgggcggcgggcggcgggtggaaggcgagtacgcgttcggtttttgtcgtcgggggaggggattaaggtagggttaggcgttcgcggtcggagtggggtttggcgtttcggcgatcgtcgtcgtcgttttcgttagtatagtggtgagtattttcgtttgttacgcgggagatcggggttcgatttttcgacggggaggtagtcgtgttttttgggtcgtcgtttcggatttagtttgtgggttttttttttttttttttcgttttttagttagtcgtagggtgttatttcgggtttggtttgtttggttttttggttttttgggtttttttggttttttgtttttttttttcgttcgcggtttggtagcggtagtcgggaggttttttttggttttgtacggcgtttaacgagttgtcggtttaaagtggttgtcggaagaggttttttgcgatatacggggttttgcgttcggtgggaagcgtaggagtggggattttgtcggcgtcggtcgtttttttttcgggtatttgttggggaagggttttgggggttcgaggcggcgagtgagcgagagcgtttttagaggtaggcgggcgtaacgggttagtcgcgttggttttgtatcggtggggcgcggggcggtttttggagaggtcgcggtagcgcggagttgcgggcgggcggacggatcgggcgtcggggtcggtttgtttcgggcgtcggcggcgcgttggtgggagtttcgggtcggcgcggcggggttgttcgcgtcgtgcggcgttggtggtatagtggtgagtatagttgttttttaagtagttgattcgggttcgattttcgtttaacgtatcgggcggattttttgcggagatttcgcgcgcggagttcgcgtcgtagtttggtttgtggttgcgtgtttgtgcgtcggggaaggaggtttg

SEQ ID NO: 372 - DNA, 3104 bp, Artificial Sequence
  chemically treated genomic DNA (Homo sapiens)
gcgggcgttgtcgagtacggggaggtgttgaaatagttttggcgtgttgatttaagttttgattggtagagttattcggtgattgatagggggtttttatggcgttcgcgtcgttaattcgtttattttaatagcggagttagttcgtttgtcggcgtgtttgagtcgagtcgagttcgaattttaagtcgcggagttagtattttttttagtcggggtcgttcgttttcggtcgttgagttatcgtcgttattcggtagtgtgtttcgttgttttaattcgttttattaataagcgtttggtatatttagttaggttcgcgggtatttgttgcgtgtttcgtttcgggtttagtgttttcgtcgtcgtcggtattgtttcgatgttttagttgtttattttgaattttagtttttagtaagtggtcggggtatgtgagattttggaagagagcggcgatgtggagcgtttgggtcgttttttttggtcgttgttcgtggtttttgcggtttgcgaggtttttaataagaatgagtcggtgttacgcgtacgagttatcgtggttttttacggtggtaattatcgcgagttttattatattttggaaaattataagtttattaaggagtcgtacgttaagttgtaggcgttgtggtttgaagtatattattaggaggttgagaagttgcgtggaagatttttgggatttgtggataagtatcgagtaaggaagaagttttcgttgtcgcgtattatttgggacggcgaatagaagatatattgttttaaggagcgtacgcggtatttgttacgcgagtggtatttgtaggatttatattttaattttagtaaaaaacgtgagttcgtttaggtaatcggattgatttttacgtaggtgggtaattggtttaaaaatcgtcgataaagggatcgagcggttgtagttaagaataggtcggtatttagaggttttcgcgttttgagcgtatcggggaggaggcgggtggaggtatttttggcgtttttatttagtttttggcgattttaatttagtaggagttgggagcgcggtttgttttgggttaagagttttgcgttttgggtttttggtcgggagtttttttgtcggttttgtttttttattcgttggttttttacgtttgcgggtagttgtagtagttggtttcggttattaaattaaggttttattgggacggagaggggaagagaaataaaaaattaaaattttataaatagttagggattttaagatttaaagttaatttttgttagtttgggtataggtttttattattaatcgaagtttggtttattagtaatgtgtcggttttatgttaattattatttttaaagtttaggtatatttttttttaatgttttgaaaatagtttttaatggatttttgagaaatgggaagtcgagtttttttttttttatgcgttgtttgttatttttgttttaaaatagtaaattagttcgtgggtcgaggtttttcgtttttcggagtgtggatttcgattagttaaatattttgcggaagagttcggttttattttttaggtttaaatgttttttataattttttttgtttttaggtcgggtcgattcgatttaacgcgatcgcgggagtatttgtttaggcgtaagttttaggtagacgtatcgttagaaatggtattttatgtttttgggatcgatttgtttttgttatttatatttcgtttattttttgatagttttgtaaattttttaaaagtgtataataaatagggaggatattgtaagtttagtatataaaagatttgggagttgcggcgttgagaaagggcgcgaattatggtggggtataatagtagggattcgcggaggggcggtcgcggatttttgttcgatttttgtcgttttgtcgagtaattttcgttttaattgttggggttttcggaagaatttttagtcgtcgggttggagggacgtaggaggtggtgggggcgggcgacgggcggttgtgttacgagttgtgattcgtgttttttttttttttcgtagattttagtagtaggttttgttatagggtttcgggcgggtattacgggcggagggcgacggtacgttagaggtgttgggcgtcgttattagttcggtcgttagtttatttagtaaggcggttattttagttatttttattacgtttagcgatagcgagtgcgatatttgagttgtttatttaggatgtttagaagtagattttagtgtaaaaacgagaaaaataaaatgaaagaggggaagaagatgagagatttgtaaatttagcgttatagaagttaggtgattagggattcgcgggttcgggttgtcgtttttcgttttatttcgcggtcggtttggttttattggcgttttttggtcgcgattacgggaattagcgtgaggtttgatttagtattacgttttttttgttttgtttttttttaaggattttgttgtaaagttttttcggaattcgaattgtaagttgagcgtttgtttagatttttttatgggtattttacgtcgaaaggacgttgttatatatgtataattttcgttttaaagtttttttttaataaaatatatatatgttgtttatttatttatttaagagatcgttatggtaggtttttttgtagtttggggaatttgttgtttttaaatatgtaggttggtggtgatgggttttgtgtggagaagttaaataataaaataatttagtgggtaatttttttaattaagggagttgtttttagattttttttttttttattattattaatattattttttttattaggtatgtagggatttttgagtaaatggttttcggaaggttttatttatatattttttgttttttttggtgttttttggtatatgttttaaataatttatggtaggtttataattattttttacgttaaattatacgtatgtgtatatatgtatgtatttatataaatatatgtatgtatttatataaatatatgtatgtatgtatatacgtgatatatttaaggttagaaattggtaatatgtgagcgtttttttta

SEQ ID NO: 373 - DNA, 3104 bp, Artificial Sequence
  chemically treated genomic DNA (Homo sapiens)
tagagaggacgtttatatgttgttaatttttagttttaaatatattacgtgtatgtatatatatatatgtttgtataggtatatatatatgtttgtataggtatatatatatatgtatatacgtgtaatttgacgtgggaggtggttatagatttattataggttgtttaaaatatatattaggaagtattaaagaaggtaaaagatatataggtaagatttttcggagattatttgtttaagggtttttgtatgtttggtgaagggaatgatattaataataataagaagaaaaggaatttgagagtagtttttttaattaagaaggttgtttattaggttgttttattgtttggtttttttatatagaatttattattattagtttgtatgtttagaaatagtaagttttttaagttatagagaaatttattatggcggttttttaaataagtaaataaatagtatatatatgttttgttaaaaaaaaattttaaagcgaaagttatatatatgtaatagcgttttttcgacgtgaaatatttatgggagaatttgggtaggcgtttagtttgtagttcgggtttcgaagagattttgtagtaaaatttttaggaaaaagtaaagtaagaagaacgtggtgttgggttaggttttacgttggttttcgtggtcgcggttaaagggcgttagtgaagttaggtcggtcgcggggtggggcgggaaacggtaattcgagttcgcgggtttttggttatttggtttttgtggcgttggatttgtaggttttttatttttttttttttttttattttgtttttttcgtttttatattggaatttgtttttgagtattttggatgggtaatttagatgtcgtattcgttgtcgttggacgtgatggagatggttgaagtggtcgttttgttggatagattggcggtcgggttggtggcgacgtttagtatttttggcgtgtcgtcgtttttcgttcgtagtgttcgttcggaattttgtgataggatttgttgttggagtttacggggaagaaagggaatacgggttatagttcgtaatatagtcgttcgtcgttcgtttttattattttttgcgtttttttagttcggcggttagaggttttttcgaagattttagtagttaaggcgaggattattcggtaaggcgatagaggtcgggtaggagttcgcggtcgttttttcgcgggtttttattgttgtgttttattatgattcgcgtttttttttagcgtcgtagtttttaggttttttatatattgggtttgtagtgttttttttgtttgttgtgtatttttgggagatttataggattgttaggaaataaacgaagtgtgggtgataaggatagatcggttttagggatatgggatattatttttaacggtgcgtttgtttggggtttacgtttgagtaagtgttttcgcgatcgcgttggatcgggtcggttcgatttaaaggtaaaaaggattgtaaggagtatttgggtttgggggatgaggtcgggttttttcgtaaaatgtttggttaatcgagatttatatttcgggaaacgaaaagtttcggtttacggattagtttgttgttttgagataagagtggtaggtagcgtatgggaagaggaaaattcgattttttattttttaaaagtttattgaaaattgtttttaaagtattagggagggatatatttgggttttgaaaatgataattaatatgaaatcgatatattgttaataagttaggtttcgattaatagtaggagtttgtgtttaggttgataagaattagttttgggttttggggtttttaattgtttgtaggattttaattttttattttttttttttttttcgttttagtgaagttttggtttggtgatcgggattagttgttgtagttgttcgtaggcgtggggagttagcgggtggggaagtagagtcggtaagggaattttcggttaggagtttagaacgtagggtttttaatttaagatagatcgcgtttttaatttttgttgaattggagtcgttagggattgggtaagggcgttagaggtgtttttattcgtttttttttcggtgcgtttaaagcgcggaggtttttaggtatcgatttgtttttggttgtagtcgttcggtttttttgtcggcggtttttgaattagttgtttatttgcgtaggggttagttcggttgtttgggcgagtttacgttttttgttggggttagggtatggattttgtaggtattattcgcgtagtaggtgtcgcgtgcgttttttgaagtagtgtgttttttgttcgtcgttttaaatggtgcgcggtagcgggaattttttttttattcggtatttgtttataggttttaggggttttttacgtagttttttagttttttggtagtgtgttttaagttatagcgtttgtagtttggcgtgcgattttttggtgaatttgtggttttttaggatatgatagagttcgcggtagttgttatcgtgaaaggttacgatggttcgtgcgcgtagtatcgatttatttttgttgagggtttcgtaggtcgtaggggttacgggtagcgattagaggaagcgatttaggcgttttatatcgtcgtttttttttagggttttatatatttcggttatttgttgggggttgaaatttaagatgggtagttggaatatcgaggtagtgtcggcggcggcgagggtattgagttcggagcgggatacgtagtagatgttcgcgggtttggttgagtgtgttaggcgtttgttgatgaggcggattggggtagcgggatatattatcgggtggcggcggtggtttaacggtcgggagcggacgatttcgattggaggaggtgttggtttcgcggtttggggttcgggttcggttcggtttaggtacgtcggtaggcgagttggtttcgttattggggtgggcggattggcggcgcgggcgttatggagattttttgttagttatcgggtggttttgttaattaaagtttgaattagtacgttaggattattttagtattttttcgtgttcgatagcgttcgt

SEQ ID NO: 374 - DNA, 2528 bp, Artificial Sequence
  chemically treated genomic DNA (Homo sapiens)
ggtttgattttcggtttttttttgttagtgtaattattattacggcgtgatttatttttttttttttaagaatgttgaacggtattattttagaggtaggtgagttatgtgttaggttttttttgatgttttttgttttttgggttagtgcgtatattatgtgagtgtgtgtgcgtgtgtgtgcgttttcgttgggtggaacgaagaggagtgtgtgtttgttttaaaaattaaatcgcgtttcgtaggtttaaaaatatatatttttttttagagttttttgataggatttttgaaattttttttttgtttttttttttgattgtttttgattttttttaggattagtgttcggggcgttaggtagaggttttggttttattgattttttagtagttagtggttttagggacgcgtttttgatttttcggggagttgttgggggtgttttttttttggaagggatggaaggggggtcgagaagatattgttttttatacgtgtaggggttaattggaaattggttttatttatatttttttgttgttgtttagttttaatttagcgtagtcgtttttgcgtttgattttagcggacgtagtgcgggatttttttttttatttttgtagagttgagggtaggcggcgtaataaattttaggtaaaagagtattagattttagaagagttgtattttagatttggcgtaggtttttttggggagaagagtttaggggttatagagaatagaggtttgaaggaagtaaaagttggcgagaggttttttttttgtcgcgaagggtgagggtaggtagagaacgcgcgaaagggtagggttttggtcgggaagtatcgtttagcgaaaggttggtaagggtgcgtagttggagcgtggtttcgggtatttttttttaggtagtcgaatttttcgtattttagttttgtttggttgatttttatttgttttgagggaggattttttagtaggattgaattagaagtgcgttcgtgtagtagttttagtatggatttgttaattttagtgtagggggaaattttttatatggagtattttagtttttattgtttggagaaaggttttagcgtgtttcggtaattcgtttattttttatttagcgtagttcgggtatttagggttaggtggcgcggtattgaacgtatggtttttagttttaggttgacgttgacgttttattgggttttgggtgtttaggatagtgttagacgttggatattgttttaagagtcgcgttttttaaatcgaaggggttttttaattagtttaatagggtttggaggaaaggtaacgttttttttttaaagggtaaatttagaggcgtagaattatggtttttaaaatttaggtagagagagattttaagttatttttgtttttaaaatatgtatatttgttgggttatttttttttttttaattttaattgttttgtgggtttaatttttttttttttttttttagggaattttattgggttcgggttttttgtttatgtagatttatttgagtcggcgataagggcgttgtagtttttttgatttttatagagattttaagatttcgaatttttagttttaattattatgttttattatagttcggtcgtttatttttttaaaagcggtaatagtagcgggatgggtgttgttagaatagaaaggaaagaaagtttagtggattgcgtgtgtttaattgtgagggagagtagtgttggttaagggatttgttttattatatttggtagaattttgaatttagaggagatttaagattttattttcgacgtaggttagagagaattatatgtatttgttttttagtttaggaattgaaaaaatgaatattgtaatttttatggaatatttgcgggttatttagattatagttgggagaagggggaatatttttttttttgtttttagttatcgggttttagtttttttgttggagaggtgaaagaaagtagaggtataaagatgttttttttatttaaagtgtttatttaaagttttttgagaatgaggagcggggagtttttaggtaattttttttgggggttttaagataaaaagagtagaaaatttagggttatatatttaattcgagggtatttttttttattttttttgggttttttttttaggaattgtgagagaaggtagggttggatttatggggacgtattttcgtagagttaataaggattttttaaattttagttgatttttattttatttttagttttttttagattttttgcgtttattgagaaggaagaattttggtagtttgtttttttataggaagtagtaaatgttattggatgtaggaatttataatttgagttttataagagtaggaatagttaggatttaatttggaaattgattgtagaaggtgttttgttttgtttgtatttagatgattaataaatttgtgtggaatagaagaatgaatggatgattggagggtttataaaatttttgtgtt

SEQ ID NO: 375 - DNA, 2528 bp, Artificial Sequence
  chemically treated genomic DNA (Homo sapiens)
aatatagaggttttgtaagttttttaattatttatttatttttttattttatataagtttgttaattatttaggtataggtaaggtagaatattttttgtaattagtttttaagttgaattttagttatttttgtttttataaaatttaggttataagtttttgtatttagtggtatttgttattttttgtaaagaagtaaattgttaggattttttttttttagtgaacgtaggaagtttggagaaagttgggggtggggtgggggttagttggagtttgggaggtttttgttagttttgcggaaatacgtttttatgggtttagttttgtttttttttatagtttttaaggaggaagtttaggaagggtgggaaggaatgttttcgaattgggtgtgtgattttgggttttttattttttttgttttggagtttttaagaaagattgtttaagagtttttcgttttttatttttaaaggattttaaataagtattttaaataaggaaagtatttttgtatttttgtttttttttatttttttagtagaggggttgaggttcggtggttggggataaaaaaaaaaatgttttttttttttttagttgtagtttgaatggttcgtaagtgttttataaaaattatagtgtttatttttttagtttttgagttgagggataggtgtatgtggttttttttagtttgcgtcggggataagattttaagttttttttaaatttaaagttttattaggtataatggggtaggttttttgattagtattgtttttttttataattgagtatacgtagtttattaagtttttttttttttttattttgatagtatttatttcgttattgttgtcgtttttaggaaagtggacggtcggattatagtggagtataatagttggaattgagagttcgggattttagaatttttatgaaggttaaaaagattgtagcgtttttgtcgtcggtttaggtgggtttatatgggtaaagaattcgagtttagtagaattttttaggggggaggaaagggaaattaaatttatagaatagttagggttgagagggaagaagtaatttaataaatgtgtatattttgagagtaaaggtgatttaaggtttttttttatttgaattttggaggttatgattttgcgtttttaagtttgttttttaagaaggaggcgttattttttttttagattttgttaagttggttaaggagttttttcggtttgaaaggcgcggtttttaaaatagtatttagcgtttggtattgttttgagtatttaaggtttagtgaaacgttagcgttagtttgaggttgggaattatgcgtttagtgtcgcgttatttggttttggatgttcgggttgcgttggatggaaggtgagcggattgtcgggatacgttggggtttttttttagatagtggagattgagatattttatgtggaaaatttttttttatattgaggttggtagatttatattggggttgttgtacgggcgtatttttgatttagttttattaggggatttttttttaagataaatgggagttagttaagtagagttgggatacggggagttcggttgtttggaaaggggtattcgaggttacgttttagttgcgtatttttgttagtttttcgttgggcggtatttttcggttaaggttttgttttttcgcgcgttttttgtttatttttatttttcgcgataaaaaaaaaatttttcgttagtttttgttttttttaaatttttgttttttatagtttttgggtttttttttttaaaggggtttgcgttaagtttagaatatagtttttttgaaatttgatgtttttttatttgagatttgttgcgtcgtttgtttttagttttgtagaaataaagggagaagtttcgtattgcgttcgttgagattaggcgtagaaacggttgcgttgggttaggattgaataataataaaaaaatgtgggtgaagttagtttttagttaatttttatacgtgtgagaaatagtgttttttcggttttttttttattttttttaagaaagagatatttttagtagtttttcggagggttaggagcgcgtttttggagttattgattattggaggattagtggaattaggatttttgtttggcgtttcggatattgattttgaggaaagttaaagatagttaaagagaaaggtaaaaggagggttttaggagttttattaggagattttgaaagagaatgtgtatttttgagtttacgaagcgcggtttaatttttaagataaatatatattttttttcgttttatttaacgaaggcgtatatatacgtatatatatttatatggtatacgtattggtttaaggggtagagaatattagaaggaatttggtatataatttatttgtttttagagtggtatcgtttagtatttttagaggaaaaggagtggattacgtcgtaatggtggttgtattggtagagaaaagtcgggagttagatt

SEQ ID NO: 376 - DNA, 2280 bp, Artificial Sequence
  chemically treated genomic DNA (Homo sapiens)
ttgttttggttttatgtttgtaaggttttcggtttaagaggtttatcgattttttttgtttttttttagttgattataaaataaataaataaataaataaataaataaataaataaataaaaaagtaggatattaaatttgttatttttagagggttttttagtttttttttttatttttgaattgagcgaagcggtgtcgatttttattttttgggtacgagtttttgcgtatttgggagatttttgaatattttcggagaagttagaaagtttcgggagatggtttcgtttgttgttgtattagatcgggttttgtaaaggatgtatttttcgagttttttttttgtacgtttagtggggtttgtttcgattttatttgagggatttattggaggagaggtacggggatgttgtttgagtagcggatttttttggcgcggagtaggttgtttttaggtagagttcgacgggtttttttttttgggtgttttcggtttttcggattttagtaggtttgggaaggtttcgggtttttttagtcgatgtttagagagtttttattttttaagttttgttatcgaatttatcggtcggtgcgtttttgatcgtagggtaagggtttgcgtatttttaaagataagcggggttttcggaaggtttttaggtagaaatgagtattacggggaacggttcgtttttaagataatttcggggatatggatataataagatagggtggtaagttttaataaggcgggtgcgcggcgtttgagggtggtcgggtcgggtcgggtttggttttgcgtttatttcgttaagaatcgtttgggtacgggtttcgcgggatgtttcgcggtttatttttttttttaggacgtaaggaggaacgtttcggcgcgcggttagtagcggcgggtatcggtttaatggttacggaatttagtattggtagtcggttttttttatatcgtaggcgtgtagtgtggtcgacggagtttttcgggtcgaggatttagttaggtcgttatttcggttgtttttacgggaaggggtattaggtaaattgtttaaggtttcgagtttaggttttttggcggaggttttcgttggtttcgtttagattatggtcgttattaggttttcgagttatggttttttgttcgggaacggttcggcgttttggttgtttagttagttttggcgtttttttttggggtttttatcgttcgatttcgcggcggagtttgtttttttcggatttttagagatttcggattcgttcgagtatttgttttagttttgtttggttttttaggatagttttaagttatttttttttaggcgagtatagcgaagggtgcgcgggattgttaagttagttttttttgatggtagtattgttttagaaatgtttatttgttttttttttacgtttatttttttcgttttttgttgaggaaaaaacgttaatagcgtttcgtatatggcggattagtatttcggtcgttttgggttagttttggtttatttgcgggattttgtttttggtagatgggattcggcgggattttttttattagtttgtttttttgataaattagaaagcggtttttttggatcgttttggggatggattcgatttaatcgtatttttaacgatgcgttaggatgggaggatggtggaattcgtagggacgagaaggagattgggtatatattaggattttagtttcggttttgtttttcgggatatattggtatttgggtatttttacgggttacggtaaggttagtttgattaagaggttaaaggcgattggcgttttattgatcgttgggggtttggttttaaattttaggtgaatttataatttcggaatagcgggatcggtattcgggttttttttacgtggtagtatcggtaaggggttgggggaagagtttacgttagtttacgttacgtaggaagggagttagtggttattttaaatatattttttttttttatatttggtttacgtttaattttttacggttttgtttagaaggttgtacgtataatatatatagaggcgggtatttttttgacgattcgtgtgtgtcgtgggggagcggtagatggtttagttttaagtgtttcgatttttttgtttaaatatattttgtgacggaaagtttatgttgatttcgttcggtatttaaggcgtgggtagcggtttaacgtttgttgcgggaatatagtcgcgttgaatgttatttttaagatagataaaatagt

SEQ ID NO: 377 - DNA, 2280 bp, Artificial Sequence
  chemically treated genomic DNA (Homo sapiens)
attgttttgtttgttttgagaatagtatttaacgcgattgtgttttcgtagtagacgttaggtcgttgtttacgttttgagtgtcggacgaggttaatataggtttttcgttatagaatatgtttgggtaggaagatcggaatatttggggttgggttatttatcgtttttttacggtatatacgagtcgttagggaaatgttcgtttttgtgtgtgttgtacgtgtagttttttgggtagagtcgtggagagttggacgtaggttaggtgtgaggaggagaggtgtgtttggggtggttattggttttttttttgcgtgacgtaggttggcgtgggttttttttttagttttttgtcggtgttgttacgtgagaagggttcgggtgtcggtttcgttatttcggaattgtgggtttatttgaagtttgaggttaaatttttagcggttagtgggacgttagtcgtttttgattttttggttaagttggttttgtcgtgattcgtgagaatgtttaagtgttaatgtgtttcggggggtagggtcggggttgggattttagtgtgtgtttagtttttttttcgtttttgcgggttttattatttttttattttaacgtatcgttagggatgcggttaggtcgggtttatttttagggcggtttaaggggatcgttttttggtttgttaggaaggtaggttagtaagaagggtttcgtcgagttttatttgttaaggatagggtttcgtaggtgggttagggttggtttaaagcggtcgagatgttgattcgttatgtgcggggcgttgttggcgttttttttttagtaaagggcggagggagtggacgtgggggaagggtaggtgggtatttttggagtaatattgttattaagaggaattggtttggtaatttcgcgtatttttcgttgtgttcgtttggggaggagtggtttgggattgttttgggggattaggtaggattagggtaggtgttcggacggattcgaggtttttggaggttcgagagaagtaggtttcgtcgcggggtcgggcggtggaagttttagagagaggcgttaggattagttggatagttaggacgtcgggtcgttttcggataggaagttatggttcgggagtttggtggcggttatgatttgggcgggattagcggaggttttcgttagggagtttgggttcggggttttgggtagtttgtttggtgttttttttcgtgggagtaatcggggtgacggtttagttgggttttcggttcgggaggtttcgtcggttatattgtacgtttgcggtgtgaggagggtcgattgttagtgttgagtttcgtggttattgggtcggtgttcgtcgttgttggtcgcgcgtcggggcgtttttttttgcgttttagggaggaaggtgggtcgcggggtatttcgcggggttcgtatttagacggtttttgacgaggtggacgtaaggttaggttcggttcggttcggttatttttagacgtcgcgtattcgttttgttgagatttgttattttgttttgttgtgtttatgttttcgaggttgttttggaggcgggtcgtttttcgtggtgtttatttttgtttgggggtttttcggggatttcgtttgtttttgggggtgcgtaggtttttgttttgcgattagaggcgtatcgatcgatgagttcggtggtaaagtttgagaaatggagattttttgggtatcggttaagggggttcggggtttttttaggtttgttggagttcgggaagtcgggggtatttagaaggaaggattcgtcggattttgtttggggatagtttgtttcgcgttagaagggttcgttgtttaggtagtattttcgtgttttttttttagtgggttttttaggtagaatcggggtaggttttattggacgtgtagggaggaggttcggaggatgtattttttgtaggattcggtttggtatagtagtagacggagttatttttcggggttttttggttttttcgagggtgtttaggagttttttaagtgcgtaggggttcgtgtttaaagggtggaggtcggtatcgtttcgtttaatttaggagtggagaaggaagttagaggattttttggaggtggtaggtttaatgttttgtttttttatttatttatttatttatttatttatttatttatttattttgtaattaattgaaagaaggtagaaggagtcgatgggttttttaggtcggaaattttataagtataggattaaggtag

SEQ ID NO: 378 - DNA, 2251 bp, Artificial Sequence
  chemically treated genomic DNA (Homo sapiens)
ggatttcgagtcgtttttaggtagttaggagcggttttagcggtagtcgtaaattttagtagtcgttcgtgttgttcgtggttggggcggagggtagttagagttggggattaaggtttcgcgttatttgcgcgtatagttttatatttgaacgttgttttttcgtagacgagatcggcgggtattgtaaagttgggattcgtttttgaaggaaaaaaaatagcgagtaagaaatttagtattattttttattgatttatttcgttgtattttttgttttttaagtttttgaaagttggtaattttgatttcggtgtttaaaaatcgatagttattgagatcggttttgagaagtcgaagatttggtagtttttagattgagtaggataaggtgaaagtaggttggaggcgggtttaggatatttgagggttgattttgggggttcgtgaggttgttatcgttgttgtcgttataggtgagatggcgttgggttgacgttggggttaacgggtagagaacgtagggatgcggttttcgtcgaagagagttaagaagggaagagcgcgttttttaaattgtttttgtaatttgtttttagtgagtattttattgatttagaatttatcgagaatagtattagcgagttattttttttttgagatgggttttatttattttggtaatggagtgagttggattgtggggaggaagaggaatgggaaaattagtttataaatattaatgttagtaagagtgtgttgttggtaggacgtatcgcgagtttggagattttggtggtcgtagttggtaagtggttataatttagaaagtaggatcgagttgttttttttgttttattagtgtatcgtttttcgggcgcgggtttaatattttataagtggtaattttcgtttacggtagttttgttttttttttattatttttagatttagttttgtattttaaggttgcgtatcgttagttattattatgtttattttcggggttaattcgttcgtttttttgagtttcgatcggttgaatagtttagtgattatttcggcggtgatgtttattttcggggtggtgggtaatttggtggttatcgtggtgttgtgtaagtcgcgtaaggagtagaaggagacgattttttatacgttggtatgtgggttggttgttatcgatttgttgggtattttgttggtgagttcggtgattatcgttacgtatatgaagggttaatggttcgggggttagtcgttgtgcgagtatagtatttttattttgtttttttttagtttgttcggttttagtattatttgcgttatgagtgtcgagcgttatttggttattaattatgtttatttttatagttattacgtggataagcgattggcgggttttacgttttttgtagtttatgcgtttaacgtgtttttttgcgcgttgtttaatatgggtttcggtagttcgcggttgtagtatttagatatttggtgttttatcgattggattattaacgtgacggcgtacgtcgtttatttttatatgtacgcgggttttagttttttttttattttcgttatcgttttttgtaacgtgtttgtgtgcggcgcgttgtttcgtatgtatcgttagtttatgcgtcgtatttcgttgggtatcgagtagtattacgcggtcgcggtcgtttcggttgtttttcggggttatttcgttgtttttttagttttgtcgcgttttagcgattttcggcgtcgtcggagttttcgtcgtatcgcgggcgtcgagatttagatggttattttatttattgttatttttttggtggtgtttatttgttttatttcgttcgtggtgagtgatcggggttggggttttattcggtttttttttcgtatttatttttcgcgtttatttttcgttttttgttttttttttgagtttttggtagtgaacgtgtcgtttttaggtcggggttgggatttttatattgttttttagagtaggtttaattttttttgaagttttaattttaacgagatttagtaggtgttttgtttttatattttttagtttatgttttcggaagtttgggtttttttttttatcgagatagtttttattttttgttgtttgatattggtcgagttttttaagaaaatttttcgttttttttgttagacgtggaggggagtttgttgtagtgtgatttagtttattttttcgtattgtgaattgtgaattgta

SEQ ID NO: 379 - DNA, 2251 bp, Artificial Sequence
  chemically treated genomic DNA (Homo sapiens)
tgtagtttatagtttatagtacggaggaatgggttaagttatattatagtaggtttttttttacgtttaatagagggggcggggggtttttttggaagattcggttagtgttaggtagtaaggggtaagggttgtttcggtggagaaagaaatttaggttttcgggaatataaattgggggatgtaggggtaaagtatttgttaaatttcgttagggttgggattttaaagagggttgggtttgttttgagaaatagtgtgggaattttagtttcgatttaaaggcgatacgtttattgttaaggatttagagggaaagtagggagcggggaatggacgcgggaggtggatgcgagaaaaaggtcgagtagggttttagtttcggttatttattacgagcgggatggagtagatgagtattattagggaggtggtaatgagtaagatgattatttggatttcggcgttcgcgatgcggcggaagtttcggcggcgtcgaaagtcgttgaggcgcggtaaggttggggaggtagcggggtggtttcgggaggtaatcgaggcggtcgcggtcgcgtggtgttgttcggtgtttagcgaggtgcggcgtatgaattggcggtgtatgcggagtagcgcgtcgtatataagtacgttgtagaggacggtggcgagaatgaggaaggagttgaagttcgcgtatatgtaggagtaggcggcgtgcgtcgttacgttggtggtttagtcgatgaagtattaggtgtttgggtattgtagtcgcgagttatcgagatttatgttgggtagcgcgtaaaagagtacgttggacgtatagattgtaaagagcgtgaggttcgttaatcgtttgtttacgtagtggttgtagaaataggtatggttgatggttaggtagcgttcgatatttatggcgtagatgatgttgaggtcggataggttgaagaagagtagaatgaaggtgttgtattcgtatagcggttggttttcgggttattggttttttatgtacgtggcgatggttatcgggtttattaataaagtgtttaataggtcggtgatagttagtttatatattagcgtgtagaaggtcgtttttttttgttttttgcgcgatttgtatagtattacgatggttattaggttgtttattatttcgaagatgaatattatcgtcgggatggttattgggttgtttagtcggtcggggtttaaggaggcggacgaattgatttcgggagtggatatgatagtggttggcggtgcgtagttttggagtgtaaggttgggtttggggatggtagaagagagataaagttgtcgtgagcggaaattattatttgtaaggtgttagattcgcgttcgagaaacgatatattgataagataaggggagtaattcgattttattttttggattgtagttatttattaattgcggttattaaaatttttaggttcgcgatacgttttgttaatagtatatttttgttgatattaatatttataaattgatttttttatttttttttttttttataatttaatttattttattgttaagatgaataagatttattttaagggaaaagtagttcgttagtgttattttcgatagattttgaattaataaaatgtttattgaaaataagttataaaagtaatttggagagcgcgtttttttttttttggtttttttcggcgagggtcgtatttttgcgttttttattcgttgattttaacgttagtttaacgttattttatttgtagcggtagtagcggtggtagttttacgagtttttagggttagtttttagatgttttggattcgtttttaatttgtttttattttgttttgtttagtttggaaattgttaaattttcggttttttaaagtcggttttagtggttgtcgatttttggatatcgaggttagagttgttagtttttaaaaatttgggaaataagaggtgtagcgggatgggttagtgaagaatggtgttggattttttattcgttatttttttttttttaaagacgagttttagttttgtagtgttcgtcggtttcgtttgcgggaggatagcgtttaggtgtgaggttgtgcgcgtaggtggcgcggagttttggtttttagttttggttgtttttcgttttagttacgggtagtacgggcggttattggagtttgcggttgtcgttgaggtcgtttttggttatttgggggcggttcggggttt

SEQ ID NO: 380 - DNA, 2586 bp, Artificial Sequence
  chemically treated genomic DNA (Homo sapiens)
ttcgcgcgggcgcgggagtagtttcgttgggcgttcgtagtcgcgggagttaagttttttttttaggtgtaggtataaaagtttatggtttttgaataatgcggggtagaggtttttttaagtaacgtttaattggtcgtttttaattaaggaaagagaggtttttagttttatggtaatttaagtagggtagttttaggttaaaggtattttagaataataagattattttaagaaatggaatgttttattggatattcgaataggttttttgttattggaattggtgtgtattgtattttaattagtatttttgtgtggagggaggcgatttagtttaggaaagttaattatagaaagaggtgattttcgaaaggattgttttagcgttattagaatatatgtgattatattaaaagtttaggcggatattcgtagttagttcggatttggataatttaatattgttggtagaattgaagggaataagttattttaattttattttttgtacgcgtagtgttgagtgagttgggggtgggaggatagcggttcgtttattgtttttttttaaaatttgagatttgaaaatatggaggttttattcgtttttttagtttttgattgttaataaaaaaataaatttcgttggttatattttttttttattttaaaatagtaattttatggtttgtattaagttttttagaagtttattttatttgttttgggttagggagggaataatgttaggaaaagttatcggtgtttttttattttcgttttttttagggtgtaggatgtgcgggtcggcgggtttgtgatttcggaacgttttttgttatttttttgcgcgaatttgaaaggattgggaggtgttgagagtagagtttagggttggtgtattttgcggtgttgagtgggcggcgcgttcgggcgtttaggtcgggggatttgtagtcgttttatcgcggaggggaaaatacgtagttggagggcgtgcgtcgtgcgggttgtgattcgttattttatcggttattttggggtttttttaagtttttaggtagggttgtgagagttttttagagttgaagtttcggaggttgatttgtgggtttggttgttatgggaattcggttggtttaaagaagtttttttttcgggtatttggaattttagtttagtgtggggtatcggggaagtggcgttggggggttgggttgggggattttagtcggtagtttcggagagggtttatttttggggtcgttgggtgaggtcggtacgatttttggttttaaaaggaaagtttttgttttttgttttggcgcgagaagttaaagatttattttgagagcggagagagaaatgttattggtaacgttttttttggaaagttcgagaggggttttttggatatattatttagtgtttttaaattagagaagtagtttttttttggtgtttgggtttagaagtcgttatttatttagtttatggttcgaaattagtatgggaagcgtcggggtaaggtttcgtcggagattagaggtttgtttgtcgggaggagtttttgggggatggggattttatttttttgtttgttttggtttttatttgggacgttttcgtaggagtttagaaagacgatttattatatggtttcgggatagagtagcgcgtttaattttgagggaattttgtgcgtttttttgaggttttagttttttaaggtatcgtcgttcgtttttttttttttagatcgaaattggggaagagtgtgggcgtttttttgtttcgatgagttcgtttttttaaacgtttatttcggttgtattagagtatttgggaaattttgaaaggtgtttaggttttatatagtagcgtttttttatttagtttttgtttttgggtttttttaagagagtttttattttatgtttcggttttttttcgatgtcgggttttcgaggtaggtacggagtttttttgaaagtagttgtttatttgtgtttttttggtgtaaagttagagtttattttgttgggggaaggggaggtagaaaagattatagttgggaaagtgcgtttttcgttttgtttttaaaatatgttttaagattgttatcgcgattgttaggagagttattaacgtttaggggttataaaggaatttttgaattttcggttttttttaaatttttaggtttttaaaattttagtgggggttttttggggttgggatttaggttggtatcgttgggaggatttcgtttagtatttttttattaatattttacgaaggtaggtttttgttttttttggagttttttttttcggaatgtttttaaattttggttaatttatttttttgtgagttattttagggttttgtggttcgggaagagacgcgttaatttcgcgggtttgcgcgtagtttttagtcgtaaagtgttgtaagtgatttttttgacggtttttttcgatcgaagagttcgggaattaaagagaaaaaaaataattttatttttaaaagaataagttattattgcggcgatattgtggcggaggattttggcgatggggt

SEQ ID NO: 381 - DNA, 2586 bp, Artificial Sequence
  chemically treated genomic DNA (Homo sapiens)
attttatcgttaaagtttttcgttatagtatcgtcgtagtgatgatttgtttttttgaaaataaagttattttttttttttttggttttcgagtttttcggtcggaaagggtcgttaggggggttatttgtagtattttgcggttaaggattgcgcgtagattcgcggagttgacgcgttttttttcgggttatagagttttaggatggtttataggggagtgagttagttagagtttgggaatatttcgagaaaagaggttttagagaaggtaggagtttgttttcgtgaaatattaataaagggatgttaggcgaggtttttttagcggtgttagtttgaattttagttttaagagatttttattagggttttaggaatttgggggtttgggaagggtcgagggtttagaaatttttttatagtttttagacgttgatagtttttttaataatcgcgatgatagttttgaggtatgttttaggaataaggcgaaaagcgtatttttttaattgtgattttttttattttttttttttttaataaagtaaattttaattttatattaaaggggtatagataggtaattgtttttagagggatttcgtgtttatttcggggattcgatatcgaagaaagatcgaggtatgaggtagagatttttttgaaaaaatttaaagatagaggttgagtagggagacgttgttgtgtgaggtttgggtattttttagagttttttagatgttttggtgtagtcgaagtaggcgtttggggaggcgaatttatcggggtaaagaagcgtttatatttttttttagtttcggtttagggaaagaagaacggacggcggtgttttggaaagttagggttttagagaggcgtataaagtttttttaaagttgggcgcgttgttttgtttcgggattatgtagtggatcgtttttttgggtttttacggaggcgttttaggtgggaattagagtaagtaggagaatggggtttttattttttaggggtttttttcgataggtaggtttttagttttcgacgaagttttgtttcggcgttttttatgttgatttcgaattatgggttgagtgagtggcgatttttgagtttaggtattaaagaaaaattatttttttggtttgggggtattaggtagtgtgtttagaagatttttttcgaattttttaaagaaaacgttattaataatattttttttttcgtttttaaaataagtttttggtttttcgcgttagaataagaagtagaaattttttttttggagttaagaatcgtgtcggttttatttagcgattttaagggtaggtttttttcggagttgtcggttgaggttttttaatttagttttttagcgttattttttcgatgttttatattaaattggaattttaggtgttcggaagaaaggtttttttggattaatcgggtttttatagtagttagatttataggttagttttcggggttttagttttaggggatttttatagttttatttagaggtttggggagattttaggatgatcgatggggtaacggattataattcgtacggcgtacgttttttagttacgtattttttttttcgcggtagggcgattataggtttttcggtttgagcgttcgggcgcgtcgtttatttagtatcgtagagtgtattagttttgaattttgtttttaatattttttagtttttttaagttcgcgtaaggggatggtaggaagcgtttcgggattataggttcgtcggttcgtatattttgtattttggaaggggcgaggatggaagagtatcggtgattttttttagtattgttttttttttggtttagagtaaatgagataaatttttgaagggtttaatataagttatagggttgttattttggaatgaggagaaaatgtagttagcgggatttgtttttttgttggtaattaagagttgggaaaacgaatgggatttttatatttttagattttagattttaaaagggggtaataaacgaatcgttgtttttttatttttaatttatttagtattacgcgtataggggatggggttggggtaatttgttttttttagttttgttagtaatgttgaattgtttaaattcgagttggttgcgggtgttcgtttgggtttttggtgtggttatatgtattttaatagcgttaagataattttttcggaggttatttttttttgtagttgatttttttagattgggtcgtttttttttatataagagtattggttgaagtatagtatatattaattttaatgatagagaatttgttcgggtgtttagtgagatattttattttttagaatgattttattattttaaagtatttttagtttgaagttgttttgtttgggttgttatagagttggaagtttttttttttttaattagaagcggttaattagacgttgtttggaaaaatttttgtttcgtattgtttaagagttataaatttttatgtttgtatttggggagggggtttgattttcgcggttgcgagcgtttagcggggttattttcgcgttcgcgcggg

SEQ ID NO: 382 - DNA, 2325 bp, Artificial Sequence
  chemically treated genomic DNA (Homo sapiens)
agttttagtagtttggttcggtcgcggcggcggtagtagtagtagcggcggcggcggtcgcggcggttttggggtattcgtagtattacgtatttgtttgtatcgttattatttataacgtggcggattcgcggagattttattgttttattatgggtagggcggggttttggggtatttgcgtttcgcgtttttcgcgtttttggagtaaattttttatttttagtggaggaagtgggagttcggggatagggtgaagagagaggacgggtttttagtgtaatcgtagagttagttatagaagttttacgaaagtggaagttagtttgttagtttttttatttagtttggtgcgttttatttttagtagtaggtgttcgagtattgttttattaatattggggttttagggatttcgaacgttacggcggataaattagaggttaattgtttgggatttggggtgggtgtgtttgaatttgtgtggtattttcgcgtcggggcggttaaagcgttttgacgtttttggttaagtttgcgcgttttttcgtttggtttaaagggaggcgattagatagtgtaagtttttatttttttttaattttgtgatttcgtattttgcgtatcgaagatttttatttgttttgtacgttttttttttttttcgttaagtaattacgtgttttgaaatgggaaagggatatagatgttcggttgggttttttcgggtgggtttttgaaatgcgttttggttagtatatggggtgggagtattttgttcgagttttatttttttatttttttttcgtcggttcgtaggaggttttgacgttagttaggtatttaatggtaagaggatgaggacggcgtttattagtacgtaatttttggagttggagagagaatttttttttaatatgtatttgtttcgatttcggaggattgaaatcgttatttatttgaatttgtcggagaagtaggtgaaaatttggttttagaatcgtcgagtgaagtataagaaggaggggaagggtacgtagaggaatagttacgcgggttgtaagtgcgtcgggagttaggtgtattacgcgcgtttcgaggatgaggattttttgtcgtcggttttagttaacgatgataaggagattttttttttatgagggagggtttttttttttatatttttcgtttttggtagattaggtaacgttaaggcgtggggtatttaggggttagaatttttgtttattgtagtggttttatttggagaagaaacgaatttggaagttttggaatggataagtcgggatttgatttttcgcgttttttttttgatttgtttatttaggattttaatttgaagttatagatttttttaaaaaatgtaaataatttataatttaatttatttttgtcgtataatagaggaaaaatagggttggtttaagtttaatattgtatggggtttttgaaagtatatgttagttttttatttttatttttttttagaattcgataagaatataggatttattgattattttttgttgtcgtttttaaataaaaatatttaagttgaaaataatttagaaaattagattttgtaggttttgttttttgaaatttcgtttggggagaatttaaaatttaagtcgttggaagtttttttgtatgtgaataggtttatataaaatttatatttatatttatttaaataaatgaaataaaaattagaattttaaatttgtggtgtttgttttttttatttttttttgtttttttttttaatgtttagagaaaggtatatgtaggaaaaagttgtttgaggaattcgaggaaaatgttgagtaagaatttggtaatgtgggttttttgattgagggagtttgtggtttaatgggttttttatgtaatagaattttcgttaaggagatatttttagttatgatggtatttattaggtagtgtttttttatttttaaaataggtaatttttttatagttgataggataaattattttatttggaatgatattgattattaacgataggtaaatttttatttagtaaggaagggtaaaaattttttatttagtttttgtttttttttttttatttttttattttttttagtacgaaaatttgaattatgtgaaggaatttgtagagttagaatagttttaggaagagtaataatttattaaataggttagaagtaaatagtggaaatttaataacgatgttataagtagaattagcgggttttttttaatgttaagaaaataaaaagttagggataggaagtattttgtttaaagatttat

SEQ ID NO: 383 - DNA, 2325 bp, Artificial Sequence
  chemically treated genomic DNA (Homo sapiens)
ataaatttttgaatagaatattttttgtttttgattttttgtttttttaatattgagggaaattcgttaattttgtttgtagtatcgttattaagtttttattgtttgtttttgatttgtttgatggattgttgttttttttaaaattattttgattttataaatttttttatataatttaagttttcgtattgagagaaatgaggaagtagaaagaagaaaataaaaattagatgggggatttttatttttttttgttaaataaaggtttatttgtcgttaatggttagtgttattttaaatggagtgatttgttttattaattgtgaggaggttgtttattttaaggatggagaggtattgtttggtagatgttattatgattaaaggtgtttttttggcgaaagttttgttatatagaaaatttattgagttataaatttttttagttaagagatttatattattaagtttttatttaatatttttttcgaattttttagatagtttttttttgtatatgtttttttttagatattggaggagggggtaggagaagatagggagagtaaatattatagatttaaaattttggtttttgttttatttatttaaataaatataaatataaattttatataaatttatttatatataaagggatttttagcgatttagattttaaattttttttaggcgaaattttagaaagtaagatttataaggtttaattttttaaattatttttaatttgggtgtttttgtttgaaaacgataatagaaaataattaataaattttgtgtttttatcgagttttgaaagagagtagggatggggaattgatatgtgtttttaaaaattttatatagtgttaaatttaaattaattttgttttttttttgttatacgataagaatgagttgaattataggttatttatattttttaaaaaaatttgtaattttaagttggagttttagataaataggttaagaaggagacgcgaagggttaggtttcggtttgtttattttagaatttttaggttcgttttttttttagatgggattattgtaatgagtaaggattttggtttttgggtgttttacgttttggcgttgtttggtttgttaggagcgggggatgtgagggaggaggtttttttttataagggggaaatttttttgttatcgttggttgaggtcggcgatagggagtttttattttcggagcgcgcgtagtgtatttggttttcgacgtatttgtagttcgcgtgattgtttttttgcgtgtttttttttttttttttgtgttttattcggcggttttgaaattagatttttatttgttttttcgataggtttaggtaagtggcgattttaatttttcggagtcgagataggtatatgttggaagagaattttttttttagttttaggagttgcgtgttagtgaacgtcgtttttatttttttgttattgggtatttggttggcgttagagttttttgcggatcggcgaagagagggtagagaggtaaggttcgggtaaggtgtttttattttatgtgttaattaggacgtattttagggatttattcggggaagtttagtcgaatatttgtattttttttttattttaaggtacgtggttgtttagcggggaagaaaagagacgtgtaaagtaaataaaggttttcgatgcgtaggatgcgaagttataggattaaagagggatgggggtttgtattatttgatcgtttttttttgagttaagcggagaagcgcgtaggtttagttaaaaacgttaagacgttttagtcgtttcgacgcggggatgttatataggtttaaatatatttattttaaattttaagtagttaatttttggtttattcgtcgtgacgttcgaggtttttaaggttttagtattaataaggtaatattcgagtatttattattaggagtaaaacgtattaggttgagtggagaagttggtaaattaatttttattttcgtggaatttttgtggttgattttacggttatattaaaagttcgttttttttttttattttgttttcgggtttttattttttttattggaggtggaaagtttgttttaggagcgcgaaaggcgcggagcgtaggtgttttaagatttcgttttatttatggtgaggtagtggaattttcgcgggttcgttacgttgtaggtggtggcggtgtagataggtgcgtggtgttgcgggtgttttaaggtcgtcgcggtcgtcgtcgtcgttgttgttgttgtcgtcgtcgcggtcgagttaggttgttggggtt

SEQ ID NO: 384 - DNA, 2501 bp, Artificial Sequence
  chemically treated genomic DNA (Homo sapiens)
tttgtaaatggagatatttttattatttttatagtattatatgtttttaaagtttgtatttatattttgggtgataaatgaaggataagatttttttttatttttgtgaggatgattatagtatgattggatgggtttgttatgatttttatttttttttgtgtttttattatcgttttattaattttagtttttttttatagggtagtatagaatttaattagtagaaagagatttagttatgtagattagagatttgtttaagtgacggtatgtaagaattaggaaggaaagttttttgtttaaatattaataggttttttttttaaagtaattattattttttaaatttaatttataaggtgatagtatttttaaattaattaaattagaatttcgggttggataattttaaatatgatttattagtattttttattaattattggttttttaggtttttaagtttatttattaggaattttatttttaatattattttattaattttagttgtaaataagagaatatttaaaggttgaggaatttttagcggtaaagttttgtttacgttaagtaataaaggataagttagtttttgttgtgattattttgttgtattgataagttacgtatttttatttaaggatttaaatttttattttttttaagaattgggttaaaatcgataaattaaatttatttacggtttattgattaaaggttgttgtataataagtttttgttatgtttagtagttggatttatagcgttagaaatttataattgtttgatttttttttttattatattgcgaaaattgttttttaaatgtaattaattttaaaattttaatagtatcgtggttaggcgtggtggtttattattgtaatattaatattaggtataggcgaggggattgaggttaggatatcgaaattagtttgggaaatatacggagattcggtttttggaaaaataattagttttgcgtggtggtgggcgcgaggtttcggttaatcgggaggttatagtgagttatgatgatattgtattatagtttgcgcgacggtttatgttagtaagttttggagtatttgaaataagttgtgttgggtattttatttattggagagcgattagtgattgatgtttatttatagcgattagagacgtatgtttcgatagtagtataaatttagtaggcgcgaataaatggtaaagagaaattgggtaaataagtattacggttttttagttgagaaagtgggggttttaaaaagggttttttgttgatagaaagggacgtttaattatcgaaatcgtagagggtgcggttttggcgtttgagcgcgtagattatatttatggcggtgatcgttttgcgtttggcgtgttttgtataggttacggcgtttcggattacgttttttaggaatatttttagtatttcgcgagttttttcgtagatgaggtcggagatgcgttttacgtcgtcgcggcgagtaaggcgtcggatggtcggtttggtgatgttttggatattgtcgcgtagtattttacggtggcgtttagcgtcgtttttgttaagatttttttcgtttttgtcgcggttagatatgacgagtaagaggagttttatttaacgttttgtgaggattttggtttgaggtagcgtttttatacgatagttggcggatcgaattgagaatttgaaagaagtcggcgggaagtttcgtttcggtgggggaggggaaatttaaagggttaaatcgaaatagggggaaaaaaaaagcgagttttttgttttcgtgttttgaattttgtaacgtgtatagtattttgttattacgttatgaggttttaaaaaattgtttttgaacgtagaagatatatattaatattgtgggaaatataagaaaggataagaaattaagaaattataatgttattttattatataggttagttaattatgtattttgtagagtagttgtatatatttttttaagaaaatgtatatagtgttgtatatggagttttgtaatttttttatattgattataatttaattaatttttattaaagagataaaagtgatgttttggtgtttatgttttttaggaattattaatagttataattagttttttagtaattttttaatcggttgtattttaaaaataatgttttttatatttaatataaatgtattttttttttatatttgggattaatattgaaatttatgattttattatattaaaatttaaattttattatattaatatttaaaattgtattagaggttttatgatttggtattacgggttttcgtattattttttttttaaattttttaatttgttttattaaggtttttggataattttagagattttttgtgaagtttgaataaaattttttcgagattttgataattgtattagttttaggatttaattggaatagaattaaaatttttaaaataagtttttata

SEQ ID NO: 385 - DNA, 2501 bp, Artificial Sequence
  chemically treated genomic DNA (Homo sapiens)
tataagagtttgttttaaggattttaattttattttaattaagttttaaagttaatgtaattattaaaatttcgaagagattttatttaaattttataaaaggtttttaaagttgtttagaaattttggtgaaatagattaggaaatttggaaaggaaataatgcggagattcgtagtattaaattatgagatttttaatataattttaaatattaatgtaataaaatttaaattttggtgtaataaaattataaattttaatattggttttaagtatagagaaaaagtatatttatgttgaatgtggaaaatattatttttaaaatatagtcgattaaaaaattgttggggaattgattataattattgataatttttaagaaatatagatattaaaatattatttttatttttttaatagaaattggttaaattataattaatataaggaggttataaaattttatatataatattgtatatatttttttggaaaaatatgtgtaattgttttgtaaaatatatgattaattagtttgtgtgatgggataatattgtagttttttaattttttgtttttttttgtattttttatagtattgatgtatattttttgcgtttaaaagtaattttttaaagttttataacgtggtaataaaatattatgtacgttataaaatttagaatacggaaataagaagttcgttttttttttttttttatttcggtttggttttttagatttttttttttttatcggggcgggatttttcgtcgattttttttaggtttttagttcggttcgttaattgtcgtataaaggcgttgttttaggttagagtttttataaagcgttgggtgagattttttttgttcgttatgtttggtcgcggtaaaggcgggaagggttttggtaaaggcggcgttaagcgttatcgtaaagtattgcgcgataatatttagggtattattaagtcggttattcggcgttttgttcgtcgcggcggcgtgaagcgtattttcggttttatttacgaggagattcgcggggtgttgaaggtgtttttggagaacgtgattcgggacgtcgtgatttatatagagtacgttaagcgtaagacggttatcgttatggatgtggtttacgcgtttaagcgttagggtcgtattttttacggtttcggtggttgagcgtttttttttattaataaaaggttttttttagggtttttatttttttagttgaggagtcgtgatgtttgtttgtttagtttttttttattatttgttcgcgtttgttgagtttgtgttgttatcggagtatgcgtttttagtcgttgtaagtaggtattagttattaatcgttttttagtaaataaaatatttaatataatttgttttaggtgttttagagtttattgatatgggtcgtcgcgtagattgtagtgtagtgttattatggtttattgtagtttttcgattagtcggaatttcgcgtttattattacgtaaggttaattatttttttaaagatcgggttttcgtgtgttttttaggttagtttcgatattttggttttaattttttcgtttatgtttaatgttggtattatagtagtgagttattacgtttggttacgatattgttgaggttttagggttagttatatttaaggggtaattttcgtagtgtagtggggaggaaagttaagtagttataggtttttggcgttgtgaatttaattgttgaatatagtaagaatttattatgtaataatttttaattagtggatcgtaaataagtttagtttatcggttttggtttaatttttgagaaaggtgagaatttgaatttttgagtagaaatacgtagtttattagtataataaagtgattataataaagattaatttattttttgttatttaacgtgggtagagttttatcgttgagaattttttagtttttgagtgtttttttatttataattgaagttgataagatggtattaaaagtgagatttttagtaagtaaatttaaaggtttgaaggattagtgattaatgggaagtgttaataagttatatttgaggttatttaattcgagattttgatttaattggtttaaggatattattattttgtgggttagatttgaaaaataataattgttttaaggaaggaatttgttggtatttaaataaaaaatttttttttttgatttttatatgtcgttatttagataaatttttggtttatatggttggatttttttttgttagttaaattttgtgttattttgtgaaaaagaattgagattaataaaacggtagtgagaatatagggaaagataaaaattatagtaagtttatttagttatgttgtagttatttttataaggatagggaaggattttgttttttatttattatttaaagtgtgagtataaattttaaaaatatatgatattataggaataatgaagatgtttttatttgtaaa

SEQ ID NO: 386 - DNA, 2168 bp, Artificial Sequence
  chemically treated genomic DNA (Homo sapiens)
tagggtttagatttggttttagaatgagaggttacgttagttgaggtagtattagcgggaatttcggttttgttttcgggaaatgcggttataaagaaggtagacgaaagcggacggtcgttatcggattttagattgttttgttttttcgagtttttgagaaggatcgttttttagattagttattagggaagagttggttagagagatgggttttttagagtaaaggatttagatttggttttagaatagaagggttaggtatacgggataggttggtaaggcgttcgtataggtaggcggtttgtgtaaagcggattttggcgggtgttattttgttttttcgtgggtcgttttcgtttatatcggtgcgtggggaacggggttttttgtattttacgttttttgcgtgtttgcggtttttttatagggggtttttgtgagttagggagtaattgtcgttttcgtgttttaggttagttaggttaggtcggtagatgggattttttaatttgtttcggtaagcggagattttgtttacgatatttcggtttttttggaaggggcgtttttttagttttaggtttttcggtggtttttgtatttaggtaaaagttaggaggattaggatttatagcgtgatagtttgttgggtttttgtacggtgggatagtttgggtttgtttaagcggggttatagggttaaggtgtgtttaagttattcgcgttttaggggagttcgttgtggggttggggttggggtttttaggtcgttatggcggtatgggaattttaagtcggggtagtttaatttcgttagtttgtttttttagagatttttatgcggtaggtgtagatgaaaggtatttcggcgtttttttaggcgttttaggtttcggggcgtttatttgtattttttttcggtttgttgttggatgagtttttttcgatattagagtttttgtagtaggtataattttttttagaaacggaggtttcgggggagttggaggttttggaagagggcgtttcgttggaagtattttttaacgaggaagaatatcgggttttgttggaggagattttagatgcggggtttggttaggatcgggtcgtggtagagcggtggtttttatttcggggggaatatttggttggttatggaggggcgtgtttttttttcgttttttttatcgggttgatcggtttaggatttttgttttatagttttaggttcggtgagaagttttatataatggagaattgttatttttttttgggtattttggggatggtagagtcggtttaggtattagtatgtcgattgtttattgcgtacgcgcgggtttgtacgtagtcgtttgggttgtgggagtagttcgggtagagtttttatgtttttttattatataaattcgtttgattatttttttatttttatattttaatattggaaaatgtatttttttttgggttgggtggagatttacgtttcgcgaaattttgagagcgtgtagcgtttaggtttgataattttttggtggttcgttttttttgtattattgtgttatcgttgtcggttcgttcgtgtttttgtagttttttagttgttattatggagcgtttgtcggtggaatatagatttttagtttattttgttagttttttggttaggtttgcgtttattgtgtattttagttgatgtgtaagggagttagttggtttttttttgtttttgttcgttcgtgaaattttggttgaggtttttttaatattttttaacgttttatagttaaagtttggagaatagttatattttttggatgtttagtttagaaatatgttataatgttttttttttgtagagcgtagggaagatttgtattatttgggtgattagtgtagagatatattataatgttttttgtataaaaagattggaaatgatttatattatttcggtgattagtgtataggtatgttagaaatttttagtaggttgaatttagataagggttatattaatttggtgattattgtagagatatgtgaaaattttcgtgtagatagagtttagataagtgttatattatttagtgattagtgtaggggtaattcgtgaagttttttttaggtagagtgtagataagtgttttttttttggagtg

SEQ ID NO: 387 - DNA, 2168 bp, Artificial Sequence
  chemically treated genomic DNA (Homo sapiens)
tattttagggaggaaatatttgtttatattttgtttaaaggaggttttacgaattatttttgtattgattattaggtgatgtaatatttgtttaggttttgtttatacgggaatttttatatatttttatagtgattattaaattgatgtaatttttgtttaggtttagtttattggggatttttgatatatttatgtattgattatcgaggtgatgtaaattatttttagtttttttgtataggggatattgtgatatatttttgtattgattatttaaatgatgtaaattttttttacgttttgtagggagggggtattgtgatatatttttgaattgaatatttaggagatgtaattattttttaggttttgattatagagcgttggaaggtgttgggagagttttagttagaattttacggacggataagggtagagagaggttagttggtttttttgtatattagttggggtgtataatgagcgtaggtttagttaggagattggtaaagtgagttagaggtttgtgttttatcgataggcgttttatggtggtagttgggaggttgtaggggtacgggcgggtcgataacggtggtatagtggtgtagaggaggcgagttattagagggttgttaggtttggacgttgtacgtttttagggtttcgcgggacgtgggtttttatttagtttagaggaggatgtattttttagtgttggggtgtgggggtgggggggtggttaggcgggtttgtgtggtggaaaggtatgagagttttgttcgggttgtttttatagtttaggcggttacgtgtaaattcgcgcgtgcgtagtaggtagtcgatatgttggtatttgggtcggttttgttatttttaggatgtttaggaaagaatggtagttttttattgtgtggagttttttatcgggtttagaattatagggtaggaattttaggtcggttagttcggtggagggggcggggggaagatacgtttttttatagttagttaggtgtttttttcgaaatagaggttatcgttttgttacgattcgattttggttaaatttcgtatttgaaattttttttagtagagttcggtattttttttcgttgaggggtgtttttagcgaggcgtttttttttaaggtttttagttttttcggggttttcgtttttaggaaaggttgtgtttgttgtaaaaattttggtgtcgaaaggagtttatttagtagtaggtcgaaggggagtgtagatgagcgtttcgaaatttggagcgtttgggagggcgtcgggatgttttttatttgtatttgtcgtatggaggtttttgggagagtaggttggcgaggttgagttgtttcggtttggggtttttatgtcgttatggcgatttggggattttagttttagttttataacggatttttttgggacgcgggtggtttaggtatattttggttttgtgatttcgtttgagtaggtttaggttgttttatcgtgtaagggtttagtaggttgttacgttgtgggttttggtttttttggtttttgtttgggtgtaggggttatcgaggagtttgaagttgggagagcgttttttttagaggagtcggggtgtcgtaggtaaaattttcgtttgtcggggtaggttgggagattttatttgtcggtttggtttggttggtttggagtacggggacggtaattgttttttggtttataaaagttttttgtgggagagtcgtaggtacgtagggaacgtggggtgtaggaagtttcgttttttacgtatcggtgtgggcgaaggcgatttacgagggagtagggtgatattcgttagggttcgttttgtataggtcgtttgtttgtgcgggcgttttgttagtttgtttcgtgtgtttggtttttttattttgaaattagatttgaattttttattttgggaggtttatttttttggttagtttttttttggtggttggtttggaaagcgattttttttaaaggttcggaggagtagggtagtttgggattcggtgacggtcgttcgttttcgtttgttttttttgtggtcgtatttttcgggggtagggtcgagattttcgttggtgttgttttagttggcgtgattttttattttgaaattaaatttggattttg

SEQ ID NO: 388 - DNA, 2490 bp, Artificial Sequence
  chemically treated genomic DNA (Homo sapiens)
gattagtacggttattatatttatagttattagttttagagttatttttttttttagtttagggattgtaatcgtttttttagtattgagaagtatagttattatatttatagttattagcgttatagttattttttttttttttttgggtatcgtttggattcgtttattatagattattatatttacggttattatgtttatagttatatttttttttattttagagattgtttatatttttatagtgtttattattacgattattataattagggttatcggttttgtggttatttttttttttattttaggaatagtttatattattaaagtgtcgattattataattacgggttttatagttatttttttttttagtttagggacggtatttacgtttttagtgtggattagtataattattatatttataattagaggttttacggtgatttttttttttatttcggggattatttatatcgttatagtgttgattattattattataattgtggttattggttttatggtaatatttttttttagtatatagattagtggtatttttttattattgattattacggttattacgattatagttatcggttttattattaatttttttttaattttagggataatttttatttttttagtgttgattattatcgttattatatttgtagttattagtagtatagtgatttttttttttgttttagggattatttatatatttttagtgtcgaatattacggttattatatacgggcggtttttgttttttagtagtttttatacggtgcgtatagtttggatttcggttatttcgggtattttgggtattatttatattatagagttttttacggtgattttttatattttagtagtaattattagtattatttagtattcgattttagttttgtttagtttttattttagtagtaggattatcgagttatttttttttttagggacgattatttcgggttatattaggggtatttttaggattatagttatagttatatttagtaagattcgtatttcgattttgttgtttagtagttttatatcggtttttataattacggtggtgattacgggttgtgagttttagtgtgtttggttagagtggttggattatagttattttatgtcggggttttttggcggggattttgatatttattttaatattcgtgcggtcggaggggtagtttgtgagtagtttttgggtttcgagtgtcgtgtttaggtttagtttggtgtttttttgcgggagttgggttaggtcgtggaatgtagtttggattttggtttggtttgtaggaatcgtgagtaggtggggaagtttaagatgtgttttaattatgaaattcgtgtgttttgttgtaattacggttattgttttagtatttcggttattagttttacggttacgttttttttaatttcggggacgatttggatttttataaagttgattataatagttattacgattgagtttattggatttacggttatttcgttttttattttagggattatttggatttttatagagtcgagtattatagttatcgtgacggtgtttatcggatttacggttatcgttttttttatttaggtaattgttggtattttatatgtgagtattacggttacgatatttatagttattagttttaaagttatttttttttttagtttagggattgtaatcgtttttttagtattgagaagtatagttattatatttatagttattagttttatagttattttttttttttttttgggtattatttggattcgtttattatagattattatatttacggttattatgtttatagttatatttttttttattttagagattgtttatatttttatagtgtttattattacggttattataattagggttatcggttttgtggttatttttttttttattttaggaatagtttatattattaaagtgtcgattattataattacgggttttatagttatttttttttttagtttagggacggtacgtacgtttttagtgtggattagtataattattatatttataattagtggttttacggtgattttttttttcgtttcggggattatttatatttttatagtgttgattattattattataattgtggttattggttttatggtaatatttttttttagtatatagattagtggtatttttttattattgattattacggttattacgattacggttatcggttttattattaatttttttttaattttagggataatatttatttttttagtgttgattattatcgttattatatttgtagttattagtagtatagtgatttttttttttgttttagggattatttatatatttttagtgtcgaatattacggttattatatacgggcgatttttgttttttagtagtttttatacggtgcgtat

SEQ ID NO: 389 - DNA, 2490 bp, Artificial Sequence
  chemically treated genomic DNA (Homo sapiens)
gtgcgtatcgtgtggggattgttgggggatagggatcgttcgtgtgtggtggtcgtggtgttcggtattgggggtgtgtgggtggtttttagggtagaggagggagttattgtgttgttggtggttgtaggtgtggtggcggtggtggttagtattggggggataggtgttgtttttggagttgaggaggggttggtggtggagtcggtggtcgtgatcgtagtggtcgtggtgattagtgatgggggagtattattggtttgtgtgttagaggagggtgttgttatagaattagtggttatagttgtggtggtggtggttagtattgtgggggtgtgggtggttttcgggacggaggagggggttatcgtggagttattggttgtgggtgtggtggttgtgttgatttatattggaggcgtgcgtgtcgtttttgggttggaggagggggtgattgtgaagttcgtggttgtggtagtcggtattttggtagtgtgagttgtttttggggtggaagagggggtggttatagagtcggtggttttggttgtggtggtcgtggtggtaagtattgtggaggtgtgggtagtttttggagtggaggagggtgtggttgtggatatggtggtcgtgggtgtggtggtttgtgataggcgggtttaggtggtgtttagggaggaggaggggatggttgtaaagttggtagttgtgggtgtggtggttgtgttttttagtgttggaagggcggttgtagtttttggattggagaagggagtggttttggagttggtgattgtgggtgtcgtggtcgtggtgtttatatgtggggtgttagtagttgtttgggtggaggaggcggtggtcgtggattcggtgggtatcgttacggtggttgtagtgttcggttttgtgaggatttaggtggtttttggggtggaggacggggtggtcgtggatttagtggatttagtcgtagtggttgttgtggttagttttgtgaggatttaggtcgttttcggagttgaggagggcgtggtcgtagagttggtggtcggggtgttggggtagtggtcgtagttgtagtagaatatacggattttatagttgaagtatattttgaatttttttatttgtttacggtttttgtagattaggttaaagtttaggttgtattttacgatttggtttaattttcgtagggggatattaggttgggtttgggtacggtattcgaggtttaggggttgtttatagattgttttttcggtcgtacggatgttggagtaggtgttaaagttttcgttagagggtttcggtatggggtagttgtagtttagttattttgattaggtatattggggtttatagttcgtggttattatcgtggttatgggggtcgatgtggggttgttgggtagtagggtcgaggtgcgggttttgttgggtgtggttgtggttgtggttttggaggtgtttttggtgtggttcggggtggtcgtttttggagaagggggtgattcggtggttttgttgttagggtgagggttggatagggttggagtcgagtgttgggtggtattggtggttgttgttggggtgtgggaagttatcgtggaaggttttgtgatgtgggtggtgtttaagatgttcgaggtggtcgaagtttaggttgtgcgtatcgtgtggggattgttggggggtagggatcgttcgtgtgtggtggtcgtggtgttcggtattgggggtgtgtgggtggtttttagggtagaggagggagttattgtgttgttggtggttgtaggtgtggtggcggtggtggttagtattggggggatgggagttgtttttggagttgaggaggggttggtggtggagtcggtggttgtgatcgtagtggtcgtggtggttagtgatgggggagtattattggtttgtgtgttagaggagggtgttgttatagaattagtggttatagttgtggtggtggtggttagtattgtggcggtgtgggtggttttcgggatggaggagggggttatcgtggagtttttggttgtgggtgtggtggttgtgttgatttatattggaggcgtgagtgtcgtttttgggttggaggagggggtggttgtgaagttcgtggttgtggtagtcggtattttggtagtgtgagttgtttttggggtggaggagggggtggttatagagtcggtggttttggttgtggtggtcgtggtggtaagtattgtggaggtgtggatagtttttggagtagaggagggtgtggttgtggatatggtggtcgtgggtgtggtggtttgtgataggcgggtttaggcggtgtttagggaggaagaggggatggttgtaacgttggtagttgtgggtgtggtggttgtgttttttagtgttggaagggcggttgtagtttttggattggaggagggagtggttttggagttgatgattgtgggtgtggtggtcgtgttggtt

SEQ ID NO: 390 - DNA, 2500 bp, Artificial Sequence
  chemically treated genomic DNA (Homo sapiens)
ttaaaataagtagggttttttttttggggtattttatttttttttttttttttaaattataaggttttaatagaggagtaaattttatgtggttttttaattgttttaaaagtgattaattattaaatcgaatgtgacgtgtattgttattttttaaggaaaattttgagtagttttgaaagatagaattataaaagggaaaaattatttttttagggttagtttttttataaaataaatttgttttggggtttttttttggaaaaatatatatagggttttaagtgtgtgtaggttgattggttatataattatttgaatttagtttcgaaaatagtttttttttgtgtttttaatgtaaaggaataattaaaatttaaagcgtattttttttaattagtcgaaagttttagtaatgtatggtattgtgggtatttaggagttaaaatgtttttatttataaaaaatgatttaaataatggttcgtgtttaagtttttatatttgttttgtagagaagttttggttggtagaggtaggatttgtaattttttgggtcgtttgattttacgaggggcgaggtatgtattgtagcgatacggattatttgtgaagtttttgggcgggagtcgtttaaagattaattttttcgggttttcgttattaaaagcgttttcgtgaatagcgtgattggaaatttgtgcgggtcggagatcgcggcgcggttgtttttttaataggcgatttgtttttttgttcgaggtttatttttatgtaaagagtttgatattagagtattttttgttgttaaacgttttttttagtttcgagggagagagttatgtggagttggaagagtttattttgaagagaggggtttcggggagttttttttaagatttagaggtttcgcggttatttttgtcgggttttgttaagatttgttagaaggaacgagtcgcgtgttttagttagttggttttcgttataggaagaaacgtttttgtagtgggtttaattgtttttgggtcgagcgaatttttcgtcgtataatttagtggtgcggattttgttttttgttattttgttgttgcgtcgagcggggtgggaaagtttttggagttgttagtcgcgtagttcgtggttatttagattcgaggtgcgggcgtttgcgaagggttttcgcggggtggtcggggtcgtcggggtatgtagcgcgggggcgcggttcggtgacgtcgcgggcggggattcggtattcgggtaggttgcgcgcgggtgcggggcgagggcgtcgcggggattgggacgtacggttcgcgcgcgggatacggttatggaggacgcgggagtagttggttcggggtcggagtttgagttcgagttcgagtcggagttcgagttcgcgtcggagtcggaatcggagtttaagtcgggtgttggtatattcgaggcgttttttcgattttggatcgacgtgatgggtattttggtaagttatttggggagggggcggcgtaggaagtatagttcgtagtagtttttttgaaatcgggggtttttttttcgtttatttattgggtaatttatttcgtagaggcgtttttttttggttttagtttttagggggttaaatatatatagtataggattttaaattttaattaaaaaataattagttataggtttcgttaaaaggtgttttttaaataatcgggtatgatatttaatagtttaatttgggatatttgttgatatgttggtgtggaaaaggcgagaaagaggtttttaaaaagtagatgtaaataaatatttggttggtgttggattagggaaaaggttgatgttattgatgtttatttttttattatttgttgtgtgattataagagggaaaataaatatttttttatttagaattgttaaaatgtttgtttatttttttttgtagttttttaatttgtggagttataggatatttgttttatatgtttggggttaaaataataggatttattttgttaaatttgtgttgttatgtattttgaaatgtttagtgattaaaagcgtttttggatttggtatagtttttgggaagtagtttttttgtatggagggtgaagttttaatttgtttagggttgaatattttggggaagtaatagatttgttttggtggagttgtagttaggtaggtagattggaattagatgggcgaggtttattatagttagatattttaatttatatataaaagataattttagtttaaagatttggaatggttagatgtgtagattattagaaaagtttttagatttgttttgagattttatattttttgagtgggaggagatggagtgaaagtttttttttgggaatgataaatcgtgtatagtttttagtatagtgattaaatttttgggttttaaagtaagttatattaggttaaatgttagttttttaattgattgtttatatgattttggttaagttatttaat

SEQ ID NO: 391 - DNA, 2500 bp, Artificial Sequence
  chemically treated genomic DNA (Homo sapiens)
gttgaatgatttggttaagattatgtaaatagttaattggagagttggtatttgatttagtataatttattttgaagtttaagagtttaattattgtgttaaaaattgtatacggtttattatttttaaagaagaatttttattttatttttttttatttaaaaaatataagattttaaagtaaatttagagatttttttgataatttgtatatttggttattttaagtttttaaattaaagttgttttttatgtatggattaagatgtttgattgtaataaatttcgtttatttgattttagtttatttgtttaattatagttttattaaagtaaatttattatttttttaaggtatttaattttgagtaggttaaaattttattttttatatagaagaattgttttttagagattatgttaaatttaggggcgtttttagttattggatattttaaaatatatgatagtatagatttagtaaaataagttttattgttttagttttaaatatataaaataaatattttgtaattttataaattgaaaaattgtaaaaaaaagtaggtaaatattttggtagttttgagtaaggaaatgtttgtttttttttttgtggttatataataaatggtgaagagataaatattagtaatattagttttttttttaatttagtattaattaaatatttatttatatttattttttgaaggtttttttttcgttttttttatattaatatgttagtaggtgttttagattaaattgttgaatattatattcgattgtttaaaaaatattttttgacgggatttgtggttggttattttttaattagggtttgaaattttatattgtgtgtatttagttttttaagaattagagttagagaaggacgtttttgcggagtgggttgtttagtgggtgggcgagaagggagttttcggttttagaggggttgttgcgaattgtattttttgcgtcgttttttttttaggtaatttattaggatatttattacgtcggtttagagtcgggagaacgtttcggatgtgttagtattcggtttgggtttcggtttcggtttcggcgcgggttcgggtttcggttcgggttcgggtttaggtttcggtttcgggttagttgttttcgcgttttttatggtcgtgtttcgcgcgcgggtcgtgcgttttagttttcgcggcgttttcgtttcgtattcgcgcgtagtttgttcggatgtcgggttttcgttcgcggcgttatcgagtcgcgttttcgcgttgtatgtttcggcggtttcggttatttcgcgggggtttttcgtaggcgttcgtatttcgggtttaggtggttacgggttgcgcgattgataattttagaaatttttttatttcgttcggcgtagtaatagggtagtaggaggtaaagttcgtattattgagttgtacggcggggaattcgttcggtttagaagtaattaaatttattgtaaaggcgtttttttttgtgacgggaattaattaattaaggtacgcgattcgttttttttagtaagttttggtaggattcggtaggggtggtcgcggagtttttagattttggagggagtttttcgggatttttttttttaaaatgagtttttttagttttatatgattttttttttcgaggttaaagaaagcgtttagtaataaaaggtgttttgatgttaggttttttgtatggaaatgagtttcggataggagaataaatcgtttgttgaaagagtagtcgcgtcgcggttttcggttcgtataagtttttaattacgttatttacggaaacgtttttggtaacggaaattcgagaaagttaatttttaagcgattttcgtttaaaggttttataagtagttcgtgtcgttataatgtatatttcgtttttcgtgaagttaagcgatttaaggaattataaattttgtttttgttagttaagatttttttgtaaaataagtgtgaaagtttgggtacgagttattgtttggattattttttatgagtgggggtattttggtttttgaatgtttataatgttatgtattgttagggttttcggttaattaagggaaatgcgttttgggttttaattatttttttatattagggatatagggaagggttattttcgaaattaaatttaaatgattgtgtagttagttagtttatatatatttggggttttgtgtgtgtttttttaaggggaagttttaggatagatttattttataagggaattagttttggagaggtgattttttttttttgtgattttattttttaagattatttagagttttttttggaaggtgataatgtacgttatattcgatttggtgattgattatttttgaaatagttaagaaattatatggagtttgtttttttgttagggttttgtggtttaaaaggaaaaaaaaaagtgagatgttttagggagagagttttgtttgttttga

SEQ ID NO: 392 - DNA, 2243 bp, Artificial Sequence
  chemically treated genomic DNA (Homo sapiens)
aaggtgttttgttaagtgattttggggagagtagttttttgttttagttttattttttttcgttttagtttttaagggtattgtttattttagttttattttagggttttaaaattggtttttatgtttttgtttttttttttttttggttttttttttttttttttttttttttattaaatttattttttgggtattttatttttggttatttagattttttggtatttagtagtttatagtttttttttagatttgttaatgagttttgtttattgtaaagagggttattgatttttattaataatggaatttttagtgtttttttagtaattttagggatgttgatgtggggtttttgggaaataggatttgagtatgtgagttttagttttatagagagagggttagtgagtgttgggaggggattgtgtattgtttttaagttgtatattttgttgattatttaataattttttttatatttgtataatttttttttatttttatatttttttgtttattatttttagatttatatatgatttaagtaataaagttttatttgtaaatgggaaattttttaattagagggtgagggtgatttgtttaaggttatatagtaaaatgtattttttaatattgagaagttagatatcgatttatataggtattaaggaagttggggaagtttttttttattatcgttagtaggtttggttttttaattttgttattacgtttggtgtatttgtgaaatatgtcgattatgtttattatggattttttagtttgagtgttgtttatttttgtttttaaaaagtttttaggaaataaagataattatttttttttttttatttaagttagggtttttatttgggagtgttggaaggagggttgaggatagagtaaaaatacggataaggtgtagtagaacgaatttaatttttttttaatgtgatgggataagttgtttaaaaatgagagggtaggattaagtttgagatttggtttattttggttagggttaagaggagatgtaggtggatggcggaagtttagttgtggatagtgttttagagagggagaagtagggagagtcgggcgttagtaatatatggaagaattaagttgggatattttagttttagttagtatatggtagattttatttttaaaagagtattaaatttattttttttagttttatagtcggggtgatagttatgggggtaggataatggttttggtgatttggtgtttgatttttttcggttgttttaggaattagatatcgtgggttttattttgatttaagtgtaagttttgtatgatacggtgtgtgtaggttttaggtgtatatgtgagcgtggacgtgagtgttagtaggaaatatagttttgtttcgagtatagggggttttttttgtatttttttgggaacgagaaataggaatggtttttgttataaggaatagaaataattttttggtttttaagttgttggacggggtgggagtgaggtgggagttattttatgtttgtttttgggaattatttgtattttttgaattattaagttttgattgtttaaataaaaatgtttgattttttaaagtagattttttagttagtagttagtttgggttggtttgtattttaagtttgaaaaataggatagtgtagtttttattttttatattttttaaagaattaggaaaggattttggttaatgtatatgggtgtttgataataaatttttaatattttttaatgtaggagaaagttttatgtcggtaattgattaagaggagttatttagagtttttttgaatttgaggttaaggttagagggtaagttttgtgtttagagggtgattgataatttgtaggttgtggtagggagtgacggagcgttggttttttaatattttatttaggtaggggtaagttatttggttagggttatgttgtgtcggggttttaggtttgggggtttggagagtttttaaagtatttataggggatttttagttttttattttttgtggagttggagttggggaggggatttagtaatcgggattttaataggaggatgaatttagggaggaagaggatagggagggttttgtgtttaggttttattggggatatttttataggagttgttttaggagattttaaaggagtaatggataggtttggtttagttatttggttatatagacgtgggtttt

SEQ ID NO: 393 - DNA, 2243 bp, Artificial Sequence
  chemically treated genomic DNA (Homo sapiens)
aaagtttacgtttgtataattaggtggttgaattagatttgtttattgtttttttgggattttttgaggtaatttttgtggaaatgtttttagtgggatttgagtataggattttttttgttttttttttttttggatttatttttttgttggggtttcggttgttaaattttttttttagttttagttttatagagggtggagggttaggggttttttgtgaatgttttggaggttttttaaatttttaggtttgggatttcgatatagtatagttttggttagatggtttgtttttatttgggtaaggtattgagaaattaacgtttcgttattttttattataatttgtaaattgttagttattttttgggtatagggtttgttttttggttttggttttagatttaaaaaagttttgggtggttttttttagttagttgtcggtatggagtttttttttgtattgagaggtgttgggggtttattgttagatatttatatgtattagttaaggtttttttttggttttttggaaagtgtgggaagtgagaattgtattgttttattttttaggtttggggtgtaggttagtttagattgattattggttgaaagatttgttttgggaagttagatatttttatttaaatagttaaggtttggtgatttagagggtgtagataatttttaagagtagatatgaagtgatttttattttatttttatttcgtttagtagtttaagaattagagagttatttttgttttttgtaatagaggttatttttgtttttcgtttttaagggaatataagaagggttttttgtgttcgggataggattgtgttttttgttaatatttacgtttacgtttatatgtgtatttggagtttgtatatatcgtgttatgtagggtttgtatttgagttaaggtggggtttacggtgtttggtttttgaagtagtcgaggagggttagatattagattattaaggttattgttttgtttttatgattgttatttcgattgtgaagttggaggagatggatttggtgtttttttaagagtggggtttgttatgtgttggttgaggttggggtgttttagtttagtttttttatgtgttgttggcgttcgattttttttgtttttttttttttgaagtattgtttatagttggattttcgttatttatttgtatttttttttggttttggttaggatgggttaggttttagatttggttttatttttttatttttgagtaatttattttattatattaaaaaaaaattgagttcgttttgttatattttattcgtgtttttattttgtttttagttttttttttagtatttttaaatagagattttaatttaaatgaagggaaaaaaatgattgtttttattttttgaaggttttttgaaagtaaagatgagtaatatttaagttgagaggtttataataggtatgatcgatatgttttataaatatattagacgtgatgataagattgagaagttaagtttgttgacgatgatgaaggagaatttttttaatttttttagtgtttgtgtgagtcggtgtttagttttttaatgttggaggatatattttgttatgtggttttggatagattatttttattttttgattaaaaaattttttatttgtaaatagggttttattatttggattatatgtgaatttaaggatggtaggtaaaaaagtatgaaaatgggaaagagttatatagatataaaggaggttattagatggttagtaaagtgtgtagtttgagggtagtgtatagtttttttttagtatttattgattttttttttgtgagattgaaatttatatgtttaggttttgttttttaaaggttttatattaatatttttgagattattgggaaagtattagaagttttattgttagtagaaattaatagttttttttgtaataaataagatttattagtaaatttgaaaaaaaattgtgggttattaggtattaaagggtttagatgattaagagtaggatatttagaagatgagtttggtggaaaaggagaagaaaggagaggaggttagagaaagaagagaataaaagtatgagggttaattttgaggttttggggtagaattaaggtaggtagtgtttttagaggttgggacgggaaagagtgaggttggggtaggggattgttttttttaaggttatttaatagagtatttt

SEQ ID NO: 394 - DNA, 2246 bp, Artificial Sequence
  chemically treated genomic DNA (Homo sapiens)
cgcgcgcgcgtatatttatatatatatatatatagtcgttagttgcgtatattcgtagtttaagtcggatatacgtgtaaatcgcgtttttgtgcgtttatttttttcgagtttcggttgcgtaatagcgggagggggttggggggggttattgggtagtttattttaaaataaaagaaaaatcgtttttatattttttttattttgggagtaggattttttgagaaggggggcggggtgttgtgtgagtgaattaaattgaattaatgtaagtttttatttatttaaaagttttttcggatttggattttgggggtgggggcgtggattgtggaaaagggttggggtcgatatgggagttggggggatagtaagaatcgtttcgtttttttggaaaagtcgtttggtagtttttatttttgttttatggtcgcgggcggcgaggggaggggagtagatgttggagtttaatttttaaaaagtgtttttatataaattttggtattatagattttgggagggtgaggatgataaaataaacgatattaagataatagaattaagagtacgtgagggggtgagaagtgtttgagattttgtttgagttttatttggaaaaggatttttatttaaatttttgttttttttttttattttatttcgattaatttttggggttaaatacgattttattttttaaattgggtttatggtaagcgagagggtaaagggatcggggcgttttacgtgggagagggatttggatttgttagtttaggagtaggtgtggttaaattttcgtagatattcgggtgggtgattttaggaggcgtttttgataattatagtaatttggaagttatatttcgtttttcgcgtttttcggtttagggtaggatttggaaatgtttgttagattgggaaggacgtagttgttttgttagtcgtttgatttttaatcggcgaggataagaggagttgtggggttttttcgtggttcggggataaggttagattacggttttcgtggatattttttattttttaggttgtggttaattttgttaatttgatgatttggtttttagggttgggcgcgttacgcggttggttttttttttttttttagggtttttttggaggcggttagggcgggtcggggtttggtttcggttaggtttcgcgggcgagtttagttgtatttattttatttcgtttttaggtttggtttcggcggttttattcgggcgtatggcgaggtcgtgacgttttagcgtcgtttttttcggggtttttttttcggggggtatacgggggtttttgttttcgtttcgaaggttttgggtggggcgatggtattaataatttaatagcgtttagagttcgtgagcgagaatagaaagagattttttttagttttatattttaaaaaataataataataaaatgtgttttggtttgtagttttgtaaattgtgggttttacggtgggcggacgcgaggtcgagcggatggagatcgggggcggggcgcggatttgtattttttcgttttggtcgggtaggttgtattcggttgtttatttttaatattttatttttacgtggtttaaagtttagtagggttttttttttttgttattttttttatcgggaaaatttttttaggaaagtggtttaaaaaaaatatgtttatacgtatttttaataaatttttttaagatatttataaattggttatttttattcgttcggattttaaatttgaaagattaattcgcgttttttttttgagaattagcgatgtgaagtttagagagggtgagtattttgttttaggatatatagcgcgttagggataggtttggatttaaaatatcgcggcgtgtttgtagtttagcgtcgtcggcggttcgggattcgaaatttcgatttacgatttttatttttttggggttgattataaggaaggtagatttcgttagtggtaaggcgggacggggaggattttttaggaaaagggagttttttcgcgagcggcgtaagggttttcggagttttagttgtagtcgttatttcgcgtgcggtaaggggtcgtgtttggggagggggtattttttttttatttttagtaggaagtagttggcgtgggtcggcgcgtgttttacggattcgaggagtatttttttattggtttcgcgttgtttcgacggcgggaagagggacgcgcgggcgggcggacgtagg

SEQ ID NO: 395 - DNA, 2246 bp, Artificial Sequence
  chemically treated genomic DNA (Homo sapiens)
tttgcgttcgttcgttcgcgcgttttttttttcgtcgtcggggtagcgcggggttaatgaggaagtgtttttcgggttcgtggggtacgcgtcggtttacgttagttattttttgttgggagtggggagggggtgttttttttttaggtacggttttttatcgtacgcggggtggcggttgtagttgggatttcgagagtttttgcgtcgttcgcggaggggttttttttttttgaggggtttttttcgtttcgttttgttattggcggggtttgttttttttgtaattaattttaggaaggtgagggtcgtgggtcgggatttcgagtttcggatcgtcggcggcgttgggttgtaggtacgtcgcggtgttttgggtttagatttgtttttgacgcgttgtgtgttttagggtaaagtgtttattttttttgggttttatatcgttagtttttagaaagagagcgcgagttgattttttaaatttagagttcgggcgagtagggatggttagtttatgaatgttttaaagaagtttattaaaggtgcgtgtgggtatattttttttaagttatttttttggaaagattttttcggtgagagggatggtagaagagggaggttttattagattttggattacgtggaggtggggtgttgggggtgggtagtcgggtgtagtttgttcggttagggcgaggaggtgtaagttcgcgtttcgttttcggtttttattcgttcggtttcgcgttcgtttatcgtggagtttatagtttatagaattgtaagttagggtatattttattgttattattttttagggtatgggattggaagggatttttttttgttttcgtttacggattttgggcgttgttaaattgttggtgttatcgttttatttaagattttcgggacgaaaataaaaattttcgtgtgtttttcgaggaaaaggtttcgagggaggcggcgttgaggcgttacggtttcgttatgcgttcgggtgaagtcgtcggagttaggtttgggggcggagtggggtgggtgtagttggattcgttcgcgaagtttagtcggagttaggtttcgattcgttttggtcgtttttagagaaattttgagaagggagaggaggttagtcgcgtggcgcgtttagttttggaggttaggttattaaattgataaagttggttatagtttggggaatggggggtgtttacgggggtcgtggtttggttttgttttcgggttacggagaggttttataattttttttgttttcgtcggttggagattaaacggttgataaggtagttgcgttttttttagtttgataggtatttttaagttttattttgggtcgaggagcgcggggggcggggtgtgatttttaggttgttgtgattgttaggggcgttttttggagttatttattcgagtatttgcggagatttggttatatttatttttgggttggtaagtttaagttttttttttacgtggagcgtttcggtttttttattttttcgtttgttatagatttagtttaggaggtggggtcgtgtttgattttaggagttaatcggggtaaggtgaggggaggggataaagatttgagtgaaaatttttttttaagtgggatttaaataaggttttaaatattttttatttttttacgtgtttttgattttgttgttttagtgtcgtttattttgttatttttatttttttagagtttgtaatattaggatttatatggagatattttttggaagttgaattttaatatttattttttttttttcgtcgttcgcgattataaaataaaagtaaaaattattaagcgatttttttagggaaacgaagcgatttttattgtttttttaatttttatgtcgattttaatttttttttatagtttacgtttttatttttaaagtttaagttcgaaagagtttttgggtgggtggagatttgtattgatttaatttagtttatttatatagtatttcgtttttttttttagggggttttgtttttaggatggaggagatataaggacgattttttttttattttaaaataagttgtttagtggttttttttaattttttttcgttgttgcgtagtcggggttcgggggagatgagcgtataaaaacgcggtttgtacgtgtgttcggtttgggttgcgggtgtgcgtaattggcgattgtgtgtgtgtgtgtgtgagtgtgcgcgcgcgcg

SEQ ID NO: 396 - DNA, 2357 bp, Artificial Sequence
  chemically treated genomic DNA (Homo sapiens)
tttgtagttttcgggagcgggaacgtcggggataagagttgaagggacgaaggatattggagatggttagggggaaattcggcgtgatttttttttagggttgtgtgagggtttttaaatttttatttttgtttagggtcggtagcgaggttttattatagggataagttcggtagattttttttttttttaggtttttagtaaaatgttgggttttttgttagtggaaaacggaagaaaagtttggagcgtttttggagtcgttcgtttgggaagaaatgaattttgattttagtttcggttcgtgtatcggaggttttagggttgcgagggtcgtttgggtagagtttaggttaagaaggagttcggttgaggataggagttcggggtttgtgtgggagacgggatttttttttaggatgttcgggttggtttgttgggaggcggcggggttttttttttagggttttgtattcgggttttatatcgggtgaaatttttgggttggggtttagtacgcgagatcgttgttttacgcgggttatatagattattttttcgcgggtcgtagtttttggttatcggtttttttttcggtgttggggtcgtttggagtcgttgggagtcgagtggttttcggggaggcggcgtcgcggtgtttagggtgcggggttcgtttttgtgcgtttgagggcgggggtcgtataggagtttttttcggggttggttttcgaggcgttgtattttttattagttttttgtgatcgaaatcgaaatttttatttgcgtaatttttttagatgggtttgaggttggggtgtggtcgggattcgggcggggaggggtaggggtggagtgaaggcggggtttgggggggtgcgcgtggacggggagagtggaatcgcgggtgtggatttttaagtatagacgttagagaacgtttgtcgttttggttcgttggtttaggggtatgattttcgttttgggtgcgagaggtttcgggtttaaatttcggacgagttcgtttttttttttttttttgaatattattattttttcgcggtgaagattgaggagttttacggagtttcggtcgtagggaatttggttttttcgtggtagttgtaggcgtcggggtcgattcgatttttcgttttcgttcggtttgcggtttttcgttttgttcggttataggaaggattcgtttgcgttttttgattggagttttttatttgggagttttgagtgcgtttaaggtttggcgttgaggtagtggattttagattcgggattcgaaaggagggtaaatatttttatcgtcgcgtttgtttttgcggacgtggttttagatttcgggtggttatggaatttggtttgggcgtgtagtttttttttgagtgggtcggttttaagtttaaattttcgacgagtttagggtttcgaatttttttttttttttttttcgttttttttttttttttttttttttttttttttttttttttttttttttttttttttttttttttttttttttttttttttttttttttttttttttttttttttttttttttttttttttttttttttttttttttttttttttttttttttattttttttttttttttttttttgttttttgttttttttgatagtgtttttttttgttgtttaggttggagtgttggagtgtagtggtgcgatttcggtttattgtaattttaattttttaaatttaagggatttttttatttttattttttaagtagttgggattataggtgtttattattacgttaggttaagtgtgtgtgtgtgtgtgtgtgtgtgtgtgtgtgtgtgtgtgtgtttgtgtgtgtaaaatcgaggtttcgttgtgttttggaggttggtttttaatttgtatttaagtaatttttttatttcggtttttttttataaagtgttgtaattataggttagaattattatgtttagttggttttttttttttttaggttttgaggtcgtagcggcgcgttttttcggtatatggcggggaagaggtgcggtttcgggagtttgcgacgtttttggggagtttaagttcggtttttagttttttgttcgaggacggaggaggatttggggggttttttttagttggtggttttagttttttaggggcggcggagatagtaggaagttttaaaattcgagttgggttttttgtttggagtcgtagggtgtggtaatgttgaagttcgtcgtgtttttgttttttatgggaattagaattcggtttaggataagtatcgggaaagggggatagtttgtgatcgaggaaattaggattgatttagaatagcgta

SEQ ID NO: 397 - DNA, 2357 bp, Artificial Sequence
  chemically treated genomic DNA (Homo sapiens)
tgcgttgttttggattagttttagttttttcggttataaattgtttttttttttcgatgtttgttttggatcggattttaatttttatagggagtaggggtacggcgaattttaatattgttatattttgcgattttaagtaggaaatttagttcgggttttggggttttttgttgttttcgtcgtttttggagaattgagattattagttaggggaagttttttaggttttttttcgttttcgggtaaagggttaggagtcgggtttggattttttagaggcgtcgtaggttttcggaatcgtatttttttttcgttatgtatcggagggacgcgtcgttgcgattttaggatttggaaggaaaaggaattagttgagtatggtggttttggtttgtaattgtagtattttgtgaggggaggtcgaggtaggaagattgtttgagtgtaagttggagattagtttttagaatatagcgagatttcggttttatatatataaatatatatatatatatatatatatatatatatatatatatatatttagtttggcgtggtggtgagtatttgtagttttagttatttgggaggtggaggtgggaggattttttgagtttgggaggttgaggttgtagtgagtcgagatcgtattattgtattttagtattttagtttgggtaatagaaggagatattgttaaaaaaaataaaaaataaaaaaagaagaaaaaggaaaataaaagagaaaaagaaagaaagaaagaaagagagagagagagagagaaagaaagaaagaaagaaagaaagaaagaaagaaagaaagaaagaaagagagaaaaagaaagaaagagagaaaaagaaagaaagaaagaaaagaaaagaaagagaaacgaaggaaaaaaggaaggaagttcgaaattttgggttcgtcggaaatttaaatttagaatcgatttatttaaaggaaaattatacgtttagattaagttttatggttattcgggatttagggttacgttcgtagaggtagacgcggcggtggaggtgtttgtttttttttcgggtttcggatttggggtttattgttttagcgttaggttttaggcgtatttagaatttttaggtggaaggttttagttaggaggcgtaggcgagttttttttgtagtcgggtaaggcgaggggtcgtaagtcggacggaagcgggaagtcggatcggtttcggcgtttgtagttgttacggagagattaagttttttgcggtcgagatttcgtgaagttttttaatttttatcgcgagaaaatgatggtgtttagaaaaaaaaaaaaaagcgggttcgttcgggatttgaattcgggatttttcgtatttaaagcgagaattatatttttagattaacgagttaggacgataaacgttttttgacgtttgtatttggaggtttatattcgcggttttatttttttcgtttacgcgtatttttttagatttcgtttttattttatttttattttttttcgttcgggtttcggttatattttaattttaagtttatttgggagggttgcgtaggtggaggtttcggtttcgattataggaagttggtaggaggtgtagcgtttcggggattagtttcgggaagagtttttgtacgattttcgtttttaggcgtatagaggcggatttcgtattttgggtatcgcggcgtcgttttttcgagggttattcggtttttagcggttttaggcggttttagtatcgagaggagggtcggtgattaggggttgcggttcgcggggaggtggtttgtgtggttcgcgtgaggtagcggtttcgcgtgttgagttttagtttagaaattttattcgatgtgaaattcgagtgtaggattttgaggaggagatttcgtcgttttttagtaggttagttcgggtattttaggaagggatttcgttttttatatagatttcgggtttttgtttttagtcgagtttttttttggtttgagttttgtttaggcgattttcgtagttttgggattttcgatatacgggtcggagttggggttagagtttatttttttttaaacgggcggttttagaaacgttttaaatttttttttcgttttttattggtaagggatttagtattttattgggagtttaaggaggagaaaggtttatcgggtttgtttttgtggtgaggtttcgttgtcggttttaaatagggatgagggtttgaaaatttttatatagttttaagagagagttacgtcgagtttttttttggttatttttagtgtttttcgtttttttagtttttgttttcgacgttttcgttttcgggagttgtagg

SEQ ID NO: 398 - DNA, 2290 bp, Artificial Sequence
  chemically treated genomic DNA (Homo sapiens)
taataaggtttttaaagtttttatatttaatgtgtggtttcggaattagaagtattgtaattatttggaagtttgtttgttataaatatagatatttagattttgttttagatatattgaaatagaatttgtattttaataaaagatttagaggattgtttttatattgtgtgtgtgtgtgtgtgtgtgtatttaaaaagatataggtgttataattttttattgtttggttaattttaaaatttaatattgtataatggatattttttatgttaatatagatttacgttattatttattataaataaatagtaagttattgtatttatcgttattgattggtatttatattaatttaatattttgttattgtaagaaatattttgatttagaaacgttgacgtaaagatttttgagtaggatatttaggagatattgattttgttatatttttttttttgttatattttgttgttttaatagattacgtgggtatattatttttattgattttttttttttttgtaaatgtaaattttaattgaattataaggttagtttatagtgtatttgtgggtagatttttttaaaatgtatggtattttaaattttgttttacgagaggtttaggaaaatgtttattaagtttttgtgattttaatatcgtgttaggttatggtaaagtgaggtgtttttgacgtttgggttgttatagcgtgttttttagttattttggtaatatttgtgatttgagggttattttattcgcgttagtaattcgcgcgggttgggaggcgttaatgagagtagggtttgaaattagcgtttggcgtttgatggttgtttagcgacggtcgtcgacgttaatttttggtcggacggatttatatttgttttttggttatcgagagggtagttatgaatatttaaaagggtttttttattataaacgtttatagaggttttttcgttatgagtatttaaaggggttttttcgtttttcgggatatggatagttcgggtagagatatgtagttgcgggtgatttcggttgaggtgaagtttttggatacgatggtcgggagggtgtatcgtttttcgattattgtgtataatatttgtcgttggaattagaaaattcgatttaaggagttcgttaagttataggtgatatattaaggggtgttgggagcgggattttgtgagagcgtttttttatattgcgtttttttttgttttagggagtagttatttggtttttgtcgggatggagggaggattgggtttttcgggaaatagtgataggtttttgtgtgtgtgttttttttgtttttttttgttttttgttttgtttaggattaggagatggggagggtagggtggagaaaagttgatttagagtttttttatttttttaatttgggtttagaaatttgttaataattttaaaatttgtgtaatttggttttatgattttgttgttgttttaagaattatgagaataaaattttttattaattgttttttgaattataaagtgtttgataattttaggaattgtaggattagtggaaaggtttattattttatattttaataaatatttgttaagtatttattatataacgggtaatagatatgaggaatacggaatggatatagttttgtttttatagaatttagaaattaatgagggggttttagtatagatttaattattaagaaagttaatgttttgagagggtgtttttattttttaatttaaagtgggtagaattttttttgtattttattgtgttattttatattatgtgtgtgaatggatggttattagtttagtatgattatatttttttaggtaaatttttgatataggaaatgcgataagaatttttgaaatgtaagtaataaataattgaaaattttaagagatatttttaataaaaagtagtgttgaatatagttggattatatgtgtagaaaaaaaagatgttcgtaattttagattaaatttatatatatttttttgtatatatgtagaaaaatttatgttaatgattagaagagtaatgagaaaaaggatttttatgttttaatttttgttttgttaaaaaaatcgatgtattatttatttattaaagtgtatagattttaaaagtaaagtttgatgaatttataaaaaaataaatatgtgtgtgtgtagatagatagttagatagataatttttattagttattatttggattaaataatagaatatgtttattattttagaagatttttagtgtt

SEQ ID NO: 399 - DNA, 2290 bp, Artificial Sequence
  chemically treated genomic DNA (Homo sapiens)
agtattggggattttttggggtagtgaatatattttattatttgatttaggtggtagttaatggagattatttatttagttatttatttatatatatatatatttatttttttgtaaatttattaaattttatttttgagatttgtgtattttagtaagtaaataatatatcgatttttttaatagagtaaaaattagaatatggaagtttttttttttattgtttttttaattattaatataggtttttttatatatatataaagaaatatatgtaaatttaatttaaaattacggatattttttttttttgtatatatagtttagttgtatttaatattattttttattaggaatattttttgaagtttttagttatttattgtttatattttaaaaatttttatcgtattttttatattaaaaatttgtttgagaaaatgtgattatattgaattaataattatttatttatatatatgatgtaaaataatatagtgagatatagaggaaattttgtttattttaaattagaagatagaaatatttttttagaatattaatttttttgatggttagatttgtattaaaatttttttattagtttttaagttttatgagggtagggttgtgtttatttcgtattttttatgtttattattcgttatatagtaggtgtttaataaatgtttgttaaaatatgaaataatgaatttttttattaattttatagtttttggagttattaggtattttatgatttaaagggtagttaatagagaattttgtttttataatttttaaggtaatagtaaaattataaaattaagttgtatagattttgggattgttaataagtttttaaatttaggttgaagaaatggggaggttttaggttagtttttttttattttgttttttttattttttaattttaaataaaatagaaaataaagagaaataaaaagagtatatatatagaaatttgttattgtttttcgggaagtttaattttttttttatttcggtaggagttagatgattattttttggggtaaagagagacgtagtgtgaggaggcgtttttataaggtttcgtttttagtattttttagtgtgttatttgtggtttgacgggttttttaaatcggattttttggttttagcggtaaatattatgtatagtaatcgggaggcggtatattttttcggttatcgtgtttaggaattttattttagtcgggattattcgtagttgtatgtttttattcgagttatttatatttcgggggacgagggaatttttttggatgtttatggcgagggaatttttgtggacgtttatggtgagggaatttttttgggtgtttatggttgttttttcggtagttagaaaatagatgtggattcgttcggttaaggattagcgtcgacgatcgtcgttaggtaattattagacgttaagcgttagttttaagttttgtttttattggcgttttttaattcgcgcgagttgttaacgcgaatagaataatttttaggttataggtgttattagagtaattgaaaaatacgttgtggtagtttaaacgttagaggtattttattttgttatggtttggtacggtattaaaattatagaggtttagtgggtatttttttggatttttcgtaagataaagtttaaagtattatgtattttaaagaaatttgtttatagatgtattgtaaattggttttataatttaattaaaatttatatttataaagaaaaaaaagattagtgaaagtgatgtgtttacgtggtttattaaggtagtaagatataatagaaagggagatataataaagttagtgttttttagatgttttgtttagaggtttttacgttagcgtttttgaattagaatgttttttataatagtaaaatattggattaatatgaatattaattagtagcgatggatataataatttattgtttatttatgatgaataataacgtagatttgtgttgatataagagatatttattatatagtattaaattttaaaattgattaaataataagaaattgtgatatttgtatttttttaaatgtatatatatatatatatatataatgtaaaagtaattttttgggttttttgttaaaatgtagattttgttttagtatgtttgaagtaaggtttaagtatttgtatttatgataagtaagtttttaggtgattataatgtttttggtttcggggttatatattgaatatagaggttttaggaattttgtta

SEQ ID NO: 400 - DNA, 2367 bp, Artificial Sequence
  chemically treated genomic DNA (Homo sapiens)
gacgtgtgcggcggtaagcgttcggttcgtatttttttcgtatttcgtaatttcgattttggcggtttttagattcggcgaaatcgtgaagtttcggttttaggagttttttagatttatggttttagattcgaatttttagatttgttcgatttttttttatgtcgtttcggggatttttttttattttttgttttatgatttaaaatataggtttataggttttagagatattttgtgaatttttttttggggtgttttgaatcgcgatcgtagatttgtgtttttagttttagcggggaattttattgttcgggaatttagagtttatagttacgattttagattcgagtttatagagttagaggtgatattggaattttgtcgttgggaatatttaaatttttaagtttatatttgggattttttaaatttcgttttggggttttttaggtcgtggatgtttgtttcgcgtttatgatttgttaaggatttttatatttaggttgggttttggattttatattttagcgtttagatatgtcgggaacgttttacgttaatttggggtttttattaagagaatttttattagatttgtatttttttttttacgcgtgtatttagtttaggtttttttaagttttacgggtgttttttagatttgaggaggttgtaaatttgattttttatatttgttttatttattcgcggataattcgttttcgtaaatttagatttttattcggaggttttagattttttttaggtttagttgtcggaaatgcgtgtttgaagggagggtgtgggtttaggggcgaagtatttattggtttttttttttttttttagtagtgagtcgtagttatgtttttggttaattcgtttttgaagggcggcggcggcggcggcgggggaggcgggggtttgggtgggggtttgggaaatgtgtttggaggtttgattagcggggtcgggggcggcggcggcggcggcggcggcggcggcggtggtggaggcggcggtggcggtggaacggttatgcgtattttaggcggagttattagcgttattaggtaaggcggagattattagaggggcggggtttgggaatgggaggagttttagtgaggcgtggtttgggaggggcgtggtttaaaaatagaataggattaatttggaggttaatttgggtatatgaattaggtcggggaggtttggtttgagagttttgttgtaagggggtggattttagtgaggcggatattagttattgggggcggtgtttgatatgggagtagtttgattgtgtgggattaggataatgtggttttgaggggattgatgtggagttttggcgggtggggtttatgggtttgggtttagtttgtattggttaatttggagatgaacgttaaaggtgcggagttaatgcgtttgagtgatattttacggaaggggtttgatttatgagtgtggttagaggttttaggtgggttaatgaggaggtgagtttaggaggaagtaagatttaatggggtagggtaaatggtttagaatgggttgggtttgttgggaattggttggattaatggagaaaaatgttttggtagggatagggtaggttggtttaattagttacggttatttagtagtgattttttgaaggggcggggattaatggttggggtaggatgttgggaagacgggtatttaggaagcgggttatggagtagggttttgggtagatggtatttgaggaggataaggttttgggaagttggggtagagtttttatgaagtgagttttttaaggggcggggttttttgattttacgtgggattttttaggtttagggtggttaagatgattgaaatttgttattgggtaggtgtgtttggtaggaggggagttttttaggggatcggtttttgggttttttcgagggtggggttggtttgaggaagggagaagaggggtacgattagggtagtgtggattgggatagatgaggataagaataaatgaaaggtatagtaattaagtaaggaagataacggttggggtttggagcgttggggttgatggttttgtagtgttgttcgttggaggtttcgtttttggtattaattttttttttttattttttcgtagcgaggcggttgcgtagtataattcggagttttcggtaagttttttttgtaattagattttttttttttgttaaggttttttcgaggttttatttttgtttttgtagagaagttttattttttttttttttttgtgaaatttttttgttagttttttttatgtcgtgtttgtagtttcgttatgggttttagttatgttttatatacgtgtat

SEQ ID NO: 401 - DNA, 2367 bp, Artificial Sequence
  chemically treated genomic DNA (Homo sapiens)
gtgtacgtatgtggggtatggttaagatttatggcgaagttgtagatacggtatgggaggaattggtagaggaattttataagaaggggaggaaggtggggtttttttataggaatagggatgggatttcgaagaggttttggtaggagaagggggtttggttgtagagggggtttatcgggggtttcgggttgtattgcgtagtcgtttcgttgcgaagagataagggggaggggttagtgttaggggcggggtttttaacgggtagtattatagaattattagttttaacgttttagattttagtcgttattttttttatttggttgttgtgttttttatttgtttttgtttttatttgttttaatttatattgttttggtcgtgtttttttttttttttttttaggttaattttattttcgaggaaatttagagatcggttttttgggaggttttttttttgttaggtatatttatttagtggtagattttagttattttggttattttaaatttaaaaaattttacgtagaattaaaagatttcgttttttggagggtttattttatagaggttttgttttagttttttaaggttttattttttttaggtgttatttgtttaagattttattttatggttcgttttttaaatgttcgtttttttaatattttattttagttattggttttcgtttttttaagggattattgttaagtggtcgtggttaattaagttaatttgttttatttttattagggtatttttttttattaatttagttagtttttagtaagtttagtttattttgggttatttattttattttattaggttttgtttttttttgggtttatttttttattaatttatttaaaatttttgattatatttataagttaagtttttttcgtaaaatgttatttagacgtattggtttcgtatttttaacgtttatttttaggttagttaatgtaggttgagtttagatttataagttttattcgttaaaattttatattagtttttttaggattatattgttttggttttatataattagattatttttatattaagtatcgtttttaatgattgatattcgttttattggggtttatttttttatagtagaatttttaaattaggttttttcggtttaatttatgtatttaggttagtttttaggttaattttattttatttttagattacgttttttttagattacgttttattgaggttttttttatttttaggtttcgtttttttgatagttttcgttttatttgatggcgttgatgatttcgtttaggatgcgtatggtcgttttatcgttatcgtcgtttttattatcgtcgtcgtcgtcgtcgtcgtcgtcgtcgttttcggtttcgttgattaggtttttaagtatattttttaggtttttatttaggttttcgtttttttcgtcgtcgtcgtcgtcgttttttaagaacgagttaattaggaatatggttgcgatttattgttggggggaaaaaaggggattagtgggtgtttcgtttttgagtttatattttttttttaaatacgtattttcggtagttggatttgggaggaatttgaagttttcgggtgggggtttgagtttgcgagggcgggttgttcgcggatgggtggggtaggtatgggggattaggtttgtaatttttttaggtttaaaaggtattcgtggggtttgagggagtttggattgggtgtacgcgtgaaggggagggtgtagatttggtgggggtttttttggtggggattttaagttggcgtaaggcgttttcgatatgtttgggcgttagaatgtgagatttagagtttagtttgaatgtagaggtttttggtaggttatgggcgcggagtaaatatttacggtttaaagggttttagggcggggtttaggaaattttaaatgtgggtttgagaatttaggtatttttagcggtaggattttagtgttatttttggttttgtgggttcgggtttaagatcgtggttgtgagttttgggttttcggataatggggtttttcgttggaattgggggtatagatttacgatcgcggtttaggatattttaaggaagaatttatagggtatttttgaaatttatgggtttgtattttggattatgagatagagggtggagaagggttttcgggacggtataaaaggagatcgaataggtttgagggttcgaatttgagattatggatttggggggtttttgaggtcgagattttacggtttcgtcgggtttgggggtcgttaaagtcggagttgcggggtgcggagggggtacgggtcgggcgtttatcgtcgtatacgtt

SEQ ID NO: 402 - DNA, 2383 bp, Artificial Sequence
  chemically treated genomic DNA (Homo sapiens)
ataataaagacgtatatatgtatgtttttataaaatttagttgagattttatttttattttataaatattttatttaatagtgtatgaatttaattgtagataaagagatagaaatagaaacgaaggaattttttaattttcgattatagttagagagatatttttttaaaggaattttttaaggataaacgtatattaaattaagtagaagatattaagatttggagtggtttttttatttttttttataattaggttgattaaggtgtgagttgattttggtataatgtatttattttaagtttgatgacgtgtttattattttaaaaggtttttttgtgttttttgtagttagtttcgttttttttttgaggttagtagttaatgatgtagtttttgttattatataggttagttttaattgttgtagaaatttattttgatggcgttatatagggtgtattttttttattattcggtataatgtttttgagatgatttacgttattttatgttttcgtaatgtgttttattttattgttgggtagttcgggtagttggggtagatcgtagtatattttggcgataggtgagattgcggttttgatttgtaggtttcggtgaatatgagtaagggtatttgggcgtcgggagagatttttttttttttatagaaagtaagcgtgttatgttaataatcgaacggggattttgtttttattttaaagaatagtattcgattgcgtagttttttttttggttttaggaggtgagaatatatttttcgttagtatagatattttataaatttttgcggaggttgcggttagaagtagaggttgtgtgaagggtgattttgggggttatgaaaaaatacgaaggtttttatagagtatgagaatttaaaagattggagattatgaagcgatttgtaaaaagtagttttaagtagaaagggaagagaagagttttgcggttatttagtgttaaaagagtttacggcggcggagaggataatacgttattttttgttttttattattgcgattgtaaggagaatatttaatatgttatttaagttataaaattgtagttttaagaataatttttataggggagtttatttttttattataaaaatttaggggaaagcgcggacgtagttttttattattataaattatgtagtcgagttttttatatttggggaaatcgtaggggttagtatattcggagtgtaatggataagtttcgttttgggaaaattattttcgtgattatggtattttttttgttaggtaagtatgattttatatatttttgttttgttatagttttatatattttattttttatatatatggttatttgtttcgcgtattttcgagtttttttagttttgatatatagttgggatttttaggttcgattagcggttttgaattcgtttttacggtacgggagttttttcgtggtgaaatagttagtggcgaagtagtagtttttgcgttgttttatttatatagaagtcgttttattcgtgatgttatcgatagcgtttttttcgtttcggtttgtttttttgttttatttttcgttatttagtcgattaatatggtgttagagtttgcgggggtagtgatgtttgtttttgttttttttttttttttttttcgtttatggttttttttaaagaagcgggtgtttttgttgtagttttttgtttgttttttgttttgcgtcgtttcgttttgtcgtttaggttggagtgtagtcgtatgatttcggttttttgtaattttcgtttttcgggttgaagcgatttttttgttttaggttttcgtatagttgggattataggtatacgttattaagttcggttaatttttgtgtttttagtagagacggggttttattatgttggttaggttgatttcgaatttttgattttaggtaattcgtcgatttcggttttttaaagtgttgagattataggcgtgagttattacgattgtttagaagtcggtttttagtttgtgttgtcgaggatttttttggtagaaatttggagtttgtttatttttttttaaataatggtttgtaatgcgtagattaaaatatggaggattatataagaaattggtttattttatattattatttttgtgatgtagtattttatttgaaattggaagtcgttcgatattagagaaattatatttatgaaattagagaggttgtttagatgattgtaaattagttatttttatttgttttattattagtagtgttataaggacggtggtttaattttaggaattttgtagggtttttttaaatatagtaatgtataaatatgttgttttagtagagtatattgga

SEQ ID NO: 403 - DNA, 2383 bp, Artificial Sequence
  chemically treated genomic DNA (Homo sapiens)
tttagtgtgttttgttggggtagtatatttgtatattgttgtatttgaaagaattttataagatttttgaaattggattatcgtttttataatattattagtggtaaaataagtaaggatggttggtttgtagttatttgagtagtttttttagttttatagatatggtttttttgatatcgaacggtttttaattttaagtagaatgttatattataaggataatgatgtgaagtgaattagttttttgtgtaattttttatgttttagtttgcgtattataagttattatttgaagaagggtggataggttttagatttttgttaaagaggttttcggtaatataggttaagaatcggtttttgggtagtcgtgatggtttacgtttgtaattttagtattttgggaggtcgaggtcggcggattatttgaggttaggagttcgggattagtttggttaatatggtgaaatttcgtttttattaaaaatataaaaattagtcgggtttggtggcgtgtgtttgtaattttagttatgcggaagtttgaggtaggagaatcgttttaattcgagaggcggaggttgtagggagtcgagattatgcgattgtattttagtttgggcgatagagcgagacggcgtaaaataaaaaataaataaaaaattataatagaaatattcgtttttttggggaagattatgggcggggaagagagggaaaggaggtagaggtagatattattgttttcgtaggttttggtattatgttggtcggttgagtggcggagggtggggtagaaaagtagatcgggacgaggaaggcgttgtcggtgatattacggatagggcgatttttatgtagatgaggtagcgtaggggttgttgtttcgttattggttgttttattacgaaggagttttcgtgtcgtgggagcgggtttaggatcgttggtcggatttgagggttttagttgtgtgttagggttaggaaggttcgggggtgcgcggggtaagtgattatgtgtgtaaagggtgaggtatatggagttgtgatagggtagaagtgtgtgaagttatatttatttggtaggggagatattatgattacgaaggtggtttttttagggcgaggtttatttattgtatttcggatgtgttgatttttgcgatttttttaaatgtgggaaattcgattgtataatttgtggtagtgggggattgcgttcgcgtttttttttgaatttttgtaatgaaaaaatagatttttttataagggttatttttaaaattgtagttttgtggtttgggtggtatgttaagtgttttttttatagtcgtaatgatgggaaatagaaagtaacgtgttatttttttcgtcgtcgtgagtttttttaatattaagtggtcgtagggttttttttttttttttttatttggggttgttttttgtagatcgttttatagtttttagttttttgggtttttatgttttgtgaaaattttcgtgtttttttatagtttttagagttattttttatatagtttttgtttttaatcgtagttttcgtaggagtttgtaggatgtttgtgttagcggggaatgtgtttttattttttagagttagggaagaaattacgtagtcgggtgttgttttttgggatgaaagtagggttttcgttcggttgttaatataatacgtttgttttttgtaggggaagggaggtttttttcggcgtttaggtgtttttgtttatgtttatcgaggtttgtaggttagaatcgtagttttatttgtcgttagaatgtgttgcgatttattttaattattcgaattatttagtaataaaataggatatattacggaaatatgaaatagcgtggattattttaaaaatattatgtcgagtgatgaaaagagtgtattttgtgtggcgttattaaggtgaatttttataatagttaaaattaatttgtatagtgatagaaattatattattgattgttggttttagggggagggcggaattgattgtaaagggtataagaggattttttagagtaatagatacgttattaaatttgaaatggatgtattgtattaaagttaatttatattttaattaatttgattgtaaaagggaataagaaaattattttaaattttaatgttttttatttaatttagtgtacgtttatttttagaagatttttttagaaaaatatttttttaattgtaatcgggagttgaggaattttttcgtttttgtttttgtttttttgtttgtagttaagtttatgtattattaaatggaatgtttgtaaaataaaaatagagttttagttaaattttataaaagtatatatatatgcgtttttattat

SEQ ID NO: 404 - DNA, 2417 bp, Artificial Sequence
  chemically treated genomic DNA (Homo sapiens)
aggtaatttgtttattttagttttttaaagtgttaggtttataggtattcgatatcgtatttggttaatttttggtatttttagtagagatatggttttattttgttggttaggatggttttttaatttttgatttcgtgataggttcgtttcgattttttaaagtgttgggattataagcgtgagttattacgtttggttttaggaaatttggatttttaatgtggtatttttaaattttgaaattttggtaattaatgtaatttttagaagattgtgggttaggtagattgtattttatggaggtagaaaaggaggtttgaggtcgggttcggtggtttacgtttgtaattttagtattttgggaggtcgaggcgggtagattacgagattaggagtttgagattagtttggttaatatggtgaaattttatttttattaaaaatataaaaattagtcgggcgtggtggtagcgtttgtagttttagttattcgggaggttgaggtagaagaatcgtttgaattcgcgaggtggaggttgtagtgagtcgagatcgtgtttttgtacggtagtttgggcggtagagcgcgattgttttaaaaataaataaataaaaaattagtcgggcgtggtggcgtatgtttgtaatttagttatttgggaggttgaggtaggagagtcgtttgaatttaggaggcggaggttgaggtgagtcgagatcgcgttattgtattttagtttgggtaataagagcgaaatttcgttttaaaaagaaaagaaaagaaaagaaaaggaggtttgagttcggcgcggtggtttacgtttgtaattttacgtttgggaggttgaggtgggaggattgtttgagttcggaagttcgaggttgtagtgagttattatcgcgttattgtattttagtttgggtgataagagcgagatttcgtgtttaaaaataagtttaaaaaaaaaaaaaaaaaaaaaaaaaggtttgtaatagagacgcgattttttaaaatgttatataggtaagtgggggtcgtatagtttatggtttttagaaagttttttttgggaatgtaaaataatatttattttgggatttttagtttttaaattttttgagtttagaggttttgaagacggattaagtgtaaagttttcgattttatatatcgtttttcgtttttttcgtattatattttttattttttgagtatcgcggttttttcgttttcgggatttcgtttttcgttatttggatggtttgtaaggttattattcgttattttattttatttgggttatgtcggttgtaagtttggtttttatttcgtattttcggagagttacgcgtagatttttttttacggttttattatatttttttaagataggtagtttaggtttgcgttttttgtcgatatttagtatcgaggggtagttttcgaggttacgtagatttttttaatttatacgtatagatcgattcggggaatcgcgggagttagtttcgcgttggggtagtggtagattcgaggcgtgaggcgcgtatgcgtagcgcggtttttattgcgttattgcgagtttagagcgtacggttggattatgagtacgttcgcgttggcgtttgcgcgtttgcgtatttttttttgttcggcgcgcgtcgtagtcgtcgggattatttcggggttgcgttgtttttttagtaagtgtatgcgcgttatggttttagttagtatgtttatgagtagtttttgttgtagttttaggtagttgtttttttttagtaatatttggtttttggatcgttgtatttgcgttttttagttttaggcggttcgcgagagtagcggcgatcgcgttttcgttagttggtttttagtggtttatcgttcgtcgcggaatacgaaggtttggttgttgaggcgtatgtacggcgcgtcgtaggcgaggtttagttcggtttggcgcgtgttgtggtttagtaggtagaaggtggatagggagggtatgcggcgtagtggcggtcgtcgtggcgagaagggtcgcgagatgtgatcggtttaaaattgttgtagcgtttgttataggcggttggtatggttcgtagtcgagtattcgaaggttgttagggcgtggattttgtagggtacgtaggtgttcgaaggggagtttcgggagcgttggcgattcgtgttgcgtttttgtttcgggagttcggatgtttagaatgatgaaggcgagttagggggcgttgttgggagataagagttcgggtgagtagcgtgtttggtataggtcgttttttaaatcgcgaggtcggcggatatgttttagttttgtagttacggttgcggttgtgttttattagttgttggttatcgaggagttcgtcgttttacgttgtataggtag

SEQ ID NO: 405 - DNA, 2417 bp, Artificial Sequence
  chemically treated genomic DNA (Homo sapiens)
ttgtttgtgtagcgtggaacgacgggtttttcggtggttagtagttggtgagatatagtcgtagtcgtagttgtagggttaagatatgttcgtcggtttcgcggtttgagaggcggtttgtattaagtacgttgtttattcggatttttgttttttagtagcgttttttggttcgtttttattattttggatattcgggttttcgagataagagcgtagtacgagtcgttagcgttttcgaggttttttttcgagtatttgcgtgttttataaggtttacgttttggtaattttcgagtgttcggttacgagttatgttagtcgtttgtggtagacgttgtagtagttttgggtcgattatatttcgcggtttttttcgttacggcggtcgttattgcgtcgtatgttttttttgtttattttttatttgttggattataatacgcgttaggtcgagttgggtttcgtttacggcgcgtcgtgtatgcgttttagtaattaggttttcgtgtttcgcggcgggcggtggattattgagagttagttggcgaggacgcggtcgtcgttgttttcgcggatcgtttggggttggaaggcgtaggtgtagcggtttaaaagttaagtgttgttggaggagaataattatttgaagttgtagtaggaattgtttatagatatgttgattgagattatggcgcgtatgtatttgttggagaagtagcgtaatttcgaggtgatttcgacggttgcggcgcgcgtcgggtagaggaagatgcgtaagcgcgtaggcgttagcgcgggcgtgtttatgatttagtcgtgcgttttggattcgtagtgacgtaataaaggtcgcgttacgtatgcgcgttttacgtttcgggtttgttattgttttagcgcgggattggttttcgcggtttttcgggtcggtttgtgcgtgtgggttggggaggtttgcgtggtttcggggattgtttttcggtgttgggtgtcggtaggggacgtaagtttaagttgtttgttttgggagggtgtgatggggtcgtggaggagggtttgcgcgtggtttttcgggagtgcggagtggaagttaagtttgtagtcgatatggtttagatagggtggagtggcgggtaatggttttgtaggttatttaggtaacggagggcgaagtttcggagacggaggaatcgcggtgtttagggaatgaagggtgtggtgcggagggagcggaggacggtgtatggggtcggggattttgtatttggttcgtttttagggtttttaggtttaggaggtttagaaattagaagttttagggtaagtgttattttatatttttaagagaagttttttggaaattatgggttgtgcggtttttatttgtttgtgtggtattttggagagtcgcgtttttgttataggtttttttttttttttttttttttttttaaatttatttttaaatacggggtttcgtttttgttatttaggttggagtgtagtggcgcgatgatggtttattgtaatttcgagttttcgggtttaagtagtttttttattttagttttttaaacgtgggattataggcgtgagttatcgcgtcgggtttaggttttttttttttttttttttttttttttttgagacggagtttcgtttttgttgtttaggttggagtgtaatggcgcgatttcggtttattttaattttcgttttttgggtttaagcgatttttttgttttagttttttaagtagttggattataggtatgcgttattacgttcggttaattttttgtttgtttgtttttgagatagtcgcgttttgtcgtttaggttgtcgtgtaggggtacgatttcggtttattgtaatttttatttcgcgggtttaaacgatttttttgttttagtttttcgagtagttgggattataggcgttgttattacgttcggttaatttttatatttttagtagagatggggttttattatgttggttaggttggttttaaatttttaatttcgtgatttgttcgtttcggttttttaaagtgttgggattataggcgtgagttatcgagttcggttttaggtttttttttttatttttatagaatgtagtttgtttggtttatagttttttaaaaattgtattagttgttaaagttttagaatttggagatattatattaaaaatttagattttttggggttaggcgtggtggtttacgtttgtaattttagtattttgagaggtcgaggcgggtttattacgaggttaggagttaaaaggttattttgattaataaggtgaaattatgtttttattaaaaatattaaaaattggttagatgcggtgtcgggtgtttgtaagtttagtattttgggaggttgaggtgggtagattgttt

SEQ ID NO: 406 - DNA, 2463 bp, Artificial Sequence
  chemically treated genomic DNA (Homo sapiens)
tgtatagttttttagtataagtaatagtagtttaattttaagaaaaagatattttaaaggtcgtatattaaaagttgttagggatttagtcgtttatattttatgaaaagtatagattatattcgtttagttagttgtgtattttaattggtcgagaaggcgcgttgggggttgggtttgagggtgagtaaaaggtaagattattagtttgggttgacgtgggggttaaggggagagtagaggaataatttgtaagatttgagtttcgaagttttttgggttatggaggttagaaaagggtttgttaaagttaggtttaagtttcggtaaggtggaattgggaaaaaaaaaaaagaaagaaaaaaaaaacgaaattcgaaaaaataatagcgagtaggttttcgagttttagcgtttatagtgaagtcgttaaacgtagtaggaaagtaggcgtgtgtttttttttttttttcgtttttttagagattcgagtttagttttttttttttatttttattttagtcgagtttaatggttgttttcgtcgcggagtcgggtcggaagacgtttcgttttttcgtcgcgttcgttttagggaattttttcgttttattttttttgttcgatgaggggtagtggttgtcgtcgttacgtgtgttggtagtcgttaagtgaggtcgtttttgcgacgcggtgatagttaaatggtgcgataggaggagttgtagtcgcggtcgtagcgttcgtacggagaggtttgaggcggtttttggcgtcgtttagagggagcgattagacgaatagttcggtgagggcggcgagaggaagttcgttacgagtgttttagtttttcgtcgttttcgatgaatcggacggaataagtcgcgtttttagtaggggttgcgtttttatgaatttttagttgttttttttttttttttttttttttttttttttatttttatttcgagtttcgtttcgtttttttttttcgttagaggcggtcgcgtttaggtgcggagtttatatcggagcgtaatggcgtttaatttcgaacggggggagattttgtttacggaattgtaggtaagggtcgcggttttggtgagaggcgttggcggaggagatagggagagagtttcgcgcggcgtcggggatcgaggaaagttttgcggtcgtcgcgtttttagttcgttaagtgcggaaatttcgggatgttattcgggaaatgtttttttcggggaatcgtttttttggggagtcggattttttttttcgttaaagttttggtttgttatcgttttggtttgattttgtttattagaggggattttatttttgtagttttgttgtagcgggagtttgttttcgtttggttttcggagaggtcggttcgtcgttttttttttcggtgttagagttattcgcgaacgtttttgttgtttttttttttcgcgcggtcgggtttcgtttcgtttttttttcgtatatcgttttttaaatttttttgaatgatttttaagttgtttttttgtttttttttttttttttagatttcgtataaagagcgtttttataatttttagtttttagataagtttttttaaaaaacgagttttattaaatgtttgttttattttagtagttttttttaggtgatagagttttttttttttattttgagggttattttttttttttttttttttttttttttttttttttaatcgagtgataaatatagggtgtttttttttgttatttttgtttagattcgggagtttagatgttgatgttttttagatttttatttttttttttatttgagtattagagaaagagttaataagttgtttattaatgagaaagtagtcgattaagggaaaatattgggtattatatgtttgtaaaagatgagagtaaagtagatcgtttagttaagttatgtcgagtagtaatgttattttttatttttagataaatatttgataatgtaggtacgattttttttagatttttatggtgtatatggggatttaagttattttgtcgggttttttattatttgggagtgttttagagatgtttgttttttgatttaaaagttattttgttttattttaatatagttattttttagttatttaaagattgtagatgggaattaggagaaaaaaatagtatgtttgtatttttttttgtgtgttggatagttaattttttttaaaaaaaagattaaattaagaaattttgaagagttgatgttaaaattaagtattgtaattgtatttaaattttttgtttaaatatattttttaagaaatttttttataagtttggttttttgtgtagttagacgtaagtttgaaaattttggtataatggttgatattttttttataaaaatagagattttaataatgtatattaatgtagtgttgtatatttagaattttttggtaa

SEQ ID NO: 407 - DNA, 2463 bp, Artificial Sequence
  chemically treated genomic DNA (Homo sapiens)
ttattaaaggattttaaatgtgtaatattgtattgatatatattgttaaagtttttatttttgtggaggaaatattaattattatattaaagtttttaagtttacgtttgattgtataagaaattaaatttataaagagattttttaaaaagtatatttaaataagaaatttagatgtagttgtaatatttaattttgatattaattttttagaattttttgatttagttttttttttaaaaaaaattaattgtttaatatataaaaagaaatgtaggtatgttattttttttttttaatttttatttataatttttgagtagttaaaagataattatattaaaataaagtaaaataatttttaagttaaaaaataaatatttttggaatatttttaagtaatgaaaaattcgatagggtagtttaagtttttatgtatattatagagatttaaagaaaatcgtgtttatattattaaatatttatttggaaatgggaaataatattgttattcgatatgatttaattaagcgatttattttgtttttattttttgtagatatgtggtgtttaatgtttttttttagtcgattgtttttttattagtaaataatttattagttttttttttggtgtttaaatgagagggaaaatgaaagtttgaaaagtattagtatttgagttttcggatttgggtaggggtagtagagaaaggtattttgtatttattattcggttaaaaaaaaaaaaagaaaggaaaagaaaagaaaaagataatttttaaaatagaggaaagaaattttgttatttgaagagggttgttgaagtgaagtaaatatttggtgagattcgttttttaaaaaaatttgtttaggggttggaagttatgggggcgttttttgtgcggagtttgaggggagggggagggataagaaaatagtttgggagttatttaaaggagtttaaggagcggtgtacggaggaaaggcggggcggggttcggtcgcgcgaagggagggggtaataggggcgttcgcgggtagttttgatatcgagggagggggcgacgggtcggttttttcggggattaggcgagagtaggttttcgttgtagtagggttgtagagatggggttttttttggtaggtagaattaaattaaagcggtggtaggttagggttttggcgggggagagggttcggttttttagggaagcggtttttcgagggaagtatttttcgagtgatatttcggagttttcgtatttagcgggttaggggcgcggcggtcgtagggtttttttcggttttcgacgtcgcgcggggttttttttttgtttttttcgttagcgttttttattagggtcgcggtttttatttgtagtttcgtgagtagaattttttttcgttcggggttggacgttattgcgtttcggtatggatttcgtatttggacgcggtcgtttttggcgaagggagaaggcgggacggggttcggggtgggggtgaggagaggggagagaaagaaaaaaaaaaaaataattagggatttatggaggcgtagtttttgttggaggcgcggtttatttcgttcggtttatcgagagcggcggggagttagggtattcgtagcgggttttttttcgtcgtttttatcggattgttcgtttagtcgttttttttgggcgacgttaggagtcgttttaagttttttcgtgcgggcgttgcggtcgcggttgtagttttttttgtcgtattatttggttgttatcgcgtcgtaaaagcggttttatttggcggttgttagtatacgtgacggcggtagttattgttttttatcgggtagggaaggtggggcggaggggttttttagggcgaacgcggcgagggggcggggcgtttttcgattcgatttcgcggcgagggtagttattggattcggttggggtgaaaatgaggggaaaggattgggttcgagtttttggggaggcgggaagaggaagaaaatatacgtttatttttttgttgcgtttaacggttttattgtgaacgttagaattcgggagtttgttcgttgttgttttttcgggtttcgttttttttttttttttttttttttttttttagttttattttgtcgaaatttgggtttaattttaataggtttttttttaatttttataatttaaagagtttcgggatttagattttatagattatttttttgttttttttttgatttttacgttaatttaaattaataattttgttttttgtttatttttaaatttagtttttagcgcgttttttcgattagttaaggtgtatagttagttaaacgggtatggtttgtattttttatgaaatgtaagcggttggatttttggtaatttttaatgtacggtttttaagatgttttttttttgaggttgaattattgttgtttgtattggagaattgtata

SEQ ID NO: 408 - DNA, 2297 bp, Artificial Sequence
  chemically treated genomic DNA (Homo sapiens)
agaaaaatattatcgtgttttttcgtttgtatttaatatatttaaggttttttatttatttttttggaataaatttttagtaaatatttatttatcgatttgggagcgatggatttttataaaggtttgatcgttttttaagtggtcgaagtgatttgttttcgtggtttttttagtattgaagggggtgggggaagcggatttgagggggtgtatgtttttgtcgtcggtgggtttattttttaaaaattattgagatgcgttagggtggtcgtgattaagcgggtttagggttaattgtgtgagggggaagcgttttttagagcgcgcgtagcgtcgggggtttagtttacgtcgttgcgcgtttttgtgcgtatcgggtgaggatgtcgagttttgcgggtatttcggaagtcgcggtggaggtaggggtttcgttcggcgtagtgggtttgttggggaggtgtaggggaggttttgatttttggtttatttttttttagattttttcgttcgttttcggatttttagggtttttttttaaatttttttttgttttttttacgggaggtttttgtagtttttgggttttagggtttcgtaagtttcgggatcgatttgtgttcggggtgggtgtggcggaagtttgaatcggattatttaggtacgttatttgtagacgtagtgggcgagggggattttgttatttttttagttttttttttggatttcgtagcgaggggaattaaattttttttatgatagtttttttggcgttagtttggatcgagtggttataggttggattagggtaggtagaagatgtatttggtattttatcgaacggtatttgaattcgtttttattatttattaatggcgtgattttaggtaatttatttaaatttttcgaattttagcggtttttatttataatatgggggttaatgataatgtttttttcgtatgtaggtggattaaatggatataaagcgtttattttcgttcggtacgtttaaaatttttattaataggttagttaattttattacgagaggaattttttttttttcgttttttagagtgtgggcggtatgaggttacggaagtagttgttgtaattagtattttaaaatttagagattttttaatggtggtagggggtgaaagggtaggggggaggtagggttgggataggtagaggtaggtttttggggatttttagttttggggattaagcgtttggaattagttgggtttgggtagaaataagaaggtaaatgacgggatcgtcgtcggagttcggatttttatttttggagtttattgttttttttagggaatagaggagtgttttggttttttagtaatgaattaggagagtgtgagaaagagtatttgttttttttttcgtggttcgataagttatttttcggtagttttgcgagtagattaattgaaacgggtttggaattttatttttttttttcgatggagttgttggaggtttgcggatattgtttggttagttttcgggattatagcgtcgtgggttttttttcgtggtgtttgttttaaatttgggtgttattaatttatttaataatgacggatgattttgttataacgacgttagttaaaatattttcggtttaatttttttttaattaatatcgaagtattttgaatgagattcggatgaagtttgaatagtacgttttttaggtttagaaaatttgagtggtgggaagagaaaaagaaataagtagaaattaggaaagaatggttattaattgtttagattggtaagtgttaaataagttaggttgtttggaaaaagataaatgtcgttttttttttttacggtatggttagaatttcggcgatgggaaagtattttttgagtcggttaattttatatattttgtttgtgttttttattatttattatcgaaaatgttaggaagagttggggggtaagtgtttttttcgtgggtgcgagattgtatcgaagggttgttttggtataaagtttggggagaggatatggtggaggtggggttgtatttttattttgtttttttaatattaggttttgggtagagaaatttatgcgtgattttttgcggtagtcgtaggtagttgatcgtaaatagtttcgttcgtgtttcggagtagttgtgttattagacgtaatattggatatttgttttcgggttttaagaaggagagggaaagagttttttagaagataattcgagaaggggttagtagagcgttgggtggagtgtagatttt

SEQ ID NO: 409 - DNA, 2297 bp, Artificial Sequence
  chemically treated genomic DNA (Homo sapiens)
ggagtttgtattttatttagcgttttgttgattttttttcgggttgttttttggagggtttttttttttttttttttggggttcggagataagtatttagtgttacgtttggtggtataattgtttcgggatacgggcgaggttgtttgcggttagttgtttgcggttgtcgtaggaggttacgtataggtttttttatttaaaatttggtgttagaggggtagggtgggagtgtagttttatttttattatgttttttttttagattttgtgttagggtagtttttcgatgtagtttcgtatttacgaaggaggtatttgttttttagttttttttggtattttcggtagtagatggtagagggtataggtagggtgtgtgaaattgatcgatttaggaggtatttttttatcgtcggggttttggttatatcgtaaagagaagaaacggtatttatttttttttaaataatttaatttatttagtatttgttaatttgagtaattaatagttatttttttttgatttttgtttgtttttttttttttttttattatttaagttttttgaatttgggaaacgtgttgtttagattttattcgggttttatttaggatgtttcgatgttggttggaagagagttagatcgaaaatgttttgattggcgtcgttatgataaggttattcgttattgttggatagattgatagtatttaagtttaaggtagatattacgagggaaagtttacggcgttgtggtttcggaggttaattaggtagtgttcgtagatttttagtaattttatcgggaggagaggatgaagttttaggttcgttttaattaatttgttcgtagaattgtcgaagagtggtttgtcgggttacgggagaagaaataaatgtttttttttatatttttttggtttattgttgagaaattaggatatttttttgttttttgggagagatagtgaattttagggatggaagttcggatttcggcggcggtttcgttatttgtttttttgtttttgtttaaatttagttagttttaagcgtttggtttttaagattggaagtttttaagaatttatttttatttgttttaattttgttttttttttatttttttattttttgttattattagaaagtttttggattttgaaatgttagttgtagtagttgttttcgtggttttatgtcgtttatattttgggaagcggaggagggagggtttttttcgtaataagattagttgatttgttaatgagagttttggacgtgtcgggcgggggtaggcgttttatgtttatttaatttatttatatgcggagaaggtattattattaatttttatattgtagatggggatcgttgaggttcggaaagtttagatgggttgtttaaggttacgttattaatgagtaatggagacggatttaaatatcgttcggtaaggtgttaagtgtattttttgtttattttagtttaatttgtagttattcggtttagattgacgttagaggggttattatgggagagatttggtttttttcgttgcggggtttagggaagaagttgagaaggtagtaaagtttttttcgtttattacgtttataggtggcgtatttgggtaattcgatttaagttttcgttatatttatttcgggtataagtcgatttcgaggtttacgggattttaaggtttagaggttataggaatttttcgtgaagggggtaggagaaagtttgagggagagttttgaaggttcgggagcgaacgaaaaagtttggaagggaatagattaggagttaggattttttttgtatttttttagtaggtttattgcgtcgagcggggtttttgtttttatcgcggttttcgggatgttcgtagagttcggtatttttattcggtgcgtataagggcgcgtagcggcgtaagttggattttcgacgttgcgcgcgttttgaggggcgttttttttttatatagttgattttgggttcgtttggttacggttattttggcgtattttaatagtttttagaaagtgagtttatcgacggtaaggatatgtatttttttaaattcgttttttttattttttttaatattgagaagattacggaaataaattatttcgattatttagaaagcgattaaatttttataaaaatttatcgtttttaaatcgatgggtgaatatttgttgggaatttgttttagaggaataaatgaggagttttgagtgtattaaatgtaaacggggggatacggtggtgttttttt

SEQ ID NO: 410 - DNA, 2372 bp, Artificial Sequence
  chemically treated genomic DNA (Homo sapiens)
gtattgttttttatatttttattcgttatttatatagtgttgagatttaggatttttattttttttttttgtttttatattgcgtgagaagtaagatagtttagatagattgttagtaaagtttagggttttttgtttttttgtttttgtatggtattttaataagtttaaagtataacggataagttagaatttggcgatgtttggagtttgtttcgggtttttgtgaaattatagtgttggaatattaggggttttgtaaatttttgttgataatagggaaggttaacggtatgtttgacgttaattgtaggtaggtggtggttttagttatttagggagggtttagtgtagagtttttcggtggataggtttagatttagattttttggtaaggaggtaaaacgaggcgggagtagggattatcgtgcgttgtttttaggttatttcgtatttgttgtcggttttttttaggttttgcgcgggattcgaggtttttggttagcgtttttttatgtttttttagatttcgttgtttttagtttggcgttttttagagtttcgcgtcgttagggcgtatttattttttttatcgcgttgcgtaatttgtgttgcgtgttttttattagttttttaatttcgcggaatattttattgagggtggtttttttttgcgggtagttgagagtcgggtcgggtttgattggagtcgaggtcgtcgtcggagcgggcgcgggggtcgtggggatcgtcgtcgttagtagtaggtatagtagggtggttttaagtcgttgtattttcgttttgcgttcgtagtcgtcgtttgtgtgtttcggaacgcgattagaggcgcgcggattatttttttcgttgggttcgtcgtttcgtttcgtttcgtttcgtcgttcgtttttggcgtttttttttttcgtattcgttcggagacgggaggaaatcgaggtttttgaaaacgtagtttttttatattcgaaaagacgcgattttattcgttttagttcgagtttcgatcgttttaggatttcgtatttttattttcgagtataagttgagttttgttttttatttgtgatgttggagttttcgttagagtaatcgaattcggattttttacgttaatagtttttaagttttagtttatttagattttgttttcggtttaaattttagttttttttcgattaggttagagtgttcgatttttatttttattttaagttttttttagtttttatttggggtggattaagtataggttagttttttttttttggcgtcgggttttattcgagcgtttcgttttatatttattaagagaggttgagtttagtagagtcgttttttttttcgtcgtcgttttttatttatttcgattggatcgagttgcgttgcgggtcggattggatttgttcgttttcgtcgggaggtcgtcgggttgcgggtgtagatgcgggagcggcgcggtgggcgggtcgcgggtgcgggagcgcggcggggtgcggtagcgtcggtattcgagggagttcgtaagacgcgtttcgttcgtttattaggtttttttttcgttttcgtttcgagtttcgttcgtttattaggtttatttcgtttcgcggaggggtcgtagttcggttattggttagtcggggcgtcggttattttacgttttacgttttacgttttttttttttgttttagcgattagttttatcgaaggtagttattttttttattgtttgtttttgcgttcgcggtattttaggttcgttttttttggtttttaggtttgtaatagtttatcgaggttgggggtagggggaatgttttttagttttattttggtttttttaagttaatttttgttttgtgaaatttttaggaaaaattttagtttttagtttggtatttaagttattatcgttggttttagtttgtcgtgattgatatcgtgttttagttaggataacgtatttgtagtttttggaatgggagaacgttatgagaaagttagtaagttttttaagggtggtatagaggagtggttaggattagatatttgtagttagttttgtttttttttaatttttcgttttggcgaagttattagatttgtatgcgttttagttagttttaatataaaattttgataagttttaaaaacgtaataaggagtgggtagtggagaattagagaagttagacgattaggttaaatagtaggtgaaggtagggatggttagaggttttgagtgtagttgattgttttttagtttgaaattttaagattgtttttttttgtagtattttttatattattgtttatcgttaaaatagtcgtttttttttttatttttgggt

SEQ ID NO: 411 - DNA, 2372 bp, Artificial Sequence
  chemically treated genomic DNA (Homo sapiens)
gtttagaagtagaagggaaagcggttgttttggcggtaaatagtaatgtggggagtgttgtagagaaaggtagttttggggttttaagttggagagtagttagttatatttaggatttttggttatttttgtttttatttgttgtttggtttgatcgtttaatttttttgattttttattatttattttttattacgtttttgagatttgttaaagttttatattagggttaattgggacgtatataaatttggtaatttcgttagggcgggaagttaggaaggagtagagttggttgtaggtgtttggttttgattatttttttatgttatttttgaggagtttgttgatttttttatgacgtttttttattttaggagttgtaagtgcgttattttggttggagtacggtgttaattacggtagattaaggttagcggtgatggtttgaatgttaggttgggggttgggattttttttgaggattttataggatagaggttggtttggaaagattaaggtgggattgaggaatattttttttatttttaatttcggtgggttgttgtaagtttggaggttagagaagacgggtttgggatgtcgcgggcgtaggggtaggtagtgaaggagatggttgttttcggtagagttggtcgttgaggtagaagaggagggcgtggggcgtggggcgtgaggtggtcggcgtttcggttggttaatggtcgggttgcggttttttcgcggggcggggtgggtttggtgggcgggcggggttcggggcgggggcggagagggagtttggtgggcgggcggggcgcgttttgcgggttttttcgggtatcggcgttgtcgtatttcgtcgcgttttcgtattcgcggttcgtttatcgcgtcgttttcgtatttgtattcgtagttcggcggtttttcggcgggagcgagtagatttagttcggttcgtagcgtaattcggtttagtcggggtgggtgaggggcggcggcgggggaggggacgattttgttgagtttagttttttttggtggatgtggggcggggcgttcgagtaggattcgacgttaaggggagggggttgatttgtgtttggtttattttaggtaggggttgagagaggtttgaggtggaagtgggggtcgggtattttgatttggtcgaggaggggttagggtttgaatcggggatagagtttaggtgagttggggtttgggagttattagcgtagaggattcgggttcggttgttttggcgagggttttagtattataggtgaggagtagagtttagtttgtgttcgaggatgggggtgcggggttttggggcgatcggggttcgggttggagcgggtggggtcgcgttttttcgggtgtaggggagttgcgtttttaggggtttcggttttttttcgttttcgggcgggtgcgggaaagaggggcgttaggggcgggcggcggggcggaacggggcggggcggcgggtttagcgaggggggtggttcgcgcgtttttgatcgcgtttcgggatatataggcggcggttgcgggcgtagagcggagatgtagcggtttggggttattttgttgtgtttgttgttggcggcggcggtttttacggttttcgcgttcgtttcgacggcgatttcggttttagttaagttcggttcggtttttagttattcgtaggaggaggttatttttaatgagatgtttcgcgaggttgaggaattgatggaggatacgtagtataaattgcgtagcgcggtggaagaggtgggtgcgttttggcggcgcggggttttgagaagcgttagattgggggtagcgaagtttgggaaggtatggaagagcgttggttagggatttcgggtttcgcgtagggtttgggaagggtcgatagtagatgcggagtgatttggaggtagcgtacggtgatttttattttcgtttcgttttgtttttttgttaaaaagtttggatttgagtttgtttatcgagaggttttgtattggattttttttaggtagttggggttattatttgtttgtagttggcgttaggtatgtcgttggttttttttattgttagtagaggtttgtagggtttttggtattttagtattgtggttttatagaaattcgggataagttttaggtatcgttaagttttagtttgttcgttatgttttgagtttgttaggatgttatgtagggataaagaggtaaagagttttgagttttgttggtagtttgtttgggttgttttgttttttacgtaatgtgggggtagagagggaagatggaaattttaaattttagtattgtatgagtggcggatgaggatgtgagaggtaatat

SEQ ID NO: 412 - DNA, 2284 bp, Artificial Sequence
  chemically treated genomic DNA (Homo sapiens)
tgtggtattgttttttgtatcgtagggtttttcgggatcgatagattttggataatagtagttgggaaatattttaaatatataatatatttttaatttttaaatattggagttgtggggtttttttttttttttttttttttttttgggggttggaggcggaattttttggaaaattttggtattttgtttttttattaattttattttttgtggttgtttttattaagatatattttttttttgataatttttttatattgtatttagtataatagatgtatttgtggatttattgggtttttattgggttttgggaatattgatgttattttatttaaaaattaatttaagtttaatgttttgatgaaaatgaaaatatatttatagggaagtaaatatttatagttatttagttttttaaatgttatatatattttattttatttaaagtgttttttttttttttttaattataaaataatttagtttatttttaggaagatttttttatttattgtttttagttatgttagtatattttcggttttaaggatagagaatagttaggagttatagtattttgttttttatttttcgtatgtttttttttaatttttattttttttttttttcgtgttgtttttttttttttttatgtaaagtagaataagaagattgttttttataaagataataggttttttttaattgtaaatgattatattataagtcgtatttgttagttaattagtgtatttaagtttttgttagcggatgttgaaatgatgtttgtaataattgattgggtttttgcgagtttagggatgtagatttttttttttttcgtttttcgtgcgagttttagtcgttaatgaaaatcgtatgaaatagattttttttttgttatgtaatcggtttttttttcgtttttcggttgatttgggtataatgttttttatgagagtggagatgtttgcggcgacggcggagttggggaaggggacgcggggattcgagagtacggaacgtttcgtttaggtggacgttagtttttcgtttgcgagtagtttagcgtatcgtttatttggttgcggacggggtggttttatttaattatgatttttttttttgaaacggagtaagattgaataatttattatacgacggatggcgagggaaggaaatgtaaaaaagaaaaggaaaagaaaaaaattggaattagatggttaaattttatattagtatcgagaggttgttaggagattttattttgttcgcggttgtttcggttttaggttcggtttttcggcgttcgcgggtttttattttttcgttcgtttagtttttttagttaggtgcggtcgttttcggattggttttttttggtcgagcgcggagagtagggttgggcgttggggttaagggaggggcggaggggcgcgcgtttgggtagggacgggggagggagattgggtggaatgaagtggggaaagataagagtggtagaagaaaaaaaaaattttcggttaggagaaaagtggtggattacgtagagagacgttatgaaattcgtagatttaatgaatgttatttaattttagtcgattggttgagtttcgttggtagcgtacgaagcgacgcggtttcgagataaaagcgagtgtagcgtcgcgtgttggggaaaaagtcgtatagcgtcggcgcggttcgggaggaaggggcgggggcgagtaggatagagttatagatttagagacgtttatttcgtcgtttatgttagttagcgtgttagcgcgtcgaggatcgggtttggtgggggcgggttgggtataaattaacgtgtatttttcgttattggaaacgtgggtgttttatgttgggggaattttttgggtttcggttttcgattttttagttttaattttttttttagtgttattaagtaagttattttcggagaaacgtttggaaagtaggaaagagtcgaagttcggggagtagttttgtttgttggttgtaggggttcggtttttagggttttgtgagataaggaaaaagaggttttgggtattgttttttatcgggttgaaattcgtgagaggtagtttcggcgcgggagtcggagtttgtatcgtttagagggggcgtagcgagcggtcgggacggaggggaggggttttatttttgagttttgtttgtatttggtggcgttttagtttgttgttttatttagttttttttgttttgtttattgtaattgggatttggtttcggttgttgt

SEQ ID NO: 413 - DNA, 2284 bp, Artificial Sequence
  chemically treated genomic DNA (Homo sapiens)
gtagtagtcgggattaggttttagttgtagtggataggatagaagggattgaatggggtagtaggttggggcgttattaggtgtaagtaaagtttagggatagggtttttttttttcgtttcggtcgttcgttgcgttttttttgggcggtgtaggtttcggttttcgcgtcggggttgttttttacggattttagttcggtgggaggtagtgtttagagtttttttttttttattttataaaattttaaaagtcgaatttttataattagtagataaaattgtttttcgagtttcggtttttttttgttttttaggcgttttttcgggaataatttatttagtggtattgggagaaaggttgggattggggggtcggggatcgaaatttaaaagatttttttagtatggagtatttacgtttttagtggcgggggatgtacgttggtttgtgtttagttcgtttttattaagttcggttttcgacgcgttgatacgttagttggtatgggcggcggggtgggcgtttttgggtttgtggttttgttttgttcgttttcgtttttttttttcggatcgcgtcggcgttgtgcggttttttttttagtacgcggcgttgtattcgtttttatttcggagtcgcgtcgtttcgtgcgttgttagcggggtttagttagtcggttggaattgagtagtatttattgaatttgcggattttatgacgtttttttgcgtggtttattattttttttttaatcggggatttttttttttttttgttatttttatttttttttattttattttatttagtttttttttttcgtttttgtttaaacgcgcgttttttcgttttttttttggttttagcgtttagttttgtttttcgcgttcggttagagggagttagttcggagacggtcgtatttggttggagaggttgggcgggcggaggggtggagattcgcggacgtcgggaagtcggatttggagtcggagtagtcgcgagtagaatggagttttttaatagtttttcggtgttgatgtgaaatttgattatttgattttagtttttttttttttttttttttttttgtatttttttttttcgttattcgtcgtgtagtgaattgtttagttttgtttcgttttaagagaggagattatgattgagtgaagttatttcgttcgtagttaggtaagcggtgcgttgagttgttcgtaggcgaggagttggcgtttatttgggcgaggcgtttcgtgttttcgggttttcgcgtttttttttttagtttcgtcgtcgtcgtaggtatttttatttttatgagaaatattgtgtttaagttagtcgaaaggcgagggagaagtcggttatataatagaaggggaatttgttttatacggtttttattagcgattgaaattcgtacggggggcgggggaaggaggggtttgtatttttgggttcgtagaaatttagttagttattgtagatattattttaatattcgttggtaaagatttaaatgtattgattaattgataggtgcggtttgtgatgtagttatttatagttgggaaaagtttattgtttttgtggaaggtagtttttttgttttgttttgtatggagaggagaggagataatacgaaagggaggaaaagtgagggttggggagaaatatgcggagaatgggaaatagaatattgtaatttttaattgttttttatttttaaaatcgaagatgtgttagtatgattaaaaatagtgaataggaagatttttttaggagtaaattgaattattttgtaattggaagggaagaaaaaatattttagataaaatgagatgtgtgtggtatttagaggattgggtggttgtggatatttgtttttttgtggatatatttttatttttattaaaatattaagtttggattagtttttaagtgaaataatattagtatttttaaaatttaataaaagtttagtggatttataggtatatttgttgtattaggtgtaatatggagagattgttagggggaaaatatattttaatagaaatagttatagagggtgaggttagtggagaaataaaatattagaattttttaaagaatttcgtttttaatttttaaaaaaaggaagagaaaaaaaaaaaaattttataattttagtgtttgggagttggagatgtattatatgtttagagtgttttttaattgttgttatttaaagtttgtcggtttcggggagttttacggtatagggagtaatgttata

SEQ ID NO: 414 - DNA, 2498 bp, Artificial Sequence
  chemically treated genomic DNA (Homo sapiens)
taagggttaagtaatgatgtataaacggggtttattgtttaaatttatagaaagtaaaacgtggaaaattagtaattttaattgatagtgtatatttaaagaatttatatcggtcgggcgcggtggtttacgtttgtaattttagtattttgggaggtcgaggcgggaggattatttgaggttaagagatcgagattagtttgattaatatggtgaaatttcgtttttattgaaaatataaaaaaattagttaggcgtggtggtatatgtttgtagttttagttattcgggagggtgaggtaggagaattgtttgaatttaggagatagaggttgtagtgagtcgagatcgcgttattgtattcgtttgggagatagagcgagatttcgttttaaaataaaaaataaataaaaagaatttatttaatagaattaagtattaatataataaatacgaagaattttagatttttggtttttaaaaaatatataaagatgatatttttttaaaatatttttataaaatatattgagattgtgatgttttatattgattgtatgaaaataatgaaaaagaattagtattgttttattataaaagttttattaatgtaaatttataaatttttttttaaatattttgagttaattttaattttatgatagaaatttattatttttagtaaaaatagttggtatttgggaaattaaaggtttaaaaattaagaatagtaattaaagaaatttgataaaatagtttttttaaaatttttatttatattataaggggaaattttgattacgtttttttttttttattaatcgtagaatttaatattaaggattatataattttatattttttttcgagaaaaagtaaaggttttgtgttgtagtaataacgtaagatatggagggaagttttatttaagatttttttgtttgttttttttttaaagttattttagaatattagggagggttgagaggtaaggtatgaagggcgtaatatttaatatgagtaacgcgtgtgatgtatttggttaaaatgtatatagaggatttgtttttgtttttagatagaagtttttcgttttgtagttatgagggttaattgttgaggttttatagttttttttttttttatattcggatcgttacgttttttatttattatttcgatgtagaggtagatttaggatttttgtatttgttaaggatttttcggtaagtttacggggcgggagtggttataagacggagttcgtttggttttggttttttcggtttatataagtttgttttttttttaatttttaatttttatagttttttatttttttattttcgatttattttgcgttatcgacgtttttggttttcgtttgtagtaagtttatttttattattatttttcgtataaaagtttgtatttattaggttaaagaggggaattaacgtttgtaggaatcgttttatcgaatcgtttggtcgcgttttttgttagattttatttgtcgttgcggatcgtatataattattttcggtatgtttcgcgtacgtattattttttttatttcgtttttttttcgtttaaatacgtgattttttttcgttttcgtttacgtttattttcgtttttttatttttttttaggaaggaggagggagttgggggtgttaaaagcgtagcgatttttttttttttttcgttttcgtttttgtatttttcgttataatgtttttcgggtcgttagcgtttcgacgttttttgggaaaatagtttatttttttttttttttttttttttgtttttaattaattagttattcgttagagagggatatgcgtagtgagtgtttttcgttttttttattcgaatttttttttttttttaagtagagagattttagtagtagtagtagttgatgatgaagagagaggtagtggtagagggggggtattttttatttttatttttaaagggataggatattaattttattttattttaattttgaatttaggggggtggggggaaggcggttgagtttttttttttattttttagttttgagttttgagagggggattgagtttgagagaggagaaggagttttttttttttcgaaaatttttatttacgatttttatttttttatttttttaattcgtttttttttttttattttttttttttttggtcgtgagaggaggagagaaagaaattaaaagttttttagtaatatagattttttgttgttgttgttgttgttgttgttgttgttgttgttgttgttgttattgttgttgttgttattgttgttgtttggttttggttggagatattttattatatttaggagtagttatttttttagtttttttttttttttttcgttttttttttttttattttttttttttattattttttgtgttattttttatagttttagggaaggtatttaaaagtggggggtaggaaaggtaagtgtgt

SEQ ID NO: 415 - DNA, 2498 bp, Artificial Sequence
  chemically treated genomic DNA (Homo sapiens)
atatatttattttttttgttttttatttttgagtgttttttttggagttgtggaggatgatataaagggtaataaagggggggagtggaggaggaggaggcgaaggaggaggaggagagttggggaagtggttgtttttgggtgtagtgagatgtttttagttagggttaagtagtagtagtagtagtagtagtagtagtagtagtagtagtaatagtagtagtagtagtaatagtagtagtaaagggtttgtgttgttaagaggtttttggttttttttttttttttttttacggttaaagaggaggagggtggagggagggaggcgagttggaggggtgagggggtaggagtcgtggatgggggttttcgaagaagaagaaattttttttttttttttaggtttaattttttttttagggtttagggttggagggtgggggaaggaatttagtcgttttttttttatttttttgaatttaaggttgaagtggggtagaattagtgttttgtttttttaaaaatagaaataaaaggtgttttttttttgttattgtttttttttttattattagttgttgttgttgttggggtttttttgtttgggggggagggggggttcgggtagaagagacgggaggtatttattgcgtatgtttttttttgacgggtggttggttggttgaaggtaggaggagggggaggggaggaaatgagttatttttttagaaggcgtcgaggcgttagcgattcggaagatattgtagcgggaggtataggagcgggggcggggaggaggaggaagtcgttacgtttttaatatttttagttttttttttttttttaagggaaagtggaggaacggaagtgggcgtggacggagacgaaaggaggttacgtgtttgggcgggagaggggcggggtgggagaggtagtgcgtgcgcggggtatgtcgggagtggttgtgtacggttcgtagcggtaggtgaagtttagtagaggacgcggttaggcgattcggtgaagcgatttttgtaggcgttggtttttttttttgatttggtaaatgtaggtttttatgcgagaggtaatggtgggggtaaatttgttgtaaacgaaggttaggggcgtcggtggcgtaaggtgaatcgaaagtgggaggatggaaggttgtggagattgggaattgggaagggggtaggtttgtataggtcgggaaggttaggattaggcgagtttcgttttgtggttattttcgtttcgtgagtttgtcgaggaatttttgataagtgtagggattttgagtttatttttgtatcggggtagtaggtgaggagcgtgacggttcgagtgtaagagagaagggaattgtgaagttttagtaattgatttttatgattgtaggacggaggatttttatttagggatagagataagttttttgtatgtattttgattagatgtattatacgcgttgtttatattggatattgcgttttttatgttttattttttaattttttttggtattttggagtggttttggggaaggagtaggtagggaagttttgagtggagtttttttttatgttttgcgttgttgttataatataaagtttttgttttttttcggagagggatgtgggattgtgtagtttttaatgttgagttttacgattgatgaaggagaagggacgtgattaaagtttttttttatagtgtagatgagagttttaaaaggattgttttgttaagtttttttggttattatttttagtttttgagtttttggttttttaaatgttagttgtttttgttgaaaataatgaatttttattataaaattagaattaatttaaaatatttaagaaaggatttataaatttatattagtaaagtttttatagtgaaatagtgttggtttttttttattgtttttatataattaatataaagtattatagttttaatatgttttgtaaagatattttgaaggaatattatttttgtatgttttttaaaaattaagaatttaaaatttttcgtatttattatgttggtatttaattttgttgggtgggttttttttgtttgttttttgttttgagacggagtttcgttttgttttttagacgagtgtagtggcgcgatttcggtttattgtaatttttgttttttgggtttaagtagtttttttgttttattttttcgagtagttgaaattataggtatgtgttattacgtttggttaatttttttgtgtttttagtagggacggggttttattatgttggttaggttggtttcgattttttgattttaaatgattttttcgtttcggttttttaaagtgttgggattataggcgtgagttatcgcgttcggtcggtgtaggttttttaggtgtatattattagttaaagttattaattttttacgttttgttttttgtaagtttgggtagtggatttcgtttatgtattattgtttagttttta

SEQ ID NO: 416 - DNA, 2357 bp, Artificial Sequence
  chemically treated genomic DNA (Homo sapiens)
ttttacgtttttgttgcggtcgacgttttagtttttgtttttgtttttatagggtttgttttgtgtatttgtttttattttgttttgttttttatggaggaatattagtgattgatttgggatttagttttaatttagggtgatttcgtttttagatttttaattatatttgtaaagttttattattagggaaggttgtattttgaggttttgggcggatatgaattttgggggtaggatattgtttagtttagtgtcgggcgtcgttgtgggttaggttttttgatttttgtaagtttacgatggttatagagttttaaggaggaggttttttggaggaggcggtttagtttattagagaattagtatgttttttttttgggttttgggattagtatttttaacgataagtttttttggattacgttgattcgggttgagatttgtcgtttgtcgcgcgttttgggcggaggttagataggtcgcgtatttttaagttttgatacgttttttttttaaagggtggaggttttatagggtgagtgtaggttggggatgggtcgtggggttgtcgggaggggattagtgggggtttgtagtgttttcgggagggttcggggttgggggtaatcgagatttgtttcggtgggtgagtggagaagtatttggggggttttttttagcgttggagagaaatgggtgatgaagtttgggaaaggcgtggggggttcgaagcgtgtattacggtgagaaggttgcgcgtggtcggattttagttttttcgcgtttgcgaaaggttgagttgcgtcggtcgggggagggtcggaggttgtcgggggttgggggatgaagagtcgggggtagtttagggtagcgtatttttcgcggaggtaggaacggtaggcggtgcgatttttattaggatttttgttatcggaatcgcgggtttttgtcgggtcggaggcgtttgagagattttcgcggaacggcgcgtgaatttgcggtcgcggcggcgggttcggatggagatggacgttggatgggttgttttttgagtttggttttcgtggcggggtcggtttttcgtttttgtatttggtagatttgatgcggagttcgagggtggttgttggtttggggcggggaaggggttttttagatcgggggttttatttgttgggtttggggagtttatttggttttttttgattggtttggagttgtaggtgaggttattttaggaagttgttgtatttgagggagttcgggtcgttttgggggacgttggggtttgatttttggggttgggggttgtacgggtgggtcggggtttgtttgggttggggttcgcggtcgcgtggggtttggattggcgtttgtttggtttgggggtttttagtcgtatgtagtttgggtcgaggtcgggggttcgcggtcgcgtggggtttgggtcggggtttgtttggtttgggggtttttagtcgtatgtagttcgggtcgaggtttgtagttgcgtggggttcggtttttatggtttttgtgtttggatttcgttttttaattattttttttgtacgtttttttggaaaaggatatggggtttagggtggtggatgtggatattttttgaaatttattagttttggtttgtgatgtttggatggaggggttatagttacgtcggtttttagtttttttttagatattttagtttttggaggtagggttttttcgtgaggcgtattatttttgagcgttttatacgtttgtttttgggtatttttttgggtggtggtgtggtgcggttttgcgtttttatttaaattttatatggaaatggagtttgtagtgtgacggtggggtttggtggggagtgattgggtagtaggggcggatttttcgtgaatggtttggtttcgttttttttggtgttgttttcgagattgtgagtggttatttaattgtgtttcgtatttgttttgtttttttcgttttcgtttacgttatgtgagatatttgttttcgtttcgttttttattacggttggaagttttttggggtttttttagaagtagaaatatttgtgttttttatatagtttataaagcgtgagttaattaaatttttttttttataaattatttagttttagggttttttttgtttgtttgtttgtttgttttggtggaggcgggggtggatagcgtttttttttgtcgtttaggagggagtgtagtggggcgattttagtttaatgtattttttgtttttgggttgaagtgatttttttgttttagttttttgagtagttgggattatagttatgtgttattatgtttggttaatttttatatttt

SEQ ID NO: 417 - DNA, 2357 bp, Artificial Sequence
  chemically treated genomic DNA (Homo sapiens)
aaagtataaaaattagttaggtatggtggtatataattgtaattttagttatttaggaggttgaggtaggagaattattttaatttaggagtagagggtgtattgagttgagatcgttttattgtatttttttttgggcgatagagagagacgttgtttattttcgtttttattaaaataaataaataaataaataaaaaaaattttgagattgggtaatttatagagaaaagagtttgattggtttacgttttgtaggttatatggaaagtataggtgtttttgtttttggagaggttttaggaagtttttaatcgtggtggaaggcgaagcgggagtaggtgttttatatggcgtgagcgggaacgagaaagatagagtaggtgcgggatatagttaaatggttatttataatttcgaggatagtattaggagggacggggttaagttatttacgagaaattcgtttttgttatttagttattttttattaggttttatcgttatattgtagattttatttttatgtgaggtttgggtggggacgtagagtcgtattatattattatttaggaggatgtttaggagtaggcgtgtggggcgtttagggatgatacgttttacggggggattttgtttttaggggttagggtgtttgggaagaggttgggagtcggcgtggttgtggtttttttatttaggtattatagattagggttggtgggttttagggggtgtttatatttattattttgaattttatgtttttttttagggaaacgtgtagaggaaatggttggagagcgaagtttaggtataggggttatgagagtcggattttacgtagttgtagatttcgattcgaattgtatgcggttgaggatttttaagttaggtagatttcgatttagattttacgcggtcgcggattttcgatttcgatttaaattgtatgcggttgaggatttttaagttaggtagacgttaatttagattttacgcggtcgcggattttaatttagatagatttcgatttattcgtgtagtttttagttttagaagttaaattttagcgttttttagggcggttcgggtttttttagatatagtagttttttgaggtggttttatttgtaattttagattaattagagaaggttaaatgggttttttaagtttagtaggtgggattttcgatttagagagtttttttttcgttttaggttaatagttattttcgggtttcgtattaggtttgttaaatgtaggggcgaggggtcgatttcgttacgggaattaaatttaggaaatagtttatttagcgtttatttttattcggattcgtcgtcgcggtcgtaggtttacgcgtcgtttcgcggagattttttaggcgttttcggttcggtagaaattcgcggtttcgatggtagaggttttggtgggaatcgtatcgtttgtcgtttttgttttcgcggaggatgcgttgttttaaattgttttcggttttttattttttaattttcggtagttttcgattttttttcggtcggcgtagtttagtttttcgtagacgcgggggagttggaattcgattacgcgtagtttttttatcgtggtgtacgtttcgggttttttacgttttttttaggttttattatttatttttttttagcgttgaaggaaattttttagatgtttttttatttatttatcgaagtaggtttcggttgtttttagtttcgggttttttcgagaatattgtaagtttttattggttttttttcggtaattttacggtttatttttaatttgtatttattttgtggggtttttattttttggaggaaggacgtgttaaagtttggaggtgcgcggtttgtttaattttcgtttaaggcgcgcggtaggcgataggttttagttcggattagcgtggtttaaaaggatttatcgttaaaagtgttggttttagaatttaaggggaagatatgttggttttttgatgagttgggtcgttttttttaggaagttttttttttggagttttgtagttatcgtgggtttgtaagagttaaagggtttggtttatagcggcgttcggtattgagttggatagtgttttgtttttaaaatttatgttcgtttagaattttagaatgtaattttttttggtagtagggttttgtagatgtaattaaggatttggggacgaggttattttggattgaggttgagttttaagttagttattggtgtttttttatgaagagtagagtagaatagagatagatgtatagagtaggttttgtgaggatagaggtagggattggagcgtcggtcgtagtaggggcgtggag

SEQ ID NO: 418 - DNA, 2460 bp, Artificial Sequence
  chemically treated genomic DNA (Homo sapiens)
tcggaaaggttttgtattagaggttaaagtatttggttttagtaaatgattaagtgtttgaaatagttagttttgtgttttagagaaatattttatatattttaaggttagtggggatttaattcgagtataaattagtaggattaaattatgatatatatatagagaatatttttttttttaaattagattttttgattttatagaattatttaattttttttgtttttattatgatttgtgggtatttgattttattgtttatggaattttagatttttttgtttgaaagggaagggacggttaggcgtagtggtttatgattataattttagtattttgggaggtcgaggtaggtagtttatttaaggttaggagttttagattagtttggttaatatagtgaaattttatttttattaataatataaaaaattagttaggtatggtggtaggtattcgaaattttagttatttgggaggttgaggtaggggaatcgtttgaattcgggaggcggaggttgtagtgagtcgagattgcgttattgtattttagtttgggtaataaaagcgaaatttcgttttaaaaaaaaaaagaagaaagaaaagaaaagaaaagaaaaaaagaaagggaagggattttttttgtttaaatgttatttttgggttaggttgttgtgttttttttttttaacgttggtgattagaaattttttgtttttttgttatggtggtgggtatggtgatgtggggtatagttgggagttttaggtttatacgggagatttaagattgtatttttttaggaataaagttagagttttcgtttaaatttttatatttagtttaggttttgattcgtagaaggttttttataaatgtttgttgaattgttttgcgttgttgggttacgcgaggaaaatggaattaagagttcgttgattcggagggttggtttcggcgtattattgattggttttagggttttgagtcggggatttaatttttcggtttttcgattttttcgttggtaaaatgaatttgatatcgttttgatcgtttttgtttagtaggggtgagttttattagaggttgaaggcgtgagaaaggtatagagcgttgtttaggtagggagttattcgggttgttatttttcgcgttcgttggagatcgtaagttaggagagttggtttagtcgttagtaattatttgcgtttcgaatataatatttgcgttttattttcgtataggtagatggtgtaatttggtcgcgtcgtattttttcgtattttattcgcggcggttttgtcgtgatagcgttcgcgttaggtgtcggtgtgtaggttggttcgggacgttgcgattgtagtcggtaggaattcgcgcgaggggaaaggggcgttgggattaggttatgggatgtttaaggtattttttttaagtttaagggaataaggttagttttttttggatttttaaaatttttttgaaaggagagtagggagtaggtattagttttttgcgttttacgtggagagattggggtttagagagacgaggtggtttgaggatggatatatatatattaagtgatgggggcggagggaagtttaagtttttaatttcgggtttattattttttttcgggttggtattgttttgattgtatagattagttgattcgttttgggtaagggtggaatttttttttttgtttagggttggttttgtttttttttatttcgtggttttgttatttttgtgttatttagtttttttttaaatattacgtttattttatatattttaaggttagtggggatttgagttaagtataaatttgtaggattaaattatgatatatatataaagaatatttttttttttttttttttttttttttttgagacggagtttcgttttgtcgtttaggttggagtgtagtggcgcgatttcggtttattgtaggttacgtttttcggatttacgttatttttttgttttagtttttcgagtagttgggattgtaggcgtttgttattacgttcggttaattttttgtatttttagtagagacggcgttttattgtgttagttaggatggtttttattttttgatttagtgatttgtttttttcggttttttaaagtgttgggattataggtatgagttatcgcgttcggtaaaagaatatttttttttaaaagtagattttttagttttattgaattatttaattttttttgttttttaagaatcgtggggagttgattttattgtttatggaattttaggtttttttgtttgaaagggaagggatttttgttgtttaaatgttattcgagttaagttgttatgttttttttgtagtttgtaattatttatgttggtaattagaaattttttgttttttttttattgaaatttattagttttttgaaggatttagtcgtttttat

SEQ ID NO: 419 - DNA, 2460 bp, Artificial Sequence
  chemically treated genomic DNA (Homo sapiens)
atagggacgattgggttttttaggagattgatggattttagtgaaagagaagtaaggagtttttaattgttagtataggtgattataggttgtaaagaggatatagtagtttgattcgggtgatatttagatagtagaagtttttttttttttaagtaggagaatttaaaattttatgagtagtagggttagttttttacgatttttggggaataagaagagttgggtagtttaatggaattgaagaatttatttttaaaaaaaggtgtttttttgtcgggcgcgatggtttatgtttgtaattttagtattttgggaggtcgaggggggtagattattaggttaggagatggggattattttggttaatatagtgaaacgtcgtttttattaaaaatataaaaaattagtcgggcgtggtggtaggcgtttgtagttttagttattcgggaggttgaggtaggagaatggcgtgaattcgggaggcgtagtttgtagtgagtcgagatcgcgttattgtattttagtttgggcgatagagcgagatttcgttttaaaaaaaaaaaaaaaaaaggaaaaaaaagtgttttttgtgtgtatgttatgatttaattttataggtttatgtttggtttagatttttattaattttagggtatgtgagatgggcgtggtgtttgggaggaggttgggtggtataggagtggtaaggttacggggtggaaggaggtaaagttagttttgggtaaaaggaagaattttatttttgtttaagacgagttagttggtttgtgtagttagagtagtgttagttcggggaggaatggtggattcggagttagagatttgggttttttttcgtttttattatttaatatgtgtgtgtttatttttaggttatttcgtttttttgagttttagtttttttacgtggaacgtagggagttgatatttgttttttgttttttttttagaggggttttaagaatttaggagaagttggttttatttttttggatttgagaggggtgttttgggtattttatggtttggttttagcgttttttttttttcgcgcgggtttttgtcggttgtagtcgtagcgtttcggattagtttgtatatcgatatttggcgcgagcgttgttacggtaaggtcgtcgcgggtggggtgcgggagggtgcggcgcggttagattgtattatttgtttgtgcggaagtggagcgtaggtgttgtgttcggggcgtaggtaattgttgacggttgagttagtttttttggtttacggtttttagcgggcgcgggaggtggtagttcgagtggttttttgtttggatagcgttttgtgttttttttacgtttttagtttttagtgagatttatttttgttaagtaagggcggttagggcggtattagatttattttgttagcgaggaaatcgagaagtcgagaggttaaattttcggtttaaggttttggagttagttaatagtgcgtcggaattagtttttcgggttagcggatttttaattttatttttttcgcgtgatttagtaacgtagggtagtttagtagatatttatggagaattttttacgggttagggtttgagttaggtgtaggggtttggacgggggttttggttttgtttttgagagggtgtaattttaaatttttcgtgtggatttgaggtttttagttgtattttatattattatgtttattattatggtagagaagtaagaagtttttaattattagcgttgggaaaagaggatatagtagtttgatttaggagtgatatttagatagagaaagttttttttttttttttttttttttttttttttttttttttttttttttttttttgagacggagtttcgtttttgttgtttaggttggagtgtagtggcgtaatttcggtttattgtaattttcgtttttcgggtttaagcgatttttttgttttagttttttaagtagttgggatttcgggtgtttgttattatgtttgattaattttttgtattattagtagagatggggttttattatgttggttaggttggtttggaatttttgattttaggtgaattatttgtttcggttttttaaagtgttgggattatagttatgagttattgcgtttggtcgtttttttttttttaagtaggaaaatttaaaattttatgaatagtagggttagatatttataagttatggtagggataagaagagttgggtagttttatgggattaaagaatttagtttaaaaaaaaaggtgttttttgtgtgtatgttatgatttaattttattggtttatgttcgggttaaatttttattaattttagggtatgtgaggtgtttttttggagtataagattggttgttttaaatatttggttatttgttggggttagatgttttggtttttggtgtaaggttttttcga

SEQ ID NO: 420 - DNA, 2301 bp, Artificial Sequence
  chemically treated genomic DNA (Homo sapiens)
tataataaagaaattagaatatttgggagtaaaatttagatttgggaattatttagggaaagtttgtttcgatttgtagtagagttttgggattgattttttaaattgtagttattttttatttttggttttgtgaaaaatttgagatttcggttttattagttttttttttgaaaaatagggcgtgttttagttttaggtatgtaaagttaaacgttttaaatcgttttgtattcgaattagttaatttaagaataagtttaatagtattgttaagtaagagtttaataatttagcgtttcgcgatattttttggcggcgttgatcgtttgttcgggatattggtttagaagtacggtatagggtgtttttatattttagaaattaagatagtttttaggttagaataaagtttattttggattgggtataattttattttatttttgcgattttttttttcgtttttcgttttttgtttttttttttttttttttttaatttttagcgcgttattttaacgttttagtttcgttcgttaagtttatgcgtttgggatttgttttttgaattttaagttcgaaaagttaggaattttcgattatggatttttttttgttaaattagagggagtgaaatttcgtttttttttttattttatttttttattttaaattcgttagattaagttcgttgattaggcgcgtatttaatggtagtattttttttaatattttttttattagagaggtaagtgttttatatttgtacgtaaaggtttttgagtggttaggtggagaggttcggatgtttttttttggagcgggtttcggggagttgtagtagttttagttttaggtattatagttaagcgagcgcgttttgggttcgttgttttgtacgtagttggaggtttgggtcgttgattttttggttacgtagttaattcgaggatgtgtgtttcggggttcggttttgtttcgggtgagaaggttagttattatttagggtgtaggtgttatggtttggaaatggtaatatttgagtaaataggtgggcgtcgtttttcggcggtgcggtggtcgttggttcgtagcgcgttttagttttcggcgtcgtcgtcgtttttttgttttgcggatttagttagttttcgggtggtttagttgggtggtttcgaggtttgtttttttgggttgcggcgggaggcggggattgtagtgtcgagtgtagggcgttttagtcgggttggcggtttacgttgcgttcgggtttttgtcgggagggcgttttggcgttaaattcgggcgggtaggggggtggagagtcgattgagtttatttttatttagaatttagaggttggtggagatagagagttttttaaatggatgtaagttttttgaaagtttgggtcggaagtttcgaaattttttgttacgtaaagttttagttagtttttagggttcggttttggttttttttgtgtaggttcggaagtgttcgttcggtttttttattgtttggaggggtttagggtcgcggatagattcggataaggtttcgtttatttttagtttgttttagttgattaatggcgggattggttgtaatgcgtgttttgagattttttttaggatttgttattttaattttgtaatatgaggtaaggttatgttttttaaagtggagatattttttttgttttttttgtttttttaaaggaagtatatttttttgatgtgttcgacgggatttgtagattttagattttattgtttttttttaaaattatatatttgaaaagaatatatttcgattgttgttaaaatttgttagatttttatgttttaatcgttggtaatgttttaataatggaattttattatttttgtacgtgttgttgaaaagagagttttttagtaaaagtgtcgtgtttatgagttttttgaggttgtgtaaggttatttattaaggattttaaaatgataggtaggttatttttggatttttaattatatgtttaaaatttaaagatttttagtttggagaggtttggttttgttttggtttggttttaaaagtttattttttttttttttttatttttaataatatagtatttaattgttttattaaattgttttaggttttggaattttggggaggtattttttaaatggtattgttttttttgtatttatgttaatataggaagttgtattagaaatttaagttgataatttaataaggtttgattaagtatatgaggtttttttaaaaaaattgacgtagtatatat

SEQ ID NO: 421 - DNA, 2301 bp, Artificial Sequence
  chemically treated genomic DNA (Homo sapiens)
atatgtgttacgttaatttttttaaaaaaattttatatatttgattaggttttattaaattgttaatttaagtttttaatgtaattttttgtgttgatataaatatagaaaaaataatattatttgaagagtgtttttttagggttttagagtttggaataatttaataaaataattaagtattgtgttattgggggtgggggggggggaggaatgagtttttaaaattaaattaaaataaaattaaatttttttagattgagaatttttgagttttgaatatgtgattggaaatttagaggtagtttgtttgttattttgagatttttgataagtaattttgtatagttttaagagatttatgggtacggtatttttattggagagttttttttttagtaatacgtgtaaaagtggtaaggttttattattaagatattgttagcgattaaaatatggaaatttgataagttttaatagtaatcgaagtgtattttttttaagtgtgtggttttgagaaaaagtagtggagtttggagtttgtaggtttcgtcgggtatattaagaggatgtgttttttttaggaaggtaggaaaggtaaagagagtgtttttattttaaaaaatatggttttattttatattgtaaaattaaagtgataaattttggagaaaattttagagtacgtattataattagtttcgttattagttaattaagataaattgaaagtaaacggagttttgttcgagtttattcgcgattttgggtttttttaggtagtgggaaaatcgggcggatattttcgggtttgtataaagggaattaggatcgagttttggagattagttggggttttgcgtggtagaaagtttcgaggttttcggtttagatttttaggagatttgtatttatttaggagattttttgtttttattagtttttaaattttgaatgggaataaatttaatcggttttttatttttttgttcgttcgggtttggcgttagggcgttttttcggtagaggttcgagcgtagcgtgaatcgttagttcggttggggcgttttatattcggtattgtagttttcgtttttcgtcgtagtttaagggggtaggtttcggagttatttagttgggttattcgggaattggttgagttcgtagagtaaaggggcggcggcggcgtcgaaagttggagcgcgttgcgagttagcggttatcgtatcgtcgggaagcgacgtttatttgtttgtttagatattgttatttttaggttatgatatttgtattttgaatggtgattagtttttttattcgaggtaaggtcgagtttcggggtatatattttcgggttgattacgtggttagagggttagcggtttagatttttagttgcgtgtagagtagcgagtttaaggcgcgttcgtttggttgtggtgtttgaggttggggttgttgtagtttttcgaggttcgttttaggaaaagatattcgagtttttttatttagttatttagggatttttacgtataaatgtaggatatttgtttttttggtggggaaaatgttggagagggtgttgttattgggtgcgcgtttggttagcgaatttaatttagcgagtttgggatggggaagtaggatggagaggagagcgaaattttattttttttaatttagtaggaggaagtttatgatcgaggatttttggtttttcggatttgagatttaaagaataagttttaggcgtatgggtttagcgaacgagattgagacgttaaagtagcgcgttaggagttgggaagggaggaaagaaaagatagaagacgggaaacgagaagaagaatcgtagaggtggagtggagttatgtttagtttagagtaaattttattttaatttagaggttgttttgatttttaagatgtagagatattttatgtcgtgtttttaaattagtgtttcgggtaaacggttaacgtcgttaagagatgtcgcgaaacgttgagttattaggtttttgtttagtagtgttgttggatttgtttttaagttggttaattcgaatgtagagcggtttgagacgtttagttttgtatatttagggttgagatacgttttgttttttaaaagggggattgataaagtcggggttttaagttttttataaggttaaagatgaggagtggttgtagtttagaaagttaattttaaaattttgttatagatcgaggtagattttttttaaatggtttttaaatttgggttttatttttagatattttgatttttttgttgtg

SEQ ID NO: 422 - DNA, 2362 bp, Artificial Sequence
  chemically treated genomic DNA (Homo sapiens)
ttagtttttggagaaagaattttataaaggatgggaaattttaaataagtgtaatttattttgggttgatttagtgttttggataatgtgttttgttcggttcgtgttttagatattttttgtaggatatcgtagtttggagatttttttttttcgtaattgattttatatatttaggattattattttacggtagttgtgaatatattaagaggaagaaaataagtggtttattgaattgtagtttttttatttatatgtgcgtgattttttttttttgtaagaaggaaaaaaataaaacggtttttttggagagggttagggttttttaagtatgttagggattaaaagtgggaaattgggaaaatgtaattttaacgtgttttgttttttaacggaatttatgtttgtaaaatatattagaagtatagtgtttggttttgtaagttatttttgttgttgttttttttttgttacgtggaggtcggggggattgggggttggaggaggtgttttttttaatatgattgggcgtgtaatacgtttgtattaattttttatagttagatatgtgttttcgaataaaggagtagtggagataggtagagatgggggtttgatatagtttatagattttgtgttttaatagtattttataaatgatttgtttaattttaacgtttattattataagagatattggagtaaaatgagaaaattggagttatttgaattaattttttttggggagtgggggggaggggaattattaatttgaatatttgtattataaattaaatttagtaagtttgttttttataaatggatttgaagtatttattttttttaaagatgaaggttggagataaagtaatggattgaaatggaaagaaggatgttaagggtttgaaaatatacgggttttttatatcgatttttgttatgttatagtaatatatttttttttttgagaaaattgtgtacgttaaattttaaaaattaaatattgaaaggatgtgtaagtttaaaagggtttaatagggttagaattttgattcgaatatattaatttatttttaagtattattttggtttaaaggcgaggaggaaggtaggtagtaaagggagaaaaagagggagattattgaattatttaataaaagaggttatttattattttaatttattgtaagatatatatttttgatataagagaattttttagaggtcgaataaagcgtgtaagtatttttgagtaatgtatttgttttcggagagggggttcggaagtttaacgagggtttagcgaatagatttttgttaatttgtttatttttttgaattggagtcgggttgcgatgggttgcgatttttaggacgatatatttaattagaataaaatagaaaaaaaaaatgttgtaaaagtttattaaattgttgtatttgtgtttttgaatgtgggtggtattttttttaaaaggtaaagtatggtttgtgaaggagaaaggggaaaggggaggtgggagtggggagaaggggtcgtacgtatagtttggtaagggaagttttggttgagatttttcggttaaggaagggtttttagcggttttttagttagggttgcgacggagtagttatttgtttagagcgttttttttttttttttatttttattttttttaagattcgtttttttgtcggttgaaatttatcgttcgtgtttaaatttattttttagtcgttttttttttcgttttattaggaaatagtgggcgaattttgtattttaattttttttgttcgagtaggggaaggaaacggggttttaatttcgttttgaaacgcgtcgggttgattttattattattcgttagttagagaagggcgtggggggttcgcgtttcggatttaataaagagaagggggcgttttttttaacgttttgttaaagtataaggaaatttttttttttttttcggaagagacggtgttttattttatttcgatagaggggggaattttaggagaaagcgcgggattaattttttttttttataaggtagggaaattaaattttattttcgtaaaataaggttgagaatttttttttacgttatttatttacgaaaagcgagaggatttttgttttttagtaaaaatacggggaagagttttttttaaaaaaataggttggggtttttattaaaagggttggagatgtattttttttttttttaattcggttttttaggggatagttaaaaaatatttttcgttaaaaaatataagtgttatagagtatttatttaaatgatttttaattataaggatggagaagggatttgaatgaatttttattttt

SEQ ID NO: 423 - DNA, 2362 bp, Artificial Sequence
  chemically treated genomic DNA (Homo sapiens)
gaaggtgggggtttatttaggttttttttttatttttgtaattgggggttatttgggtgggtgttttatagtatttgtattttttggcggggggtgttttttagttattttttagaaggtcgaattggggaggggggagatgtatttttagtttttttgatgaaaattttagtttatttttttagagaagattttttttcgtgtttttgttaaagggtaggggttttttcgtttttcgtaggtaggtgacgtgagggaggatttttagttttgttttgcgggggtaaggtttggtttttttgttttgtagggagaggaagttggtttcgcgtttttttttggggtttttttttttgtcggggtaaaatggggtatcgtttttttcgggagagaaaaggagatttttttgtgttttggtagggcgttaaaggaagcgtttttttttttttattaagttcgaaacgcgggttttttacgtttttttttggttggcgggtgataatggggttagttcggcgcgttttagggcgaggttggggtttcgttttttttttttgttcgagtagaaggagttggggtgtagggttcgtttattgttttttggtggggcgagagaagaggcggttggagagtaggtttggatacggacggtgggttttagtcggtaggaaagcgagttttggagggaatgggggtggagaggggaagagaacgttttggatagatggttatttcgtcgtagttttggttggggagtcgttgaggatttttttttagtcggggggttttagttagggttttttttgttaggttgtacgtacgattttttttttttatttttattttttttttttttttttttttttatagattatattttgttttttaaaagaaatgttatttatatttagagatataagtgtagtagtttggtgagtttttataatattttttttttttgttttgttttaattaaatgtatcgttttgggaatcgtagtttatcgtagttcgattttagtttaaggaaataaatagattagtaaaggtttgttcgttaagttttcgttgggttttcgggtttttttttcgggggtaggtgtattatttaaaggtgtttatacgttttattcgatttttaaggagtttttttatgttagaagtgtatgttttataatgggttgggatggtaagtagttttttttattgagtaatttaatgatttttttttttttttttttttattgtttgttttttttttcgtttttagattaaagtgatgtttgagagtgaattgatatgttcgaattaggattttaattttgttgagtttttttagatttgtatatttttttaatgtttaatttttaaaatttgacgtatatagtttttttagaaaaaaaagtgtgttattgtaatatgataaaaatcgatgtaaaaggttcgtatgtttttagatttttggtatttttttttttattttaatttattgttttgtttttagtttttatttttgaagaaagtggatattttaagtttatttgtaggagataagtttattggatttgatttatgatgtaggtatttaaattaatggttttttttttttttattttttaaaaaagattggtttaagtagttttaatttttttattttattttaatgttttttgtggtgatggacgttaaaattgagtaagttatttgtaaagtattgttgaagtataaaatttgtaaattgtgttaagtttttatttttgtttgtttttattgtttttttgttcgaaagtatatgtttgattgtgaaaagttgatgtaaacgtgttatacgtttagttatgttggagggaatattttttttagtttttagttttttcggtttttacgtaataaggaaaaaataataatagaaatgatttgtagaattaaatattgtatttttgatgtgttttataagtataagtttcgttaaaagataaaatacgttgaagttgtatttttttagttttttatttttgatttttgatatatttagagaattttggttttttttaaaagaatcgttttgttttttttttttttataaggaaaaaaggttacgtatatgtagatgaggaaattgtaatttaataggttatttgtttttttttttttaatatgtttataattgtcgtagagtggtgattttaggtatgtaaaattagttacgggaggaagaaatttttaaattacgatattttgtaagaaatgtttgaagtacgaatcgaataaaatatattatttagggtattgggttagtttaaaatgaattgtatttatttgaagttttttattttttgtaaaattttttttttaggagttga

SEQ ID NO: 424 - DNA, 2568 bp, Artificial Sequence
  chemically treated genomic DNA (Homo sapiens)
gttttttaggggttgatcgttgtgtatttagtagggaagttgaggcgggcggtgttacgttttaggtttagggtttatatatttgttgggttagttttttggtgggtagtataattagggtacggatgtggtagattattttcgaaagtagggtttgagggggaaggagcgtttgcgttagtaaggttgttatttgttttttgtatattcgttgtagagaaaggggatttttatatagatttgtattatagggatgacgaaggttagtgtttttttattgtttgttggggtagaaatatagaggtcgttaggtcggtagttatttttgtttattagaaatttataggttgcgttttttaggagggtaggaattatagttgtttggattggatgaggaaaggcgagagagaagtcgtgtttacgtttaggtttaggtttgtcgtttttttgtttgtgatttttgggttgggttgttttgttggaggtttgggaatcgttttttagagggatggtattaaggtttagaggaacgttagttttaggagatttaagtgggaattatgagtttgagagtgttgagattatatttggtatcgatgtggtagggacgtttgatttacggttatttatagttttgtgtgtgggtgtttagggaggtgtttttttagttgtttgttcggggttggggtatttggaaagtaggacgagatgtcgtgtgttcgtagttgtttttgtaggttaggatggacgttagggatgttttcgataggaattaggttttcggtgatattttttttgatatagttaggtttagttagttattttggtaggaaaggttggatttgttattaaaaagaaagagaggttaggtgagcgttttttaggttttcgcgtagaagtttacggtggaaaaagttaggggagggaggttggggaaatttttgtcgtttttagtttttttttagttttaggatgcgttttttatatagtttttagaagttaaatagtaaaagtagatgttattttttgagtaaatttattttgtagttttttattaatttatagtggtatttattttttcgtagttaggaggttttgtgatttggcgttcgtttgttttagttacgtcggcgtttttgtttcgaggtttttgtttggtatttttaatttttaattttgatttggttttaagtttttgtattttaatttaaagagaattttttttatttgttttatttaaggtgttcgagtattttgttaaatttttcgttttttttatttgtttcgtcggaaatttttttatcgaaaattatacgtgttaagtaaaaatattaacggttaggagtttgtagaacggtttttgatttatttttgaggcggtgagcgtatagtaggaaatttcgtacgtttacgtaaatatattttgtagaattggcgcggcgcggcgggaggataggggtaagtttagtagaggaaacgggagttttgtacgtgtaggatttagatttttaggcgatgaaattgtagatttggtagcgaggcgcggttgtgattcgggaatattcgttgaacgaaatttttcggggcgatcgtcgtatttaagaattcgcgtagtttatttttttacgtcgattattttttcgttcgtcgaggtttattttcggcgttttttttttttcgaatttttttagtattaggtcggggattaggggttcggtcgttttttttagggtcggtttatttggggtcgtttcggcgttggcgttggtgttgcgttttttcggcgttttttcgttgttttttgcgttgggtttttttggcgttttttcgttgttttttgcgttgggtttttttggcgttttttcgttgttttttgcgaggtagatatttattcggtagcgcgttagtatcgagtcgtcggcgttttagagggagttcgttcgtttcgcggtttatttgcgttcgcgttttcgtcgttcgtttttcgtcgttttttttgcggcgttttcgggtttttcggtttcgcgtcgtttattcgtcgtcgtcgtcggggtcgtcgtcgttttttggtcgtcggttcggtcgatgtagtcgtttcggtttgcgcgggttttcgttgttgttgtcgttcgcgggttcggttttgtagtcgttcgagtagcgcgcgggttttgtcgtgcgtttcggttttcgcgtttttcggtttcgtcgtagttgtcgtatcggggttcgggtatcgcgcgacgtagaatagcgttatggttagtcgtacgtttgggattcgggcgtggcgcgttgcgatgacgtcggcggtacgtttgcgattcgggtttcgcgtaaaagatggggttggggtacggcgcgtagagatgacgtcgggttttacgcgtagtggtgacgttacgggagcgtcggcggttgagaattcgcgttgtttcgtgttgggggcggtatggagcgggagtcgggcgtcgcgggagttcgtcgggttttgggtcgtcggttggaggcggtgttggcgagtcgtagtgaggttaacgtcgtgttcgatattttggtcgtgttgta

SEQ ID NO: 425 - DNA, 2568 bp, Artificial Sequence
  chemically treated genomic DNA (Homo sapiens)
tgtagtacggttaggatgtcgaatacggcgttggttttattgcggttcgttagtatcgtttttagtcggcggtttagagttcggcgaattttcgcggcgttcggttttcgttttatgtcgtttttaatacggaataacgcggatttttagtcgtcggcgttttcgtgacgttattattgcgcgtagaattcgacgttatttttacgcgtcgtattttaattttattttttgcgcggagttcgagtcgtaggcgtgtcgtcgacgttatcgtagcgcgttacgttcgagttttaggcgtgcggttggttatggcgttgttttacgtcgcgcggtattcgggtttcgatgcggtagttgcggcggggtcggagggcgcggaggtcggggcgtacggtagggttcgcgcgttgttcgagcggttgtagagtcgggttcgcgaacggtagtagtagcgggagttcgcgtagatcgaggcggttgtatcgatcgagtcggcgattaggaggcgacggcggtttcggcggcggcggcgggtgaacgacgcggagtcggggagttcggaggcgtcgtagggaaagcgacggaaggcggacggcgaggacgcgggcgtaggtgggtcgcggggcgagcgggttttttttggggcgtcggcgattcggtgttgacgcgttgtcgggtgggtgtttgtttcgtagaaagtaacgaggaggcgttaggggagtttagcgtagggagtagcgaggaggcgttaggggagtttagcgtagggagtagcgaggaggcgtcgggggagcgtagtattagcgttagcgtcgaggcggttttagatggatcggttttggaggaggcggtcggatttttggttttcggtttggtgttgggggggttcgggaagaggaaggcgtcgaaggtgagtttcggcgggcgggagggtggtcggcgtgagagggtaggttgcgcggatttttaagtgcggcggtcgtttcggaagatttcgtttagcgaatgttttcgggttatagtcgcgtttcgttgttaggtttgtagttttatcgtttaggggtttggattttgtacgtgtagagttttcgttttttttgttaggtttgtttttgttttttcgtcgcgtcgcgttagttttgtaagatgtgtttgcgtgaacgtgcggggttttttgttgtgcgtttatcgttttaggagtaagttagaggtcgttttgtaagtttttgatcgttggtgtttttgtttagtacgtgtggttttcggtaaagagattttcggcgagataggtgaagaaagcgagaagtttgatagagtgttcgggtattttaggtagggtaggtggaggaggttttttttgagttgggatgtaaagatttgaagttaggttaaggttgggggttgggggtgttaggtagaggtttcgaggtagggacgtcggcgtggttggggtaggcgagcgttaggttataggattttttggttgcgggagggtgggtgttattgtgggttgatgggaggttatagagtgagtttgtttagggagtggtatttgtttttattgtttaatttttgaaggttgtatggaaagcgtattttggggttgagaaggagttgaagacgatagaggtttttttagttttttttttttagttttttttatcgtgggtttttgcgcgagagtttggaaagcgtttatttggtttttttttttttttgatggtaggtttagttttttttgttaaggtggttggttgagtttaattgtgttagaaggaatgttatcgaagatttggtttttatcgaggatatttttgacgtttattttgatttgtagaagtagttgcgggtatacggtatttcgttttattttttaggtgttttagtttcgggtaggtagttgagggaatatttttttgggtatttatatataaggttgtgagtggtcgtgggttaggcgtttttgttatatcggtgttaagtgtggttttagtatttttaagtttatggtttttatttgggttttttgaggttggcgtttttttgggttttggtgttatttttttggggagcggtttttaggtttttagtagagtagtttagtttagaggttataggtagggaagcggtaggtttaggtttaggcgtaaatacgatttttttttcgtttttttttatttagtttaggtagttgtgatttttgtttttttggagagcgtagtttgtgggtttttggtgggtagaggtggttatcggtttagcgatttttgtgtttttgttttaataggtagtgggaagatattggttttcgttatttttgtggtgtaggtttgtgtgagggttttttttttttatagcgggtgtgtagaggataggtaatagttttgttgacgtaggcgtttttttttttttaggttttgttttcgagagtggtttgttatattcgtgttttggttgtgttgtttattaaggagttggtttagtaggtatgtggattttagatttggagcgtggtatcgttcgttttagtttttttgttgagtgtatagcgattagtttttgggggat

SEQ ID NO: 426 - DNA, 934 bp, Artificial Sequence
  chemically treated genomic DNA (Homo sapiens)
tgttgttgttattgtaaagatgttgttaaggataaaagtttatgtagatgtttcgggtttgggtaattttatttttgcgtattgtttttttagatttttaagtttttttttttattttttataattttatttagggtttagagtaggtgattgtagcgatttggttttaataaaatcgaaagtaaacgttttttgtgaaaagtttcgggttgtaaattagaaatgtttatgttgattttttattgtatggaaaaagtttttgggcgaaatagttttgagttcgagaacgatttaaaaagttggagttgtgtatatagttttgagcgtttgaagttgtttaattattgtgtgattagaaagaagagtgacgcggtaggaagaagaagtcgggttttggggagagcggaggcgggttagggtgggtaaaggtagtcgatgttaggaatataatcgtttttcgcgtcgttttaaattaagagatggtagcggttttttagcgtattgttggaagtgtgttttagtagatagggtgtgggtaagatgcgcgggtagatagttcgtattcgttatatgtgttggggtgcgagatttagatttgcgttatttcggtttttattttttattttttgtttttgttcgtaacgtttagagattgtttttttttttttatatttacggttttgttatttgaaggaaagggttggttggttagtatttatcgaataaagattgggcgtcgtaggtagtattaaaattaagattatttgagaaatttagagaaaatcgagggatagcgatgggtttagggttggataaggaataatgagttttttttttttttttttatagacgttttttttacgcgggaattcggttttttttttttcgacgtagagagagaagcgattttataggtggaaaatttgagatcggt

SEQ ID NO: 427 - DNA, 934 bp, Artificial Sequence
  chemically treated genomic DNA (Homo sapiens)
gtcggttttagattttttatttgtggaatcgtttttttttttgcgtcggaagaaggaggatcgggttttcgcgtgaaggaggcgtttgtggggagggaggagaagggtttattattttttatttagttttagatttatcgttgtttttcggttttttttaagttttttaaatagttttaattttggtgttgtttacgacgtttagtttttgttcggtagatgttggttaattagtttttttttttaaatgatagggtcgtggatgtaaaagaggaaaaatagtttttgagcgttacgaatagagatagggaatggggaatgaaagtcgagatggcgtagatttagatttcgtattttagtatatgtggcgagtgcggattgtttgttcgcgtattttgtttatattttgtttattggagtatatttttagtagtgcgttgggaaatcgttgttattttttagtttggaacggcgcgaagggcggttgtatttttggtatcggttgtttttgtttattttgattcgttttcgttttttttaagattcggttttttttttttgtcgcgttatttttttttttggttatataatggttaaataattttaaacgtttagagttgtgtatatagttttagttttttaaatcgttttcgggtttaaagttgtttcgtttaggagttttttttatataatgggaaattagtataaatatttttaatttatagttcgggattttttataggagacgtttattttcgattttattggaattaaatcgttgtagttatttgttttgagttttgaatggaattgtgagaaatggagggggaagtttaggggtttggggaagtagtgcgtaggaataagattgtttaaattcgaagtatttgtatgggtttttatttttggtaatatttttgtaataataatagta

SEQ ID NO: 428 - DNA, 2359 bp, Artificial Sequence
  chemically treated genomic DNA (Homo sapiens)
taagtttatatatgaaatgaggttaataattgttttgttaatttgttgagaatattaaatgagataatgtatataaagtgtttttgtataaaatttggtatataaatatgtaaattaattttttaataagataatgtataattttggtataatggtagtttaattaatagttgttatttttttttagggttaagattgtaatttttttttattgtttaaagaataagatgagtgggtgaaaatatgtatataaattaataaaacggttgttttattaggtttgtagaaatattgaaagatatacgtttttagatatattttttttaattaaattttaattagaagtttaggattattgaggtataaaagaaggacgggatttaaatgagcgaagtaatttttcgggttatagttgtaaagttaatataggaatagagtggagttagtatagtaaaggttttaagaaaatggagtttggagttaaattgtttgtatttgaattttgtttatattttttattcgttttacgattttgggtaagttattaattttattttttttttgtatgttaattttaaaaaggggcgggatagagaggtggggtgtagtttatataataatagtgtttattttatagagttatgagaagtagataatatttgtaaagtgtttagaatagtgttgggttggtatatagtagatgttatttatttttttaaaaaattcgatagtagtaagagtttttatattatgtgagttagattaagaaaggttgtggtatagtttaaaattatttttgtttattttttaaaataagtttatagtagagaataagatatcggaaaatataaatatttttttatattcgaatttatttgaattttaagatgtagatacggagagtttagagtgttattagtatagggtagagaggttgaagagtttaggaatagatatagggtgggggaaaggggtaggggtaacgacgttgatttttggttaataaagtttttttaggttgcggagtaattttttttgttttttatttgttcggtttatttttggttaagaagattttgtcgttaaatttttatatttagtttaggtcgtagtgtatagattggttttttcgaagttttttagcggtagttcgatttcgaagtttatcgaggtattcgtgagaggagatgttatttagcgtagattatatttgttttgaatttttgataatcgtagtttaaagaatgataaattataaaggtcggaaatgcgttatcgcggttcgtttttcgcgaaatagcggtttcggttgtgttttttttaggaaggtcggaggtttttatatttttgtggtcgttattttgaatttcgtttgtagttttaagtgagatattaggtgatatattgttttttacgcggtaatataataacggttaatatagtgttttaatacgtattaatttattatttcgtataataattttgtgagttaggtataattatttttatttaataggtgaggaaattgaagtatatttttatatttattagttgttattttttgtaaagaatatttttttttttttttgtcgttttattttattacgatgaatttatggatttttttataaataattattgttattattatgttgatgtttaaattatttaaaatttggttagttggagtttttttatattgtttttttttttttttttttttgataaagtttttaggttggagtgtagtggatgcgattttagtttattgtaattttcgtatttcgggtttaagtgatttttttgtttcggttttttgagtatttgggattataagaatatattattatgttttagtgaggttggttttgaatttttgttttttaagtgattcgttttttcggttttcgaaagggttgggattatagaagtgagttatcgtattcggttataaataggtttttatgttttttgataagtttttaatagtttttgtgtattttatttttttataaaagatattttagttttattttatattatttttattttaaatttagaattattattgttttatgaagttatagtatattagtgaaaaatggtatatagaaattaagatttggatttcgggtaatgaataattttattgttattgtgtttggtattggtttttgttagtttattgtgtttagaattggttttttttagtgggtttttgttttgattttaagaatgaagtcgcggatatttacggtgagtattatagtttttaaagatggtgtgtttggattttgttttttttgttgtttagatgcgtttagagtttttttttttcggtgggttcgtggttttattt

SEQ ID NO: 429 - DNA, 2359 bp, Artificial Sequence
  chemically treated genomic DNA (Homo sapiens)
aagtgagattacgaatttatcggaaggaagaaattttggacgtatttgaatagtagaaggaataaagtttagatatattatttttaagaattgtaatgtttatcgtgagtattcgcggttttatttttgaagttagagtaggaatttattggaaggagttaattttggatatagtagattggtaggaattaatgttagatatagtagtaatgaggttatttattgttcgaaatttagattttggtttttatatattattttttattgatgtattgtagttttatgaagtaatggtgattttaggtttagggtaggaatagtataaaatgggattgaaatattttttgtgagaaagtgaagtgtataaaaattgttgggaatttattaaaggatatagaaatttgtttgtggtcgggtgcggtggtttatttttgtaattttagttttttcggaggtcgagggagcggattatttgagggataggagtttaagattagttttattaaggtatagtggtgtgtttttgtaattttagatatttaggaggtcgagataggaggattatttgaattcggaatgcggaggttgtagtgagttgagatcgtatttattgtattttagtttggagattttgttaaaaaaagaaaagagagggagtagtgtgaaagggttttaattgattaaattttaaataatttgagtattaatataataataatagtaattatttgtaaaggaatttatgagtttatcgtgataaaatgagacggtagggaaaagaaagggtattttttgtaggaaatggtaattaataaatgtagaaatgtgttttagtttttttatttgttaaatggagataattgtatttaatttatagggttgttatgcggggtaatgaattaatacgtgttaaaatattatgttggtcgttattatattgtcgcgtggaagataatgtgttatttagtattttatttaagattatagacgggatttagagtgacgattatagaggtgtggaaattttcggtttttttagaaggaatatagtcggaatcgttgtttcgcggagagcgggtcgcggtgacgtattttcggtttttgtagtttattattttttgggttgcggttgttaaggatttagagtagatgtgatttgcgttaggtggtatttttttttacggatgtttcggtgagtttcggagtcgggttatcgttgaggggtttcggaagggttagtttgtgtattgcgatttggattgggtgtggggatttggcggtagggtttttttggttagagatgggtcgggtaggtgaagggtagaggaggttgtttcgtagtttggaagggttttgttaattaaaagttagcgtcgttgtttttattttttttttttattttatgtttgtttttgagttttttaatttttttgttttgtattgatggtattttgaatttttcgtatttgtattttaggatttaaatagattcggatatgaagaaatgtttgtatttttcgatgttttattttttattgtggatttattttaaagaatgagtagggatagttttaaattatgttatagttttttttagtttaatttatatagtataaaggtttttgttgttatcgaattttttaaaagaataaatagtatttattatgtgttagtttagtattgttttaagtattttataaatattatttgttttttataattttatgagatagatattattattatgtagattatattttatttttttgtttcgtttttttttaaaattaatatataagaagaaaatgaagttagtaatttgtttaaggtcgtagagcgagtaaggggtgtaggtaggatttaaatataggtaatttggttttagattttatttttttaaaatttttgttatgttaattttattttgtttttatattagttttatagttataattcgggaagttatttcgtttatttgaatttcgttttttttttgtattttagtagttttgggtttttagttaggatttgattggagagaatatatttgaagacgtatattttttagtgtttttgtaaatttgatgaaatagtcgttttattggtttgtgtgtatgtttttatttatttattttgttttttgagtaatagaaaaagattatagttttggttttaagggaaagtagtaattattaattaaattattattgtattaaaattgtatattattttattaaaagattaatttgtatgtttatatgttaggttttgtgtaaaaatattttgtatgtattattttatttaatatttttaataagttggtaaggtagttgttgattttattttatatatgagtttg

SEQ ID NO: 430 - DNA, 2823 bp, Artificial Sequence
  chemically treated genomic DNA (Homo sapiens)
tgagtacgttatagagtttaacgggttaaaagggggtgatagttttatattaattttttttcgttttattagtattttttcgtttatttaggtcgtttcgagtttttttggttgtttttgtattcgcgttttatttggtttttagatttatgcgatgttgggtaattcgggtcgggtgtgtttaggatcgtaaagcgggaagcgtaggttttgcggattgcgagtggttttcgcggtttgttgtttttttttataacgcgcgtttcgtttttcgcgtttcgggcgtttcgttttggtttatttatttgttgtcgagaattagatatcgcgtagtagaaagttagtcgttgggtcgcgaggttcggtcgtcggagcgggcggggttggggcgtcgtcgagatagattcgatttttatttttttttaaatgcgttgttgaaagtcgagaaggtttcggtcggggagttcgcgtcgttttttttttttttagtttttttcgtattttgagttttttagttttatttcgggaggggtcgcgaaattgtattcgtaagggttttatatatattttaaggagtaggttaggtaggtaatcggagttggattcggacggtgagggggcggttttcggggatttgatattttggattttttacggtttagggtttaggcgggggaagaggtggtttaggacgatttggggtttttattttgttggtttgtttagcgtattttaagttcgcgtgtattttattttttttttttgtagatttaatgttcgtttggtaattgttttattttttttcgttggagagatttttttcgtttcgttataggcgttttacgttgttcggagtcgtgcgtttcgggacgggtagttttgggtttttcgacgtttggttaggtttaggaaagattcgttgttttttttgttgtttttatttaggagattcggcgttttgcgtttcgttttttttaatggtgtcgcggtttgtttttttggtttgtttttttttagtttttattttatacggtttttttcgttagttttatgataattttattcgtgttgaagattttgggtaaagaagtaattatcggtttttttttttttttttattttttcggcggtaggattagggggaaaggtgttcgggatataagttttttacgtagatttattgatgcggtcgtggttttgttattggttttttttcgaatggtgaggtttttttgttaattttggttttatggtataattagtataattttagtgagaggaatttagagttttagtttttttttgttttagtttttttgtgatttcgatttcgagggatttattttatttttttaagttttagttttttatttgtaaaatgggtagaatgattcgtatttttggggatgaagaaaatgtatatgtgagtacgtgggtatttggcgattcggagatttttgtaaattgtaggtttagcgagatggttttagtacgttttgtattttcgttcgcgcgattgtcgtcgggtgttcgttttagtcgttgtgtttttggtgtttttttcgttagggttacgtgtcggggaagttaaagcgggagtttttcgattttggtttagtttttagttttcggttttttgttttagtatttagattttcgtgggttaataaagttattggaaatttaacgaatttttcgatatttttcgaaaatcgtatgcgtgtgtttttgtgcgttttttttttgatcgaggtagggttttgtagggttttgtttggacgggaggttggagtggttttttttcggttgcggggtcggaggatgtagagattcgaaagaaggagaaatatagagattgttaaatgaaaggagattttgttttcggaatcgatttagttttttaaaagaatgaggaaaatatggggtttttatatattttggaaagtcgtttaggcgtttagtgaaaaacgtaaaaggtacgtggatttttatttgtgtaaaaatataaatggggtagggggttaaatattaggttttttttgtacgaaaggttttagcgtagagggttggagatttttttttttattgtatgtttttcgggattgttcgaagttaatgtgtgttgtttattatatttttgtattgaatttttaattaaaaaaagaaattgtaggaattgttttttgtttgtttgtttgttttgagacggagtttcgttttgtagtttagattggagtgtagtggcgttatttaggtttattgtaattttcgttttttgggtttaagcgatttttttgttttagtttttcgagtagttgggattataggcgcgtgttattacgttcggttaattttttttttttttttttttttttttttttttttagtagaggcggggttttatcgtgttagttaggatggtttcgattttttgatttcgtgattcgtttatttcggttttttaaagtgttgggattataggcgtgagttatcgcgttcggttaataaattgattttttaaaaagtaatttgggtcgggcgtagtggtttacgtttgtaattttagttttttgggaggtcgaggcgggtggattatttgagattagaagttcgagattaattagcgtgattaatatggagaaagtttatttttattaaaaatataaaattagtcgggtgtggcggtattcgtttgtaatgttagttatttcggaggttgaggtaggagaatcgtttgaattcggaaagaggaggttgcggtgagtcgagatcgcgttattgtattttagtttgggtaataagaacgaaatttcgttttaataa

SEQ ID NO: 431 - DNA, 2823 bp, Artificial Sequence
  chemically treated genomic DNA (Homo sapiens)
ttattgagacggagtttcgtttttgttgtttaggttggagtgtaatggcgcgatttcggtttatcgtaatttttttttttcgggtttaagcgatttttttgttttagttttcggagtagttggtattataggcgagtgtcgttatattcggttaattttgtatttttagtagagatgggttttttttatgttagttacgttggttggtttcgaatttttgattttaggtgatttattcgtttcggttttttaaagagttgggattgtaggcgtgagttattgcgttcggtttaggttgttttttaaaaaattaatttattggtcgggcgcggtggtttacgtttgtgattttaatattttgggagatcgaggtgggcggattacgaggttaggagatcgagattattttgattaatacggtgaaatttcgtttttattaaaaaaaaaaaaaaaaagaaaaaaggaaaaaaaattagtcgggcgtggtggtacgcgtttgtaattttagttattcgggagattgaggtaggagaatcgtttgagtttaggaggcggaggttgtagtgagtttaaatagcgttattgtattttagtttgggttatagagcgagatttcgttttaaaataaataaataaataaaaaataatttttgtagtttttttttttaattgaaaatttaatgtaagaatatggtaagtaatatatattggtttcgaatagtttcgaaagatatataatgaaaagaaaaatttttaattttttgcgttgagatttttcgtgtagaaaaaatttgatgtttaattttttgttttatttatatttttatataaataggaatttacgtgttttttgcgttttttattgaacgtttaggcgattttttaggatatataaagattttatgttttttttatttttttaaagagttgggtcgatttcgaagatagaatttttttttatttgatagtttttgtgtttttttttttttcgaatttttgtatttttcgatttcgtagtcgggaaggaattattttagtttttcgtttaaatagaattttatagggttttatttcgattagaggaaaaacgtatagaagtatacgtatacggttttcgaaaaatgtcgggaagttcgttgggtttttagtgattttgttgatttacgagaatttagatgttagagtaaaggatcgagggttaagggttgggttaagatcgaaagattttcgttttggttttttcggtacgtggttttggcggaggaagtattagggatatagcggttggggcgggtattcggcggtagtcgcgcggacgagggtgtagggcgtgttgaggttatttcgttgggtttgtagtttgtagagattttcgggtcgttaagtatttacgtgtttatatgtgtattttttttatttttagaggtgcgagttattttgtttattttgtaaatgggaaattgaggtttagagaggtgaagtgaatttttcgagatcgagattatagagggattggagtaggggaggattggaattttgggttttttttattggggttatattagttatgttatggggttagggttagtaggagaattttattattcggagaggggttaatggtagaattacggtcgtattagtgggtttgcgtgaggggtttgtatttcgggtatttttttttttagttttgtcgtcggaggaatgggaagggaggggaagatcgatggttatttttttgtttaaggtttttagtacgagtgggattgttatggagttggcgaagggagtcgtgtggggtagggattaggagggagtaagttagagggataagtcgcgatattattaaaaaggacggagcgtaaggcgtcgagttttttaggtgggggtagtaaggaagatagcgggttttttttaaatttggttaagcgtcgaggaatttaaaattattcgtttcggggcgtacgatttcgggtagcgtgggacgtttgtggcgaggcggaagggatttttttagcgagagggaatggggtaattgttagacggatattggatttgtagaaggagggggtaggatatacgcgggtttaggatgcgttggataggttagtaaagtgaggattttaggtcgttttgagttattttttttttcgtttgagttttgagtcgtaagggatttagggtattaggttttcgggggtcgtttttttatcgttcgagtttagtttcggttatttgtttggtttgttttttaaaatatgtatgaggtttttgcgggtgtagtttcgcggtttttttcggagtggggttgggggatttagggtgcgaggggagttgaggggggaggaagcgacgcgagtttttcggtcggggttttttcgatttttagtagcgtatttaagaaaaggtggaaatcggatttgtttcggcggcgttttagtttcgttcgtttcgacggtcggatttcgcggtttagcggttagttttttgttgcgcggtgtttggttttcgatagtaggtgaatgggttagggcggggcgttcggagcgcggggggcggggcgcgcgttataaaggggagtagtaggtcgcgggggttattcgtagttcgtaaggtttgcgtttttcgttttgcggttttgggtatattcggttcgggttgtttagtatcgtatgggtttgaggattaggtagggcgcgggtgtagagatagttagggaggttcgaggcgatttagatgggcgggggaatgttagtaggacggggaggggttaatgtggagttattatttttttttggttcgttgggttttgtgacgtgttta

SEQ ID NO: 432 - DNA, 3120 bp, Artificial Sequence
  chemically treated genomic DNA (Homo sapiens)
aattttaagtttaggtcgggtatagtggtttacgtatgtaattttagtatttggagggatcgaggtgggcggattataaggttaggagattgagattattttggttagtatggtgaaatttcgtttttattaaaaatataaaatttagttgggtatgatggtacgtgtttgtagttttagttatttgggaggttgaggtaggagaatcgtttgaattcgggaggtggaggttgtagtgagcggagattgtattattgtattcgtttggtgatagagtaagattttattttaaaaaataaataaagaaaatttgaagtatagtatttttttaaattttaaatagataatagaaattggtttttttttatttaaattagaatttaagtttaattttatatatttttgatagtttggattttgttttttaattttataaaattgggaatttaagtattatttggttcgatttaaatgtaatgtagaatttgtattaaaatattatattaaagttttagatttgtagtagttaatagtatttttatgtatgtgttagggattgttttaaatattttatatatattaatttttttattttgtatttttgttttcgttttatatagtaggaaattgaaatattgagaggttaagtaattaaagttatagagttagagtgataggagtaaagttttaatttaggtaatttagatttttagagttttgatttttattattaagttgttagtatagtttttttggtaattatttttaatttaaatataattcgagtgatttatttaataagttattattttgataatttagtgatttgtaatgtaaaattatttattgtaatttatttaatattattgtttttttgtgttgtaaaaattatagtaatcgagatgtaatttattatttttttttttattttcggtattttgtgttaatttttttgttttgcggatttttttcgattttttattatgcgtgttaattgttattaatttttttgtttgttggggattggggtcgcgagggtatattttcgaggggtacggggttagggttaggtaggttgtgcggttgggcggggttttgtgttttattgcggagtgcgggtcgggaagcggagagagaagtagttgtgtaattcgttggatgcggattagggcgttttttattttcgtcgggagttcgtcgattggttgggtgtgggcgtacgtgatcgatatgtggttgtattggtgtagttcgttagggtgttattggagatagaatggaggtgttgtcggattcggaaatggggtaggtgttggagttattatggttaggtttgttgcggggggaggggggaaggtggttttttttcgtattgttttaaatcgatggtttttttttggtatagggtttattgtagtatgttaaacgaggaggtaggggcgtcgttttttcgttttttattgtagtattggagatggattttttgtatttcggatttagggtttttgatagaagaggaagaagggggaggggtagaagtgttaaggggagtttgttgagaaaagttgtttttgaagttagaaggggtttttgtttttataatgttatttgatagagtggaataatagtatttaaggaaacgggtagaggataataaagaatggagtatatttatggcgaggagtaaaagttttattttattgaaaggtttttttttttttttggcgataaggatatatgtattggtggttaaaagagagaggagataaaatcgttgtagatggttgatgtgaatttagtggaaagagttattggggatgagagaaagaggaggaggtaggtattgtagagcgtgagtggtggtgttggttggtgaaatattggttattagtagtgtgtttgtttttgtaaaatatttaagtaaattttttgtgaatagggtggtaaatagatattagtgtttttgttagttataaaatgtagtggtagtggttttttgcggacgattgtagtagtgttttttttttttttgttaggtcgaaaagataattgtagaggaataagaaattttgtagtaaatgttggggtagaagtttatttataagaagttatagtttataaatgtagtttgaatagtagaaaaaaaattattgttttttaaagtaggaataatgttaggttatgaatgttttgttattggaatgtattggatattttgattttatattacgaaagtgatgtttaaattttttgatttaatataaattttatacgaaattttaataaattatgtatgaaatagtggatttttttttttgttagtgaagtttttatgttattaattaggttatttaagagtaaattattttataacgtaaattattttgttaaaaattatggtgaataaatttttgtaggtttaatatttaagatttatagttaagtaattttatatttttttttggttgtttttagataatattgaataaatatttaagatattaatttagtgtgtaaatattttaaattaaagtaatatggttttttttttagatgtatttttgtttagtgagtatttatgagatatatttttgatataaagtgttttttattgagttttttttttttttatttaaatgtaaaagtttatttttatgtatatttatagtagttagtttgttatatttttttattttttgaataaggatggtagtggttttgtaaagttttttagggttagtgatagtgttttttaaataatgtttatgtaatagaaagttttaagatgatttattatattgttttagtaatatttttaagataatgcggaattgggttggtttagataaataagattatataagttttttattgataaatttaaatagttttttaaaaaattatttttgttttaagaattatttgattatggatattagggttaatagtatttaggagtcgggcgtggtggtttatgtttgtaatataagttaaataggaggttgagggaagttgaggtaggaggattatttgagttttggcgtttaagattagtttgggtaattaagtaagattttattttaaaaaaaagtatttagagttttttttttaaaatttgat

SEQ ID NO: 433 - DNA, 3120 bp, Artificial Sequence
  chemically treated genomic DNA (Homo sapiens)
attagattttaaaaaagagattttaagtatttttttttgagatagggttttgtttggttgtttaggttggttttgaacgttaaggtttaagtgatttttttgttttagttttttttagttttttgtttagtttgtattataggtatgggttattacgttcggtttttaagtattattaattttgatatttatgattaagtaatttttaaagtagaaataattttttaaagaattatttaaatttattagtgaaaaatttatgtagttttatttatttaagttagtttaatttcgtattattttgaaaatattattgaaataatataataggttattttaagattttttattatataaatattatttaagagatattgttattgattttggagggttttataaagttattgttatttttgtttagggagtggggaggtgtggtaggttggttattataagtatgtataaagataggtttttatatttaggtaaaggaaaaaaaagtttaatgaaaaatattttatattaagagtatattttatgagtatttattaaatagaaatatatttagaagaaaagttatgttgttttaatttaaaatatttgtatattgaattaatattttaaatatttatttagtgttatttaaaagtaattaaagagaaatataaaattatttaattataggttttaaatattaggtttataaaaatttgtttattataatttttgataaagtaatttacgttgtaaagtggtttgtttttgaatgatttaattaatggtataaaagttttattaataaaagaaaagatttattgttttatatataatttattaagatttcgtataggatttatgttaaattaaagaatttgagtattattttcgtgatgtagaattaaagtgtttaatatattttaatgataaaatatttatagtttgatattatttttattttaaaaaatagtaattttttttttgttgtttaggttgtatttataaattatggttttttgtaaatgggtttttattttagtatttgttgtaaggttttttatttttttgtagttgttttttcggtttaatagagggagaaaaagtattgttgtagtcgttcgtaaaaagttattattattgtattttgtaattaataaagatattggtatttgtttgttattttgtttatagggagtttatttagatgttttataaaagtaggtatattattggtgattagtattttattaattaatattattatttacgttttgtagtatttgttttttttttttttttttatttttagtagttttttttattagatttatattagttatttgtagcggttttgtttttttttttttttggttattaatgtatgtgtttttgtcgttagggaggaaaagaagttttttaatggggtagagtttttgtttttcgttatgaatatgttttattttttgttgttttttattcgtttttttagatattgttattttattttgttaaatggtattataaaaataaaaattttttttggttttaaaaatagttttttttagtagattttttttaatatttttatttttttttttttttttttttttgttaaaaattttggattcgaagtataggaaatttatttttagtgttgtagtggggggcggggggacgacgtttttgttttttcgtttggtatgttgtagtggattttgtgttaaggaaaggttatcggtttaagatagtgcgagggaaaattattttttttttttttttcgtagtaagtttggttatggtggttttagtatttattttattttcgagttcggtagtatttttattttgtttttagtgatattttggcgggttgtattaatatagttatatgtcggttacgtgcgtttatatttagttaatcggcgggttttcgacgggaatggggagcgttttggttcgtatttagcggattatatagttgttttttttttcgtttttcgattcgtatttcgtagtggggtatagggtttcgtttaatcgtatagtttgtttagttttagtttcgtatttttcgggggtatgttttcgcggttttagtttttagtaagtaaggaagttgatggtagttgatacgtatagtaaagagtcgggggaggttcgtagggtagaaggattagtataagatgtcggaggtgggagggagagtaataaattatatttcgattgttatgatttttgtagtatagagaaataataatattaaatgaattataatgaataattttatattataagttattgagttgttagagtgatgatttgttagatagattattcgaattatatttgaattaaaaatagttattagaaaagttatgttagtagtttagtagtggagattagaattttggaagtttgggttgtttgagttgaagttttatttttgttattttagttttgtaattttagttatttaattttttagtgttttaattttttgttgtataaaacgggaatagaagtatagaatagaggagttaatatatatgaagtatttagagtagtttttgatatatatatagaagtgttgttagttattataaatttgaggttttaatgtagtattttaatgtaaattttatattgtatttaaatcgaattaggtgatgtttaaatttttaattttatgaggttgaaggataaaatttaaattgttaagaatatataaagttaaatttaaattttggtttaaatggggggaaattagtttttattatttatttaaaatttaaaaggatattatattttaagttttttttgtttgttttttgagatagagttttgttttgttattaggcgagtgtagtggtgtaattttcgtttattgtaatttttatttttcgggtttaagcgatttttttgttttagttttttaagtagttgggattataggtacgtgttattatgtttagttaagttttgtatttttagtagagacggggttttattatgttggttaggatggttttaattttttgattttgtgattcgtttatttcggtttttttaagtattgggattatatgcgtgagttattgtgttcggtttaaatttaaagtt

SEQ ID NO: 434 - DNA, 2256 bp, Artificial Sequence
  chemically treated genomic DNA (Homo sapiens)
aaatttttattataaataaattatattaagtaagttaaagatagtaaaagagtaaaaatgttagtagatatttttaaaatggtaattatatattatttttggaatgattatatgaatgtggtttattattttttaagtttttatagtaaatatatatttatttgttttatttagttaaaaataaatataatatgtagttgtttttgaataatttttttttttttttttttttttttttttttttcgataaagttttattttgttatttaggttggagtgaagtggttttatttcgttgtttattataattttagtttttcgggtttaagcgatttttttgttttaatttttcgagtagttgggattataggcgtttgttattattttcggttattttttgtatttttagtagaggcgaggttttatttgttggttaggttggtttcgaattttcgattttaggtgatttttttcgttttgattttttaaagtgaagggattataaggcgtgaggtatcgcgttcggtcgtttttgaataatttcgattaaaatttatattcgatatttattttaatatatattatagatttttattgataattttttttagtaagaaagataagttttatttaggtatttgtgaattggaggttaagtagttttagtatattttatatttttttaagattttttttttattttaaacgttcgtaaattttgtatttgataaagagtatatttttatttaatataaatatgtttttttttttagatttttttagtattcgagagatttgtacgcgcgtggttttttattttttttttttggttttttaagtttttagggcgtcgttaggaggaggtttgtgattataaattttttttgaaaattttttaggaagtttttttttttttcggagaatcgaagcgttatttgattttaatttttttgtaaatttcgttttttagagtcgttcgttattttttgttttcgttgtagattttttatttatttggatcggttttcgatcgtaattattcggtgcgttgggtagcgttttcgtttttagtagcgttcgtattttttttattcgatttcgggtcgcggtcgtggttagttagttagtcgaaggttttatgttgtttttcgtcgtcggttttatgttgtttttcgtcgttcgttgtttgtttttttttttttcgtagtcgtcgagcgtacgcggttcgttttattttttggtgattagttagtttttttttttttttttttcggtgttggcggaagagtttttttcgattttgttttttaaattttttggagggatcgcggtatttttttaggtaaggggacgtcgtgagcgagtgttcggaggaggtgttattaatttcgagtatttagcgaatgtggtatttttgaagtcgttttaggttgggtttttttcgggggtattagtcggaagtagttttcgttagagttagcgttggtaaggaaggaggattgggtttttttttatttgttttttatatcgtttttcggtttttttgtttttagtcgcgttttttcgtttgttagtaaaggcgtgtttgagtgcgtttattttgttaaaaagaaattcgttttcgtttcgtttttttttttcgcgatataatttttttaattgttaaattgaatcggggtgtttggtgttatagggaaagtatggtttttttttttaattataagaaaaagtaaaattatttttttttagttgtgagagttttatcgagaatcgaaattatttgtacgattagaaagtgtttttttatttttttaatttttgatttttaggagcgcggggtttattaagttagaaattttagtttaaaggattttttttggagagtcggattgtttttttttttttttttttttttttttttgcgtgtaaaacggttgtttggggtaagggttttttagacgtgtatattgtttggtataagagtagattttgaaaagatgaggtttatttaatacggacgggggagaattttgtttgtaggtagataggaaaatggggagggagttattggaaggacggattttatttttaaagttataatttttagattagaaaaagtgtttagtgttttagaagtagagttgtatagtgatttaaagattagttttaaatattgttttgttttttttatattttttatattttttttttttattgaaaatattttgtatttttcgtaattataaagggggaagg

SEQ ID NO: 435 - DNA, 2256 bp, Artificial Sequence
  chemically treated genomic DNA (Homo sapiens)
ttttttttttttataattacgaaaaatgtaaggtatttttagtaggaaagagaaatgtgagaagtgtgaaggagataggatagtatttgaagttggtttttggattattgtgtaattttgtttttagaatattgagtattttttttggtttaggaattatgattttgagaatggagttcgtttttttaatgattttttttttatttttttatttgtttataggtagaattttttttcgttcgtattaaataaattttatttttttagagtttgtttttatattaggtaatgtatacgtttgagaaatttttgttttagatagtcgttttatacgtaggaggggaaggggaggggaaggagagagtagttcgattttttaaaaggaattttttgaattagggtttttgatttagtgaatttcgcgtttttgaaaattaagggttgagggggtagggggatattttttagtcgtataggtgatttcgattttcggtggggtttttataattaggaaagaatagttttgtttttttttatgattaaaagaagaagttatattttttttatgatattaaatatttcgatttaatttggtagttaggaaggttgtatcgcggaggaaggaaacggggcgggggcggatttttttttaatagagtgaacgtatttaaatacgtttttgttggtaggcgggggagcgcggttgggagtagggaggtcggagggcggtgtggggggtaggtggggaggagtttagttttttttttttgttaacgttggttttggcgagggttgttttcggttggtgttttcgggggagatttaatttggggcgattttaggggtgttatattcgttaagtgttcggagttaatagtatttttttcgagtattcgtttacggcgtttttttgtttggaaagatatcgcggtttttttagaggatttgagggatagggtcggagggggttttttcgttagtatcggaggaagaaagaggaggggttggttggttattagagggtggggcggatcgcgtgcgttcggcggttgcggagagggggagagtaggtagcgggcggcggggagtagtatggagtcggcggcggggagtagtatggagttttcggttgattggttggttacggtcgcggttcggggtcgggtagaggaggtgcgggcgttgttggaggcgggggcgttgtttaacgtatcgaatagttacggtcggaggtcgatttaggtgggtagagggtttgtagcgggagtaggggatggcgggcgattttggaggacgaagtttgtaggggaattggaattaggtagcgtttcgatttttcggaaaaaggggaggttttttggggagtttttagaaggggtttgtaattatagatttttttttggcgacgttttgggggtttgggaagttaaggaagaggaatgaggagttacgcgcgtatagatttttcgaatgttgagaagatttgaaggggggaatatatttgtattagatggaagtatgttttttattagatataaaatttacgaacgtttgggataaaaagggagttttaaagaaatgtaagatgtgttgggattatttagtttttaatttatagatatttggatggagtttattttttttattaggagggattattagtggaaatttgtggtgtatgttggaataaatatcgaatataaattttgatcgaaattatttagaagcggtcgggcgcggtgttttacgttttgtaatttttttattttgggagattaaggcggggggaattatttgaggtcgggagttcgagattagtttggttaataggtgaaatttcgtttttattaaaaatataaaaagtagtcgggggtggtggtaggcgtttgtaattttagttattcgggaggttgaggtaggagaatcgtttgaattcgggaggttgaggttgtagtgaatagcgagatggagttattttattttagtttgggtgatagagtgagattttgtcgaaagaaagaaagagagaaagagagagagaaaaattatttagaagtaattatatattgtgtttatttttaattgagtagggtaaataaatatatgtttgttgtaggaatttaggaaataatgagttatatttatgtgattattttagaggtaatatgtagttattattttgggaatatttgttaatatttttgtttttttattatttttagtttatttgatatagtttatttgtgataagagttt

SEQ ID NO: 436 - DNA, 2501 bp, Artificial Sequence
  chemically treated genomic DNA (Homo sapiens)
cgttattatattgtattgtttgtggatgatttatttgtttttgtagttttatttgaagaatttttttttttttttttttgaggtttgttttaaatattattttttttgtgaagattgtttggtgttttttaggagagagtgtgatttttttttttaggaatggtagtattttaaatatatatattttgtagtatattttattttgtatggtaatggtttgtttgtgagttttatttcgtattagagggtgagggttttgaagatagcgttaggttttatttatttcgatattttataatatttattatatgtttgatgaatgaatgtatagggggatggttgggtgtattttttttaattttttaattttttgaaataaataataaaattttatttttttttagaagttttggtatggttttttttattttgttatagttattgataattatttttattttttgtgtaatttattaggtaagaagtttatgtagatttatttttagtagtttatatgataaataaatattgcgtttgatttttaaatattaaattatagtatattatagatagatatagagttattatttaaagtatgatattttaattttaaaaggttttttttgaagaatattataaattttttttttttttaagatttgttgggtaggaaagatgggagaaaatgaattaatgtttatatagaaaggaggataatgggggtaaaaataatagatgaacgtatgggtggatgagagaatggataaaatgataggtggatatgttgattttggatagatgggaaatgagtggatatattaataaatagatatgtgggtggatgggtggagaagaggatggtggatggttgtggttttatgaagagatgtgaaaaaggaagtgtggaatgatggatgagaagttgtatgggaagatgaatagaagaataggtggttgaataaattaaaaggtgtgtggttggatgaatgaatgagtgggatgatagatggatttaagtggttagtggatggataggaggatggatggatgtgagagttttagaaggatataaggaaagatgggtggatagatggatgggcggatggaaggatatttaggaggatgaatgagtatgtgtgtggagagaggtgtttatttatattggtttgaatatatgggttagttgagttaaatgttagttttatgataggttattagtagttttttttgagttgttttgttaagaagttaaaatttatttaagttatgtggatttgttattgaggggaaaaagaatgagttttttttttttttatttggaagatttattaattttttattttttattttttattgtgggtacggaggtattgcgttatttagggtaagatttcgttttttttttagttttttttttaggatatttaatattttgtgaaatttagagattttgttttagtcggatttagagaaatttagcgggaaaggagaggttaaaggttgaatttaatggtgtaaggttttacggttcggttattttttgttttgacgtcgcggggttagcgggagaagaaagttagtgcgtttttgggcgtaggggttagtggggttcggaggtataggtatttcgcgatattttaggtttttcgatttacgtttttggtagtttcgattatttatagttttagtagagtacggggcgggggtagaggggttcgttcgggagggttgttattttttaaaatttttgcgggttgtttagttatagttttttttgtttgggtgtgtttttcgttcgtttttttttttcgttttaggttattgtttttaatttcgaataaaaattgtagttaattttcgaggtagttttattgtttagcggattttagtttttgttaggttcggttcgttattttcgtttcgtttttcgtcggtttttgtttcgcgtttagggattttttagtttttttcgttcgcgtttttcgttcgtttcggatattatggataagttttggtggtacgtagtttggggattttgtttcgtgtcgttgagtttggcgtagatcggtgagtgttcgtcgtagtttgggtagtaagatgggtgcggggtgtttagcgcggattcggcggtagttttttcggttgagtcggttttgggggattggagttaagtgagttgtttgcgaagtgtattgggtttcggaaagtagggttgggatttgcgttaaatcgttggagaatgtgtttgtggaagtattatttggttgaaagaaaaagagaaagagaagaaagtttgttgggtaggttgtcggcgcgtagttttgggcgaggtcgttagagttgtagtatatggtagaaagtaatcgttttttcggatgcgtatagtcgttgtttggattaataggtttttgtgtttaagggttcgttaagttttatcgggttgtgtttaggtagggtagagttgggcggggtagagattggggttggaatagggcgagtgg

SEQ ID NO: 437 - DNA, 2501 bp, Artificial Sequence
  chemically treated genomic DNA (Homo sapiens)
ttattcgttttgttttagttttagtttttgtttcgtttagttttgttttgtttagatatagttcggtggggtttggcgagtttttgggtataggagtttgttagtttagataacgattgtgcgtattcgggagaacggttattttttgttatgtgttgtagttttagcgatttcgtttaaaattgcgcgtcggtagtttgtttaataaattttttttttttttttttttttttttaattaaatggtgtttttatagatatattttttaacggtttagcgtaaattttagttttgtttttcggagtttaatgtatttcgtagatagtttatttgattttagttttttagggtcgatttagtcggaggggttgtcgtcgggttcgcgttgagtatttcgtatttattttgttgtttaggttgcggcgggtatttatcgatttgcgttaggtttagcggtacgaggtagagtttttaggttgcgtgttattaaaatttgtttatggtgttcggagcgaacggagggcgcgggcgaaaggagttggaggatttttgggcgcggggtaggggtcggcggaggacgggacgaggatggcggatcgaatttggtagaggttggggttcgttgggtaatgaggttgtttcggaagttggttgtagtttttattcgaggttgaaaatagtgatttaagacggagggagggagcgagcgaaggatatatttaagtaaggggggttgtgattaagtagttcgtagaggttttaagaagtagtagttttttcgggcgggtttttttgttttcgtttcgtgttttgttgaggttgtaaataatcggggttgttagggacgtgggtcggggaatttggagtgtcgcggggtgtttgtgttttcgagttttattggtttttgcgtttagagacgtattggtttttttttttcgttggtttcgcggcgttaggatagaggatgatcgaatcgtaaaattttgtattattgggtttagtttttggttttttttttttcgttaaatttttttgaattcggttggagtaagatttttgggttttataggatgttggatattttgggagaggagttggagagagggcgaggttttgttttgggtggcgtagtgttttcgtgtttatagtggggagtgaggggtggggagttggtgaattttttaagtggaaagagggagagtttattttttttttttttaataataagtttatatggtttgaatgaattttagttttttggtagaatagtttagggaaagttattgatggtttgttatagggttggtatttggtttagttaatttatgtgtttaagttagtgtgaatgggtatttttttttatatatatgtttatttatttttttaaatatttttttattcgtttatttatttatttatttatttttttttatgtttttttggggtttttatatttatttatttttttgtttatttattaattatttaggtttatttattattttatttatttatttatttaattatatattttttaatttatttaattatttatttttttatttatttttttatataattttttatttattattttatatttttttttttatatttttttataaaattataattatttattatttttttttttatttatttatttatatatttgtttattgatatatttatttattttttatttgtttaagattaatatatttatttattattttatttatttttttatttatttatacgtttatttattatttttgtttttattatttttttttttgtgtaaatattaatttatttttttttattttttttatttagtagattttaaagagaggaagagtttgtaatattttttaggggaagttttttgagattgaaatattatattttgaatgataattttatatttatttataatatattatggtttaatgtttggaaattaaacgtagtatttatttgttatgtgaattattaaaagtaaatttgtatggattttttgtttggtgagttatatagaaaatgaaagtgattattagtggttgtggtaagatgaaaggaattatgttaggatttttgagggaaggtaagattttgttatttattttaagaaattgaaaagttgagagaaatgtatttagttatttttttatgtatttatttattagatatgtaatgagtgttgtggggtatcgaggtaaataagatttggcgttatttttagagtttttattttttggtacggaataaaatttataagtaggttattattatgtaaggtgaaatatgttgtaaaatgtgtgtgtttggggtgttattatttttagagaagggagttatatttttttttggagaatattaggtagtttttataggggaagtgatatttgaggtaggttttaaaggaaaaggaggaggaattttttagatgaaattatagggataagtaagttatttataggtagtatagtgtagtgacg

SEQ ID NO: 438 - DNA, 2407 bp, Artificial Sequence
  chemically treated genomic DNA (Homo sapiens)
gggcgagtgggtgtgtgcggggtgtgcgcggtagagcgcgttagcgagttcggagcgcggagttgggaggagtagcgagcgtcgcgtagaattcgtagcgtcggtttggtagggtagttcggaggtgggtgggtcgcgtcgttagttcgtttgtagggtttttattggtcgtttgtcggtcgtttttcgtttaaaaggcggtaaggagtcgagaggttgtttcggagtgtgaggaggatagtcggatcgagttaacgtcggggattttgtttttttcgcggaggggattcggtaattcgtagcggtagggtttggggtcggcgtttgggagggatttgcgttttttatttattttttagttgtgttttcgtcgtcgtttcggttagttttcggcgttggcgtttatggtcggttttcgatagcgtttcggagggatcgggggagtttttaggcgttcgggtgagtagttaggcgcggtttttcggttttttcgattttcggcgttagtttttgtttttttagttagggcgcggtggggtttgttcgggtagtgtttcgagtaattgggaaggttaaggcggagggaaatttggtttcggggagaagtgcgatcgtagtcgggaggtttttttagtttcgcgggtcgggtgagaataggtggcgtcggttcgattaggcgttttgtgtcggggcgcgaggatttggagcgaattgttgcgtttcggtgggtcgttttttttttttttttgttttttcgggcggtcgtacgtcgggtcggtcgggtaacggagagggagtcgttaggaatgtggttttggggattgtttcgttcggggaaggggagagggtggttacggtgttaggagaggcgcgggagtcgagaggtggcgcgggggtgttatcgttgtcgtaggttggagagagattgtttttagtgaggcgcgtatcgtttgggcgagggttttattttttcgcggcgtttttggaggtgggaaagttgggtgggtatgtgtgtagagaaaggggaggcggggaggttagttattttcggagtcggttttgattttaatagatcgtttagcgtttggggacgtcgatttcggggtgtcgtggtgttcggttttacgcgcgcgcggggttgaggggtcgggggcgtttttggtcgtttagttttaataaagggtgtttttttttatttcgcgaggaggggtagtttcggagattcggtttttagcgagcggggttttagcgtcggggaggtttatttttttttggggttgttattttattattattattgttttttttttttttttaaaaggattggagattgatgtatgagggggttacggaggcgtaggagcggtggtgatggtttgggaagcggagttgaagtgttttgggttttggtgaggcgtgatagtttattatgatcgtgtttaggtaggaaaacgtggatgattattacgatatcggcgaggaatttggtaggtaaagggggtattagaagcgtatttttttggattgtggaaatgtataacgatggggttattgggtggtaaataaatgtagtttgaattaggcgtttttttcgttttttttggagatgcgtaaattatagagaaaagagttattaatttagcggtaaatcgtttgatttaagggtttgggggtggaggagaggtagtagtttagggttagattatgatgtatagtatattgatttagttttttggataaaattagatttaattgttcgtgttaatttttgttagtttttgtttttttgtgataataggataaatattaagattataattgtaattggagttagtttttatgtgtgatttaaacggagggtataaattaattaataggttttaaaaattttagtattttattttttatttaaatttttagtgtaatttgagtaagtattggtaggtggtaaatggagatttgttagatgttgatattgggtttggattttgaaattttttttaattaggaatttaattatttggttggtgttggtggttgttttggttttatttataatgttaaatttttaataaattaatgagagtttaatatggttatttggatttagagtatatttttattgttgtagtagttgtgatttttagtgtaaaattttttagtttttaggtaaataaagaatagtttttttcggggtatttaagggttgattgttgttttttttgattgtgtattagatagagtgttttgggttttggttaattttagtagaaaatttagtttttatatatatatttaaaattgaatttatggaatttgattgtggtgtatttatattgtgagtggagtaggtaaaaggatttttaaataaataaaatatgtatttatttatatgtgtattgaaata

SEQ ID NO: 439 - DNA, 2407 bp, Artificial Sequence
  chemically treated genomic DNA (Homo sapiens)
tattttaatgtatatataagtaaatatatattttgtttgtttaaagatttttttgtttattttatttataatgtaaatatattatagttaaattttataaatttagttttaaatgtatgtatgaaaattaggttttttattaaagttgattagagtttaaaatattttgtttaatatatagttaaaggaaatagtaattagtttttagatgtttcgaaagaaattattttttgtttatttagaaattgaaagattttatattgagaattatagttgttatagtaatggaggtatgttttgaatttagatagttatattagatttttattgatttgttaaaaatttaatattgtaaatgaaattaaagtaattattaatattaattaggtaattaaatttttggttggaagaagttttaaaatttaagtttaatgttaatatttggtaagtttttatttattatttattaatatttgtttaaattatattgaaaatttagatagagggtaaagtattaagatttttaaaatttattaattagtttgtatttttcgtttaaattatatataaaagttaattttaattgtaattataattttagtgtttgttttgttgttatagaagggtaagggttgataagagttagtacggataattaaatttgattttgtttaggggattggattaatatattgtgtattataatttagttttgaattgttgttttttttttatttttaggtttttggattaggcggtttatcgttgggttagtaatttttttttttatgatttgcgtatttttagaaagggcgagggagacgtttgatttaaattgtatttgtttattatttaatggttttatcgttatgtatttttataatttaggagggtacgtttttggtattttttttatttgttaagtttttcgtcggtgtcgtagtaattatttacgtttttttgtttgaatacggttatgataaattgttacgttttattaaagtttagggtattttagtttcgttttttagattattattatcgtttttgcgttttcgtagtttttttatgtattagtttttagtttttttgaagaaaaaaaaaaggtaataataatagtaaaatggtaattttaaaaggaagtagattttttcggcgttaagatttcgttcgttgaagatcgggttttcggagttgttttttttcgcggggtggagaggagtattttttgttaaagttgggcggttagggacgttttcgattttttagtttcgcgcgcgcgtggggtcgggtattacggtatttcgaggtcggcgtttttaaacgttgggcggtttgttgggattagaatcggtttcggaagtgattggttttttcgttttttttttttttgtatatatgtttatttagtttttttatttttagggacgtcgcggaagaatgaagttttcgtttagacggtacgcgttttattgggagtaatttttttttagtttgcggtaacggtggtattttcgcgttatttttcggttttcgcgttttttttaatatcgtggttatttttttttttttttcgagcgaggtagtttttagagttatatttttggcgatttttttttcgttattcggtcgattcggcgtgcggtcgttcgggggagtaagggagggaagggagcggtttatcgaggcgtagtagttcgttttagattttcgcgtttcgatataaagcgtttggtcgggtcggcgttatttgtttttattcggttcgcggggttggggaagtttttcggttgcgatcgtattttttttcgaagttaagttttttttcgttttggtttttttagttgttcgaggtattgttcggataaattttatcgcgttttggttgggaaagtaaaagttggcgtcgggggtcggggggatcggggagtcgcgtttggttatttattcgggcgtttgggagttttttcggttttttcggagcgttgtcggaggtcgattataggcgttagcgtcggagattagtcggggcggcggcgggaatatagttagggagtgagtggggggcgtagattttttttaggcgtcggttttagattttgtcgttgcgagttgtcgagtttttttcgcggagggaataaagttttcggcgttggttcggttcggttgttttttttatatttcgaagtagtttttcggttttttgtcgttttttgggcggagggcggtcggtaggcggttaatggggattttgtaagcgggttggcggcgcggtttatttattttcgagttgttttgttaggtcggcgttgcgggttttgcgcggcgttcgttgttttttttagtttcgcgtttcgggttcgttggcgcgttttatcgcgtatatttcgtatatatttattcgttt

SEQ ID NO: 440 - DNA, 3000 bp, Artificial Sequence
  chemically treated genomic DNA (Homo sapiens)
atatttaaattgtatatttggtttgtaatatattatatatttaaaagaattattatttttttgaatattattaatattaataatagtattatagtgattaagagtggatttaaataaaggttggtttgaaatttaggtttgttatttattagtaagtttttaaaaattttgagtttttagtttttttatatgtgaaatggagaaaataaatttgtaaaattaattaaatttgtttatttatatttttttttttagtgtatattaattggtatttttcgttaggttagaatgtgtttttaattatgttttaaattcgttttgtgttaattttattgttagaattttttttattttgagaattagaaaaggaaatattatgtttggtaatgtttatattttttaaaataaatttgtaggaaagaatatttagtaagtgatgagagtagtaacgattgtttttattattttaaatttataatattattttttttagagttttttaagtattgtagataattttttatttattaaaaaataaattgtaattataagtatttagggttgatattgtttttgaattagatagtgtttatattagttgtataagattaatttaaagtagaggatgaaattttttttttgaattttttttagaacgtaatttagtgaatatattaaaattaaattttttttgaatgggagtaatttttacggattaatttgtaattttttagattatatttaaggtaatgtagaggttgttgtattataggttttgtgattagagattattggatttgtttttggaaaagttatttatgattttttgggttttggtttttttattttttatatcggtttaataatgattatcgtagagttgttatggaagttaaatgaatttatgtattataagtgattaatataatgattgatatttagtgatttattaataaattaaaatatttattattaatatgatagagaaggtgtcgttaaaatagataataggtttttggaagaggtgattaaatggatgtaaaatttatggattgtttatttcgtttatttttgttgtgttttttggttgtggtatatatacgtgtgggtataaaatcgtaaattttatgtagtcgcgtagtgtatgcgtagaaggtttagatacgaaatgttattttagtaatgtgtttagagaagttttgacgtcgttttggaagtaagtcgttgttgtttgatttttgggcgtttgggacggatgtttatatttgtatttagtagtattggaaggggtttaggtttttcgtagtatagtttatttttagatcgtttagttttttataatatatatttttacggaaaagggtattttttttcgttagaaaaagcgttttagtttggtttgggttggtttttattttacgttgttgtaagtaggcgaagttttttttgtttttttttttggggtaagtggaaaggagttcggtagggggttcgtagtggtttgtataggggaattgggtagcgagagagttttaggtaatttcgggggttgttttatagaagtaggtggggatcgatagtggtttttcggtttagggaggagagcgcggtcgcgggtttttttttttagtttggaggttgtagtcgttcgagtcggttcgggtgggggcggggtgggggcggcgcggagggtacggagattacggcggcgttattcgggatatttagggtttcgaggttttgggcggtttttacgcgagatcgtaaattatgataataggtagttattcgaggttaaataaaaacggagtgggtttttcgcgcgtcgtcgtttttcgcgtttttggcggtttttttcgaggttttcggcggttttacgagttcgtagtagtcggtggcgacgtcgttttcgttttatttttttgcgtaagtgcgaggttgtcggtagcgcggcgtacgtttcggtcgttttcggttttcgcgtaaaatttttattttgtttacgtgaagttgtcgttgttttagagagggggaaagagttgcgggaaaagtcggggagtgacgattgcggcggttgggcgcgtttttttattttttttttttttttttttttttttgtcgtagttcggagttttggttttttttttttttttttttttttcggagtcggttttttttttcgtttcgtttttttttcgtttgtgtacgttatttgttgtggggtggtcgaaggggatgttttgtttttattagaggtatagcgcgaaggggaaatttcgatattggaaggaacgagaataaatatttaattacggacgtattgaatcgcggttgggatagatatttcgggaattcgaggcggatcgggcgacgaggtgagtgatttttttttttaattttcgttttagggttttcgggggagtttgagttgagagaatttttaaatttttcgggaaagtgcgcgaggtttcgtcggggacgtcgagcgttgggtattgaggacgcgtagttggacggtgcgtgggcgtttgcgttttcggggggcgtttggaggtcgggtgttttacgtttgagggttcgggtcgttcggatcgtagcggtgttttttgttttagaagacgtttttaagttttaagggtttttttcgagtttgtttgtttttttcggggtcggcgcggagtttgcgcgtaacggagtttatttagtagtttagcgcgcggtttttatttgtatttcgtttttatttggtagaggcgcgagtatcggggttttttttatattttttttatgacgtgtattattttttgatgattttttagatggtttaggcgcgaggatgttgatttagagtttttcggagggttataggcgtttgggttttttcggtgtcgggtgcgtgtgtattttaaaggttcgcgttttaatttttaggtattgatcgggttttttaattgcggcgattttattttaatagtttttatgtggcgtggattgaatgtt

SEQ ID NO: 441 - DNA, 3000 bp, Artificial Sequence
  chemically treated genomic DNA (Homo sapiens)
gatatttagtttacgttatataaaaattattaaagtgggatcgtcgtagttgaaaagttcgattagtgtttggagattagaacgcgagtttttaaagtatatacgtattcggtatcgggaaagtttaggcgtttgtgatttttcgaaggattttgggttagtattttcgcgtttggattatttagggggttattagaaagtaatatacgttataagaaagatgtgggggagatttcgatgttcgcgtttttgttaggtggaggcggggtgtaggtagaagtcgcgcgttggattgttggatgaatttcgttacgcgtaggtttcgcgtcgatttcggaagggataggtaggttcggaagggatttttggggtttggggacgttttttagggtagagagtatcgttgcggttcgagcggttcgggtttttaggcgtggggtattcggtttttaagcgtttttcggggacgtaggcgtttacgtatcgtttagttgcgcgtttttagtatttagcgttcggcgttttcggcggagtttcgcgtattttttcggaaagtttgggggtttttttaatttaggttttttcgggagttttggggcgggggttggaagaaggggttatttatttcgtcgttcggttcgtttcgggttttcgaagtgtttgttttagtcgcggtttagtgcgttcgtaattaagtatttattttcgttttttttagtgtcgaagtttttttttcgcgttgtgtttttggtgaaaataggatatttttttcggttattttataataaatagcgtatataagcgggggagaagcggggcggagggagaagtcggtttcgagggggaggaggaaaggagaggagttaaaatttcggattgcgataggggggaaaggagaagaaaagaaaatgagagagcgcgtttagtcgtcgtagtcgttatttttcggtttttttcgtagttttttttttttttttaaggtagcgataattttacgtggataggatggaagttttgcgcggaagtcgggaacggtcggagcgtgcgtcgcgttgtcggtagtttcgtatttgcgtagggaggtggggcgggggcgacgtcgttatcggttattgcgggttcgtgaggtcgtcgggggtttcgggggaggtcgttagggacgcggggggcggcggcgcgcgggggatttatttcgtttttatttgatttcgggtgattgtttattgttatggtttgcgatttcgcgtggggatcgtttagggtttcggggttttggatgtttcgggtggcgtcgtcgtaattttcgtgtttttcgcgtcgtttttatttcgtttttattcgggtcgattcgagcggttgtagtttttaggttgaggggagggattcgcgatcgcgtttttttttttgggtcggagagttattgtcgatttttatttgtttttgtggggtagttttcggaattgtttggaattttttcgttatttagtttttttgtgtaggttattgcgggttttttgtcggatttttttttatttattttaagggaggagatagaagggatttcgtttatttgtaataacgtgaaataaaaattaatttagattagattggggcgttttttttgacgggaggaaatattttttttcgtggagatatatgttatgaaggattaagcggtttggggataggttgtgttgcgaagggtttgggttttttttagtgttgttgggtgtaggtataggtattcgttttagacgtttaaaggttaggtagtaacgatttatttttaaggcggcgttagagtttttttaggtatattgttgaaatgatatttcgtgtttaagttttttgcgtatgtattacgcgattatataggatttacgattttatatttatacgtgtgtatgttataattaggggatatagtaaaggtagacggaataaataatttataaattttgtatttatttaattattttttttaaaaatttattgtttattttagcggtattttttttgttatattgataataaatgttttaatttattgataaattattgagtgttaattattgtattggttatttatggtatatgagtttatttaatttttatgataattttacggtggttattattaagtcggtataaaagatgaggaaattaaagtttaaagaattatgagtgatttttttaaagataaatttagtggtttttaattataaagtttatgatataataatttttatattattttaggtgtggtttaagagattatagattaattcgtagaaattatttttatttaaagaaagtttagttttaatatatttattaagttacgttttgaaaaaggtttagaaaaaagattttattttttattttaggttggttttatgtaattgatatgagtattgtttaatttaaaagtagtattaattttgaatatttatggttataatttattttttaatgagtggggaattatttataatgtttaagaggttttagaaaaggtggtgttgtaaatttaaaatgataaaggtagtcgttgttgtttttattatttattgggtgtttttttttgtagatttattttggagggtgtaggtattgttaggtataatgtttttttttttggtttttaaggtagaaagggttttggtagtggggttggtataaagcggatttggagtatggttgagagtatattttggtttaacgaggaatgttagttaatatatattggagagaaaaatatgaatggatagatttaattaattttgtagatttattttttttattttatatgtgagaaaattaagggtttagaatttttagaagtttgttaataaatggtagatttgagttttaagttagtttttatttaagtttatttttagttattgtgatgttattattagtattaatggtatttagaaaaatagtaatttttttaaatatgtaatatattataagttaaatatgtaatttaaatgt

SEQ ID NO: 442 - DNA, 469 bp, Artificial Sequence
  chemically treated genomic DNA (Homo sapiens)
ttttttttttgttttgtgaagcgggtgtgtaagtttcgggatcgtagcggttttagggaattttttttcgcgatgtttcggcgcgttagttcgttgcgtatatttcgttgcggttttttttttgttgtttgtttattttttaggtttcgttggggatttgggaaagagggaaaggttttttcggttagttgcgcggcgatttcggggattttagggcgtttttttgcggtcgacgttcggggtgtagcggtcgtcggggttggggtcggcgggagttcgcgggattttttagaagagcggtcggcgtcgtgatttagtattggggcggagcggggcgggattatttttataaggttcggaggtcgcgaggttttcgttggagtttcgtcgtcgtagttttcgttattagtgagtacgcgcggttcgcgttttcggggatggggtttagagtttttagtatggggttaat

SEQ ID NO: 443 - DNA, 469 bp, Artificial Sequence
  chemically treated genomic DNA (Homo sapiens)
gttggttttatgttgggagttttgagttttattttcggggacgcgggtcgcgcgtatttattggtggcgaagattgcggcggcgaaattttagcgaaggtttcgcggttttcgagttttataagggtggtttcgtttcgtttcgttttagtgttgagttacggcgtcggtcgtttttttggagggtttcgcggattttcgtcggttttagtttcggcggtcgttgtatttcgggcgtcggtcgtagaggggcgttttggagttttcggagtcgtcgcgtagttggtcggggaagttttttttttttttttaggtttttagcggggtttagggagtaaatagatagtaggaagaggatcgtagcgaagtgtgcgtagcgaattggcgcgtcgggatatcgcggggggaaattttttaagatcgttgcgatttcggagtttgtatattcgttttatagggtaggggagagg

SEQ ID NO: 444 - DNA, 2442 bp, Artificial Sequence
  chemically treated genomic DNA (Homo sapiens)
tttttaatatgtttttgaaataaatttagtttaatttcgaaagtataaatatggttaaaggtagtagtagtaaagattttattaattcgtaattttttattgagttttcgaaggtgttttataatgtttattaagaagttaaagttataaagttattgtttgtttgagaagtggattgttgttgtttttattgaaattaagaacgtttttatttttttttttagagagaatattagttttaaagtttttttttttttaagttaattgtttagatatcgtttattaatttttttattatgttttgatttagatttcgttagtaaagtttgaaatttaggtcgtttaacgtttttggttttaattaaaattatttattcggatatggtatttatgatttgattaatatttatattataggagtttaatagttttaagtgaagaaattttgaataatgaatgatattttaatagttggggtttacggtttttttttttatgtatgagacgagttttgagtttttattaattatttttaaagtatgggtcgtggttagtttaattattttttgtaagttaagttttgttgtttgtagggattttaggattgtcgatatgagcgtattaatattgaaatgatgagttaggttgattatggttagaagatttttttgtatttttaatttagggtttatatcgcggataaagattaggaggtagtttttataggttataaaagtttggtcgtttaaggtaagagaataggttttaaagtttttggttcggttaaaaagttggttgcgtagatttttgttaatgtttaggattttttgttttgtgatatttggagataagttaacgttttgtaggacgtttatatgttcgggtagtattttttttagtaatatttttatgtattggtatataaagttttttttattttagtcgcgattttttaaggttaagaggcggtagagttcgaggtttgtacgagtagttttttttttaggagtgaaggaggttacgggtaagtcgttttgacgtagacgttttattagggtcgcgcgttcgtcgttcgttatatatcgttcgtagtattcgtgtttagtttcgtagtggcgtttgacgtcgcgttcgcgggtagttacgatgaggcggcgatagattaggtatagggttttatcgtttttcggaggttttattattaaataacgttgggtttattcgggtcggaaaattagagtttcgtcgatttttattttgttttttttgggcgttatttatattttgcgggaggttataagagtagggttaacgttagaaaggtcgtaaggggagaggaggagtttgagaagcgttaagtatttttttcgttttgcgttagattattttagtagaggtatataagttcggtttcggtatttttgtttttattggttggatatttcgtatttttcgagtttttaaaaacgaattaataggaagagcggatagcgatttttaacgcgtaagcgtatatttttttaggtagcgggtagtagtcgttttagggagggacgaagagatttagtaatttatagagttgagaaatttgattggtatttaagttgtttaattaatagttgtcgttgaagggtggggttggatggcgtaagttatagttgaaggaagaacgtgagtacgaggtattgaggtgattggttgaaggtattttcgttgagtatttagacgtttttttggtttttttggcgttaaaatgtcgttcgtggtaggggttattcggcggttggacgagatagtggtgaatcgtatcgcggcgggggaagttatttagcggttagttaatgttattaaagagatgattgagaattggtacggagggagtcgagtcgggtttatttaagggttacgatttaacgggtcgcgttatttaatggcgcggatacgtttttttgttcgggtagaggtatgtatagcgtatgtttataacggcggaggtcgtcgggttttttgacgtgttagttaggtttttttttttttcgtagatcgtgtgtttttttatcgttttttttcgagattttttaagggttgtttggagtgtaagtggaggaatatacgtagtgttgttttaatggtatcgttaattaagtaaggaagttatttaatttaaaattatgtatgtagaatatgcgaagttaaaagatgtataaaagtttaagatggggagaaaaatttttttttagagggtattgtgttattgtttttttgttttttatttattttagaaattatttgtttatatttaaaggtataatttattttgagttttttttaaaataaatcgtttgtagttttaggataggttgatgtattttgggtttgatttttgattattttattgttaaattagtgattttttttagtgtttttttgttttttatttcg

SEQ ID NO: 445 - DNA, 2442 bp, Artificial Sequence
  chemically treated genomic DNA (Homo sapiens)
cgaaataaaggataggaaaatattaagaggggttattaatttaataatagggtaattagaagttaagtttaaagtgtattagtttgttttaaaattataaacgatttgttttgaaagaaatttaaaatgaattgtgtttttggatgtgaatagatgatttttggaatgaatgaaaagtaagaaaatagtaatatagtattttttgaaaaaaggtttttttttttattttaagtttttatatattttttaatttcgtatgttttgtatatataattttaaattaagtggtttttttatttagttaacggtattattaagataatattacgtatatttttttatttatattttaaataatttttaaaaggtttcgggggagagcggtaaagaaatatacggtttgcggaaaaggagaaggtttgattggtacgttagggaattcggcggttttcgtcgttgtgggtatgcgttgtatatgtttttgttcgggtaaagaggcgtgttcgcgttattgagtgacgcggttcgttaagtcgtagtttttaagtgagttcggttcgatttttttcgtattagtttttaattatttttttgatagtattagttggtcgttggataatttttttcgtcgcgatgcggtttattattgtttcgtttagtcgtcgaataatttttgttacgaacgatattttggcgttagaagagttaaggaaacgtttagatgtttaacggaagtgtttttagttaattattttagtgtttcgtgtttacgttttttttttagttgtagtttacgttatttagttttattttttagcggtagttattgattggatagtttgaatgttagttaaattttttaattttgtgggttgttgggttttttcgtttttttttgaagcggttattgttcgttatttagaaggatatgcgtttgcgcgttagagatcgttgttcgttttttttattggttcgtttttaggagttcggggaatacgaaatatttagttaataggagtagagatgtcggaatcgggtttgtgtgtttttgttgaggtgatttggcgtagagcggaggaggtgtttggcgttttttaggttttttttttttttttgcggtttttttaacgttggttttgtttttgtggtttttcgtagaatgtggatgacgtttaaaagaagtaagatggaagtcgacgaggttttagtttttcggttcgagtggatttagcgttatttggtggtggagttttcggagggcgatggggttttgtgtttggtttgtcgtcgttttatcgtagttattcgcgaacgcgacgttaggcgttattacgaggttgagtacgaatattacgagcggtatgtggcggacggcgagcgcgcggttttggtggagcgtttgcgttagggcgatttgttcgtggttttttttatttttgaagagagagttgttcgtgtaggtttcgggttttgtcgttttttggttttgaagggtcgcggttggggtgagggggattttgtatattagtgtatggaggtgttgttgagagaggtattgttcgagtatgtaagcgttttgtaaggcgttgatttatttttagatattataaggtagaggattttgagtattgataggaatttacgtaattagttttttaatcgagttagggattttaaagtttatttttttgttttggacgattaggtttttgtggtttatgagaattattttttggtttttattcgcggtgtaggttttgagttggaggtgtaagaagattttttgattataattaatttgatttattattttagtgttggtgcgtttatgtcggtaattttagagtttttgtagatagtagggtttagtttgtagagaatggttggattgattacgatttatattttgaggatgattggtgagaatttaggattcgttttatatatgagagaaaaggtcgtaagttttaattgttggaatgttatttattatttaggatttttttatttggaattgttgagtttttatgatgtagatgttaattagattataaatattatattcgaatggatagttttgattaagattagaggcgttaggcgatttgaattttagattttattaacggaatttgaattagagtatggtgaaagggttaatggacgatgtttgaataattggtttaggagagggaaaattttaaaattaatattttttttaagaaaagaaatggaagcgtttttggttttagtaggggtaataatagtttattttttagataaataatggttttgtgattttggttttttggtggatattatggaatattttcgagaatttagtgaagaattacgagttagtaaagtttttgttgttgttgtttttgattatatttgtattttcgaagttaagttgaatttattttaaagatatattgagga

SEQ ID NO: 446 - DNA, 2347 bp, Artificial Sequence
  chemically treated genomic DNA (Homo sapiens)
cgagattgaggtattggcgggtgcggtcgttatcgtcgttttttcgggtttggatggggtcgttcgcggcggtagcgggggcggtggttttaacgggaaattcgggaaggttgcggggttggtatcggttataaggtaggaacgcggggagcgcgcggaggttttcgcgttttttttttttttttttatttttagagcgggcggttggaagtcgttatagagagggtacgcgtcgtttttgggttcggcgtcgggcgggtacgcgtagtcggggaagtcgtttatagcgatcggggtggacgaggtatagggtgaatttcgcggcggggtaaaggcgttggtagtttcggtttcgtcgtcgtaattttcgttttttagtagttgtcgagtgcgggttgttaataaggcgtgattgagaggtaggataggtacgtggatgaaatttattatcgtggtggttagcggggagcgttcgggcgttatcggcgcgttttgttttattagggcgattttgggcgttgagaagcgggaattttttttggggattagggcgacgttttttgttgtcgttttcggcgggatagtcgcggttttttttttagtcgtcgcgttatttagagttcgaggtttgttttttagaagcggattcgtagatttttcggatttagagttatttttttttttaatttttatcgtagcggtttgcggagacggttttattggggtttcggattagtgagggtttttagaggtcgggagtagtagttgtcgggttggtgataggtttcggggtagtattttatgggtagttgtcgtttcggagttgtttttaattttgtattcggatcggtttatgagcggggataatattcgttgggtggcgggggtagtcggtggattttcgggaagttcggggttaaataggtattaagagttggtgatttcgtaggcgggagggttgggttggttttgttcgggatttgagggcgttaatagagtgtttaagatattgtttagtagttcgttgtttttttttgggggattagaattgttgtttttagtattttttgtagttttagttttggaatatgcgttttttacgttcgatagcgattgttggttttgcgttttttcgtcggaggggttttgtttttggtagggtcgagggaagagtagttcgtttagggagataggtatggtcgaaattttaggtaaggtgttcgaggtttggtttttcgggaacggatttgcggttgggcgatatagtagtggggattcgatttcgggggagggcgggtcgttcgttacgtggggagttcggggattttttgtttttagtttagttatgacgattggatttttttttttttttttttcgtttttaggaggagggaaaagggaaggaggagggggtttcgggaatataggggtagagggaggagaaagtgggtgttgaatgtggttggatcggagggatttttattttttgggtcgggggcgggggagggcggcgttggttagtttttgtttttggtttttattttgtcgttaggggaattgtggttgtcgtttgttttagcgagcggtaagtggggagcgtaagaaaaagtagtaattgttaggagatttcgttttttaattcggggagttttttaagagagttttttaatttttgttcgaggattggagacgtagagtatttataagttcggtatttgagtggttgcggttgcgacggtaatttagtgatacgcggtttttttatttttcgattttttttttggtattaaattcgtgtatgttgtgaagtttttagtttttcgttgagttttattgtttttttattaaaattttggggttagtcggatttttcggtatagtttatttttaggaagggtcggatttttgttggtttcgtattgcgggcgatagttattttcgaagattttagattttagtagtgcgggagtattagtcgtttcgggttgtagattttatttaaatgataagtgaagttagtttttattgagaatgttatttatacgtataaatataataaggtttatttcgattagtgatagttgtggattggttagatagttttttaataacgtttttttttttagggaggtttcgtttaaagtttttttttattttaattatcggtaggatttgaaattttggagttggtatttttattcgttattttgaatgttatttttaatagtaggttttttgggatggaattttataagtatattacgttttgttttgtaaattaagaattatgttttatttaattggaaaaatgaatagattttattagaagtagaatttttgttattat

SEQ ID NO: 447 - DNA, 2347 bp, Artificial Sequence
  chemically treated genomic DNA (Homo sapiens)
atggtgataaaaattttatttttgatagaatttatttatttttttaattagatagggtataatttttaatttgtaaaataaaacgtaatatgtttatgaggttttattttaaagaatttgttattgagagtagtatttagaataacgggtggaaatgttaattttagagttttagattttatcggtaattggggtagggaggggttttgggcggggtttttttagaggaggaggcgttgttagaaagttgtttggttagtttatagttgttattaatcggggtaagttttgttgtatttgtgcgtgtgggtggtatttttaatgagaattagttttatttgttatttgagtgaaatttataattcgaggcggttagtgttttcgtattattgggatttgagattttcggagatgattgtcgttcgtagtacggagttagtagaagttcgattttttttgggaatgggttgtatcgagaggttcgattagttttagggttttagtgagggggtagtggaatttagcgagggattgagagttttatagtatgtacgagtttgatgttagagaaaaagtcgggagataaaggagtcgcgtgttattaaattgtcgtcgtagtcgtagttatttaagtgtcggatttgtgagtattttgcgtttttagttttcggatagaagttggagaatttttttggagaatttttcgagttaggagacgagattttttaataattattatttttttttgcgttttttatttgtcgttcgttgggataaacgatagttatagtttttttgacgataggatggaggttaagggtaggagttgattagcgtcgttttttttcgttttcgatttaggaggtggagattttttcggtttagttatatttaatatttatttttttttttttttgtttttatattttcgaaattttttttttttttttttttttttttttttggagacgggggaggagaaaaggggagtttagtcgttatgattgagttgaaggtaaagggttttcgggttttttacgtggcgggcggttcgttttttttcgaggtcggatttttattgttgtgtcgtttagtcgtaggttcgttttcggggagttagatttcggatattttgtttgaagtttcggttatatttatttttttggacgggttatttttttttcggttttgttagggataggattttttcgacgaaaagacgtaggattagtagtcgttgtcggacgtggagggcgtatattttagagttgaagttataaggggtgttggaggtagtagttttagttttttagaaaaggatagcggattgttggatagtgttttggatattttgttggcgtttttaggtttcgggtagagttaatttagttttttcgtttgcgaggttattagtttttggtgtttgtttggtttcgaatttttcgaagatttatcggttgttttcgttatttagcgggtgttgttttcgtttatgagtcggttcgggtgtaaggttggagatagtttcgggacggtagttgtttataaagtgttgtttcggggtttgttattagttcggtagttgttgttttcggtttttgagagtttttattggttcggggttttagtgaagtcgttttcgtaggtcgttgcggtggaggttgaggaggaggatggttttgagttcgaggagtttgcgggttcgtttttgaagggtaaatttcgggttttgggtggcgcggcggttggaggaggagtcgcggttgtttcgtcgggggcggtagtaggaggcgtcgttttggtttttaaggaagattttcgttttttagcgtttagggtcgttttggtggagtaggacgcgtcgatggcgttcgggcgtttttcgttggttattacggtgatggattttatttacgtgtttattttgttttttaattacgttttattggtagttcgtattcggtagttgttggaagacgaaagttacgacggcggggtcggggttgttagcgtttttgtttcgtcgcggagtttattttgtgtttcgtttatttcggtcgttgtaggcgattttttcgattgcgcgtattcgttcgacgtcgagtttaaggacgacgcgtattttttttatagcgatttttagtcgttcgttttaaagataaaggaggaggaggaaggcgcggaggttttcgcgcgtttttcgcgtttttattttgtggtcggtgttaatttcgtagttttttcggatttttcgttggggttatcgttttcgttgtcgtcgcgagcgattttatttagattcggggaagcggcggtgacggtcgtattcgttagtgttttagtttcg

SEQ ID NO: 448 - DNA, 2353 bp, Artificial Sequence
  chemically treated genomic DNA (Homo sapiens)
tatagttggataatagaatttttaagaagtatttttttatatttttttatttatgattttttttttatttgttttattgatgtttaaaattttgtttttggagtttatttagtttatgattttgattttggttaatattaaaatatttaggatatgggggaggggaagttgttattaattttagtttagttagttaatatagcgagttgtttttatttattatttaataagtatttattgattgtatattgtatattaggtttgtattaagttttggtgttataaaaatgaatgaagtttggtatttatttttaatattgttgtagttatatataggagaatgtaagagattattatgaaataatgtagtaaatgtataatagggaattttagataagtatagtagagaagtaattagtttcgttttaggtttttttttgagattgattcggttggaagggagtaggtttcgttaaatgaagaagttgtgggaagataggaggataagaataggttttacgaagagattttagagtagagttgcgtatttttttttttttttgttttttttgttttgttatttaggttgaagtatagtggttagtttacggtttattgtagttttgattttttaggtttaagtgattttttcgttttagttttttaagtaattgggattataggtatgtattattatattaggttattgttttatattttttgtagagatggggttttattatgttgtttaggttggttttaaatttttgggtttaagtaattcgtttacgttaatttttttaaatgttgggattataggcgtgagttatcgcgttaggtttgagtaattttaattataggattttaaaaagaaattttttgcgttatttattaaataatattttttattaatttggtagtaaatattttgttaatagtatttaatttttaggtaggtattgtgtttatatatatatttatttttttttttttgattgtttttttgtttaatgggtagttattttttttggtatttagtagaatgagttgttgtagtttatataaaaagaatggagattagagtattttttgtgttattaacgtgtttgagaaatttgtagtgttattattattatatattatttttattttatcgaatattttatttttcggttttgcgtgggtcgagaggattgtcgtacgtatgtttgtacgtatgtatgtaatttatagtttttttttgttcgaatatgttggaggttttttggaagttgtgtagataatagtaattttagtttgaattattttttttaattgtggataagttgttaagaggtttgagtaggagaggagtgtcgtcgaggcggggcggggcggggcgtggagttgggttggtagtgggcgtggcggtgttgtttaggtgagttatcgttgtttttgtttagatacggtcgtttttatatttaggtttttgtgtttttcgtttgtttgttttttttttacgtattttttaggataattgtgattttaggtaagtaaggtggggtagtagggttggtgattttttttttttagggaaatttataaatatcgttatttgagttgatttgagatggtgaataaaatggatttaggtttattttggggttgtttttaaagacgggttgttgggttgagtattgtcgttttttattttttatgttggtagtatttttagtttttaattttttgagtattaggaatattgtagagggagtaaaattatttaattatataaggtaagaatatgaagaagttacgtggttcggaggttttggtggtagaggggtgtaatcgtgatttacggaggagaaaatatttttgaggatatttttaggtttattttggaatttagaatgaattttgtaatgttagttttagaaagggtgtggtattcgtaaattggggaaagttgagaagtattggtgggtttggttggtttttttttttggttgacgttgtaaggttgagatttaggtatatggattgtttttttttttggtatttttaagtattagatcgttgtttatttatttgtaattgtatttttttaagcggaaattattttttttttagttttttgggttttagtataattttaaataagttatatattttagatgtatatttttggatttataaattgtaatagttgtttgtagttttttatttatatgttgtatatttttttttatggttttatttaagtatattatattaaaaattaatatgttaggttattttagagatttgtaattagatttttagagttgggggtttttagatatattttagtttagtttttttattttgt

SEQ ID NO: 449 - DNA, 2353 bp, Artificial Sequence
  chemically treated genomic DNA (Homo sapiens)
atagaatgagggggttgggttgaaatatgtttaagagtttttagttttgaggatttggttataagtttttggaatagtttggtatgttggtttttagtatgatatgtttaaatgaagttataagaaaaagtgtatagtatatgagtaagaaattataagtagttattataatttataagtttaagaatatgtatttgaaatgtgtaatttgtttaaagttatgttgaaatttagaaaattgaagggagaataattttcgtttagaagaatgtagttgtaagtagatgaatagcgatttgatgtttaaaaatgttaaaaagaagggtagtttatatgtttaaattttagttttataacgttagttagggagaagagttagttagatttattaatattttttaattttttttagtttgcgggtattatattttttttgaaattagtattgtaaaatttattttgagttttaaagtaggtttgaaaatgtttttagaagtattttttttttcgtgaattacggttgtatttttttattattaaaattttcgagttacgtgatttttttatatttttattttgtatggttaagtgattttattttttttgtagtgtttttggtgtttaaagggttgggagttggaaatattgttaatatgggggatgagaggcgatagtatttaatttaatagttcgtttttgaaaatagttttaaaatggatttaagtttattttgtttattattttaaattagtttaaataacgatatttatgaatttttttgaaaaaaggaagttattagttttgttattttattttgtttatttggagttatagttattttggaaaatgcgtggaaaaggaataggtaagcgaggagtataaagatttggatgtggaggcgatcgtgtttgggtagaagtagcggtggtttatttgggtagtatcgttacgtttattgttagtttagttttacgtttcgtttcgtttcgtttcggcggtattttttttttatttaagttttttggtagtttgtttataattgaaagaaatgatttaggttgaagttattgttgtttgtatagtttttaaaaggtttttaatatgttcgggtaggaaggggttgtgagttatatgtatacgtatagatatgcgtacggtaattttttcggtttacgtaggatcggaaggtgaaatattcgatgaaataaaagtaatgtgtgatgatagtaatattataaattttttagatacgttggtggtataaaaagtattttgatttttattttttttgtgtaaattgtagtagtttattttgttagatgttaagagaggtagttgtttattaaatagaaagataattaaaaaagaaggaatggatatatgtataaatatagtgtttatttaaaaattaggtattattagtaaaatatttattattaaattggtaggagatattgtttaatgggtggcgtaggaagtttttttttaaaattttgtgattaggattatttaggtttggcgcggtggtttacgtttgtaattttagtatttggggaggttgacgtgagcggattgtttgagtttaggagtttgagattaatttgggtaatatggtgagattttatttttataaaaaatgtaaaataatagtttagtgtggtgatgtatgtttgtggttttagttatttggaaagttgagacgagaggattatttgagtttgggaggttaaagttgtagtgagtcgtgagttaattattgtattttagtttgggtgatagagtaaaagaaataaaaagaaaaaggagtacgtagttttgttttgaaattttttcgtggagtttgtttttgtttttttgtttttttatagtttttttatttggcgggatttatttttttttagtcgaattagttttaggaaaggatttgaaacggagttggttgtttttttgttgtgtttatttagaattttttattgtatatttattatattgttttataataattttttatatttttttatatgtgattataataatgttaaaggtaagtgttaaattttatttatttttataatattaaagtttggtatagatttgatgtatagtatgtagttaataagtgtttgttgagtaatgaataagagtaattcgttatattaattgattaaattaagattgataatagtttttttttttttatgttttgggtattttaatgttaattagaattaaagttataaattaagtgaattttaaaaatagaattttaggtattagtggagtaagtggagggaaggttataggtgaggaggtgtggaaggatgttttttaaaaattttattatttagttgta

SEQ ID NO: 450 - DNA, 2415 bp, Artificial Sequence
  chemically treated genomic DNA (Homo sapiens)
taaggatgtgggaataggtaagtaatttttatattggatttttattttagggagttgggttttagttatagttttgagttgtgtgattttgggtaggttttattttttcggggttttgttttattagttgaatagtatgaggatgagttatagttaatatttgttttatgatatttatttagtattatataagtgttatttttgtttttttagttaatattgacgtgggtagtattatatgtttattttatagatgaggaaattgaagtttgaagaagttaaatatttattttagaatatatagttggtaagtggtagatttggaattggaatttagtttagtttgattttttaatttatgtttttgattattatattgtttttttaagtttagatttgaaattttattttttgtgtggttgtgtgtttgggataggggtaattaatttttgattattttatatgttgtatagaatttggagaggattttttaaagtaaatgaatttcgaaagttggattgtagagtaaacgagtgtagttaatttagttaggggtttgtaagagggagaaagagaaaaagattgtggaatggaaagttttttaatttaagttttttttaaggggtagttattttttgttttatagtttagggtttgtatgtgttttttttggagtggaaaaatatataagttataaggaatttaatagatagaaaggcgtatagaggaatttaaagtgtgggttggggggcgaggcggtgggcgggaggcgagcgggcgtaggcggaatatcgttttttaagttaagtcgtcgtaaataaaaaggcgtaaagggagagaagttggtgtttaacgtgagttaggagtagcgtttcggttttttttttgtttattttaaaagtattttttgtattgtttttaaggtgagaaataggaaagaaaacgtcggtttgtgcgttcgttgtttgtttttttggttgtttgtttttgtagggttgttgggagtttttaagttttgtgagaattttgggagttggtgatgttagattagttgggttatttgaaggttagtagttcgggtagggtttatcgaaagtttattcgtatatattaggtaatttaattttttattttgtgtgatagaagtagtaggaagtgagttgtttagaggtaggagggtttattttttgttaaaggggggattagaatttttttatgcgagttgtttgaggattgggatgtcgagaacgcgagcgattcgagtagggtttgtttgggtatcgtcggggtaggattcggaacgtattcggaaggttttttgtaagtatttatttggaaggagaatttgggatttttttgggaatttttcgtttcggttggattggtcgagtaagtttggaaaatggtaaatgattatttggattaattataggtttttagttggtttgtttgttataatttatgattcggggttgggaaaaagattaatagtttacgtgttaaaaaaggggtagagtttgatggagttgggtggatttttttatgttatttgtttttatatttagaggataagtatttttgtagatatttagtgtaagggagattatgtttgattgtatggatgttttgttagtgagttttgggtaaattttggatttttatattgcgagttcgtttttttgtatgttttaggagaaagtttttaaagtatgttttagtggattgatttaaatcgaatggtagtatcggtatattgtttaatgtaggtttatttttttttttttttttattaagaaaaaaaaaattgttttttttgtatgtaataaagacgttggaaataaattgtattggtagtaagataaaggatttaatgatttaatgttgaaggggtgtgatatgttggtatgtatattgattttttttgttgaaaattttttgttagatgttttttttttaaataatttttttcgtttttatgtttttttttttattaattttatagttttttgaaaatagtttttaaaatatgtataaaaatgtggggggtggggagtagagggtgattataagattttaaaatattttttaagtagggtaatttgatatattttgtagtttttattaaaatgtatgtagagtggaatttaattttgttgttttttggattagttattagttgtataggtttttttattttttgtgtattttaatagtttaaagtaattaaaatatgatattttttttgaaaggaatttagtttaattaaggtggttgttgttttcgaagtttataaattattagtttaagttgtcgtttttaatgttttttttgttaaggaaaggtaatattttttagtattgattttgttgttatttttttaagttattttgttggtttaagaagttgttgttttgt

SEQ ID NO: 451 - DNA, 2415 bp, Artificial Sequence
  chemically treated genomic DNA (Homo sapiens)
gtaaaatagtaattttttagattaataaagtgatttggaaaggtggtagtagggttaatgttaagaaatattgtttttttttagtaaggaaaatattggaagcggtagtttgaattggtggtttatgaatttcgggagtagtagttattttaattaaattaaattttttttaaggaaaatgttatattttaattattttggattgttggaatatataaggggtggggggatttatataattagtagttaatttaaagaatagtaaagttaaattttattttgtatatattttagtaaaaattgtaaaatgtgttaaattgttttatttgaagaatgttttaaagttttgtggttattttttattttttattttttatatttttatgtatattttaaaaattgtttttaagagattataaggttggtaaggagaggagtatgggggcgggaggggttatttgggaagaaaatatttaataggaaatttttagtaaagggaattaatatgtatgttagtatattatatttttttagtattaaattattaaattttttgttttgttattaatgtagtttatttttaacgtttttattgtatgtaagagagataatttttttttttttggtagaagaagggaaaaaaataaatttatattgagtagtgtgtcgatgttgttattcggtttgggttaatttattgaagtatgttttgagagtttttttttggagtatgtaggaagacggattcgtagtgtagaaatttaggatttgtttaggatttattgatagaatatttatatagttaaatatgattttttttgtattgaatgtttgtaaaagtgtttattttttaggtgtggaggtaaatggtatagaaaagtttatttaattttattaaattttgttttttttttggtacgtaggttgttggttttttttttagtttcgaattatgaattatgatagataagttagttaaaagtttgtaattgatttaaatgattatttattattttttaggtttgttcggttaatttagtcggggcggggggtttttagaaagattttaagttttttttttaagtaaatgtttgtaaaaagtttttcgaatgcgtttcggattttatttcgacggtgtttagataaattttgttcggatcgttcgcgttttcggtattttagtttttaaatagttcgtatgggggaattttggttttttttttggtaaagaatagatttttttgtttttgaatagtttattttttattatttttgttatatagaatgaaagattgaattgtttaatatatgcgagtgaattttcggtgaattttattcgggttgttaatttttaaatgatttaattagtttgatattattaatttttaggatttttatagagtttaaaaatttttagtagttttgtaaaagtagatagttagagaggtaggtagcgagcgtataagtcggcgtttttttttttattttttattttaaaaataatataagaagtgtttttaaaatgagtaggggaggagtcgggacgttgtttttggtttacgttgagtattaatttttttttttttacgtttttttatttgcggcggtttagtttggaaaacggtgtttcgtttgcgttcgttcgtttttcgtttatcgtttcgttttttagtttatattttaaatttttttgtgcgtttttttgtttgttaaattttttataatttatgtatttttttattttagaaaaagtatatgtaagttttaaattgtagaatagagaatggttattttttgggaaaggtttgggttgggaaattttttattttatagttttttttttttttttttttttgtaagtttttggttgaattgattgtattcgtttgttttgtaatttagttttcgagatttatttattttgaaaaattttttttaggttttatgtagtatatagagtagttaggaattggttatttttgttttaaatatatagttatatagaaaatgagattttagatttggatttgaaaaaatagtatagtggttaagagtatgggttggggaattaaattgaattagattttaattttaggtttgttatttattagttgtgtgttttgggataagtatttaatttttttaggttttagtttttttatttgtaaaatgggtatataatattatttacgttagtgttaattgggaggatagaaataatatttgtatggtgttgggtaaatattatggaataaatgttagttgtgatttatttttatattgtttaattggtgaaataaaatttcggggagatgagatttatttaaggttatatagtttagagttgtgattagaatttagttttttaggatgaaagtttaatgtgaaaattatttgtttgtttttatatttttg

SEQ ID NO: 452 - DNA, 5001 bp, Artificial Sequence
  chemically treated genomic DNA (Homo sapiens)
ttaggaagtttatttatgggaaatttatatttatggtgttttgatgttgtagaggatattttgagttggttggagtaatttgggatataggttaatcgattgtaatttaatttttgaggttatttagtattttttatagtggttatttaaaaaaaaggtagttaggtgtggtggtttaagtttatatagattttagaattttggaaggttgaggtgggaggattatttgagttaaggagtttgaggttagtttgggtaatatgaagaaattttgtttttataaaaaataaaaaaaattagttaggtatggtggtatgtatttgtagttttagttttttgggaggttgaggtggaagaatgatatgagtttagtaagtcgttgtaattagtcgtgattacgtcgttgtattttagtttgggcgataaaaagaaaaagaaaacggagtttgtttattgggtgtggtagataaggtaaatttttttttattttttatattttataattttggatgtgtttatagttatggtagtgttttgtaatgatgtagttgatgataggtgtgatgttggagatttttttatttgattgttgttattagttttattagtttttaacgtttggtgtttgttttaaagggtatgttttaggagtcgttttaaatttttaaagtattattttttatataaataagaagtgtaagtaagtagtttgagtttagttttttaataggaatattttattattattagattaagtttttttattataatgattgatttgtttttgaattttgtggatttattttttaaaatgttttttttttttagtttttatagttagtgttttaaaagtgatttgtagtattttttgttgagacgaatgtattagttttttaattagtttgtattttttttatttttttaagttagtgttagattattttgtttgaaaaattatttttagtgtgttttattttagtagaaatgttttttagtttttaattaataattatattaaatttttgtttttgtttgcgttttaagggtatttataggtcgggcgtcgtggtttttatttgtaattttagtattttggaaggtcgaggcgggtagattatttgaggttaggcgttcgagattattttgattaatatagtgaaatttcgtttttattaaaaatataaaaaaaaaaaaaatagtggggcgtggaggtgtacgtttgtaattttagttattcgggaggttgaggtaggagaatcgtttgaattcgggaggtagaggttttagtgagtcgatatcgcgatatagtattttagtttgagcgatagagcgaggttgtgttttaaaaataaataaataataaattaaaaaaataagagtatttataatttggttttagtttgaatttttttttttattttaatacgtagttttagttatatttttttgacgtttgtaaataagtttagttttttttgttgtgaagttaagtttaggtggttttttttcgtttgattgtttttttattttatttatcggaagtttagttatttttcggagggttgtacgggggttgtaagaagtaacggaaacggtttagtatttgttattttttattatattttttttaataaaggggtaattttcgttaatggtagtgtagattttttaatttttatatatggaagatttatattatttaggattgttgtttaattgttgagagagtatttgatatttaatagtttattaggttataagatagcgtaggaaagaattttttgttgtttttttatgttattttgaatagttggtttatagagttattgtaaatatataaaatatgattgttagggtttagtagtgaggaaggtgggaattagttttgatttagttaattgtgtttaggagaagttgtttaattttaaaggattttattattattagaattaataatattaattttaggggtaaaaataaagataaatgtgtgtaaattttgtttgtagtttcgggtacgtcgtgggtgtttaagaattgtttttaggtagtcggtggggataaagtttgtgtgttttttgttttggaataggttttaaggtcggtttatttgtaaagtaagggtacggcgtaagagtattgaatacgggttggaagggcgttggttttatttttagtttataggtcggttgggcggcgttgattagtagttaggtttcgttttttttaggaacggttacgggggttttgggagggtatgaatgtttttttgtagtgaggtttttggatttcgcggtttttcggtagcgtaattaaaatttaggggtaggcgtcgtagtcgtttagtgtagttagattttcgtcggtatttttaggggcggagtcggaggtagggttttcgggtcgtattaattttacgggggtaggggtcgttttttttcggtcgcgcgttatttaagtacggtagataggtagcgaggttgtcgaggtcgaggttagtttgtagttttttttttttcgtgttttgggcgcggggtgtacggtaagcgcgggcgggcgggataggtacgtagggtattttcggggttgggcgcggcgggcgcggggcggggttcgcggggggggggggcggggcggcggtgtttttgcggcgtagttggggtcgcggttttgtttttcgcgtttttttaaggttcgcgggcggcgtaggagcggtattcgtggttgtggtggtttcggtagcggttttagtagatcggcggtattagcggtagtattagtattagtagtatgttgagtcgggtagtgtgcgggtgagaagaaaggggattcggttacggttttaagggcgaaggggttcgcggcgggtagggttttcgcggtaatggcgatagtggtcgtatcgggtttggcgggatcggggtatttgtaggcggttttttcgggagtgttcggcgcggcggttggagcggggattcgtagggaggggacgcggggattcgggggacgtcgcgcgttgtcgtttttcggtagtttagtttgcgtagacggtttcgcggcgttgattgatcgggttgtgttttttcgtttttagtattagtaggtagttggtttcggttttggggtatttgggttttaggtagaagtatagttttttcgatttgttttacgattacggcgttttggaattttatattaacgcgtagattatgtagttgtattatagtaagtattacgcggtttacgtgaataatttgaacgttatcgaggagaagtattaggaggcgttggttaagggtaggttttaggttgagcggcgggaggtagttttcggtagaggcgattttagggagttaggttttatacggacgggttttttcgtggaggagaattcgtttcgtatttgtatcggtttcgagttttttaggtacgatagttttttttttaaatatatggtttattttattgtagaaggagtgtttcgatgggtttgaatatatttttgttattttagggaatttggggttttgcgaaggagtttgttttattgttgtgagttatatttcgttatatatattgttagtattggtgaattgtagggtttgaaaagaaagttttattgtgttattcgttttttttgtaaattgaaattgtttttgttgtataatgtgttttggggaaatgtttggttttttaggtaggtgtgttagtcgtttgtaggagggttgagagcgtttgtttattggtggttagatattatcgggttcgtaggtgtttttgagtgttagggttattttttgatagaagtgggagtggtgttttattgttaggttatattgaaggtgggagataggaggatattatttcgtgttaggaattatggtttttgttatttttttgagagtaaacggggtcgggattttagtttaggatttggagattttttgtatttttagttattttgtaggtgaaattttattgagtttatttgattttaggtgggagaggaggaggtatatcgttgtggtgtgcgttattaaaaaagtagtaatttaattgtggaatagtttaggatttttagatttgatattttttttgattttttttaggggttaaagtttataaggaaaatagttttttagtgggaaattgaaataggtttgtttttatttattatttatttatatttgtaatgtaattaaaatatatgttgttaatttttttttttttttttaagagttcggttgataaaattaggggtatgtggattttttgagtttgtgttttttgggggtgtgtatgggaatgttatgttttaacgttttttataaaatagtattgtttttttaatttattcgttagtggtttgtataaggaagataatcgatagttatgttttttagattttttgtattgtttggtaagttacgtagtaaaaaatgtttatttttttttaaatgttttgaatttcggggttatgaaatttgttgagtaatttttagatagttatattttgttgattggaggtatttagtggaaaaatgtagtattttagtttgattgtgtttgaagtaaatgattaaaagaggaggaagttattatattttggaagatttatttgagatagacgaattttgaattacgggaaaaggtttcgtgatttaggaaataataaatttgggaaatatgtaatggggagagattggggaatattttagttgtgaaagtattttttgtaaggtaatatttgatattaggaatttttttttttagtattttaaaaataatttaattttagttttttatttgtggaattagagttttatttatgtaatataatttattggaaaaaagttttttattgtattgtattatattgtttataagtgattgagtatttgtagagtttttttttatttaaatatattttaaaaattattaaaaagatttttatgtttgaaaatttggggaaaaaagataaaataatgttataattttatt

SEQ ID NO: 453 - DNA, 5001 bp, Artificial Sequence
  chemically treated genomic DNA (Homo sapiens)
gatgagattatgatattgttttattttttttttttaagtttttaaatatgaaaatttttttaataatttttaaaatatgtttaagtaaaagaaagttttgtaggtatttaattatttataaataatatagtataatataataaaaagtttttttttagtgggttgtattatataagtaaggttttgattttataagtaaaggattgaaattaagttgtttttaaaatattgaagagaaaggtttttggtgttagatgttgttttataggaagtatttttataattggggtattttttagtttttttttattatatgttttttaaatttgttattttttaaattacggggttttttttcgtaatttaaggttcgtttgttttaagtaaattttttagaatgtggtaattttttttttttttaattatttattttaaatataattaggttgaaatattgtatttttttattagatgtttttagttaataagatgtgattgtttaaaaattatttaataaattttataatttcgaaatttaaaatatttaaggaaaagtaaatattttttattacgtagtttattaagtaatatagagagtttaaaaaatatgattatcgattattttttttgtgtaaattattaacgaataaattaaaaagataatattattttgtaaaaaacgttaaaatataatatttttatatatatttttaaaaggtatagatttaaaaagtttatatatttttggttttattaatcgagtttttgagaaaaaaaaaaaaagttaataatatatattttaattgtattataaatatgagtaaatagtaaataaaaataagtttgttttagttttttattaaagggttattttttttgtgaattttgatttttaagggaaattaagaaaagtattaagtttaaagattttgaattgttttatagttaggttattgtttttttggtaacgtatattataacggtgtgttttttttttttttatttgaagttaagtgggtttagtgaagttttatttgtagggtagttggggatgtagggagtttttaagttttaggttggagtttcgatttcgtttgtttttaggaagatgataaggattatggtttttagtacggagtagtgtttttttgttttttatttttagtgtgatttggtagtaagatattatttttatttttattaggaggtgattttgatatttagagatatttgcggattcgatgatgtttggttattagtggataggcgtttttagtttttttgtaaacggttggtatatttatttgagagattaaatatttttttaaagtatattatataataagaataattttaatttgtaaaaaaaacgagtgatatagtagagttttttttttaggttttataatttattagtgttggtaatatgtgtaacggaatgtggtttataatagtaaggtaagttttttcgtaggattttaagttttttgagatgatagaagtgtgtttaaatttatcgaggtattttttttataatgaggtagattatgtgtttaaaagagagattatcgtgtttggaaaattcggaatcggtataaatacgaagcgagtttttttttacggagaggttcgttcgtatggggtttggttttttggggtcgtttttgtcggggattgtttttcgtcgtttagtttggaatttatttttggttaacgttttttggtattttttttcggtgacgtttaggttgtttacgtaggtcgcgtggtgtttgttgtggtgtagttgtatgatttgcgcgttgatgtgaggttttagggcgtcgtagtcgtagggtaggtcggggaggttgtgtttttgtttggagtttagatattttaaaatcggagttagttgtttgttggtgttgaagacgagaaagtatagttcggttagttagcgtcgcgggatcgtttacgtaggttgggttgtcgaggaacggtagcgcgcggcgtttttcgagttttcgcgttttttttttgcggattttcgttttagtcgtcgcgtcgggtattttcgggagaatcgtttgtaggtgtttcggtttcgttaggttcggtgcggttattgtcgttattgtcgcggaggttttgttcgtcgcgagttttttcgtttttggggtcgtgatcgggttttttttttttttattcgtatattgttcggtttaatatgttgttagtgttggtgttatcgttgatgtcgtcgatttgttgaagtcgttgtcgaagttattatagttacgagtgtcgtttttgcgtcgttcgcgggttttaagaaagcgcggggagtagggtcgcgattttagttgcgtcgtaagggtatcgtcgtttcgtttttttttttcgcgggtttcgtttcgcgttcgtcgcgtttaatttcgggggtgttttgcgtgtttgtttcgttcgttcgcgtttgtcgtatatttcgcgtttagggtacgggagaaaggaggttgtaggttagtttcggtttcggtaatttcgttgtttgtttgtcgtatttgagtggcgcgcggtcgaagggaggcggtttttgttttcgtggagttggtacggttcgaaggttttgttttcggtttcgtttttgagggtgtcggcggggatttggttgtattaggcggttgcggcgtttgtttttgagttttggttgcgttgtcggggggtcgcggggtttagaggttttattgtaaaaagatatttatatttttttagggttttcgtggtcgtttttagggaagacggggtttagttgttggttagcgtcgtttagtcggtttatgagttgagggtagagttagcgtttttttaattcgtatttagtatttttgcgtcgtatttttgttttgtaagtaagtcgattttgggatttattttaggataggaggtatatagattttgtttttatcggttgtttaagaatagtttttggatatttacgacgtgttcgagattgtaggtaggatttgtatatatttatttttatttttatttttagggttggtattattgattttagtaatagtgaaattttttgaggttaagtagttttttttgggtatagttaattgagttaggattagtttttattttttttattattaagttttggtagttatgttttgtgtgtttatagtaattttgtgaattaattgtttaggataatataaaaggataatagaggatttttttttgcgttgttttgtagtttagtaagttgttaagtattaagtgtttttttaatagttaaataataattttgaatggtgtgaattttttatgtgtagaggttaggaaatttatattgttattggcgggagttgtttttttattgaaaagaatatgatggaaggtagtaggtgttgaatcgttttcgttgttttttgtaattttcgtatagtttttcgaaggatgattaggttttcggtaagtggaatgggaaaatagttaggcgaagaggaattatttgaatttggttttataataggaagggttgggtttgtttatagacgttagaagaatgtaattagggttacgtgttggggtgaaaaaggaaatttaggttgggattaggttatagatatttttatttttttaatttattatttatttatttttgagatatagtttcgttttgtcgtttaggttggagtattgtgtcgcgatgtcggtttattggaatttttgtttttcgggtttaagcgatttttttgttttagtttttcgagtagttggaattataggcgtgtatttttacgttttattattttttttttttttgtatttttggtagagacggggttttattatgttggttaggatggtttcgaacgtttgattttaagtgatttgttcgtttcggttttttaaagtgttgggattataggtaggagttacggcgttcggtttatagatatttttaaaacgtagataagagtaggggtttgatgtgattgttaattggaagttgagaaatatttttgttgaggtgagatatattgaaagtggttttttaggtaaggtggtttggtattgatttggggggatgaagggagtgtaggttagttaggaagttggtatattcgttttagtaggaggtattgtaggttatttttagggtattagttatgagaattggaagaaaagggtattttgaaggatgaatttataggatttagagatagattagttattgtaatggaaagatttgatttagtgataatgaaatatttttattgggaggttgagtttaggttatttatttgtattttttgtttgtatagagagtgatattttgagagtttaaagcgatttttaggatatgttttttagaataagtattaaacgttgggggttggtaggattgatagtagtagttaggtagaagaatttttaatattatatttgttattagttatattattataaaatattattatgattgtgagtatatttaaggttgtgggatatgggaggtaaagaaaagtttattttgtttattatatttagtgaataggtttcgttttttttttttttttgtcgtttaggttggagtgtagcggcgtgattacggttgattgtagcgatttgttgggtttatgttatttttttattttagttttttaagaagttggaattataggtgtatattattatgtttggttaattttttttattttttgtagaaatagagtttttttatgttgtttaggttggttttaaattttttggtttaagtgatttttttattttagttttttaaagttttgggatttatataggtttgagttattatatttggttgttttttttttaggtggttattgtagagggtattgaatggttttagaagttagattatagtcgattgatttgtgttttaagttattttagttagtttaggatgttttttgtaatattaggatattatgaatatggattttttatagataaattttttaa

SEQ ID NO: 454 - DNA, 2483 bp, Artificial Sequence
  chemically treated genomic DNA (Homo sapiens)
atattaaatttagaaaaatagggtggggatacggtagggtttagtagtattattttttgaatatttataaatattgttttttttttagtaggtggagttatttgttgttttttgtttttatgtggttttttttatatttaaagatgggattaggatttgtgttggagaatagttttatttttttttttttattttgttttggtataattaacgaatattttttttttttaaagatagagttttatttttgtcgtttaggttggagtataatggtataattttagtttattgtagttttcgttttttgggtttaagtgatttttttgttttagttttttaagtagttgggattataggtatatattattatgtttagttaatttttgtatttttagtatagatagggttttattatgttggttaggttggttttaaatttttgattttaggtgatttatttgttttagttttttaaagtgttgggattatcggcgtgagttatcgtatttggtcgttaatatataattaaattttaaatataaatttgtatattggttgattacgtgtatttgtaaaatttttattttttatttttaggaagagggggttttcgtttttattttttatttttatttttgaaattgcgaagaggattataggtaatttgtaggtattttcgttagagcgtttgtgtttttagatatttttttttattgtcggtaattcggttttattgtcgcgtttagttttttttgtttattgttttggtttcggcgtttggaaatcgcgtgtttattaaaacgtgaaggtgaatttcgtaagtttatgtaaattggataggagggagagtagaggtagagattatcgtgtttattcgacgttttgagcgaaaagttacgtgtgtttacgtgacgatggagataggaggattagggttttgtttgtttttttttttgagtttttattgtatttagttttggggtttgggttttcgacggttattatttttttatttgggtttttgcgtagttaagcgtagtttcgtacgtttattttttacgttagtttttgtagcgagagtttggtatgtttttttagggagatgaattttttggtgtttttgaggaagcggcgttcgttgtgtttggagttttagaggtttgggggtattagtcggcgtaggtaggttcgtacgaagtcgtatatttgttaggggttgttgtgttggcggagtagttgtattaggcgacgggggtttgtgttttttttttcgggggtcgttatagagttttggggtttttttcgggtatagatatcggttgttggggtgatcgtagttcgtagcgggtagtgcgttttgaggagtatttcgtaggggtattgcgcgtggtttttaagtagttttagaaataggggtcgtatttgttagtagcgttggggtaggcggggtaatttgcggggagtttttggtatttagggtttggaatttagaaagatggtttttacgagttttcgagcgttagttaggttgggttttagagagttgagtaggaaggagggtcgtagttgttttttgtcgtttgaggagtagaggaagtgtttggtttcggcgtatatcgggggataaggcgtgttttagggacgtggtggtcgcgatgtggatggggggttcgcgtggtgttggcggtttacggatgggtgggagtggcgcgtgttagagagcgtattttttaaagaggtggttttttcggcgggtttggtaggtgatattatatagaaattacggttattcggtttacgcgttttgttcgggtgggtttaggatttttgtttaacgggcgttcgtttcggtttaggggtagcgttacgtttgggttttttgggtaacggtagatttcggttggtattgttttcgcgttttttcgtattcggggttggtaggtttagggggatttcggtttttttgacgttatggttttaggttcgttcgtattttagacgttttcggggtttattagcgtgtggcgggggtcgggtttgagtggtagcgtcgagttggtatagcggcggttcgtatatttggtaggcgtagttgggagttattagtataaagagcgcgtagcgtgttagtaggtgaattagtacgtcgtcgtttacgcggcgtagtagtagtttttacgtttcgttttttcgtagtgcgtcggttatcgtgttgggtaggtagttgcgtacgttggtggtgaaggtttcgggggggttttcgcgggtttcgtttagtagcgcgaagtcgaaggttagtacgtttttcgcgtcgcgttcgtatagtttttgtagtattcgggttattagtttttttaggtaggatatttgcgggggaagcgttttgagtcgtttgcgttgtttttcgtatgtcgttggtttttttcggtcgtttttaattttagtcggacgtcgatttcggggaggtttatttggcggaagga

SEQ ID NO: 455 - DNA, 2483 bp, Artificial Sequence
  chemically treated genomic DNA (Homo sapiens)
ttttttcgttaggtgggttttttcggggtcggcgttcggttggggttgagggcggtcggggggaattagcgatatgcggagagtagcgtaggcgatttagggcgtttttttcgtaggtgttttgtttgaaggagttggtggttcgagtgttgtagaggttgtgcgagcgcggcgcgaagaacgtgttggttttcggtttcgcgttgttggacggggttcgcgggggttttttcgaggtttttattattagcgtgcgtagttatttgtttaatacggtgatcgacgtattgcgggggagcggggcgtgggggttgttgttgcgtcgcgtgggcgacgacgtgttggtttatttgttggtacgttgcgcgttttttgtgttggtggtttttagttgcgtttattaggtgtgcgggtcgtcgttgtattagttcggcgttgttatttaggttcggttttcgttatacgttagtggatttcgaaggcgtttgggatgcgaacgggtttggaattatagcgttagggaggtcggggtttttttgggtttgttagtttcgggtgcgaggaggcgcgggggtagtgttagtcgaagtttgtcgttgtttaagaggtttaggcgtggcgttgtttttgagtcggagcggacgttcgttgggtaggggttttgggtttattcgggtaggacgcgtggatcgagtgatcgtggtttttgtgtggtgttatttgttagattcgtcgaagaagttatttttttggagggtgcgttttttggtacgcgttatttttatttattcgtgggtcgttagtattacgcgggttttttatttatatcgcggttattacgtttttgggatacgttttgtttttcggtgtacgtcgagattaagtattttttttattttttaggcgataaggagtagttgcggtttttttttttatttagttttttgaggtttagtttgattggcgttcggaggttcgtggagattatttttttgggttttaggttttggatgttagggatttttcgtaggttgtttcgtttgttttagcgttattggtaaatgcggtttttgtttttggagttgtttgggaattacgcgtagtgtttttacggggtgttttttaagacgtattgttcgttgcgagttgcggttattttagtagtcggtgtttgtgttcgggagaagttttagggttttgtggcggttttcgaggaggaggatatagattttcgtcgtttggtgtagttgtttcgttagtatagtagtttttggtaggtgtacggtttcgtgcgggtttgtttgcgtcggttggtgtttttaggtttttggggttttaggtataacgaacgtcgtttttttaggaatattaagaagtttatttttttggggaagtatgttaagttttcgttgtaggagttgacgtggaagatgagcgtgcgggattgcgtttggttgcgtaggagtttaggtgaggaggtggtggtcgtcgagggtttaggttttagagttgaatgtagtaggggtttagaaaagggggtaggtagagttttggtttttttgtttttatcgttacgtgggtatacgtggtttttcgtttaggacgtcgagtggatacggtgatttttgtttttgtttttttttttgtttagtttgtataaatttacgaggtttatttttacgttttgatggatacgcggtttttaggcgtcgaggttagagtagtgaatagaggaggttgggcgcggtagtggagtcgggttgtcggtaatggggagaagtgtttggaagtatagacgttttggcgagggtgtttgtaggttatttataatttttttcgtaattttaagggtgggaatgagaggtggggacgagaattttttttttttgggggtgggaggtaagggttttgtaggtgtacgtggttagttaatatgtaggtttgtgtttaagatttaattgtgtgttgacggttaggtgcggtggtttacgtcggtaattttagtattttgggaagttgaggtaggtggattatttgaggttaggagtttgagattagtttgattaatatggtgaaattttatttgtattaaaaatataaaaattagttgggtatggtggtgtgtgtttgtaattttagttatttgggaggttgaggtaggagaattatttgaatttaggaggcggaggttgtagtgagttgagattgtgttattgtattttagtttgggcgataagagtgaaattttgtttttaaaaaaaaaaagtgttcgttgattgtgttaggatagggtagagggagggagataagattgttttttagtatagattttggttttatttttaggtatgaagagggttatatgggagtagaggatagtagatggttttatttgttgaggaagggatagtgtttgtgggtgtttaggggatggtgttgttgggttttgtcgtgtttttattttgtttttttggatttgatgt

SEQ ID NO: 456 - DNA, 2374 bp, Artificial Sequence
  chemically treated genomic DNA (Homo sapiens)
tgaaatttagagaggttaaaggatttttttaaggttatagagttagtaataaatatagtttttattataattttgtttattatagttttgtgtgttcgttttttttatagttatttttattatattagagtttgttttagtatatgattttatttaatagatttttttttttttttttttttttaagcgttaaatatatgttattaaaaaaagtgatatattgggtagtattttaaatttaagtgttttgttaattaaaattatatttaaattttataagtatataggtttagttcgtaaaatagaaaggtataattatttatagttttttaagttttttttgaaattggtgtgtatgttttggaagttttaagaataattattgaaaatttatttattaattttgaatggtttgtaaagtattagttttatttttattttttttagagtttatagttattttttttttggatatattttattttgtagattatgtaaggtaatgtaattaattttaaagtttttttagttttttttaaagtataagaaaattttttaaaatattgaatataaaattaatttttgggaagttttagattttgagaataggaattattttttaattattttttttgattgcgattatttaggttttttatttaaaatgtattaattggaaatatttaaaagaaacgtgggagggggtcggggggtcggaagaaagtggagaatagatatttatatatataaaaaaagggatttgatatatgaataatatttttgtttaacgttaatttttcgtttcgatttaaggtttgatataatttttgttgtttttttgattattttttttgaagagaggggttaaagtcggtacgttttgcggagattgtttttagatttaggaaggggtatattagggtagcggacgatttgtttcgcgttttttaaaattattgttagtttaattagtaaatcgagagggtagttttgagatgtaggatggttagagagttgaaatgagtttgggagttaagagtgggatggggcggacgaataggcgtggggagggtaaataacgtattaggagcgggagtgagaatagggtcgaggtggggttagcgaaaggtaaaaggcgaagagaagaaggggacggggtttcgggtgggatgggcggtagtaaagggggaggggacgcgagaaggttgggggagggggagaagggttcggggcggggcggaagggagtaaagaggcgggatgaagacggttaggtcgggagggtttttatttgtagtttcgttcgttttattttttattgggttttttttatttcgaagcgggtttattcgtgttgtaggaagtgtaggattttcgggagattgtattgggttcgggtcgttttcgtcgtagtcgtttcgtcgtcggtcgcggtagttttcgttagaggttcgagttttttggtatcgtcggcgttcgggtggttgttgttgaagaagacgtcgggattcgtttgttcgtttatggcggtcgtagatattcggggagttgtttcggcgtttagtagcggaggtaatagcggcggtaagtagcgttttttttttttttcgtcgttttcgtttatattttagttagtagggagtagttttttgggcgcgggggtcggtcgagttcgtgacgggtcgggaaatgggttaattgcggcgcgttggcggttcggggtttgtcgggaaatgtagtcgcggggcggggcgcgggttagcgcggttcgggcggtttgtagggttgtgttttagtttgggcgtggtttcgggttcgtttcgtttcggttcgtcgcgtagggggtcggttgggcggggagagcgggttttttttggggtcggttgggcgcgggcgggcgggtttttagtttttttcgtacgcggaagttcgcgggcggcgtattttgttgtatttaaaaatatatatatatatatatatatatatatacggaagttgttacgttaagatatttgttcgagttgtatattttttaaggttttttggtcgttttgtgaaggaataggtttaaagcgagttattcggtgcggtcgcgggatcggggttttttcgttagttgttttgcgtgttttcgtttcggtttcgtgttcggagttttttttattttagacgtttttttattttgttaatttgcgggtcgttgtcgtttttgttttttttttttgattcgaggggtttaaatttgttatttgattagtttttatttttaaggaacgtcgattatttttttaagataacgtcgtagttttttgttgttgtttttaaattgtggtttgttgatagtttatttgaaaaattgtttcgttgaagttttt

SEQ ID NO: 457 - DNA, 2374 bp, Artificial Sequence
  chemically treated genomic DNA (Homo sapiens)
agaaattttaacggagtagttttttagatgggttgttaataaattataatttggaagtagtagtagaaagttgcggcgttgttttagaaaggtgatcggcgttttttagaaatgaaaattggttaggtaataggtttgagtttttcgagttaaaagagaaaggtaagagcgatagcgattcgtagattggtagaatggaggagcgtttagggtgagagaaatttcgaatacgaagtcgaagcgagagtacgtagggtagttggcgggagaatttcggtttcgcggtcgtatcgggtagttcgttttgagtttgtttttttatagaacggttaggaagttttaaaagatgtgtagttcgggtaggtattttggcgtgataattttcgtgtgtgtgtgtgtgtgtgtgtgtgtgtgtttttgaatgtaatagggtgcgtcgttcgcgaattttcgcgtgcgaggaagattggagattcgttcgttcgcgtttagtcggttttagaggaaattcgtttttttcgtttagtcggttttttacgcggcgagtcggggcggggcgggttcgaggttacgtttaagttgaggtatagttttataggtcgttcgggtcgcgttagttcgcgtttcgtttcgcgattatatttttcggtaagtttcgggtcgttagcgcgtcgtagttgatttatttttcggttcgttacgggttcggtcggttttcgcgtttaggaggttgttttttgttgattggggtgtgggcgggagcggcggagggaggaggaggcgttgtttgtcgtcgttgttgttttcgttgttgggcgtcggggtagtttttcgggtatttgcggtcgttatggacgagtaggcgggtttcggcgttttttttagtaataattattcgggcgtcggcggtgttaaggggttcgggtttttggcggaggttgtcgcggtcggcgacggggcggttgcggcgggggcggttcgagtttagtatagtttttcggggattttgtattttttgtagtacgagtgggttcgtttcgaggtggagagagtttagtgggaggtggagcgggcggagttgtaggtaaagattttttcggtttggtcgtttttatttcgtttttttgttttttttcgtttcgtttcggattttttttttttttttttagttttttcgcgttttttttttttttgttgtcgtttattttattcggagtttcgtttttttttttttttcgttttttgtttttcgttgattttatttcgattttgtttttattttcgtttttggtgcgttgtttattttttttacgtttgttcgttcgttttattttatttttaatttttagatttattttaattttttggttattttgtattttagggttgttttttcggtttattaattgggttggtagtagttttgagagacgcggagtaaatcgttcgttgttttggtgtgtttttttttaggtttagagatagttttcgtagaacgtgtcggttttggtttttttttttaaggaaggtgattaagaagataatagaagttgtgttaggttttgagtcgaggcgagaagttgacgttgggtaaaagtgttatttatatattagatttttttttttatatatgtaaatgtttgttttttattttttttcgatttttcggtttttttttacgttttttttaggtatttttaattaatgtattttgaatgaaggatttagatgatcgtagttagagagaatggttaagaggtggtttttgtttttagaatttgaaattttttaagggttaattttatgtttagtgttttgggagatttttttgtgttttaaaaggaattaaagggattttgaagttagttatattgttttgtataatttgtaagataaagtatatttagggaggagataattgtgggttttgaaaagaatgaaagtgaggttgatattttataagttatttagaattggtgaataggtttttagtggttgtttttaaaatttttagggtatatatattaattttaaaaggaatttaaagaattatgaatagttgtgtttttttgttttacgggttaagtttgtatatttatgaaatttgagtatagttttagttggtaaaatatttgagtttaaaatgttatttagtgtgttattttttttggtaatatgtatttggcgtttaagaaaaaaaagaagaggagaaatttgttaaatagaattatgtgttggaataggttttggtgtagtggaagtggttgtggaaagagcgaatatataaggttgtagtagataaggttatagtaagggttgtgtttgttgttagttttgtgattttgaggaaattttttaatttttttgggtttta

SEQ ID NO: 458 - DNA, 2322 bp, Artificial Sequence
  chemically treated genomic DNA (Homo sapiens)
taggtttggtgcgcgtagagaataattttaagcgtatcgacgttcgcgagttttttttaaatatcgaacgggatttagagttcgagtttataggcggcggtcgggggagggagtagggtgttggtcgtcgttcgggagtgttcgcgttttgggtgatttttggaaggacgtggggtttaaatttcggttggggttgggagagtagtttttagaggtttttcgcgggattttttgtcgggcgggatcgtggttttataggagaagtgggtggtaagttttgtttggcggaaagtagtcgtttttttttttttgggtttggggcggcgttttttatttttgtttttcgttttttatttttgtttttcgtcggttatattttttgttttttggattttaagcgtttcgcgcgtcgaggagtttagcgttagtggcggcggttaggagagattcgggtgttaggaaagatgggtcgtttgggggatagtagggagttcgggggaaacgtaggcgtcgggtatagagtcggtatcggcgtttttagttttgtcgaagatcgcggtcgggtttggttcgcgggaggggttttggcgtcggatttgtttcggttttgcgtgggcggtttcgtcgggttttgtaggagcgacgcgcgttaaaaggcggcgggaaggaggcggggtagagcgcgttcgggatttcgatttggacgcggttagttggagaggcggagcgtcgggaggagattttggtttcgtcgcgattcggtggttcgcgttgttttttcgcgcgtcgggttaaaaaggcgttaacgttcgcggtcgtttatttttcgcggcgtttttttttttcgcgtttatataattcgtttaggggtcgggtagttcgttttgttttttcgttcgcgtattcgttcggaggttcgcgcgttcgcgaaggggacgtagcgaaatcggggttcgcgttaggttagtcgggacggacgtcgatgttcggggttgcgacggttgtaggtaggaggtttagggtcggggggcggttcggtttcgcgggcgggggttggagcgtagcgttgggtaggtatttgggttcgtagtttcgaagttgggaggtgaggggagagcgatcggggacgagttgggataaggcgatataggggttttttcggagttggatcggtttttgggatttggcgttcgcgagaggttggagcggttagagtttagtttgcgaggagacgcgggttttgtttttagcgtcggtcgtttttggcgttaaagatagtttcgtaggggtttcgggagggttttttttttgttgttttttttttatttcgggtttcgagggtcgttgggagggtaatttcgggaagaggtcggggtgcggggcgcgggtgtaggtggaaatcgttagtaagttttttttcgttcgcgcgtttttttcgatttgtagggttgtgttaatttcgaggttttagtttttttgaggagttagggttaggtttttttttggatagggagaaggatttgggcgggggttttgatttatggagttggttattaagcggtttcgatggtttttcgagggatagttttttgtggttttgagtttgtttgtcgagggtttttggtttgttttcggagcggttttaggtagagaaagttcgtgaagaaatggttcgggtcggtttggagggagatattttacgtttttttagtttttgggtcgtttttttttgtagtttttgtttttttcggggtttggatttggggagcgatgattatttttgtttagtttgtattttggtttggacgttaggagataagtttatgtagtatgtatacgtttgttatataaataggggatagatagacgatttttaattagtaagggtgtagggaaaagtaatgtattttaaatttttgattagaggttatttgtttttaaagatgttgttatttgtttatttattgtttggatatttggaaatggtttaggtttattaatataatgttttggtttttgttgttttgttttttgttgttgttattgttgtttatttgtttagttttagttttgggggaggagtaaataaagcgcgtggtttttggtatttattgagcgttgagttatttttttttggatttattcggggaaagattaaaaagtattttattaagaataggatacggtgtttgaaatgttgttatatatgaatgtatgtattacgtatgtagtttttaaaataagataaaaagttggttgggtacggtagtttacgtttgttattttttatagtttttgggaggttaaggtgggtggattatt

SEQ ID NO: 459 - DNA, 2322 bp, Artificial Sequence
  chemically treated genomic DNA (Homo sapiens)
ggtgatttatttattttggttttttaaaggttgtgagggatgataggcgtgagttatcgtgtttagttaattttttattttattttaaaaattatatacgtaatgtatatatttatatatggtaatattttaaatatcgtgttttgtttttaatgaaatgttttttaattttttttcgaataaatttaaagaggggtggtttagcgtttagtaagtgttagaggttacgcgttttgtttattttttttttagagttaaggttgaataaataaatagtaatgatagtaataaaaaataaaataataaaaattaaagtattgtgttaatgagtttgagttatttttaaatgtttagatagtgaataaatagatggtagtatttttggaagtaaatgatttttggttagaagtttggggtgtattgtttttttttgtatttttgttggttgaagatcgtttatttgttttttgtttatgtagtagacgtgtgtatattatatgggtttattttttagcgtttaggttaaaatataagttgagtaaaggtaattatcgttttttaagtttaagtttcgggaaaggtaggggttgtaggaggaggcggtttaggagttaagggggcgtgaggtgtttttttttaggtcggttcgggttatttttttacgggttttttttatttgggatcgtttcggagataggttaggagttttcgatagataaatttagagttatagggagttgtttttcgggaaattatcgaaatcgtttagtaattaattttatgggttaaggttttcgtttagatttttttttttgtttagaggggggtttggttttggttttttagggaagttgaggtttcgggattggtatagttttgtaggtcggagggagcgcgcgggcggggaggagtttgttggcgatttttatttgtattcgcgtttcgtatttcggttttttttcggggttatttttttaacggttttcggagttcggggtggagaggggatagtaggaggagggttttttcggaatttttgcggggttgtttttggcgttaaaggcggtcggcgttgagggtaggattcgcgttttttcgtaggttagattttggtcgttttagtttttcgcgagcgttaagttttaggggtcgatttaatttcgagggagtttttgtgtcgttttgttttagttcgttttcgatcgttttttttttattttttagtttcggagttgcgagtttaggtgtttgtttagcgttgcgttttagttttcgttcgcggagtcgaatcgtttttcggttttgggttttttatttgtagtcgtcgtagtttcgggtatcggcgttcgtttcggttggtttggcgcgggtttcggtttcgttgcgtttttttcgcgggcgcgcgagttttcgggcgggtgcgcgggcggggaggtagggcgggttgttcggtttttaggcgggttatatgggcgcggggaggggaggcgtcgcggggagtaggcggtcgcgggcgttagcgtttttttagttcggcgcgcgggaaggtagcgcgggttatcgagtcgcggcggggttaaggttttttttcggcgtttcgtttttttagttggtcgcgtttaagtcggggtttcgggcgcgttttgtttcgtttttttttcgtcgttttttggcgcgcgtcgtttttgtagagttcggcgaggtcgtttacgtagggtcgaagtaggttcggcgttagggtttttttcgcgggttagattcgatcgcgattttcggtagagttggggacgtcggtgtcgattttgtgttcgacgtttgcgtttttttcggattttttgttgttttttagacggtttattttttttgatattcgggttttttttggtcgtcgttattagcgttgggtttttcggcgcgcggggcgtttggaatttaaggggtaggggatgtggtcggcggggaataggggtgaggggcggggaataggggtgaggggcgtcgttttaggtttaggaggaggggaacggttgtttttcgttaagtagggtttgttatttattttttttgtggagttacggtttcgttcggtagaggatttcgcggagagtttttgggggttgtttttttaattttagtcggagtttgggttttacgtttttttaggggttatttaggacgcgaatattttcgggcggcggttagtattttgttttttttttcggtcgtcgtttgtgggttcgggttttggatttcgttcggtgtttggaaggagttcgcgggcgtcggtgcgtttggagttgttttttgcgcgtattagatttg

SEQ ID NO: 460 - DNA, 1100 bp, Artificial Sequence
  chemically treated genomic DNA (Homo sapiens)
agattgtattttaataaataaataaataaataaataaataaaggtcgagtacggtggtttatgtttgtaatttttgtattttggtaggtcgaggtagatggaatatttgaggttaggagttcgatattagtttggttagtatagtgaaaattcgtttttattaaaaatataaaaattagggttaggcgcggtggtttatgtttgtaattttagtattttgggaggttgaggcgggcggattacgaggttaagagtttgagattaatttggttaatatggtgaaatttcgttttttttaaaaatataaaaagtagtcgggtgtggtggtgggtatttgtaattttagttgttcgggaggttggggtaggagattcgtttgaattcgggaggcggaggttgtagtgagtcgagatcgtattattgtattttattttgggcgatttggtaaggtttcgttttaaaaaaaaaaaaaaaaaaagaaaaagaaaatatcgggcgtggtggtagacgtttgtagttttagttacgcgggaagttgagttacgagaatcgtttgaattcggatggcggagtttgtaatgaatcgatatcgtgtaattgcgtttcggtttgggcgttaaagcgatattcggttttaaaaagaaaaaaaagaaaataggagaataatgaaattttatttatttattttatttattttttatttttttgagatcgagtttcgttttgttatttaggttggagtgttttggcgtaatttcggtttattgtaatttttgtttttcgggtttaagcgatttttttgttttagtttttcgagtagttgggattataggcgtttgtaattacgttcggtttatttttgtatgtttagtagagacggggttttattatgttgttcgggttggtttcgaatttttgagtttaagtgattttttcgtcgttgttttttagcgtgttgggattataggcgtgagttatcgcgttcggttaaaagttttaaattttagtaagttttaatttattaattttttttttgtatagattggttttttggtgtcgtttaaaaattatttgtttggttttaggttttgaggattttt

SEQ ID NO: 461 - DNA, 1100 bp, Artificial Sequence
  chemically treated genomic DNA (Homo sapiens)
aaaaatttttaggatttagggttaggtaaatagtttttagacgatattaaaagattaatttatatagggaaaaagttgataaattggaatttattgaaatttaaaatttttggtcgagcgcggtggtttacgtttgtaattttagtacgttggaaagtagcggcgggaggattatttgagtttaggaattcgagattagttcgggtaatatagtgaaatttcgtttttattaaatatataaaaatgagtcgggcgtggttgtaggcgtttgtagttttagttattcgggaggttgaggtaggagaatcgtttgaattcgggaggtagaggttgtagtgagtcgagattgcgttagggtattttagtttgggtgatagagcgagattcggttttaaaaaaataaaaaataaataaaataaataagtaaaattttattatttttttgtttttttttttttttttttgagatcgagtatcgttttggcgtttaggtcggagcgtagttgtacgatgtcggtttattgtaaatttcgttattcgggtttaagcgattttcgtgatttagtttttcgcgtagttgggattataggcgtttgttattacgttcggtattttttttttttttttttttttttttttttgagacggagttttgttaggtcgtttagggtggagtgtagtggtgcgatttcggtttattgtaattttcgtttttcgggtttaagcgaattttttgttttagtttttcgagtagttgggattataggtgtttattattatattcggttattttttgtatttttaggagagacggggttttattatgttggttaggttggttttaaatttttgatttcgtgattcgttcgttttagttttttaaagtgttgagattataggtatgagttatcgcgtttggttttaatttttgtatttttagtagagacgggtttttattatgttggttaggttggtatcgaatttttgattttaagtgttttatttgtttcggtttattaaagtgtagggattataggtatgagttatcgtgttcggtttttatttatttatttgtttatttatttattgagatgtagttt

SEQ ID NO: 462 - DNA, 286 bp, Artificial Sequence
  chemically treated genomic DNA (Homo sapiens)
tttgtattaggttggaagtggtcgttagtttttcgtgtaattttattttttggaaaagtggaattagttggtattgtttagcgtgatttgtgaggttgagttttaatagtttaaagaagtaaatgggatgttattttcgcggggttcgtttttcgcgaggtgtttatttcgtatttgttatgtaaaacgagggagcgttaggaaggaattcgttttgtaaagttattggttttggttattagtttttatttaatgttttcgtgatgttgttgttgatttatttggg

SEQ ID NO: 463 - DNA, 286 bp, Artificial Sequence
  chemically treated genomic DNA (Homo sapiens)
tttaaatagattagtagtagtattacgaaagtattgggtagaggttgatgattaggattaatggttttataagacggatttttttttaacgttttttcgttttgtatggtagatacggggtgagtatttcgcgaggagcgagtttcgcggaggtggtattttatttgtttttttggattgttggggtttagttttataaattacgttgggtaatgttagttgattttatttttttagagaatggaattgtacgggggattggcggttatttttagtttagtgtaaa

SEQ ID NO: 464 - DNA, 2197 bp, Artificial Sequence
  chemically treated genomic DNA (Homo sapiens)
ttatatttagttttttgaagttttggttgtataattaatttgtggaaggtatgaatatttatgtgcgttttaattaaaggtttttttgaattattttttatatgagaatttttaatgggattaagtatagtattgtggtttaatataaatatataagttaggttgagagaattttagaaggttgtggaagggtttatttattttgggagtattttgtagaggaagaaattgaggttttggtaggttgtatttttttgatggtaaaatgtagttttttttatatgtatattttgaattttcgtttttttttttttagatgttttttgttagtttttttagttgttaaatatagttgtttgtggttggttgcgtatgtaatcgtatattttattttatttgttttatttcggttatagtgtagttttttttagggttattttatgtatatattacgtatttttagttaacgaggagggggaattaaatagaaagagagataaatagagatatatcggagtttggtacggggtatataaggtagtatattagagaaagtcggtttttggattcgtttttcgcgtttattttaagtttagttttttttgggttatttttagtagattttcgtgcgttttcgttttttggtcgtgaaatttagtttttatttagtagcgacgataagtaaagtaaagtttagggaagttgttttttgggatcgttttaaatcgagttgtgtttggagtgatgtttaagttaatgttagggtaaggtaatagtttttggtcgttttttagtatttttgtaatgtatatgagttcgggagattagtatttaaagttggaggttcgggagtttaggagttggcggagggcgttcgttttgggattgtatttgttttcgtcgggtcgttcggttttatcggattcgtaggttttcggggtagggtcggggttagagttcgcgtgtcggcgggatatgcgttgcgtcgtttttaatttcgggttgtgttttttttttaggtggttcgtcggtttttgagttttttgttttgcggggatacggtttgtattttgttcgcggttacggattatgattatgattttttatattaaagtatttgggatggttttattgtattagatttaagggaacgagttggagtttttgaatcgttcgtagtttaagatttttttggagcggtttttgggcgaggtgtatttggatagtagtaagttcgtcgtgtataattatttcgagggcgtcgtttacgagtttaacgtcgcggtcgtcgttaacgcgtaggtttacggttagatcggttttttttacggtttcgggtttgaggttgcggcgttcggttttaacggtttggggggtttttttttatttaatagcgtgttttcgagttcgttgatgttattgtattcgtcgtcgtagttgtcgttttttttgtagttttacggttagtaggtgttttattatttggagaacgagtttagcggttatacggtgcgcgaggtcggttcgtcggtattttataggtattcgcgttcgcgtcgttcgtcggggtggtcgtcgcgttcggtaggagggagggagggagggagggagaagggagagtttagggagttgcgggagtcgcgggacgcgcgattcgagggtgcgcgtagggagttcggggcgcgcggtttagttcgggggttttgcgtgtagttcgcgttgcgtttagagttaagttttttcgtcgggtagttgaaaaaaacgtattttttatttatttatcgttcgtgcgagaggtagattcgaaagttcgggttttttaataaaatatacgttggaaaattagataaagtagtagttatttgtgggggaaaatatttttaggtaaataaatacggggcgttttgagttatttgggaaggtttcgtttttggtatttaaagttgggggtgtttggagttagtagagtttagtagagttttatttatttttttaatgtttttgtttaatgtgttttttaaatttttttttatttagattatttgattggaaatatgttagttatgatgatgattttttgggaagcgatttttgttattcgttttttttttttttttattttacgttttggggttttagagagcgattgggagttgaatgggtttgatttcggagttagttggttgagttcgcgttg

SEQ ID NO: 465 - DNA, 2197 bp, Artificial Sequence
  chemically treated genomic DNA (Homo sapiens)
tagcgcggatttagttagttaatttcgaaattagatttatttaatttttaatcgttttttaaagttttaggacgtggggtggggaggaggggaaagcgggtgataggaatcgttttttagaaagttattattatagttgatatatttttaattaaatagtttagatgaaaggaaatttggggagtatattaaataaaaatattaaaaggataaataaaattttgttgagttttgttaattttaaatatttttaattttaaatgttaagagcgagatttttttaagtgatttaaagcgtttcgtgtttatttgtttggaggtgtttttttttataaataattgttgttttgtttggttttttaacgtgtgttttgttaggaagttcgggttttcgggtttgtttttcgtacggacggtaagtgggtggagagtacgttttttttagttgttcggcgagagaatttgattttgaacgtagcgcgggttgtacgtagaattttcgggttgggtcgcgcgtttcgggttttttgcgcgtattttcgggtcgcgcgtttcgcggttttcgtagttttttaggttttttttttttttttttttttttttttttttttgtcgggcgcggcggttatttcgacgggcggcgcgggcgcgggtatttgtagaatgtcggcgggtcggtttcgcgtatcgtgtagtcgttgggttcgttttttaggtagtagggtatttgttggtcgtggggttgtaggaaaggcgatagttgcggcggcgggtgtagtagtattagcgggttcggagatacgttgttgagtggggggaaattttttaggtcgttggagtcgaacgtcgtagttttagattcggggtcgtaggggaggtcggtttgatcgtagatttgcgcgttggcggcggtcgcggcgttgaattcgtaggcggcgttttcggggtagttgtatacggcgggtttgttgttgtttaggtatatttcgtttaggggtcgttttagggggattttgagttgcggacggtttaggggttttagttcgtttttttggatttgatgtagtagggttattttagatgttttggtgtggagggttatggttatggttcgtggtcgcgggtagggtgtagatcgtgttttcgtagggtagaaggtttagaaatcggcgggttatttggaaaaagagtatagttcgaggttagaggcgacgtagcgtatgtttcgtcgatacgcgagttttggtttcggttttgtttcgggagtttgcgggttcggtgaagtcgggcgattcgacgggagtaagtgtagttttaggacgaacgtttttcgttagtttttgggttttcgggtttttaattttaagtattggtttttcgagtttatatgtattataaaggtgttggaggacggttagggattgttgttttgttttgatattggtttaaatattattttaggtataattcgatttggagcgattttaaagagtagtttttttgaattttattttatttgtcgtcgttgttggatagaggttgagttttacggttagggggcgggggcgtacgaggatttgttaaaggtggtttagggaagattgggtttaaaataaacgcgaaagacggatttaggggtcggttttttttaatgtgttgttttatgtgtttcgtgttagatttcgatatatttttgtttgtttttttttttgtttgatttttttttttcgttggttagaaatacgtagtgtgtatataggatgattttggggaggattatattgtaatcgagatagggtagatagaatggggtgtgcggttgtatacgtagttagttatagatagttatatttagtagttgggggaattgatagggggtatttgaggggaagggggcggagatttagggtatatatataggaagagttgtattttgttattaggagaatgtaatttgttaggattttagtttttttttttgtaaaatgtttttaaagtagatagatttttttataattttttgagatttttttagtttgatttgtgtgtttatgttggattatagtattgtatttggttttattaggaatttttatgtgaaggatgatttagaaaaatttttggttagggcgtatatgggtgtttatgttttttataggttggttatgtaattaaaattttagaaaattgaatataa

SEQ ID NO: 466 - DNA, 2436 bp, Artificial Sequence
  chemically treated genomic DNA (Homo sapiens)
gtgaatttttatttttattaaaaatataaaaattagtcgggggtggtggtgggtgtttgtagttttagttattcgggaggttgaggtaggagaattatttgaatttaggaggtggaggttgtagtgagttaagatcgtattattgtattgttgtttgggtaacgtatcgagatttcgttttaaaaaaaaaaaaaaaatgagagaataggggagggtttagggtttagagttttggagaatagattttagtagtattaatattttaggattaatgttataaagatacgggttataattaaattggagaatatggttaaggatgggaatttagtttgagtagggttgagtcgagtagggttaagttaagtagggttgagttagaatattttttttttttttttgaataatttatttatattttagttatagggttggttttatttagttcggcgggagggaggagagggttggtttgtgattttagtgttgaggtttgattaaggtaaagggaaattttttatttttagattttttgtaagaaagaatggtatattatttgttatcgataggggttattattattaaatggagttagtataaatgttttttaataaagtatgtttagcgttcgggttttagtttgtacgtttatgaattgtttgttatattttttttttgaatggttggaaattgggtatttgtttttttaaataggaaatattttttgttcgagtgagttatttttgttttgttttaggagtaaagtttattttgtagttttttttgtggtgaagttttttttttttttcggagattagattttgtttttttgttggagggaagtgtttttataggtttttttttttttattttttgtgtttttttttaagttttgttgaatttgttagttaatttaataggaagtgaggttatggagggaggtagaagagttagggtggttattgaaagtaaaagaaatttttttttgggagttttttttatttttttttttgttgagtacgtggagttaggtaggttaggggattcggagattgcgatggtgttaggaaagggtggagcgggtgagtgtttgttgttaaggtggtttttttaataggaaattataatatttttgttttttgatttgttttagaaatagggttgtgggggtggggaagtaatttggatttgtttttttgaggatatttttgggtgttgtttggtttaggttttttgtgtggtttttttttgagtcgttgtttttgattttgttatttttttattttgagtagtttttagtttttttgttatttttttgttttttaagtttttttgtcgtttcgaatgtagatatacggttttttttttgtggattcgtttggagagtttagaagattttattaatttattttttttttttttttatttggttttggggtcgacggttaagtattttattttgttattttgtcgaattacgatgttttgaggtgtatagttttttttttttttttcgtgtttgaagggtttttttttatttttttatttttatttttgtttttttgtttttttttttgttttttaaagatagttttttaatgttttgatgtggattcgtgaatttatttgtatttttgtaaaatgtattttttttttgtatgtgtatattgttttttaattatgcgattttaggtaagtaatttttttgtgtttttgttattttattattaaatgattaataatgtttttagaggtgattgtgaggtttgaaggagataatacgtatatattatttattatacgagttagtaattattattgtatattaatattattggtattttattttgtttattttgtttttattttttttttatttatttattttttgagataaagttttgttttgttatttaggttgtagtgtagtggtgtaattacggtttattgtagttttaatattttgggattaagtaatttttttattttagtttttagattagttgggattataggcgcgtgttattatatttggttaattaaaaaatttttttttatagagatggtgttttattttgttgtttaggttggttttaaatttttatgtttaagggatttttttattttggttttttaaagtgttaggattatatgtatgagttacggtggttatttaggtattgatattatgaggttattttgatttagttttttttggtgaagagttttttttagatatttcgtttagtttttttagttatgagtttttattttttgaaagtttatattttatttggggaaagataaaaggtagttttaaagaagagaggtgtttgattttttttttttatttttaatattagaaaatattttatttaatttttagtatgaaggtaatattttgtttattggtatatttttagagtttaatatggt

SEQ ID NO: 467 - DNA, 2436 bp, Artificial Sequence
  chemically treated genomic DNA (Homo sapiens)
attatgttgggttttagggatatattagtaaataaaatattgtttttatattgagagttagatgaaatgttttttgatattaaaagtaggaaaagaaaattaaatattttttttttttgaaattgttttttgtttttttttaaatagaatataagtttttagagggtagggatttatagttgagaagattgaacgaagtatttgaaaaggattttttattagagagggttaggttaagatggttttataatattaatgtttggatggttatcgtggtttatgtatgtaattttagtattttgagaggttaaggtgggaggattttttgagtataggagtttgagattagtttgggtaataaaatgagatattatttttatgaagaaaaattttttaattagttaggtgtggtagtacgcgtttgtggttttagttaatttgaaggttgagatgggaaaattgtttgattttaggatgttgaggttgtagtgagtcgtgattgtattattgtattgtagtttgggtgatagagtaagattttgttttaaaaaataaataaataaaaaagaaatagaaatagaatgagtaaaataaaatattaatagtattaatatgtaataataattgttaattcgtgtagtaagtgatgtatgcgtattattttttttaagttttatagttatttttggaggtattattaattatttaatgatgagataatagaggtatagaggaattatttgtttgagatcgtatagttaaaaaatagtgtatatatataaaagaaaaatatattttgtaaagatatagataaatttacgaatttatattaaaatattagagaattgtttttggggaataagagagagggtaggagggtaagggtgggggtggagagataaaaggaaattttttagatacggaagagggggaaggggttgtgtattttagggtatcgtgattcgatagaatgatagaataaagtatttaatcgtcggttttagggttaaatgaaaaagaaaaaaaagtggattgataaagttttttggattttttaaacgggtttataggagggagatcgtgtatttgtattcgaggcggtagggaagtttggaggataaaaaggtagtagaggaattggagattgtttagagtgaaaaagtagtaaagttagaggtaacggtttagagagaaattatataggagatttgggttaggtagtatttagaggtgtttttagaagggtagatttaagttgtttttttatttttatagttttgtttttagagtaagttaagaaataaaaatattgtggttttttgttgaagaggttattttggtaataggtatttattcgttttatttttttttggtattatcgtagttttcgagttttttaatttgtttaattttacgtgtttagtagggaagggggtgggaaaggtttttaggaagaagttttttttatttttaataattattttggtttttttgtttttttttatggttttattttttgttgagttgattagtaaatttagtagggtttgaaaaaaaatataaaagataaaaggaggagaatttgtgaaaatatttttttttagtagaaaggtagaatttggttttcgagagaaagagaaaattttattatagaaggaattgtagggtaaattttatttttaaagtagaatagagatgatttattcgaataagaaatgttttttgtttaaaggaatagatgtttaatttttaattatttagaagagggatgtggtagataatttatggacgtgtaaattaaagttcgagcgttggatatgttttattggaaagtatttatattgattttatttagtaataataatttttgtcggtggtaagtaatatgttatttttttttgtaaagggtttgggaataggaagtttttttttgttttgattaaattttagtattgaagttatagattagtttttttttttttttcgtcggattgggtaaagttagttttgtagttgaaatgtaggtagattgtttagaaaaaaggaggaagtgttttggtttagttttatttggtttagttttgttcggtttagttttgtttaggttgagtttttatttttggttatgttttttagtttagttgtaattcgtgtttttgtagtattgattttggagtgttggtgttattgaggtttgttttttaaagttttgagttttagatttttttttgtttttttattttttttttttttttgagacggagtttcggtgcgttgtttaggtaatagtatagtggtgcgattttgatttattgtaatttttattttttgagtttaggtgatttttttgttttagtttttcgagtagttgggattataggtatttattattattttcggttaatttttgtatttttaatagagatggggatttat

SEQ ID NO: 468 - DNA, 2488 bp, Artificial Sequence
  chemically treated genomic DNA (Homo sapiens)
tttttatttaagtttaaagtagtagaagaagggttgaggttaattattagttaagtagtttttatttttttttttattcgtagggtttgtagggtagtgggaagagttttgggttatagatttagaaattttagatttttatattggttttgttgtggaattgttataatatatttttatttttttggttttagtttttttgttgaattagatggtatgggaatttttaagttttttatttgtgagattttttgaattttgatttttttttattttaatattatagtagttttttatatttttttaaattagtgatttttttttttaggttttgattttgttttgggattttttattgtatattagaagtttaatggttttttttgtttatttttcgtatagataggtgagttttgggttgtaggaaaggtttagttgattatgggttttttgttttattttattacgaggtttatagatagtgatgaaggtttggatatatagattgtaggataaggttagattggttggtgagaaagggtattttttagtaagaatttttttttttaattaagtagagatggggattgttgtttattgtaggtttttgttttacgttttttttatatttgatttattgatttatagttttttttttattaatttttttttttttaggtattttttatttgtttatattattgtatattttttggttgttttattttttttttgggtttagttttttttaatttttaaattatttatgtttttgtttttttttttttttggttatatttttttttttgtgattagtgttttttatttaaattttttttttatttttaaattatatatttttttttttggaaagagttttttatatagttgtttttttttattatttttttatcgtggtttttaattagatttggattattaaagttttttttgaataggttttatttgttttaggttaggttgttattttcgcgtttttttattttttagttttaattaggagggatgcggtaggagtgttgcgtggggttaggtacgttattagttagtttttaagttaatattttgagtttcgcggtttgtttatcgagtgattttatgtagttatcgaaatttttgttgtttattagtttttaggtgtttaggaaagcgtttattatagtgatgttgggttaggttgagagaagttataagagagtaggcgtgtaagggtttcgacggcggttttttgttcgggttgtcgttttaaatagttttcgtattatatgaggagacgtggtttacgttttcggttttcgaaataggaagttttaggttagggtttatttaggaggggttggtgcgtttattttttaatttatcgaggtgggtggggattagttagtggcgttttgttagtttgcgttagcgttagtgtttggttttcgagtttttattttaggttggtaggatttttttttttttttggtttttaggtattttggaatttgagaaggaagtagttaatattagttcgagagttagggcgtatgttatggtggatattttttcgttttttagtttttttttgagtttagcgttagagtagagatgagattagaaaagtaaaacgtttttgggttggtgtttacgtcggggaaagttttggttgatttttggtacgggtatttgttttcgttttataagtgaggagttcgaggtttataggggaattgataaggttttaagaaataggagggggtgaatggagtttagattgtaagtttagtttagcgggttttagagttcgcgttttttttttatttttattgtttggtggcggagatagttattagcggttcggtttgcggttgagttgattttgttttttgtttgttttgagtaaaagtttgatttttcgcgtttcgttcgttttatacgtgtttgtttttttttgcggaatgttttttgttggttttttttcgtttttattttattttattatttagttttttattcgtttttgtaagtgttttgggttttttcggttttttcgtatagtttcgagttttagtttaggtcgtttttagttttttttttgtagaaattttgttaattcggttagttttttaaggtttatggttgttttttttatttgtcgttttttttttggtttgtgtatattagtaagtcgtttgtatttttgggtaatttgttgttttttttcgagagtttgttgtgcggtggtttgttattgtatagtttattaagtatttttagtaaaaataagatttgttttgttttgttatttattgtatgttgagggttttgggtgtattgttttattgaattttttattttattattattttttagagataaagtttttcgttgtgttttttaggttggagtattgtgacgttattatagtttattgtagttttaaatttcggggtttaggggatttttttattttagtttttttagt

SEQ ID NO: 469 - DNA, 2488 bp, Artificial Sequence
  chemically treated genomic DNA (Homo sapiens)
gttggggaggttaaggtaggaggattttttgagtttcggagtttgaggttgtagtgagttatgatggcgttatagtattttagtttgggagatatagcgagagattttgtttttaaaaaataataataaaataaaaagtttaatgaaataatatatttaaagtttttagtatgtaataaatagtaagataaggtaggttttatttttattgaaagtgtttagtaaattatatagtgataaattatcgtataataggttttcgaaaggaggtagtaaattatttaaaagtgtaggcggtttgttagtgtgtataggttaaagaaagggcggtaggtggggaaggtagttatgggttttgaagagttgatcgaattggtagaatttttgtaggaggggagttgggaacgatttgagttaaagttcggagttgtgcgaagaaatcggaaaagtttagagtatttgtaggggcgggtggggagttagatggtggggtggggtggggacggaggagggttagtaggagatatttcgtagggaggggtaagtacgtgtgaggcgggcggggcgcgaagggttaggtttttgtttaaaataggtagaggataaggttagtttagtcgtagatcgagtcgttggtgattgttttcgttattaggtagtgagagtgaagggagagcgcgagttttgaagttcgttagattaagtttgtaatttgagttttatttatttttttttattttttgagattttgttagtttttttgtgagtttcggattttttatttgtaaaacgaggatagatgttcgtgttagaagttaattagagtttttttcggcgtgggtattagtttaagggcgttttgtttttttagttttatttttgttttgacgttaagtttaaagagggattgggggacgggaagatatttattatggtatgcgttttagttttcgggttggtgttggttgttttttttttagattttagagtgtttagaggttaggaaagggagaaggttttattagtttggggtagggattcgggggttaggtattggcgttgacgtaggttagtagggcgttattggttggtttttatttatttcggtgggttgggggatgggcgtattagttttttttgggtgagttttagtttggggttttttatttcgggagtcgggggcgtgggttacgtttttttatgtgatgcgagggttatttaaagcggtagttcgggtagggagtcgtcgtcggagtttttgtacgtttgtttttttgtagttttttttagtttagtttagtattattatggtggacgtttttttgggtatttggaagttagtggatagtaagaatttcgatgattatatgaagttattcggtgagtaagtcgcggggtttaggatgttggtttggggattggttggtggcgtgtttagttttacgtagtatttttgtcgtattttttttggttaagattggggaataggggagcgcggagatggtagtttggtttagagtaggtggggtttgtttagagggggttttggtggtttaaatttggttagagattacggtagggaggtggtggaaggaggtagttgtgtgggaggttttttttaggaagagggatatgtgatttggaggtaggaggagggtttggataaagaatattgattataggaaagggagtgtagttaggggagaaaaagaataggggtatgggtagtttagaaattggaggagattgaatttagaaagggaatggggtagttagggagtgtataatgatgtaaataagtaggaaatatttaggaggaaaaagattagtggggaaaaaattgtggattagtgaattagatatgagaaggacgtaagataggaatttgtagtaagtagtaatttttatttttgtttggttagggaagagaatttttgttggagaatgtttttttttattagttagtttgattttgttttgtagtttatgtatttaggtttttattattgtttgtgagtttcgtggtagggtggggtaagaggtttatgattagttgggttttttttgtaatttaaggtttatttatttgtgcgaggggtaggtagagaaagttattggatttttgatgtgtagtagagggttttaaggtaaggttaagatttgggagggaggattattggtttaggaggatgtggagaattgttgtggtgttgggatggagaagaattaggatttaaagaattttataggtgaggaatttggagatttttatattatttagtttaatagggaaattgaaattaggagagtagaaatgtattataataattttatagtagagttaatatgaaaatttaaggtttttagatttgtaatttagagttttttttattattttataggttttgcgagtgggaagaaaagtagaaattgtttagttaatgattgattttagttttttttttattgttttgggtttagatggaga

SEQ ID NO: 470 - DNA, 2250 bp, Artificial Sequence
  chemically treated genomic DNA (Homo sapiens)
ttagggtgtttatatagaaggtgtttagaaaaatattttgaattggtttagtttggtaagaatatgggttttggtagtaggaagtttaaatatttgttttattttttattattagtaatgtgattttggataatttatatagttttgttgagatttgttttatttgtaaaatattttttggagttgttgtgaggataaaatgataatatatataaagagttaggttttttttagaagaatgtttttgggtagtatgtatatttttatttttttttttagagagtgggggtaataggatatttttttttttaggggtattttttttttttagggatttatttaagttaggttttttttttagtgaaacgtgtatttcgagggtttttaggatgaagtagtttattggaaggtattagtttttttttttatttttttagagttggatagtgtattaggggtcggtattggttttttagttaggagatattttgggcggggttttgttcgtcggaagtacgtagagcgtggggaggagggttttttttgtttgtgtttgtgttaatagtattcgcgttgtcgcgtcgggtttcggcggtcggagttatatatgatgttatagataatgatataagtcggtgttttatttcgatatagcgttcgagttgtataatgttatattcgggtgttaaatatttggtttcgcgcgattcggttttacgttttttgtcgtcgtttttcgcgttttcgggggaggtggttcggttcggtcgggtagggggttggcgggcgagtttcgcgggcgggttggcgagcgggtgatgttacgggtagcggtgggtgggttattcggaggtgaggcgtcgttaggcgagtttagcgagagtttagtcgtattgtattaggtaaatgaggttcggtttgggtgggggtgtgtgttaaggggaggatatcgggattatttttttttttttcgttttattattttttttattacggtttcgttcggttagggattgattaaattttgggggagtttgggagtcggaattggtataagggaggacgttcgtttttttttcgtttttgttttttcgtagtttttttttttttttgtattcggcgtttttttgtattttgtgtattttttatttggagtttttttttttttttgtttttttttttttttttttttttttaggttgtttttatttgtttgtttatatgtcgtttttttttttcggttttttgcgtttttttcgttgtagtcggacgcgtcgggaatgggttaagttaggggcggtgtttggacggggcggggcggtggaaagggggtggtgttcggaggggagggggcgcgtagagttggggtgggggggtcgtggcgcgtattattagagatcgagcgagtcgttagttgtttttggtttggcgggggcggaatcgcgcgggatttttatttttattcggaattttcgttacggagaatttttggagaagtttcggattttcggttgggaggaggaagtgttcgttgatttttagtttcgcgttgatttcgttttcggtttgcggatttggggagtcgttgtattttgtttcggacgttacgagattttagacgggagttttttcgaggtgaagtcgttgagttttcgggtttcgttaggtttttttgggagagtcgacggatttttttttttagtatatataatttttttgttttttatcgggattggcggagcggtcggcggatttagacgcggggattttagggtagggggcgttttttgttcgggttattagtcggggcgaggggacgtttttttttttttagttgttttgttcggatggcgtcgtcggttgagtgacgggggcggcgcgtaggattttttagttcggattttttgttttcgaggggaaagatgtacgagagtgtagaagtggggggttttatttttaatttttttttagtggtggatttttataattagaatcgggtttgtttgtttttagagaaggggtttttcgtttcgggttcgtattttatttcgtttcggatttcgttttggaatggtttaaattattgtacgtatcggttttttagtttgttgttgtagggggtgggagtgggcggtagggtttttattattattcgggggtgagagtttcggggtgtagtggaggttttgtttttattttttatttaattcgtgttgtttttgttggataattgaattttttcggtcgtat

SEQ ID NO: 471 - DNA, 2250 bp, Artificial Sequence
  chemically treated genomic DNA (Homo sapiens)
gtgcggtcgggagggtttaattgtttagtaagggtaatacgggttaagtgaaaggtagagataggatttttattatatttcgggatttttattttcgagtagtagtggaagttttatcgtttatttttattttttataatagtagattgagaggtcggtacgtatagtggtttgagttattttaaagcggagttcggagcggggtggagtacggattcggggcggggagttttttttttgggagtaaataggttcggttttggttataaaaatttattattaggaagggattaggggtgggattttttatttttatattttcgtatattttttttttcgaaggtaagaggttcgagttgggaagttttgcgcgtcgttttcgttatttagtcggcggcgttattcgagtagagtagttgggggagaggagacgttttttcgtttcgattggtgattcgggtagggggcgttttttgttttgaagttttcgcgtttaagttcgtcggtcgtttcgttagtttcggtgaaaagtagggaagttgtgtgtgttgggagggggggttcgtcggtttttttagggaagtttggcggggttcgggaatttagcggttttatttcgaggggattttcgtttagagtttcgtggcgttcgaggtagagtatagcggttttttaagttcgtaggtcgggggcgggattagcgcggggttgggggttaacgagtattttttttttttagtcggggattcggggtttttttagggatttttcgtggcgaggatttcgggtgggggtggggatttcgcgcggtttcgttttcgttaggttaggggtagttggcgattcgttcggtttttggtggtacgcgttacggtttttttattttagttttgcgcgttttttttttttcgggtattattttttttttatcgtttcgtttcgtttaggtatcgtttttggtttaatttattttcggcgcgttcggttgtagcgggagaaacgtagggaatcgagagggagaggcggtatgtggataggtaagtgggggtagtttgggaagggggaggagaggagagaagtaggaagggggaaaggttttagatgaggagtatatagagtatagagggacgtcgagtatagggagaggagggggttgcgaggggataaggacggaagaggggcgggcgtttttttttgtattagtttcggtttttaggtttttttaaggtttggttagtttttggtcgagcgaagtcgtggtggaggaggtggtggggcggggaagaggggggtggtttcggtgttttttttttaatatatatttttatttaggtcgggttttatttgtttaatgtaatgcggttgaattttcgttgaattcgtttggcggcgttttattttcgagtgatttatttatcgttgttcgtgatattattcgttcgttagttcgttcgcggggttcgttcgttagttttttgttcggtcgaatcgggttatttttttcggagacgcggagagcggcggtaggaggcgtagggtcgggtcgcgcggggttaagtgtttggtattcgggtgtgatattgtgtagttcggacgttgtgtcggaatgagatatcggtttgtgttattgtttgtgatattatgtgtgatttcggtcgtcggaattcgacgcggtagcgcgggtgttgttggtataaatataggtagagggggtttttttttttacgttttgcgtgttttcggcgagtaaagtttcgtttaaggtgttttttagttggggaattagtatcggtttttggtgtattgtttagttttggagagataaaaggaagagttggtgttttttagtggattattttattttagaagttttcgggatgtacgttttattggaagaaaggtttagtttgggtaggtttttagaaagaggggatatttttggaggagggggtattttattatttttattttttaaaaggaaggatggaaatgtatatgttatttaaggatatttttttagaagaagtttggttttttatatatgttgttattttatttttatagtaattttaagagatgttttataaataaaataggttttagtaaggttatgtgggttgtttaagattatattattaataataaagagtagagtaggtatttgaattttttgttgttaaagtttatgtttttattaagttaggttaatttaaggtatttttttgagtattttttatgtggatattttgg

SEQ ID NO: 472 - DNA, 2441 bp, Artificial Sequence
  chemically treated genomic DNA (Homo sapiens)
ttgttttttaaaatgttgtttattatattaaaatataattttgttttttaaatagcgagtaaaattaaattaattttatttttttaaatagaagtttatttaaagtttttttataaaaatgatatttatttgatttaatattgtttttttaataagaataatacgtagggtgttagagggtagttgttggatttttttttagtaaataaaggagattagttagagtttagtttggtttgtttaggaaaggaggaacgtagtttgttgatatggttaaggaatgttaattaatatattttaaaatttttattattttgtttgagacgtgtatatttttttaggtttttaaagtttaattagaaagtgtatttaattttattgttattttatttatagtggggaagtttatcgaggaaaattatagggaaataaaatgttttttagttatttatattagtataattaatttagagtttacggtataaattaaataagttaatttgttagtgttttgaatgaagatatttaattaaagtatgtattttttaattttttagtagtttttaggatagttggttttggtgatcgttttttggttttttattgtttttaatacgattggttttttatcgtaggattttaaataaaatgagataattaaattatatttcgagcgaaggggcgtttattttgtagataaatatatcggttttgttttttttaaaatgcggatacgtgtttttttcgtattagggggggtttttcggcgcgcgtttcgtcgttatttgttgaggaaagcgagcgtattttttgtagtttaggtttcgggcgttagttttgtttcgtagttttagagttcgtcgtagttcgggtggttttttttcggtttagcgttcgtcgtttgtttttcgttttgtaagttttaagaggtagttatttttcgtagttttcgcgtttgtaattgttttttggcgggggagtgggtgtttaaaaagttagtagttggagaaattgaaaagattataagcgatttaacgataagtttttttttttttttaaagatcgagaggagggtagaggggagtagtgtttgagtttacgtgatcgagttagggagttcgacggttttaggaacgttcgacgtcgcgcgtgatttttaagtgggagtattttcgaatcgatttttggtttatttataaggatagtggcgtatagatggcgtttttcgtagttttagttttagatttaagaggtttggagtagggtttgagaatatgtatttttaattaggttttgggggatgtcgatattgatatagttagtttggggattatatttcgaggattacgtttttagtttttgatttatataagtgttatttagaatagatgtttgattttaaggagttagtggtgaaattagagaggttttgggtttgttaaatttttagtagtaaacgtaatttcgggttttggagtggtaaagtcgtggattagaggtggagggagtgggtttttagtttttaagaggttattgggaaggtttttcgcgttagattaaagattttaggtattttttcgaatttatttgaagtggtatcggggagatttgtgttttcggttacggcgttttttttcgttggaggtatttgtttattttttttttcgggcgaaggtttttcgcgttttttggtggtagttttagtttttttagtttaatggggtgttttttttatttattttagtaggagttttagggtgcgagattaggattatagttttaattggttttaaggtagttgttgttgatgaaaatgaaaaggaaagtagtatgtgatttataggttattgtgagaattttttagtgttatatttgtgtttaattaattattaaattatttatttaggtggtataagggatatggtttttgagggttgtgatttagatttttaatagaggaagacgagggggggtatttggagggaaagttttatagtattagttttagttgtttggtgtttagttaaaatagagagacgtaagtgtgttttgggttgataaagatgaggtttataggtaatgaagataggttttaaagatggagaagtatttgttttattagttaaataatagttgtgaaaagtttttattgttttattttaagtttaatttttattaaagttgagagttttggttttttttaggttgaaaggtagagtttttttgtttttgaggtagagaagttagtttggacgggaagagtgtgtcgttggtaaataattgtagtagataatatgttaattttagtttttttgttttttgttttggggttttttaaagtatttagtttttatatgttttttttttttgttattttatggagaaaatgttaaatgatggtttaaaaaaattagttttatggttaggtatggtggtttata

SEQ ID NO: 473 - DNA, 2441 bp, Artificial Sequence
  chemically treated genomic DNA (Homo sapiens)
tgtgagttattatgtttggttatgaagttgatttttttaaattattatttaatattttttttataaggtggtaaggaggaagagtatatggggattgggtattttgagagattttaggataggagatagggaggttgagattggtatgttgtttgttgtagttatttgttagcgatatatttttttcgtttaaattaatttttttgttttaaggatagggagattttgttttttaatttgagagaaattaggatttttagttttaatgaaaattggatttagggtggggtagtggagattttttatagttattgtttagttgatgaagtagatgtttttttatttttggagtttgtttttattatttgtggattttatttttattaatttagagtatatttgcgtttttttattttggttaaatattaaatagttgaggttggtattgtaaaattttttttttaaatgttttttttcgtttttttttattagagatttggattataatttttaaaaattatgttttttatgttatttgagtagatggtttgatgattaattaggtatagatgtgatattggggggtttttataatggtttgtgggttatatgttatttttttttttatttttattagtaatagttgttttaaagttagttaagattgtggttttagtttcgtattttggggtttttgttggggtgggtgaggggaatattttattaagttgggggaattggggttgttattagggggcgcgaggggttttcgttcgagaagaggggtgggtaggtgtttttagcggagaagggcgtcgtggtcggaggtataggttttttcggtgttattttaagtgagttcgaggaagtatttgggatttttgatttaacgcgaaaggtttttttagtgattttttgagagttgagaatttattttttttatttttagtttacggttttgttattttagggttcgaggttacgtttgttgttggggatttgataaatttaaagtttttttggttttattattggttttttagaattagatatttgttttgaatgatatttatgtgagttaggggttgaggacgtgattttcgaagtgtggtttttagattggttgtattagtgtcggtattttttaggatttggttggaaatgtatatttttaggttttattttagattttttaaatttgagattggggttgcggggagcgttatttgtgcgttattatttttgtgggtggattaggagtcggttcgagggtgtttttatttagaggttacgcgcggcgtcgggcgtttttgagatcgtcgggttttttggttcggttacgtgggtttaggtattatttttttttatttttttttcggtttttaaaaggaagaaggggtttatcgttaagtcgtttgtgatttttttagtttttttagttgttggttttttggatatttattttttcgttaggaggtagttgtaagcgcggaggttgcgagaaataattgttttttgaaatttgtagggcgaagagtaggcggcgagcgttgggtcggggagggattattcgagttgcgacgggttttggggttgcggggtagggttggcgttcggagtttgagttgtaggaggtgcgttcgttttttttaataggtggcggcggggcgcgcgtcgggagattttttttaatgcgggaaaagtacgtgttcgtattttagagaaggtaaggtcggtgtgtttatttgtaaggtaagcgttttttcgttcgaggtgtggtttaattgttttattttgtttgaaattttgcggtgagaaattagtcgtgttgagaataataaaagattaaaaaacgattattaaaattaattgttttgaaagttattggaaagttggaaaatgtatgttttgattaaatgtttttatttaagatattggtaagttaatttatttagtttgtgtcgtgagttttgggttgattgtgttaatatgaataattgaaaaatattttatttttttatggtttttttcgatggatttttttattatgggtgaaatgataatggagttgaatatattttttgattgaattttgagggtttgggaagatgtatacgttttaggtaagatgataggggttttaaaatgtattaattggtattttttagttatgttagtaagttgcgtttttttttttttgggtagattaagttaagttttaattggttttttttatttgttgaagaggagtttaataattgttttttaatattttgcgtgttatttttattggaaggataatattaagttaagtgaatgttatttttgtgaaaaaattttgagtggatttttatttaggaagataaggttgatttaattttattcgttgtttaaaaagtaggattgtgttttggtgtggtaggtaatattttggaggatag

SEQ ID NO: 474 - DNA, 2378 bp, Artificial Sequence
  chemically treated genomic DNA (Homo sapiens)
attttgagattttagttgattttttttgttttgtaattagaggggattgtgatttgggttaattttttttttatgggttttagtggagttagttgtggaatggaatattaatttttattttataggtatgttgtgaggtttcgttaagaaatagttataaaagggttttaagagttatgatgattgttttaattatttagtagggagggggtatttagcggtgttgtttttacgtatcgatgttacgtggggcggggaggcggggcggagaacggagagcgtttttttattttttattttttttttttaagtttagcgtagggggaggtggttgcgattgattgaggggttagggaaggttggttaggggcgtgggcgtggttggggacggtttgggggtggggttgcgtaggaggttggaggagtttcgcgggatttagaggcggggcgtcggttcggggattattgttttttcggggcgtggttgtaggaggttggaggagtttcgcgggatttagaggcggggcgtcggtcggggatcgttgttttttcggggcgtggttgttgtcgagtattttttagtttagtcgagttcgtgtttaggttacgttttgttttagtcgtcgttttttttattttacggcgttcggagttatttttcgtttgttcgtttttttttttcgtttattttttgtatttgggtttgtattatttttgttaatcgttttttcgattttgtcgatattttttttttaaatttttgatcggtatttttgtttggtatttttttttttatttttttttttttatttttttttttcgatttttttcgggtttttttttttttaaaattcgggttttttcgcgtggtttcgtttttaggtcggggatgtttttcgcggtttcgcgtttatggttttgacgttgttttttttcgtttataagttgtgtcgttttttcgttatgtcgggtttacggcggggcgtcgagcggttggcggtgtttgggttagatgggggcggtggtacgggtttatggtgggttgcgggtggttcgggttcgcgaaagtgtcgtcgggggtaggtatcgaggtgtaggacgttttggagcgcgcgttgtcggagttgtagtaggttttgttcgcgttgaagtaggcgggcggcgcgcgggtcgtgggcgtcggtttggtcgaggttttttaattggtggaggaggtttggttgttgcggtcgtgggtcgcgaggtagtttagggtttgtgcgacgttattcgtttcgatggcggtttcgatttgttgttgcggttgttgtaggcgtcggagttggagacgcgtgtgtaggtcgcgcgtttgttggagtagattttggtggttgagaatcggtgagcgcgttaggtcggggttgggagagcgtcgcgtggtgtggatagttaagcgtttgcgttttcgtgtgttttgcgtcgtgtttttgttttttttatttttttgattgtttgtattatatttttgttaggggttagtttgtttgttttatagataaggaaattgagttttgggaaagtttagtgatttgtttagtggattatagtgaattaagatttgtttttagggttagtggggtgaggaatggagttataggataggagttcgtttttggttttatggatggagatggtattttattgttaattttttttttttttcgttttttaagtttatagtttttttttttatcggtttgggttttcgtttatgatattttttttcgttattattttattttttttttaatgagagaagaagggaaatataacgtttagaaaagagggagggagatttttttttttttttttttttaggttgtaaggcgtgttggtttgaggttgtttattttttttttgtcgttttaatttaatttttgttttattttttattttggtttttgtaataggttagatatgattttattttgtagttgttgatgggaaatagttttttgttgggaggtatgggtgggggaagaggatatcggggtgtagagttcggcggggattaggtagagtgtgtgttttttttttttattttatttagtattaagatgtcgtaagagggttaaatagaggtttggttgttatttttgtatgttttttgggattttttttggagtatgaagatttttaaggatttatttttttttttttttgatgttagagtagattaagttgttatattttagttttatgttgaagtttttagttttttaagtttagaagagtttttggaagagttatttttagtttatgtagtttttataagtgtgaagggagtgggttgggggtgttttttttgttattttcgaaaagaaaaaaattatttggtg

SEQ ID NO: 475 - DNA, 2378 bp, Artificial Sequence
  chemically treated genomic DNA (Homo sapiens)
tattaggtaattttttttttttcgaaaatggtaaggaaaatatttttaatttattttttttatatttgtgagagttgtatgagttgaaagtgatttttttaaaaatttttttaagtttgagaagttggagattttagtatgagattggagtgtgatagtttggtttgttttggtattagaagggagggaaagtgagtttttggaggtttttatattttaggagagattttaagagatatgtaagagtggtaattaggtttttgtttgatttttttgcggtattttggtgttaagtggggtgaagggagagaatatatattttgtttggttttcgtcgggttttgtatttcggtgttttttttttttatttatgttttttagtagaaaattgttttttattagtagttgtagaatgagattatgtttggtttgttgtaagaattagaatgaaggatggagtagaagttggattggggcggtaagaagggagtaagtagttttaggttagtacgttttatagtttggggaggagggaaaggagaggttttttttttttttttttgagcgttgtgttttttttttttttttattgggagagggatgggatgatggcgagagaaggtgttatagacgggaatttaagtcggtgggaaggagagttgtgggtttggggggcgggggagagggagaattggtaataggatgttatttttatttatagagttagggacggatttttgttttgtaattttattttttattttattagttttgggagtaaattttagtttattgtgatttattgagtaagttattaaatttttttaaggtttagtttttttatttgtgaaatagataggttgatttttaatagagatgtagtgtaggtagttagagaggtgagggaggtaaaggtacggcgtaaggtatacgggaacgtaggcgtttaattgtttatattacgcggcgtttttttaatttcggtttggcgcgtttatcggtttttagttattaggatttgttttagtaggcgcgcggtttgtatacgcgtttttaatttcggcgtttgtagtagtcgtaatagtaggtcgaggtcgttatcgaggcggatggcgtcgtatagattttgggttatttcgcggtttacggtcgtagtagttaggttttttttattagttggaagatttcggttaggtcggcgtttacggttcgcgcgtcgttcgtttgttttagcgcggataaggtttgttgtagtttcggtagcgcgcgttttagggcgttttgtatttcggtgtttgttttcggcgatattttcgcgggttcgggttattcgtagtttattatgggttcgtgttatcgtttttatttggtttaggtatcgttagtcgttcggcgtttcgtcgtgggttcgatatggcgaagaagcgatatagtttgtaggcggagagaagtagcgttaggattatgggcgcggggtcgcgggggatattttcggtttggaggcggggttacgcggagagattcgggttttgggaaaagagggattcgagaggggtcggggaaagaagatggagggggaggaatggagagaagggtattaggtaagggtgtcggttagaagtttgggggaggagtgtcggtaggatcgggggagcggttggtaaaggtgatgtaggtttagatgtagggagtgggcgaaaggagagagcgagtaggcgagggatggtttcggacgtcgtagggtagaggaggcggcggttggaataaagcgtggtttgggtacgggttcggttgagttgggagatgttcggtagtagttacgtttcggaggagtagcggttttcggtcgacgtttcgtttttgggtttcgcggggtttttttagttttttgtagttacgtttcggaggagtagtggttttcgggtcgacgtttcgtttttgggtttcgcggggtttttttagttttttgcgtagttttatttttaagtcgtttttagttacgtttacgtttttggttagttttttttagttttttagttagtcgtagttatttttttttgcgttggatttggaggaagggggtggagaatgagaggacgtttttcgtttttcgtttcgttttttcgttttacgtgatatcggtacgtgggagtaatatcgttggatgttttttttttattaaatggttaaaataattattataatttttaaggtttttttatggttgttttttagcgaaattttataatatgtttatggggtgggaattgatgttttattttatagttgattttattgaagtttatgaggaagaaattggtttaaattatagttttttttgattatagaatagaaaaagttagttaaaattttaggat

SEQ ID NO: 476 - DNA, 2444 bp, Artificial Sequence
  chemically treated genomic DNA (Homo sapiens)
tagattttaggtgttttggagttttgtagattagagaggttagtattggaagtttgggtttatgtttttagtagtttttagtttagggggtttttaaggttgaatagtaagtttaggattattttggtggtggggtaggtttagtttatatttagttttggtaagtagttttagaaattgttagtgacgttgtttttaagttaaattttaggaggaaaagaaaatacgaggataataaagagaggaagtggtttgggtcggtttattcggtgggttttgttttgttttttaattattttggttggttttataggggtcgttaattatataagttagtttttgtttttgaggatttggtttagggattttgggaatgtggtagatatggggtggttttattaaatgtatttttatgggaatttgttttttgggagttatgaaaagagcgtggatttcgaggtggggttataggaagtggttaggtttattttaggggatttgttgtttatttatattgttggttaggaaatggggggtaatttatgtttttttagtatttttagtattgggcggtttaaagaagggaagggattattttggggttatatagtatgtagttagaggttaaggtatgaggaagttttttatttttttatttttatttattttagattttttaatcggttttatggtagtttagggtttagcggtatttaggatgttggtgggtagttgtatagtttaggtcgcgggaggttggttgtttttatttaataggtttatgtggttttgatttttatttaggaagttggggataatggttaaggcgttttttttttttgtgtttgtttgtttaggtgtagtatagatatagtatttttggggttaagagtatttagttagggttgtttttatgggtgggtagggtagtaaatgaatgagggataggttgggaggtggttagttttttttagtttatggagggtacggggtaggagagttgggttgagttagtaggagtttagggagtttggtttttgtttttttattttggaggaaggtgaggttgaattttttttttttttttttttttttttcgtttttattgtacgtagggttggttgggttttagttggttttcgtattaatattttatcggcgttaataggaggtatcggggatagtcgttgcggtagtattcgagttagtttaagttcgtagttcgtagggagatttagtttcgttttgtttgtagtagtataattttgtatatttattatggatgtttttaagaagggtttttttatcgttaaggagggcgtggtgggtgcggtggaaaagattaagtagggggtgacggaagtagttgagaagattaaggagggggttatgtatgtgggtaagtggggtatggtagggtgggatagtgtggtggttaaagggtgagtgtttagttattttcgttagattttattttttagttttagggaggtattttgggagggggcgaggttttggttattaaggtggggtttttagattttggagtatttataatgttttgtgtatatttatgtgtgtttgtttttggttttttcggggtttttgggtgttagagatcgtagatagggttggttatttgtttgtgtacgtatatatatatttttaagtatattagttttttttgagtttggagtttttgaagttatgagtagtttgtgtttaggtggtttttattttttttatacgggagcggttatagttaggttacggattttttttttttttagagagaaggggtaggttgggggatgaaatttaggtttagtgttttttttttcgtatttttttttggtattttttagaggaggaaggggaggttaagttaatgatttagttttggtttattttgttttgttgttgtttttgaggttcggttatattcgggtaggggttggattttgggtttagttagtgtttttattttaggtttgtttttttttgttttttatattttgttttgttttttttttatttatttattttttttagatatagtaggaagaggttttttgaaggggtcgtcggtttttagatattatttttatttttttatcgattttatagtttgtttagttgttttgttgtgtttgttttgatcgtttttaatatttcgagggaggtttgggttgatagttttattttttttttaggagttaagattaaggagaatgttgtatagagcgtgattttaggtgagaagttttagggttaggggatatatgggggataggatttttggggtttttgtattttagtgttggggtttaaatttagagttttgttttatttttaattggggttttaagttttatagatttttgtagattatgaggttaaattagggtgggcgtttttttatttttattagtattagaggtgtt

SEQ ID NO: 477 - DNA, 2444 bp, Artificial Sequence
  chemically treated genomic DNA (Homo sapiens)
ggtatttttgatgttggtgggggtaaggagacgtttattttagtttagttttatggtttgtaggggtttgtagggtttgggattttagttgggggtaaggtaggattttaggtttgagttttagtattaggatgtaggagttttaggggttttattttttatgtgttttttggttttggggttttttatttgaggttacgttttgtataatattttttttggttttggtttttggggaggaaatggagttgttagtttagatttttttcgaggtgttgggggcggttaggataaatataatagaatagttggataaattgtggggtcggtgggggggtaaggatggtgtttgggggtcggcggtttttttagagggtttttttttgttgtgtttggaagaagtggatggatgggaaggggataggatagaatgtgggggataagagagagtaggtttgaggtagggatattggttagatttagggtttagtttttgttcgggtgtggtcgggttttagaagtagtaataggataggatgggttagagttgagttattggtttgatttttttttttttttttggagagtgttaggagaggatgcgggggagggaatattgagtttaggttttattttttagtttgttttttttttttggggagggaggggattcgtgatttggttgtagtcgttttcgtgtggagagggtgggggttatttgagtataggttgtttatggttttaggggttttaggtttaggggaggttggtatgtttgggaatgtgtgtgtgcgtgtatagataggtagttagttttgtttgcggtttttgatatttagaggtttcgaggaggttaaagataaatatatataggtgtgtatagggtattgtgggtgttttagggtttggagattttattttgatagttagggtttcgtttttttttaaaatgtttttttggggttggggagtaaggtttggcgaaggtaattgggtatttattttttggttattatattgttttattttgttatgttttatttatttatatatatgattttttttttggtttttttagttgttttcgttattttttgtttggttttttttatcgtatttattacgttttttttggcgatggagaagttttttttgaagatatttatggtgggtgtgtagggttgtgttgttgtaggtaggacggagttggatttttttgcgagttgcgggtttgagttggttcgagtgttgtcgtagcggttgttttcgatgttttttattgacgtcgatgaaatattgatgcggaggttagttggagtttagttagttttgcgtgtagtgggggcggggagggagggagggagggaaggaggtttagttttatttttttttaggataggaaggtagagattaggttttttgggtttttgttggtttagtttagtttttttgtttcgtgttttttatgggttggagggggttggttattttttaatttgttttttatttatttattgttttgtttatttatgggggtagttttggttgggtgtttttggttttaggggtgttgtgtttatgttgtatttggatagataggtatagagaggggaggcgttttggttattgtttttagttttttaggtaggggttagggttatataggtttgttaggtgagagtagttaatttttcgcggtttgggttgtgtagttatttattagtattttggatgtcgttggattttgggttgttatgaaatcggttggaggatttgaggtgggtgggggtggggaaatgaaggatttttttatgttttggtttttggttgtatgttgtgtgattttagaatagtttttttttttttttgagtcgtttagtgttgaaggtgttgaggaggtatgaattgttttttattttttggttagtagtgtggatgggtagtaggttttttgagatggatttgattattttttgtggttttatttcgaagtttacgttttttttatggtttttagggagtaggtttttataaggatgtatttggtggggttattttatgtttattatatttttagagtttttgagttaagtttttagggataggaattggtttgtgtggttggcggtttttgtggggttagttagggtagttggggggtaggataagatttatcgggtaggtcggtttaggttattttttttttttgttgttttcgtatttttttttttttttgagatttaatttgaagataacgttattagtagtttttggagttatttgttaaggttgagtgtgagttgagtttgttttattattaagatgattttgagtttgttgtttagttttgggggttttttgggttgggggttgttgggggtatgggtttaggtttttagtattagtttttttgatttgtagagttttaggatatttggggtttg

SEQ ID NO: 478 - DNA, 2001 bp, Artificial Sequence
  chemically treated genomic DNA (Homo sapiens)
gtattacggtggtcgtttttttttgttttgtgtagtggattttttggtttttttttagttttggggtttttatagttttcggtttggtttttttttttatagttaggttttgggtaattttaggggaaagtgattttgaggttttttattttttttcgtgttttgtataggttttgggttttcggcggtgttgtttgtcgtagttttacgtttttttgggagagtggtttaggtttttttttttgagtgtgattgcgttgtcgtttgcgaggtttgcgcgggtttttttcgggttgtttttgttgggatggggattggtggtttcgggttacgttttggattcggtttgttttttggtataagttcgtacgggttacggttaggtaggagggcgggcggcggggtttcgggggcgtcgagttcggggtcgtgcggtttttaagagtaggttgtgcgtgtttttgttggagttttacgaaggcggtttagggttatttttgagggcgcgtgggttcgattcgcgtttcggatttagtttgcggttaggaatgtaggtgttttagggtgttaaaaggaaaacgtataaggtttcgtcgaggagggggggttaggaggggatcgggggtgggaagaacgcgggggagagggatggtagggtgttcgttcgagggatcgatattttcgcgagtggtattttaggatgttgacgtcggcgggggtgggggttcgaggggcggtcggggttagggggcggttttaggggtagggtcgtagtacgaggggtcgcgtgatttcggcggtgatcgggtggggagaggtcggcgtcggggttgggagacggtcgtgggtgggagggtgtttcgtggggacgtttttgtcgtagcgttcggttacgcgcgaggtttcgtttttaggacgcgttcggcgggacggattcgtttatttcgtagtcgcgcgttcgtcgcgtcgttttgtgggcgttgtagtttcggagttcgcgtgcgcggggtcgggttcgggagttttagggtagtcgtttcgtcgagtcgtaggtatcggtggggaacggggttacggggtcgcgtgtcgggggttgcggggtgtttcggggttttggggtgagtgcggggcgcgggtcgaggtttgtagggttttgtgaggtgagtgtgggggttggcgttggggttcgcggggttttggggagggtgcggggcgtgggtcggggtttgcggtttgtagtttggggttcgcggggttttggggagggtgcggggcgtgggtcggggtttgcggtttgtagtttggggtttggggggttttggggagggtgcggggcgtggtcggggtttgcggtttgtagtttggggtttggggggttttggggagggtgcggggcgtgggtcggggttttcgcgggggtcgcggtggttcgggcgtttggtagaatcgttgttgtgtagcgggtttttcgtcgttcgtttttcgtcgtagtttgcgaatggggtggggagtttcggtttttagtttgtttttcgcgttattttggggcgttaagttttattttcgggtttggaggaaagcgtggattcggcgttcgcgtttaggtacgtgttgtttcgggacgggttagtcggtgggtgaattttgttagttacgcgtggggcgggtttttggtatatttttagattattgttttttgtgttagaagttttgtaggtgtaatttttttttggagtagttgtgggtgcggatttagcggagtaatttcgaggcgttttagagagagtttggatagtcgttggagtttttttcgagtgggtttttttaatatcgttatagtaggaaagttatttttttagggttttgtttatcggaaatttttgttttggggagtttggtttgtttggttttaggatataggttaattaagttggtttcgaaatttagaatgtatttagagggaaggtgggataaagtttttggaggcgtttgttggtcgtt

SEQ ID NO: 479 - DNA, 2001 bp, Artificial Sequence
  chemically treated genomic DNA (Homo sapiens)
ggcggttaataggcgtttttaaggattttattttattttttttttggatgtattttggatttcggggttagtttagttggtttgtgttttgaggttaggtaggttagattttttaggataggagttttcgatggataggattttagggggatggtttttttgttgtagcggtgttggaaggatttattcgggaaaggttttagcggttgtttaggttttttttgagacgtttcgggattgtttcgttggattcgtatttatagttgttttaaggggaagttgtatttataaagtttttggtataggagataatggtttggagatgtgttaggggttcgttttacgcgtggttggtagggtttatttatcggttggttcgtttcgaagtaatacgtgtttgggcgcgaacgtcggatttacgtttttttttagattcgggggtgggatttggcgttttaggatgacgcggagggtaggttgggggtcgggattttttattttattcgtaggttgcggcggaaagcgagcggcgggaaattcgttgtatagtaacggttttgttaggcgttcgggttatcgcgattttcgcggagatttcggtttacgtttcgtattttttttagggttttttagattttaggttgtagatcgtagatttcggttacgtttcgtattttttttagggttttttagattttaggttgtagatcgtagatttcggtttacgtttcgtattttttttagggtttcgcggattttaggttgtagatcgtagatttcggtttacgtttcgtattttttttagggtttcgcggattttagcgttagtttttatatttattttatagggttttgtaaatttcggttcgcgtttcgtatttattttagggtttcgagatatttcgtagttttcgatacgcggtttcgtggtttcgttttttatcggtatttgcgattcggcggggcggttgttttggggttttcggattcggtttcgcgtacgcggatttcgggattatagcgtttataaggcggcgcggcgggcgcgcggttgcggggtgggcgggttcgtttcgtcgaacgcgttttgagggcggggtttcgcgcgtggtcgggcgttgcggtaggagcgtttttacggggtatttttttatttacggtcgttttttagtttcggcgtcggtttttttttattcggttatcgtcggggttacgcggtttttcgtgttgcggttttatttttggggtcgttttttgatttcgatcgtttttcgggtttttattttcgtcggcgttagtattttggggtgttattcgcggaggtgtcggtttttcgggcgggtattttgttatttttttttttcgcgttttttttattttcggtttttttttgatttttttttttcgacgaggttttgtgcgttttttttttggtattttggaatatttgtatttttggtcgtaagttggattcgggacgcgggtcgggtttacgcgtttttaggggtggttttgggtcgttttcgtggggttttaatagggatacgtatagtttgtttttggggatcgtacggtttcgaattcggcgttttcgggatttcgtcgttcgtttttttgtttgatcgtgattcgtacgggtttgtattaaggagtaagtcggatttaggacgtggttcggggttattagtttttattttagtagggatagttcgggggagattcgcgtaggtttcgtagacggtagcgtagttatatttaggaaggggggtttgggttatttttttaggaaggcgtggggttgcggtagatagtatcgtcgaaagtttaaggtttgtgtaggatacggggagaagtggggggttttagggttatttttttttggagttatttagggtttggttatggggagggaagttaagtcgagggttgtgggggttttaaggttaaggaggagttaggaagtttattgtatagaatagaaggggacggttatcgtggtat

SEQ ID NO: 480 - DNA, 2002 bp, Artificial Sequence
  chemically treated genomic DNA (Homo sapiens)
tttttatttcgaaaggagttatttttttgtagttttttagttgcgaaaagaggaggaagttggttgggtcgggggtcgcggggggtatttttcgtagatggcgggatttttttgtcggttatggtaaaaacgaggtttgttttttttatcgtttttaattttagtttttggtatattgttgaaagtaattgaataaaatcggaaattcgagaaggcgttcgttcggattggtgagattttgaggggagaaagaagcggggatttcgtcggtattagcggcgtttttttttcggttatcgttaatttttattttagagggtattgtttcgttatttagtttaggtttttttgcgagagtttcgcgggttcgcgtagttttcgcgattcgaatagatttttagtttttggaggaatgtttgtttttttaataataaaaaattaaagaagcgtttataaatgttaagttttttcgtattatgcggagtatagaggataacgattatagttatttttgaatttcgtttacggtatagcgtcggagtcggggtttggggcgtcgttttttggggggtttcgatttttagtcgttttcgttttattcgggtcgttaaggggttgggggaggcggcgttcggggtaatcgggggagatttagggcgttgggggtatttggggaatttatgggggtttaaaggaattaggagatcgggatttcgaaggggatttggggggttcggggttttcgggggcggtcgggggttcgcggattcgggaagttttgaggatttagaggtcgggcgcgtttcgttcgcggcgtcgtttttttcgtaatttttttagttttcgagggaagaggcggggtgtggggtgcggttaaaaggcgttacggcgggagataggtgttgcggtttcgtagcgttcgcgcgttttttttttcgattcggagtttttcggcggcgttcggtttaggattcgtttaggagcgtaggagttttagcgtagagattttaacgtcgagattttcgtttcggtttcgtcgcgttttttttcgacgtaggtgagttcgtcggtttcggattgttcggttaggaatttggcggcggggagggatcgcgagatttagagcggttgttcggtcgcgtgggtttcggggaatcggggggttggattaatatacgtttttgggtcggggggcgggggtcgttttttggagcgggcgtttttgcggtcgagtttcggagttggaatggggcggtcggggaagtggacgcgatggtatcgttcggggtgcgagtggggtcgggcgcgcgcgggaggggaaaaaggcgcgggcgagtcgttagcgcgaggtttgtggtgtcgtcgatgttttttcggggtattttagcgtagtcgtttggttatttgatttattgttattaaacgttttaaatttatcgaaagtttagtttcgaagtaaagtttcgtttcgtcggtgaagtaggaagttttcgttgtaggaattgatttttattttttggagcggtttttgtagaaaaattttcgggtagagatttgggcggagtttgtttagaattaacgcggagttagtcgatttcggtttatttcggggttaagattttagtggttttttttttttttaaatattttacgagggtttgttttcgggttgtgtttttcgtttagaaggaaaatttttaggatttttgttcgcgaagaggtggtgtgcggttgagattcgcgtttttaggacggttttattagtgtttcgattttgttttattggaggaggaaggtagttcgaatagcgtttatttaattaatagttgttgagagttgggtttcgtggttatgtatttgggattgttttgagaagcgtggtacggtcgtgtttttatgtgattttagagtttttttcgaaattgttgtgtatagtcggttataattttagatattggtgagaagggtggaggaattttttggggatagttaggtaaggtcg

SEQ ID NO: 481 - DNA, 2002 bp, Artificial Sequence
  chemically treated genomic DNA (Homo sapiens)
cgattttgtttggttgtttttagagggtttttttattttttttattagtgtttgaaattgtgatcgattgtgtatagtagtttcgaaagggattttaaggttatatggggatacggtcgtattacgttttttaaggtagttttaggtgtatggttacggaatttagtttttagtagttgttagttaggtgagcgttgttcgggttgttttttttttttagtggggtaggatcgaggtattgatggaatcgttttgaggacgcgggttttagtcgtatattattttttcgcgaataagggttttaaaaattttttttttaggcggggagtatagttcggaaatagattttcgtgaagtgtttaggaaaaagggaagttattgaaattttggtttcggggtaggtcgggatcggttggtttcgcgttagttttaggtaaatttcgtttaaatttttgttcggggatttttttgtagaagtcgttttaagaggtaaaggttagtttttgtagcgaaggttttttgttttatcggcgaaacggagttttgtttcgaagttaagttttcggtgaatttaaaacgtttggtggtagtgggttaagtagttaggcggttgcgttagagtatttcgaagggatatcggcgatattataaatttcgcgttggcggttcgttcgcgttttttttttttttcgcgcgcgttcggttttattcgtatttcgggcggtgttatcgcgtttattttttcggtcgttttattttagtttcggagttcggtcgtagaaacgttcgttttagaaggcggttttcgtttttcggtttaaggacgtgtgttggtttagtttttcggtttttcgagatttacgcggtcgggtaatcgttttgggtttcgcggttttttttcgtcgttaggtttttggtcgggtagttcggggtcggcgggtttatttgcgtcgggaggaagcgcggcggggtcggggcgggggtttcggcgttggggtttttgcgttggggtttttgcgtttttaggcgggttttgggtcgggcgtcgtcgaggggtttcgagtcggggagaggagcgcgcgggcgttgcggggtcgtaatatttgtttttcgtcgtggcgttttttaatcgtattttatatttcgttttttttttcggagattgggaaagttacggagggggcggcgtcgcgggcggagcgcgttcggtttttgggtttttagagtttttcgggttcgcgaattttcgatcgttttcgaaagtttcgaattttttaagtttttttcgaggtttcgattttttagtttttttgagtttttatgagttttttaagtgtttttagcgttttgagtttttttcggttatttcgagcgtcgttttttttagttttttggcggttcgggtgaagcgggggcggttgagagtcgggattttttaggaagcggcgttttagatttcggtttcggcgttgtgtcgtgggcggggtttagggatggttgtggtcgttgttttttgtatttcgtatagtgcgagaggatttggtatttatgagcgtttttttaattttttattgttagagaaataggtatttttttaaggattgaagatttgttcgagtcgcggaggttgcgcgggttcgcgaggttttcgtagggggatttaggttgggtggcggggtagtgttttttggaatgggggttaacggtggtcgaggagggggcgtcgttggtgtcggcgaagttttcgtttttttttttttttaaaattttattaattcgaacgaacgttttttcgaattttcgattttatttaattatttttaataatgtgttaaggattaaggttgggggcggtgggagagataagtttcgtttttgttatggtcggtaggggggtttcgttatttgcggagggtgtttttcgcggttttcggtttagttaattttttttttttttcgtaattggggaattgtaaggaggtgatttttttcggggtgagga

SEQ ID NO: 482 - DNA, 2430 bp, Artificial Sequence
  chemically treated genomic DNA (Homo sapiens)
agttgtaattttaatgaatcgtgattatgttattgtattttagtttaggtgatagagtgagatgttgtttttaaaataaaaaataaagtgaaatttttgattggtataattttgtttttttattagttttatttttaaaaaaattatataagtaaaatatgtttttttagttattattttttaaattagattattttttgtaataattttatgggaattattttacgggagtatagttatttacgtttgtaattttagtattttgggatgttaaggtgggaggattgtttgagtttaggattttgtaattagtttgagtaatatagatttcgtttttataataataataataataataaaaataaaaaaattaatcgggtatgatggtgtgtgtttgtagtttatgttatttgggaggttgaagtgggaagattttttgagttaaggaggtagaggttgtaagtgagttatgatagtattatcgtatttaagtttgggtaagagtgaggttttgttttaataaaaattcgtaaaaaattttgggagtatcgtacggttgttagtgaataaggttataagataaaaaataggatgtttaattaaatttagttaaataagcgttgtatatttttagtgtaagtatatttaaaatattaatgaggtatatttatattaaaataaatatttattgtttatttgaaatgtaaatttaaataggtattttgtatttttatttgttaaatttggtaattttattagtattttaatatgaagttatgagggttgtttggatttatgttggtaggtaagtattaatttattcggttgttttagataggatagaaattattttttttaaaaaaatcgtttattttgacgataggtagtaacgaagtacggaagaattttgattttttgaggaattcgtaattgacgtaagtgttataaatgttattttgattgatttttcgttttttttatttttttttttttgtaattgttttattatttttttttttttaagtttcgtttttttagttatttttaattgttgaggaatcggttgtttaaaaggagtcggtaaaagcgtttacgtggagtttagaggagcggaagtagttagatttgattgagagtcgtaaagcgcggttggttttcgtttttcggataacgattatagtttcgattgttagtgtcggtttttttcgtgtgaggggatttgtcggatttttgtaaatttaattttttttttatttcgggtttttttttatcgtcgttttttttattttggattatgtttaagaagtaaggatatgttgtggtttttatcggttgtttataaaggcggtggggtgggggtggggaagagggcgagagttaagattttttttttttttttttcgtttttgttattttgattttttaaggttttttatagtattatgtttttatttttaatttgaatatttttttaagttttttattcgtagtttttaattgggttttagtttttttatttttattgttttttttttttattttttttttttttttgtttttttttttaattttgtttttatttttagggttttattaattatattcgtgtattgtgatttagaggtatattttttgtagttgagaggggagttttgcgtttattgttatatgtttattagttatgaattgaataaaggaaggtttgattttttgggttatgggagtgaaggagtttgggtgataggaagtaagcggtttgttatgtttattgtttagttgttagattaattttgttttgaaaataacgattgttttataggttatttagtgtaaggaagataaaaattttttgggaatttattagtgggtttgttttttagatttggtagacgtaaaaagtaaagggggaatatgggtaaaggaaggtgggttttgtgtatgaaattttgagtaaaaacgaatagggattttagaaattattattattattatttaaaaaaaattttagtagattatatagtttagtaggggtcgattttttatgttatgtttgggttggttttttgtattttaagaattgagggttttgttttttgattttaggttttattattggtgggagtttgtgtttttttttgggtagaattgaataagattttttaggaaaggtatttgtgtagttaattatagattatggtgtaaagtatgttttatatttttttttttaattttagttaattgttgtatatttgatagtttattttaatattgtattaagatattggttttgtgttggatagagtaaaagggagatggtatttttttttaaaagaataatttattttataattaagtatttaaatatttggttgggaataaatgattaattagaatagtatttttaggtattttgatatttttatttagaaa

SEQ ID NO: 483 - DNA, 2430 bp, Artificial Sequence
  chemically treated genomic DNA (Homo sapiens)
tttttaagtagaggtattagaatatttaaaggtattgttttaattagttatttatttttaattaagtatttagatatttaattatgaaataaattgtttttttaaaaaaaaatattattttttttttattttgtttagtataaaattaatgttttaatataatattgaaataaattgttaagtatatagtaattagttggggttagggggaggaatatgagatatattttgtattataatttgtaattagttatataaatgttttttttggaaaattttatttaattttatttaggaagaaatataggtttttattaataataaaatttgagattagaaaataaaatttttaatttttgagatataaaagattaatttaagtataatatagaaaatcggtttttgttaggttatgtaatttgttgagattttttttaagtgatgataataatgatttttaagatttttattcgtttttgtttaaaattttatgtataaaatttatttttttttgtttatgttttttttttgttttttgcgtttattaaatttggaaggtaaatttattagtaggtttttaaggaatttttgttttttttatattgaatagtttatggggtaatcgttatttttaaggtaaggttaatttggtagttaggtaataggtatgataggtcgtttgttttttgttatttagatttttttatttttatgatttaggaagttaagtttttttttatttagtttataattaataaatatatggtagtgagcgtagggttttttttttagttatagagaatatgtttttaaattatagtgtacggatgtgattggtagaattttaggaatggagatagaattgggggagggggtaaaagagaaagaggggtaaggagaaaaaataatgggagtggagggattgaaatttaattaaggattacggatggaaagtttaaagaagtgtttaagttgggagtgagagtatagtattatagaaaattttagggagttaggatggtaggggcgggggagagagaaagaggattttagttttcgtttttttttttatttttattttatcgtttttgtgagtagtcgatggaggttatagtatgtttttattttttgaatatgatttaaggtgaagggggcgacgatagggaagggttcggaatgggaaagaaattgaatttgtaggggttcggtagatttttttatacgaggaaggtcggtattgatagtcggagttgtagtcgttattcggaaaacgagagttagtcgcgttttacggtttttagttaaatttgattattttcgtttttttggattttacgtaggcgtttttgtcggttttttttaggtaatcggttttttagtagttggaggtagttgaaagggcgggatttgagagggaagaagtgatagagtaattgtaggaagagaagaatggagggggcggagaattaattaaagtagtatttatggtatttgcgttagttacgggttttttaaagggttaagattttttcgtgtttcgttgttatttatcgttaaagtaaacgatttttttagagggaatggtttttgttttgtttgaggtaatcgaatggattggtgtttatttattagtatgaatttaggtaatttttatggttttatgttaaagtgttggtaggattgttaggtttagtaaatgaaaatataggatgtttatttaaatttgtattttaggtaaataatgaatatttgttttagtgtaagtatattttattaatattttggatatatttatattaaaaatatatagcgtttgtttagttgaatttaattgagtattttgttttttattttataattttatttattggtaatcgtacgatgtttttaaagttttttgcgggtttttattgagatagggttttatttttgtttaggtttgaatgcggtggtgttattatggtttatttgtagtttttatttttttggtttaagggatttttttattttagttttttaagtagtatggattataggtatatattattatgttcggttaatttttttatttttattattattattattattgtagagacggggtttatgttgtttaggttggttgtaaagttttgggtttaagtagtttttttattttggtattttaaagtgttggggttataagcgtgaatgattgtgttttcgtagaataatttttatagaattattatagaaggtaatttgatttaagagataatagttaaagagatatgttttatttatgtaatttttttaaaaataaagttgatagagaaataaaattatgttaattaagagttttattttgttttttgttttagagatagtattttattttgttatttaggttggagtgtagtggtatgattacggtttattggagttgtaatt

SEQ ID NO: 484 - DNA, 1123 bp, Artificial Sequence
  chemically treated genomic DNA (Homo sapiens)
ggggatttggatatttttattaggggtttgttggagagttggaatggggtaggtgttagaatttgtgggtaggaggttataggaagtttggaggttttgtttgtattttaggtagtaaaggaggtttggtgaggttttatttgtttatttgtttggtggttttgaggggtggggagggagtagttttagggggagtagggtgagaggttgggaatggtttagtggtggggttttagagttaggtgaaattgaggtttttttagagttgagttggatttggaataggagttgtggttttgtgttggggtgggtgtggtttaggtagttatttggttatagatagatagtggtggttatatatatttttgtttttgtatttgtggttaggttggggtatttgtgtgttaggtggaatgtaggggtgttttgggtttgtatatttttttatgtttgatatgttgttgttgttagagtttgttttgttgtgtttttgtttttggatatttgtgtttttgtttgtttttgggtttgagtttgttttagtttttgtttttgtaggatttgttgtaatttatttgttgttgttgtagttgttgtttttgttttgagtattgagtttgtttagtttgttggtgttgagtgtagggtttgtttttattttaggttttttgtgtggttttatttgttgttatatatttagatattttattttgtttattttgtttgattttgtaaggttgttattggagtttattggggtttagggaagttttgtgattgtgatttagttatagatggagaaggttagattgttggttgattgattagtttaggttagtttggggaggttaagggttatgtttgaaagtttgtagtttattttttttttattgtagtggatattttttttgattttttattttagtatatgaattttatttagttgggttttagataggttttatagtattgttatgtgagttttaggtatagtgagttagatgaagatatgggtttggtagagtggtttggggtggtttttgatttttatttttataatggaagagattgtagttttttgagagagttttgtgaattgagggaatgtattttggttgttttg

SEQ ID NO: 485 - DNA, 1123 bp, Artificial Sequence
  chemically treated genomic DNA (Homo sapiens)
taaaatagttagaatgtatttttttaatttgtagaatttttttaaaaggttgtagttttttttattgtaagagtagaggttagggattgttttaggttattttgttagatttatgtttttatttaatttattgtgtttgaagtttatatgatggtgttgtggggtttgtttggggtttagttgggtggggtttatgtattggggtgagggattaagaagggtgtttgttgtagtagaaagaaggtgggttgtggatttttagatgtggtttttaatttttttgaattgatttaggttagttagttagttggtggtttgattttttttatttgtgattgagttatagttatagggtttttttagattttggtgagttttggtaatgattttgtgaggttgggtagagtgggtagggtgaaatatttgggtgtgtggtagtgggtggggttgtgtggggggtttgggatgggggtgggttttgtgtttggtgttggtgaattgggtgggtttagtgtttagagtggaggtagtggttgtggtagtagtaggtgggttgtagtagattttgtggggatggggattgggatgggtttaggtttaagaataggtgaaggtgtaggtgtttggggatgggggtgtggtggagtaggttttagtagtagtggtgtgttggatatggggaggtgtgtgggtttagggtgtttttgtattttgtttggtgtgtggatattttagtttggttatgggtgtaggggtgggggtgtatgtagttgttattgtttgtttgtggttaggtggttgtttgggttatatttgttttgatgtagagttgtggtttttgttttgggtttggtttgattttggggaagttttggttttatttggttttgggattttattattgagttgtttttagttttttattttgttttttttggagttgttttttttttattttttagggttattgagtgggtgagtaggtggggttttattaggttttttttgttgtttgggatgtagatagggtttttaggttttttgtgattttttgtttataggttttgatatttgttttattttagttttttagtaggtttttggtgagggtgtttaggttttt

SEQ ID NO: 486 - DNA, 933 bp, Artificial Sequence
  chemically treated genomic DNA (Homo sapiens)
ttattaattttatgttttttaaattggtataattggtgataattttagagttatttgttattgtattaaagtttgatagagaaggatgatttataggagtagttttgttgtgtttgaggattgtttgatatttgaaatgagttttggattagtttttggttgaagtttatttaggttttttttgtgaaggttaagttattagagttaattattatttttgttttattttgtttaaatattgttgttggggttgataattgtatttagtgaatatttgtattggaatttggagtatttatttttttttatttgtagtttgaggaattttgattttttggtgatttttagaagtttttggatgtagttgtttgtgaggtggatttgtttgttgttggttttggggttggatgatatgtttggagttttagggaggttgtgaggagtttgttttttggttaggaagtgattgttgtttgtgttgtggtttttaaggataatttttgggtggtaattatttttttttatttaggagattaatttttttgttgaggttttatttaaggttgtagtatttatttattgaggtttttaagaaatttgtttgttttaggaaattttttattgagatttgttttgtattgttatttggtggtaagatataaaaatatattttttatggtgggattagattgtgtgtttgttttgtttttattttgttttttttttggtggtggggtagagggatggtggaaagggaattaagagttagtttttagaagtgtaggtatttgggattgagattggagtggggttatatttttttttttgtttttagtattagttatagttttgttattgtgtttttagttttttttttttttgtagatattggttatttgtgaaattaattgtattttttttttgtattgtttt

SEQ ID NO: 487 - DNA, 933 bp, Artificial Sequence
  chemically treated genomic DNA (Homo sapiens)
aagataatgtaaagagggaatataattagttttataagtggttaatgtttgtaaagaggaaagaaattagaggtatagtgatagagttatggttggtattgaaaatagagaaggaggtgtagttttattttaattttaattttagatatttatatttttgggaattagtttttggttttttttttattatttttttattttattattggggagagggtggggtgggggtggagtaggtgtgtaatttgattttattgtggagggtgtgtttttatattttattattaggtggtagtgtggggtaggttttagtaggaggttttttaggataggtaggttttttaggaattttagtgagtgagtgttatagttttaggtggaattttaataaagaaattgattttttgggtggaggaagatggttgttgtttaggggttgtttttaagggttgtgatgtagatagtggttattttttggttgaggggtaggttttttgtggtttttttgggattttgggtgtgttgtttagttttgaggttggtgatgggtagatttgttttatggatagttgtgtttagaggtttttggaaattattaaaggattagaattttttaggttgtaggtggagggaggtagatgttttggattttagtatagatgtttattggatatagttattaattttgatgatggtatttgaatagggtggggtaagagtggtggttgattttgatagtttagtttttgtgaaaggggtttaggtggattttagttaagaattgatttgaagtttattttaagtgttaaataatttttaagtatagtaaggttgtttttgtgggttatttttttttgttaaattttgatgtgatgataggtgattttgagattgttattagttgtattaatttgaggaatgtggaattagtag

SEQ ID NO: 488 - DNA, 660 bp, Artificial Sequence
  chemically treated genomic DNA (Homo sapiens)
ttttgttttttgggtttaagtgattttttttttttagttttttgggtaagtgggattataggtgtttattattatgtttggttaatttttgtagagagagttttgttatgttggttaggttgagttggagtaatgttttttttattttatggagtttttatttattatagttgttagttttttttaattttaggaatttttgttttaagggaaataggatagatagtgtttgtgttttattttgtttatttttagatgaggaaatagttattaaggttttgtgtaaatttgttgtttatttaatagtttatattatttgttttgttttagttttttgtttgttagttggtgtttttggtagttagtaggtttgtgggggttttgttttagttaggttgggggttgggggttgggttttaggaattttgttgttgttgttggggttgttttaagttagtgtggatagaagtttagagtttaggggtattttagggttgaggggtttaggttggtttttgggttttgggtttagggtagttatttagggtgtgtgtttgtagttaattagggttgtggggaggaaggtttttggtattgttatagtttgtaggttttatgagtttggttttggggttgggaaggtgggagtttttggtttta

SEQ ID NO: 489 - DNA, 660 bp, Artificial Sequence
  chemically treated genomic DNA (Homo sapiens)
tggagttagagatttttatttttttaattttaggattaggtttatgggatttgtagattgtggtagtgttggggatttttttttttataattttgattggttgtaggtatatattttgggtgattgttttgagtttgagatttaagggttagtttgagttttttagttttgaggtgtttttgagttttgggtttttgtttatgttagtttggggtagttttaatagtagtagtagagtttttgaggtttagtttttggtttttagtttggttgagatggggtttttgtggatttgttggttgttaggaatattagttggtgagtgggaagttggagtaaggtaagtgatgtgggttgttgggtgggtggtgagtttgtatgggattttggtgattgtttttttatttgaaaatgagtagagtgggatatgggtgttgtttgttttgttttttttggggtgggggtttttaggattaggggaaattgatagttgtggtaggtggaggttttatgaggtgagaggagtattgttttagtttagtttggttaatatggtaaaattttttttataaaaattagttaggtgtggtggtgggtgtttgtagttttatttatttaagaggttgagggaggagaattgtttgaatttaggaggtggag

SEQ ID NO: 490 - DNA, 684 bp, Artificial Sequence
  chemically treated genomic DNA (Homo sapiens)
tataaaagttagttgggtgtggtgatgggtatttgtaattttagttatttaggaggttgaggtaggagaattgtttgaatttaggaggtggaggttgtagtgagttgagattgtgttattgaattttagtttgagtgatgagagagaaattttgttttaaaaaagaaaaaaaaaaagatattttaaaaggttaatttttatgaagggttaggggttttataggtgagtggagttttagtagtttttttagttttgtgtgtttatgtattggttttttttttggttttatatttagtgtttaaggggttgtagtgagatggggtttgggttgtggagttgtgtttggttttgttgttttataagggtattgtggttgttagtttgtttttgtaattgttgtagagttatgtagggttataggtggtggttggttgtgggatttattttttgtgtatgatatttttaggtatttggttgggtgtggttttggtagttagtagggtttttgtattagttggtttagtttgtgttagagggtatggtggttggtatttttttttatattatttttttggaaatttttttaggagttggtgatttttgagtaaaggatttttaaggttattttgtttttagaagggtgtgttttgtttattggtttgttttttatttatatttaggggg

SEQ ID NO: 491 - DNA, 684 bp, Artificial Sequence
  chemically treated genomic DNA (Homo sapiens)
ttttttagatatggatgaagagtaggttagtgagtagggtatatttttttaggagtagaatgattttgaggattttttgtttagaagttgttagtttttggaaagatttttagaaaggtggtatagaggaaggtgttagttattatgttttttagtatagattgggttagttggtgtagaggttttgttgattgttagagttgtatttagttggatgtttagaagtgttatgtataagaagtggattttatagttagttattatttgtaattttatgtggttttgtagtagttgtagggataggttgatagttatggtgtttttgtggagtagtaaagttaggtgtagttttgtggtttaagttttgttttattgtaattttttgaatattgagtatagagttagggagaagattagtatatgggtatgtagagttgagggggttgttggggttttatttatttgtgggatttttggttttttgtgaagattggttttttgaggtattttttttttttttttttttgagatagagttttttttttgttgtttaggttggagtttaatggtatgattttggtttattgtaatttttgttttttgggtttaagtaatttttttgttttagttttttgagtagttgggattatagatgtttattattatgtttagttagtttttgta

SEQ ID NO: 492 - DNA, 615 bp, Artificial Sequence
  chemically treated genomic DNA (Homo sapiens)
ttgtttttaatttttttttttttaagtaagtttaaaatttttatgagtaaaagagtttaaagaggtaagaggatattggtgttttaattgttttttttttttttaattttttttttttttttttttttggttggttttatggattatttgggagataaatttatagtggtttagatttatatgatttagtggatgggtattgtgaggaggtttttttaggaagtttttaatttggtgattattatggtgggttatgaatggatgagtgtagagttggttagttggattttttttaagtgtattttttttttttgatatttggttttttggagttgggaatttttttgttgtttttttgtttgtagttaatagagattttttttattgaggaaaaggtatatagatttggaattgttagatattgtaagtttattatgttttaaaaaatattaaaataatattgaaagttttttttttttagtttttttagggagggggttttagatattaaattggggaagttattttttttagaatagttgttagttaaagtttaggtattttttgttttttgtatttgggaaagaggtatgtagtaataattttttttttttg

SEQ ID NO: 493 - DNA, 615 bp, Artificial Sequence
  chemically treated genomic DNA (Homo sapiens)
taggagagaggaattattgttatgtgttttttttttaggtataggggataggaagtgtttgggttttgattgataattattttggaagaagtaatttttttggtttgatgtttgggattttttttttgggaggattggaggggaggagtttttagtgttgttttaatattttttaaaatataataagtttataatatttggtggttttgaatttgtatgttttttttttagtgaagaaaatttttgttggttgtgagtagagaagtggtggaaggatttttgattttgggaagttaggtgttggaaggaggaagtatgtttgaagggggtttggttggttgattttgtatttgtttgtttgtggtttattgtggtggttattaaattgagggttttttggaaggatttttttatggtgtttatttattgggttatgtgggtttgggttattgtgagtttattttttaggtaatttatggggttagttaggaggagagggaagaaggaagttagggagggagagagtaattaaaatgttagtgtttttttgtttttttggatttttttgtttatggaagttttgggtttgtttggaggaaaaaaaattaaaaatag

SEQ ID NO: 494 - DNA, 550 bp, Artificial Sequence
  chemically treated genomic DNA (Homo sapiens)
tattagggatgttgtgagtttgttagaaggtgttgggggtgggtatagttattgtttattattatttttaatggggtattggtagttatgtggttggaaggggtttatggtgtaatggtttggaaggtagtgatattattgtttttgttttaagaattatttggttttttggggaagattggttgttggggagggttaaggggttaggtatttaggtttagtgattttatggtatttttgttgtttttttaggtatttgttgttgggttttggtaggggtttgtgtttgtggtagtgtatgtgggattggggtttttgtgtggttgtgtatttgggtttgtgtgtggtgtgagggagatttgttttgtttattatggggattttggtttgtatgtgggggtttttgggttggtgagatttagggttgtagatgatgttatatggttgtgtgtgtatgtggttatgtgggtgtggttgtgtatgttgtgtgattgtgtgggttttggggtttttaggtttggttgattttttatttattttgggtaagttg

SEQ ID NO: 495 - DNA, 550 bp, Artificial Sequence
  chemically treated genomic DNA (Homo sapiens)
tagtttgtttgggatgaatagaaagttagttaggtttgggggttttagggtttatataattatatagtatgtatagttatatttatatggttatatgtgtatatagttatatgatgttatttatagttttggattttattagtttaggaatttttatatgtagattagagtttttatggtgaatggaataggttttttttatgttgtatatagatttagatgtatagttatatagaaattttagttttatgtgtgttgttataggtataggtttttgttagagtttggtagtagatatttggggaggtggtgagggtgttgtggggttgttaagtttgggtgtttggttttttggttttttttaatagttagttttttttaaagggttggatggtttttaggatgggaatgatggtgttattgttttttgggttattgtgttataggttttttttgattatgtggttgttggtgttttgttgggggtggtggtgagtggtaattgtatttgtttttaatattttttgataggtttatagtatttttggtg

SEQ ID NO: 496 - DNA, 623 bp, Artificial Sequence
  chemically treated genomic DNA (Homo sapiens)
tgtttatgttttgtttttgttatttttttttagttgtttgagggttggttggtgtgagtttaggtttttgtagggtatgttaggagtaagttgtgatttggttttgggttgtggagtttatgttattttttattgaggattttgggttgttttgttttgtgtatgggtatttgggttttgatagtttgttgggttttgggttattagaggttttgaattgtgttttggtgatagttagttttttgtatggggtatgtatagatttgggtttaggttggggtattgagatttttatatttagtagttgtggtgaggttggtttgtttgttttttggggttatttttgttgtgttgtttttttttttttttttgttttttttgttggttgttttttttttgttttttttgggtaggtatggttgggtgggggtgaggttttggtaaagttttttttgttttttagtttagtggtgtttatatgtgatggtgtgggggtagttttgtgaaaagtttttttgtgttttttttttaattaagaaatagtagtaggttttgggggtttaggttttatgttttttttgaatgttggttgtggttataggtggttggatgggtaggtttag

SEQ ID NO: 497 - DNA, 623 bp, Artificial Sequence
  chemically treated genomic DNA (Homo sapiens)
ttaggtttgtttatttagttgtttgtgattatggttagtgtttagagaggatgtggggtttgggtttttggagtttgttgttattttttaattagggaggagatataaaggggttttttatgaggttgtttttgtattgttatatgtgagtgttattgggttggaaaatagagggggttttgttagaattttatttttatttggttgtgtttgtttagagagggtgggggaggagtaattaatagagggggtaggggagagggaggagatggtatggtagaggtggttttgggaagtaggtaggttagttttattgtggttgttggatgtggggattttggtgttttagtttaggtttaggtttgtgtgtgttttatgtaaggggttgattgttattaggatgtaatttaaggtttttggtggtttagggtttggtgggttattagaatttggatgtttgtatgtgggatagagtagtttaggatttttagtggagagtagtatgggttttatagtttggggttaggttatagtttgtttttggtatattttataggagtttgggtttatattagttagtttttaggtagttgaggaaggatagtagaggtagggtatgggtg

SEQ ID NO: 498 - DNA, 682 bp, Artificial Sequence
  chemically treated genomic DNA (Homo sapiens)
tgtgttaggtttatgttttgtaattatataatgtgttttgttatttttgtaatttgtgttgtttttttttatgaaggtataggtatatttgtttagtttttggttatgtgggtatttggtgttgagtatttatttgtttgtgttgattgatgtttttttttagtttttattttttttttagaagttttttttttttgttttgagaggggttgagttagttgtggtttttttttattttgattttagtggagataagttggggaagtttttgggagttgtgtgggtgagtagagttgagatttggtatggttgtattggttgggttattgtagggtgattggtggtttggtttgataatatgtttatttgagttatttttggtaaaggttattaggttttaggatggaatatgtatgggggaaatgttttttttgtgatatgtttattttgttttaaagtgagatgagggagggagggtgtggttgttaggtaatgaagtttagagtttattagagttgagggattgatgtgttgtgtatgggttgggttttatttttaggaagtttaggataaaattttgtttatgttagagggttttggttaaattttgttttgtgtgtttgggtgaagttttgtttttataagtggttttagtttttttagagtaagaattatttgtatt

SEQ ID NO: 499 - DNA, 682 bp, Artificial Sequence
  chemically treated genomic DNA (Homo sapiens)
aatataaataatttttattttgaaggaattaaaattatttgtgaagataggattttatttaaatatataggatagaatttggttaaagttttttaatatgaatagggttttgttttgagttttttggaaatgagatttagtttatatgtaatatattaattttttaattttagtaaattttagattttattatttggtagttgtgtttttttttttttgttttattttagagtgaggtgggtgtgttatggaagaggtattttttttatgtgtgttttattttggagtttggtaatttttgttaaagatgatttaggtaaatgtgttattaagttgagttgttagttattttgtagtgatttggttagtatagttatgttgggttttagttttgtttatttgtgtagtttttagaaatttttttggtttgtttttattggaattgggatggaagggagttatggttggtttagttttttttggagtagaaagaggaaatttttgaaaagaagatgggggttgggggaggatattaattagtatggataagtaagtatttagtgttaggtgtttatgtggttaggaattaaatagatgtgtttgtgtttttgtaaaggagggtaatataggttataaaaataataagatatgttatgtgattataaagtataggtttggtgtg

SEQ ID NO: 500 - DNA, 626 bp, Artificial Sequence
  chemically treated genomic DNA (Homo sapiens)
tagaggggatttttgtagagttgtttttgttttagggtttagtttgtgtttgatttaaatagtttttgtttttttttgaggatgagttgggtgtattttttttttgtaggaagatgagggttagagatggaggtttatgttagggttatagagtttggaattttttttggagttaaaatagttttgttttatttattttgtgtattttattttttgttttagttttgttgggtttgttttgtatgtaaggtggggttgggatttagggtttgagttttgttttttggatatttggtttattgtttgttaaaggttttgtggttggaggttttggtttttttatttttttatagggttttagggttgatttaggtttgtgggttaggaatgtgttaatggggtaatttgggttttgttggtttatgtaggtatttgtggattttgagaggggattgggtggggaggggtggggaggggtggggtggggtggtgttgtagagtgtagggtgggtggggttaggttagtagggagtgagtttgtttggttgttttgttttggagttattgtattgttggttgtagatataggttgtattatgaagttagtttttttgttttgggttttg

SEQ ID NO: 501 - DNA, 626 bp, Artificial Sequence
  chemically treated genomic DNA (Homo sapiens)
tagggtttagggtaggagggttggttttatggtgtagtttgtgtttgtagttagtagtgtagtggttttgaggtgaggtggttagataagtttattttttgttggtttggttttgtttgttttgtattttgtggtattgttttgttttgtttttttttgtttttttttatttagtttttttttaaagtttataggtgtttgtgtggattagtaaggtttaagttgttttgttagtatatttttggtttgtaggtttggattggttttgggattttgtgggagggtgaggaggttggagtttttagttataggatttttggtaggtgatgagttggatgtttagagggtgaagtttagattttgggttttagttttgttttgtatgtagggtgagtttggtggggttgaagtagaggatgggatgtgtagggtgaataaggtagggttgttttagttttagggaggattttagattttgtggttttgatatagatttttatttttagtttttatttttttgtaggaaggaggtgtatttaatttatttttagggggaggtaggagttgtttgggttagatataggttgagttttggggtggaggtagttttgtaggggttttttttg

SEQ ID NO: 502 - DNA, 694 bp, Artificial Sequence
  chemically treated genomic DNA (Homo sapiens)
taattattattattattattgttgttattattaatgtattttgtaaatttatatataatttgtaaatttttttttgaaataagagagagagggtaattgaaattatttaaggtagtatttggaatatgtaggttaaagattgagttagggagggattgttattatatgggttgtggggaggtagagtttttttgtgtttttgagagtatttttttttggggttttattagtttttaatttgttttttgaatttttatttttttttttgttttgtgtttttggaaatttagatagtggttttatttttgtgatttatttagtaggaatgtgggagtttttgaattgttttagttaaagttttttaatttttttttggtgatgaatgggtgaggtttttaaatgaaatgtggaggtttttagttttagtttgtggttttttttttttttggtgtaattatttttgtgtagaatatgttaagtgttttgttttttgggaatttgttttgtatgtaaatatttggtgattaagtgaggtttatttaattaagtattttgtaatgatttttaaattaaagaatagtggattaggagtttagtttgtgttggtgatgggaaaggtagttttatattataaggaggtagatagtgatttggtgtggggaggtggttgggttaagtggggtagagtaggtgt

SEQ ID NO: 503 - DNA, 694 bp, Artificial Sequence
  chemically treated genomic DNA (Homo sapiens)
gtgtttattttgttttgtttggtttggttgtttttttatattagattattgtttgtttttttgtgatatgaagttgttttttttattattagtatgaattggatttttaatttattgttttttggtttaagagttattataaagtgtttaattaagtaagttttgtttaattattaaatgtttgtatgtgaaataagtttttgggaagtagggtatttgatatgttttgtatagaaataattatgttgaggagggggagggttgtgggttgggattgggagtttttatattttatttgagggttttatttatttattattgaaggggaattaaaaggttttagttggagtaatttgagaatttttatatttttgttggatgaattatgggagtggggttgttgtttgggtttttaaaggtgtagagtaaggggagaggtgggaatttgagaggtgagttgggggttggtggggttttggggaggggtgtttttggggatataggggagttttgtttttttatagtttatgtgataataatttttttttggtttagtttttggtttgtgtgttttaagtgttgttttagatagttttaattgtttttttttttttattttaggaggaggtttgtaaattgtatatgaatttgtagaatatattggtggtggtggtggtggtggtggtggtggtta

SEQ ID NO: 504 - DNA, 701 bp, Artificial Sequence
  chemically treated genomic DNA (Homo sapiens)
tggagtagatttttttgtgaagtatattgtggatggttgtatttggaattatattggtatgtaggagggatagttttagggttagtagtttgtgagggagttttggatttggttagagtaggagtttggtttggggttaagtttattttatggatttttttttttgtttttttaggagtagtttattgaaatgtgttttttgtttatagaagtattgtgatatatagatgttttatgatatattgtatatattaggggttttgtgttttttaggaagagggtttttatttgaagtggggtttgatggttgttatgtgttggtttatgttttttttggttttgttgatgtttagggatatggagtgttgtagtaggttggagaagatttttatttggttagagttgtagtatttggtgattttaaattgttgtattaggaattgagtgaaaagaggaagatgttgtggtggtggggttgagttgggttaattttggggttggtagagatagttgaggaggggttttgggttgattggttgagtttgttgaaggttttgggtttggttatttttattttaggaatagttttggttttttaggtggagtattttatagtttttgtgggggaataggtatgtatgttgatttagatgtagtggggggttattttggggggatagggtttgggttgatttgttttt

SEQ ID NO: 505 - DNA, 701 bp, Artificial Sequence
  chemically treated genomic DNA (Homo sapiens)
ggaagtaagttaatttaaattttgtttttttgaagtgattttttattatatttggattgatgtatgtgtttgtttttttatgaaggttgtggggtgttttatttggggggttaggattgtttttggggtgggggtagttgagtttaaggtttttggtaagtttggttagttagtttagaatttttttttagttgtttttgttggttttagggttagtttggtttagttttattattatagtgtttttttttttttgtttagtttttggtgtagtggtttgagattgttaagtattgtagttttgattaagtggagattttttttagtttgttgtagtgttttatgtttttgaatattggtagggttaaggggagtatgaattggtatgtggtggttattgggttttgttttaagtgagggttttttttttggggagtatagggtttttggtgtgtatagtgtgttatggggtgtttgtgtattatggtatttttgtagatggggaatatattttagtgagttgtttttggaagggtagggaagagagtttataaggtgaatttggttttaggttaggtttttgttttgattgggtttggggtttttttataggttgttgattttggggttgttttttttgtatgttgatgtggttttaaatgtaattatttgtaatgtgttttgtgagaagatttatttta

SEQ ID NO: 506 - DNA, 698 bp, Artificial Sequence
  chemically treated genomic DNA (Homo sapiens)
taatgagtgtgtagattgttgtgtgattaagtgggttagtgtgaaaggtggggggtagaggttgggtgagttttttgggatgtgggtagtaaggatagggttgtggtgtgaattaagatatggtgttttttgtttttgttttttttttgtagggagaggggttattttggttttgagtatttttaattttatgtgaattatgtggatgggtggatagttggagggttagtagtagtagtaggagtttttgtttatttgggggttttgagtgttggtatgatttgattttatggtgtgggtggggtttgggtttatttggaggagtaggatatgttgttggattatagttgggggtgttagatttaggttatgttatatttggtgttagagtttaagatttaggaatagaaattgtgtatggggttaagttggttgtagtttaatatttaggtgattttaggtttaaagtatgtttttggtttttgagatgggttttgtagttgtagtttatgttttggattttgttagttgggtttggtatatttttgttgtttgtttttgtttttaggtttattattttttgttttgttattagggagttatttttagttagtttgttattgtggttatttttttgttttaagtttttttatggtttttattgttaggattttttatgatttattttaggtaggaag

SEQ ID NO: 507 - DNA, 698 bp, Artificial Sequence
  chemically treated genomic DNA (Homo sapiens)
ttttttgtttaagatgagttatggggaattttggtgatgggagttatggaagggtttagagtaggggagtggttatagtaataggttaattgggagtagttttttggtgatagggtgggaagtagtgagtttggaggtaggggtaggtagtaggggtgtgttaagtttagttgataaggtttaggatataggttgtaattgtgaggtttgttttgggggttaggagtatgttttgggtttgaggttatttggatattgggttgtggttaatttggttttatatatagtttttatttttgggttttgggttttgatattaaatatggtgtggtttgagtttggtatttttaattgtggtttgatgatatattttgtttttttaagtgggtttggattttgtttatattatggagttagattatgttagtatttggggtttttaagtgggtagaggtttttgttgttgttattggttttttaattgtttatttgtttgtgtggtttatatggggttaaaagtatttaggattaaaatagtttttttttttgtagaagaaagataggggtagggggtattatgttttggtttatattatagttttgtttttgttatttgtattttagggagtttatttggtttttgttttttattttttgtattggtttatttggttatatagtgatttatatatttattg

SEQ ID NO: 508 - DNA, 641 bp, Artificial Sequence
  chemically treated genomic DNA (Homo sapiens)
gttgttattgatggtaatgaataggtattttttaaataggtgaaggatatatagggagttgttgttttttatggagaagtaggtgtaggtgtttgagagtttttttagtattgttatggaggagatgatgattggggttaggagggggttgagttggttttgtagggtagggagttttttttttttattttttgattgtttgaattttagttggagattttttttaaattttttatttgtttagtagaagagggtttttgtgtttttaatggttattaagatgtattttattttggtaaggagtatagtggagtgtttagatagttagaggtttagaaagggttgtagtagatagattttgtgattgttttattggagagtagtataatatttttggttttgtaaatgtggattgtggtgtgtatagtattttgtttgtgggatagaaatgttttttgaattgaaaaagggggattataggtgtttgttaggttttttatatatatatatttttttatgtttgtgtttagaagtgagatatattgttatttttgttttttgattggtttttttagttttttgagatagagttttttttttttatttaggttggagtgtagtggtttgattttggtttattg

SEQ ID NO: 509 - DNA, 641 bp, Artificial Sequence
  chemically treated genomic DNA (Homo sapiens)
tagtgagttaagattgagttattgtattttagtttgggtaagagagggagattttgttttaaaaaattaaaaaggttaattagaaaatagaaataatggtgtattttatttttagatatagatatagggggatgtatgtatatggagggtttggtaggtatttgtagttttttttttttagtttagaaaatatttttgttttgtaggtggggtgttgtgtatgttgtgatttgtatttgtaggattagggatgttgtgttgttttttgatgaggtagttatagagtttgtttgttgtagttttttttgaatttttggttgtttggatgttttattgtgttttttattaagatgaagtgtattttggtggttattgagggtatagaggtttttttttattggatggatgaggagtttgaagagagtttttagttgaagtttgggtagttagagaatgaggaagaagagttttttgttttataggattagtttagtttttttttagttttggttattattttttttatgatgatgttggagaagtttttggatatttatatttgtttttttatggaaaatagtaattttttgtatgttttttatttgtttggagaatgtttgtttattgttattaatggtgat

SEQ ID NO: 510 - DNA, 675 bp, Artificial Sequence
  chemically treated genomic DNA (Homo sapiens)
atgtagagagaggtaggagggaggaaggagaatgagggggtggtagggagagtgatagagagggattgtgttatagatggtgatatggagtttgtgaaggagggagtaagtagggaggggttgagggttggagagtaggtgtggggggtgggggtggggtgtaggttaagggaggaggtttggagagggagtaggaggggtgtagattttgttattggggagattttagttatttatgtttgttggttttggtttttgtagggagttggagagaagaatgtgtttagtgtttaggggagttgaggttgttagttagtagttagagtagtttgtgaggttattgtggtataggttttttggggtagtagttgtgttttaaggtaaggttgggtgtggggttggttagtttgggagtttatagtttagttttgtagttgggtatattggttgtagtatggattattggggaggttgggtgggggttattagttttgggattggttatatttggagagttttaggtagggtgaggagtggaaggatagaatagagaattaatattttaggttttgagggtaaaattattgtgtagtgagaaaatagatttttattattttgtaattgataaaatttaaaatagaataataataattgaggttagtattttgtaatgta

SEQ ID NO: 511 - DNA, 675 bp, Artificial Sequence
  chemically treated genomic DNA (Homo sapiens)
tatattataaaatattggttttaattattattattttattttgagttttgttagttataaaatagtaaaaatttgtttttttattgtataatgattttgtttttaaagtttaaaatattggttttttgttttgtttttttattttttattttgtttggggttttttagatgtaattaattttaggattaatgatttttatttggtttttttagtggtttgtgttgtggttggtgtgtttgattgtagggttggattgtggatttttgggttggttagttttatatttagttttgttttgggatatagttgttgttttgggggatttgtgttgtagtggttttatgagttgttttggttattggttggtagttttggtttttttgagtattgagtatatttttttttttaattttttgtaggagttaaggttagtgggtgtgggtggttgaaatttttttggtaatagggtttgtgttttttttgttttttttttgggtttttttttttaatttgtattttgtttttattttttatatttgttttttggtttttagtttttttttgtttatttttttttttatgggttttatgttattatttgtggtatagtttttttttgttattttttttgttatttttttattttttttttttttttttgtttttttttgtat

SEQ ID NO: 512 - DNA, 1023 bp, Artificial Sequence
  chemically treated genomic DNA (Homo sapiens)
ttggtttgagtgatagattggtgtaggtggttagtagtttaatttgtattgagtgtttattgggtttttatagtgattttgaattgtgtttttgtttatagtgatttggttggtttgggtatggtagatttagtggtgggtattgtgggtttggtggttaagagtgtgtggttattttgttttagtgaggtttatgtggaggttatgaaggaggatttggttgagtggtttaatgttttgtatggtttgggttttttgggtggtggtgatggttttttgatagggttggttatgggtatgattttgtgttaatatgttaatgttgtgattgaggttgtttgtgtattggtagttgtttgtttggtttgaggtgtggttttttaggtgtatagtgtagtgtttggtttttttatggtgtgtgataatgtggttatttttattggttggtgttgtgtggagttgggtgtgttggaggtgtttatgtttgagattgaggatttggtgttgtgtaagaatgagaagagtgtggtgttgtgtttgttggaggtggtgtggtgtggggtatgtttgggtttgttggttttatgttttgtgtagtttgagtaggagattgagtgggagttgtgtgttgtatttttagtttttaatgtttttgttgttggggaggatattattgaaattgtttttgtattagggatttttgtttgtggtttttgtatgatatttagtgatttgtgtaattttgatgagttggtgagttttttagtattaggtgttagggatttgatagtatagttagtgtttgtaatttgtttttgaattttttagggtttattttgttatttgtagaatagtttgttttataaaaagagtgtatatgttgagtattaaattgaggaatgtatatttgattttaaggaaatgggtagtttatagagagggaggtgttggggagatgatgtagtttagttgggtttgggataggatgtgggtttttggtatgatttttttttattttgtgtg

SEQ ID NO: 513 - DNA, 1023 bp, Artificial Sequence
  chemically treated genomic DNA (Homo sapiens)
tatataaagtgagggaagattgtgttaggagtttgtattttgttttaggtttggttgggttgtgttatttttttggtatttttttttttgtgggttatttatttttttggggttaggtatatattttttggtttggtgtttaatatgtgtattttttttgtggggtagattgttttgtagatagtagggtggattttgggaggtttagggatagattgtaggtattggttgtgttgttgggtttttggtatttggtgttgggggatttattagtttgttgaggttgtgtaggttgttgggtgttatgtgggggttgtgggtaggagtttttggtgtgggggtggttttagtggtgttttttttagtggtaggggtgttgggggttgggggtgtagtatgtagtttttgtttaattttttgtttaaattgtatgaggtgtggggttagtaggtttaggtgtgttttatgttgtgttatttttagtaggtatagtattatgttttttttgtttttgtgtagtattaggtttttagttttaaatatgagtatttttggtatatttagttttatgtggtattagttgatgaaggtggttatgttgttgtgtgttatgaaggagttaggtattatattgtgtgtttggaaggttatattttgggttgggtgggtggttgttaatgtatgggtagttttggttatggtgttggtatgttggtatagggttgtgtttgtggttagttttgttaggaagttattgttattatttgggagatttaggttgtataaggtattgagttatttggttaggtttttttttatggtttttatgtaggttttattggagtgaaatggttgtatgtttttggttgttgagtttgtgatgtttgttattgggtttgttatgtttggattggttgagttattgtgggtaggaatatagtttaggattgttgtggggatttagtaagtgtttagtataaattaagttgttggttatttgtattagtttgttatttaggttaa

SEQ ID NO: 514 - DNA, 1843 bp, Artificial Sequence
  chemically treated genomic DNA (Homo sapiens)
agttttgttgttttttgtattttttggtaattttattgtatgaaattttttaaatttttttttatgttaagtgttaaaatagtttagtttaagtgtttttaggatttttatggagtttgattgtaaagaggtgagtatatttaagtttttatttttagtttagttttttgtattagagttttagggttgattttgtagaggggaagtagtttttttttagaggtaggtatatagtaggtgtttaagtaataggatttttgttatttttatatttttggaagaatttgtttattttttattttttgtttgtttttaaggattgttattttgaatttggtaaggtggttttttttatttttattgaatgaatgaggaaattgaggtagggtgtgggggttgggaggagaggagtattgtttgaggtttttgggggaggttagggaaattttagtttggtaggtttttgggtttttggtttttagggttttttttttaatttatttttggtttttttaaggtttttatttatgtggatgagttttttagtttgttgtagagttagttgttttgggttttgggtattaatatttttattatgtttttagtggagaagtgtagtagtgtgtggttggtgttttttgagtgggagattagggtgtggatttttttggtgtttttgttgttgtttgggtgtttgttaaaggagttggagtgtgagttttgggtgttgttgttgtagagtgaggttgtgggtgggagagtgtggtggtatgtgggtaggaagttttttttggtgtttgtttttgattttttttgttgtagttttatttttgtgttttttttggtttttttgttgttttggggtgggggtatttataggttgatggtgtgtggggtagggagtgatggtttggttttagttgggatgtgggttttgtgttgggtttggtgttgtaggagttggagttgtgttggttgtggggggagttgaatttttttaggggttttgggggttgtgggggagatgggtaggggagggtggggtgggggggggggggggtggggttgtgttttagtttagtttttatttttagttttaggtgttggtgtaggggttttgggggtggagattgggttattatgggggtgtggagaatgtgttggggtggaagggtaggttgggggatgtagtgtagagtgggagtttggggggtaggaggttttaggttgggggtttgaggttttgggtttttgtggggggtggtgggggtgtgaatggtggtgggggtgtttagggttttattatgtttaggtaggtgggtgttaggtggtttgaggggtagggtggttttagtgtggggtttagtaggttgggggagtgggtgtgtgatgggttgtggttggttttagattgttttttttatagtagtatgtggttttggagtattttttgggtttggttgggtggggatatgggggttagttaggtttgggtggttttttgaattttggggatttaaaatgatatttttgatttgagagtttaggttttattagtttgggatgattggattttttagttggaaggagttagaagttagtttattgtttaatttgtattttttatttttggtaaaggtatttttattttttatgaagagttttttttgattttttgttttttgtgttaatgtgtgtgttttgagtggggttgtttttattgtttagttttaggggtaggggtggtatttaggtttggttatttaattattttatttttttttttgtagtgataggtttaggaatggtgtttagatagaaattatgattaaagaatttagtt

SEQ ID NO: 515 - DNA, 1843 bp, Artificial Sequence
  chemically treated genomic DNA (Homo sapiens)
gattgggttttttggttgtagtttttatttaagtgttatttttgagtttattgttgtaggaaggaggatggggtgattgagtggttaggtttgggtgttatttttatttttgaagttgggtggtgaggatagttttgtttaaagtatatatattgatgtgggaagtggggggttagaggaagttttttgtggaaaatggaggtgtttttgttaaaagtagagggtgtgggttggatggtgagttggtttttggttttttttagttagaaaatttggttgttttgagttggtagggtttgagtttttaggttgagggtgttattttgggtttttaggatttagggagttgtttggatttggttgatttttgtgtttttgtttggttaggtttgggggatgttttagaattgtgtgttgttgtggaaggagtagtttgaggttagttgtagtttgttgtgtgtttatttttttggtttgttgggttttgtgttggggttgttttattttttgggttgtttgatgtttatttgtttggatatggtgaggttttgggtgtttttgttgttgtttgtgtttttgttgttttttgtgggggtttggggttttaggtttttagtttggagttttttgttttttaggtttttgttttatgttgtattttttggtttgtttttttgttttggtgtgttttttgtgtttttgtggtggtttggtttttgtttttagaatttttatgttgatgtttgggattgggggtgggggttggattagggtgtggttttgtttttttttttttttgttttatttttttttgtttattttttttgtagtttttgaggtttttgggagagtttagttttttttgtagttggtatggttttggtttttatggtattgagtttgatgtgaggtttgtgttttagttagagttagattgttgttttttgttttgtatgttgttggtttgtgagtgtttttgttttggggtggtaggagggttgggagaggtgtgggggtggggttgtagtaggagggattgagggtagatgttaggaagaattttttgtttatgtgttgttgtgtttttttgtttatagttttgttttatagtggtagtgtttaaagtttgtgttttaatttttttggtgagtgtttgggtggtggtgggggtgttaggagagtttgtgttttggttttttatttggagggtgttaattatatgttgttgtgtttttttgttggggatgtggtggaggtgttggtgtttgaggtttagaatggttggttttatggtaagttggagggtttgtttgtgtgagtgggagttttggaggggttgggggtgggttgagaagaaggttttgggggttgggaatttggggatttgttggattgaggtttttttggttttttttgggggttttggataatgtttttttttttttgatttttgtattttgttttagtttttttatttatttagtgggagtaggaagagttgttttattaagtttaggatgatggtttttgagagtgggtagaggatgggggatgggtaggtttttttaaaagtgtggaaatggtagaaattttattgtttgagtatttattgtgtgtttgtttttgggaggaggttgttttttttttgtagagttagttttggaattttgatgtagggggttgggttgggagtaggggtttaaatgtgtttatttttttgtggttaggttttgtggaaattttgaaagtatttaaattgggttgttttgatatttgatgtggaggaggatttggggagttttatatagtgaggttgttagaaagtgtggaggatagtagggtt

SEQ ID NO: 516 - DNA, 770 bp, Artificial Sequence
  chemically treated genomic DNA (Homo sapiens)
gagttttaggataggatgaggttttgtagtagtagatttgttttgtagttttttattttttatttttttaaagatttttatttgaattttgttttttttaaattttttttgagttttttatttgattgttttagtttttttgaatttttagttaattttttggttttttttaagtgttttttttgtatttttttgattatagtagttggtggtatagtgtgtgtatttgtgggtaggagttagtgaaggtttttttttttttttttaaagttttaggttttatggtttgttatttgtaaaattttaattatgagggggtgtttttttgtttgttgttttgtagggagatttggtttaggttgttggagttttgagttttagggtttttgtgatggaagggtgggtgtggtttttatatttggttttttagttttatttaaggaggattgttagatagttttgttttgaggtgtaggaggttgggttgttttggttattttgaatttatttgaagttagagggtttgagtttggggggtggttgggtgtttatttttagagtttgtttagtgttttgttgagtttagtgttgtgtaggtgtgggtattggtttgtgagttttttgtgtgttgtttgagtttatattatgaaggtgtttatgggttgtttgatgtgtggtttgtttttgttggtgttgttgatgtgtatgggtatgggtattagtgtttagttgtagttgttgagtatttggttgatggttttgtggatgta

SEQ ID NO: 517 - DNA, 770 bp, Artificial Sequence
  chemically treated genomic DNA (Homo sapiens)
tgtatttgtgaggttgttagttaggtgtttagtggttatgattggatgttggtgtttatgtttgtgtgtgttaatggtgttagtaaaagtaagttgtatgttaagtggtttatgaatgtttttatggtgtgggtttaggtagtgtgtaggaagtttgtggattagtatttgtatttgtataatgttgagtttagtaagatgttgggtaagttttggaggtgagtatttgattgttttttgggtttgggttttttagttttgggtggatttagggtagttgaggtggtttggttttttgtattttagagtgggattgtttggtagttttttttggatagggttggaagattaggtgtgggggttgtgtttgtttttttattataaggattttggaatttggaattttagtggtttaggttgggtttttttatggggtggtgggtaggaaggtgtttttttgtggttggaattttgtgggtggtagattgtggggtttggggttttggagggagggaaggaggtttttattaatttttgtttatagatatgtatattatgttattagttgttgtggttaggaggatatgagggaaatgtttggaaagaattaaagggttggttggagatttagggaaattgaggtagttagatggagaatttaggggaggtttaaagaaaatggaatttagatgagagtttttggaagagtgagggatgaagaattgtgggataaatttgttgttgtgggattttattttattttagggttt

SEQ ID NO: 518 - DNA, 696 bp, Artificial Sequence
  chemically treated genomic DNA (Homo sapiens)
aaagggaggaagagggaggttagaaggtgttagttgagttagtgaagtttttataggagaggaagtgggttaggggaataggaaggagggttgggttggtttttgggtttgtttttgttttgggtatgtggtgagtttagttttttgtttgtaatgaggaggaggaagatgaatagtgtttttgttaattttggtttttttggtttatgggatgggagatgttattattttatgtatttattttagttagttttatataggttgattggggaggttttttttgagtttaatttgataagttttgaggagtgagttgtatttattttgttttgtttgggatagggtggggggtttttgggtagggggttgggggttgtaggagtatggtgggtggttgttttgtatttgtttgaggaaggattattttttttgttaagtttttgtttggttgtgtttgtttttagtttttgtgtttttttttaatttgttattttgtaagggttggtttaagggtttttttttatagggtttgtattttttgtttaggttggtatgttgatgtgtttttagaatttggtttttattttttttttgtgtttttaggtttagagaaaatgaggggtttagtgagtttggggttttttagattgtgatgtttttttttgttttttttgtgtaggtttgggaggtgatgga

SEQ ID NO: 519 - DNA, 696 bp, Artificial Sequence
  chemically treated genomic DNA (Homo sapiens)
tttattgttttttaagtttgtatagaggaggtaggagagggtgttatggtttgagaagttttaaatttattgagttttttattttttttagatttggaggtatagaaggagggtagaagttaggttttggggatatgttagtatgttagtttaggtagggggtatgggttttgtgagaaagagtttttgagttaatttttgtggggtgatgggttagaaaaaggtatagaagttgagggtgggtatagttaagtaaaggtttggtggaggaagtggtttttttttaggtaggtgtagagtggttgtttattgtgtttttgtagtttttagttttttatttagggattttttattttattttagataggataaagtaggtatagtttattttttagagtttgttaggttgagtttaagggaaatttttttggttggtttgtgtggggttggttgaggtggatatgtggaatggtgatattttttattttataaattggaagggttagggttgatagaggtattgtttattttttttttttttattataggtagaaggttgggtttattatatgtttgggataggggtagatttagaggttagtttagtttttttttttgtttttttggtttatttttttttttgtgaaggttttgttggtttggttggtgttttttggttttttttttttttttttt

SEQ ID NO: 520 - DNA, 1078 bp, Artificial Sequence
  chemically treated genomic DNA (Homo sapiens)
gttttttgttttagattgtggttttggttaggaaaggaggtgtgagtgtgtggttggagaattttatattaaatattttggttttttgagtggaaattatattggtttaggaaaaggaagggggtgagaaggttggttggttggatggttgttttaagtaatgtgaaaagtaaatttatgaaattattttttgaaaataaagtgtgagggttgtgttattttggttgtagtagggttgtatttgtttttttaattaatgtattattttttttagaaatagaataaagataaaagtggatgtataataaattattttagtttgttagtgttttgagagatgaaaaattttgtttagagataggattgtgggtttataaaaaaattataaagtttaggtattttgttaagtttttagaatgttgttgggttgttttttttttttttatgtttagttgtgtgtggttgttgggatagtgtttattttggtaggtgatgagttagtgtgggaatttaggggttgttttagttttgttggggtgttgagttgtagggagtggtttgtattgattttttttttttttatttatgttatttaaaagtatattagaggggttttgagatgaaatttgtatattttttagagtttttttagattaatgtgtggatgagaatgtgtttattgtggggatgtgtttggttgtggatgtgaagaaatttttttgtaggagtagtgattttgttatatgggttttgtatatggagtttttgttagtttggggttttggttttgggaagtatttgggaggtggtggggaaggttggttttggttggtttgatatatgttttggggtttgttttttatgggttaggtttggtgttttatttattattgttgggaagttatggaggttttttaagggtgatttgtgaggtgggggtgtttgtttttttttttgaggtaagaggggtttggttttattgtttgttgtaaaaaaggaggagtagtttaggtttgtatgtggttttgagtagtttgttggaaggttttagtttggtttttttattttgttttttttt

SEQ ID NO: 521 - DNA, 1078 bp, Artificial Sequence
  chemically treated genomic DNA (Homo sapiens)
gaagggaaatggaataaaaagattaggttggaattttttggtgagttgtttagggttatgtgtagatttgagttgtttttttttttttatggtaagtggtgggattagattttttttattttaagagggaaggtaggtatttttattttgtaggttatttttgagaagtttttatggttttttagtagtggtaggtggagtattaggtttggtttatgaaggatgagttttgaggtgtgtgttagattagttagggttaattttttttgttgttttttaggtgttttttgaggttgaggttttgggttggtgggggttttgtgtgtggggtttatatggtagggttgttgtttttgtggaggggtttttttatatttgtagttgggtgtatttttgtaatgggtatgtttttatttgtgtattggtttgggaaggttttgagaagtgtgtggattttattttaaaatttttttagtgtgtttttgagtggtgtgaatgggggagaggggagttggtgtaggttattttttgtaatttaatattttagtgaaattgaggtggtttttgggtttttatattgatttgttgtttgttggagtgagtgttgttttggtagttatgtatggttgagtatggagaaggaaagggtgatttggtagtgttttaggggtttggtagagtgtttgggttttatggtttttttgtaaatttataattttatttttgggtgaggttttttattttttagagtgttggtaggttgaaatgatttattatgtatttgtttttgtttttgttttatttttggaaaaggtggtatattggttagggaagtaggtatgattttgttgtagttaggatggtatagtttttgtattttgtttttaaaaggtggttttgtgggtttattttttgtattatttgaagtagttatttagttaattaatttttttattttttttttttttttgagttagtgtgatttttatttaggaaattagggtgtttggtgtagagttttttagttatatgtttgtgtttttttttttgattgaggttatagtttgaggtaaagggt

SEQ ID NO: 522 - DNA, 1245 bp, Artificial Sequence
  chemically treated genomic DNA (Homo sapiens)
agttattgttagaggttttagtttttttatttttagtggaattggtaaggtttttttttgtttttgtgaagtttaaaatggtatataggaaaggattaatagagatgaattattattattattattattatgttagttattatttttattattggatagtgtttagaagttgaatttttttgtaatttgagggtataatgaggttttttagagaattatttgtgggtgggggagggggaggtggaaatttgttgaaaattttgttgttatttgagatttagtgtatttttttaaaatgtgtgtgatgaggatgtttttttttttggtaggtgtttgtggtagtggagatattagtgtgttataagatttttttttttttttgtgagtggtggtttaggttggggagtagttttgttttttttgtttaatatgtgtttttttaatttttagtatttttgattgtgaggattaggttagtttatgggttggtagtttggtggtgtttgagaaatggtaggttgagaagaagaaagagttgatgaaggtgtagagtttgtttaagattttagttttttaggtgtgtaaggttatgattgagaagttggagaaggagggtgtggttgggtgagttgtagaagtgggttgggtagtggggggtggggtgtgataggtagtggggggtggggtttgatagttggtttggtagaggtgggaagattgtgtggttagatttgtggtgtaaaggtttgaaggttatggaaggtggggtttgggatttattgggtgggtttattgaggtatgttttttatagttgtgtgatttggttttgatattgtttttatagtagttttggtggattttgtgtagttgtgtagtgatttattagttttggggtttttaatgttaatagtattaagtagatgttgttggattggtgttgagttaagatttgtggttatgaggtgagttttgggaggttagggggtttggaggtttttttagattttagtttaatattttttttttagtagagtttttattatttagtatattttttgttattgtgtggttttatagggaatatggaaaggtttttggggtgaggaaattgaggtttaaagaggatataaggtaagttttagattttagaattagtgatgaagtaatagggttttttgggtggtgggtagggtttaaggttggattttatttttggagttttttttttgttgttttgtaggagg

SEQ ID NO: 523 - DNA, 1245 bp, Artificial Sequence
  chemically treated genomic DNA (Homo sapiens)
ttttttatagagtaataaggaggggattttaagagtgggatttggttttgaattttgtttattatttaagaggttttgttattttattattgattttggaatttagggtttgttttgtgttttttttgagttttagtttttttattttaagagtttttttatgttttttgtgaggttatatagtggtaggaagtgtattgggtaataggagttttgttaagaaggaggtgttgagttggggtttggggaggtttttaggttttttggttttttggggtttattttgtagttgtgagttttggtttgatattagtttagtagtatttgtttgatgttgttggtgttggggattttgaagttggtggattgttgtatggttgtgtggggtttgttagggttgttgtaggggtggtgttaggattaggttatatgattataaggggtatgttttggtgggtttatttagtggattttaggttttgttttttatgatttttgggtttttgtattatagatttagttgtgtggtttttttgtttttgttgggttaattattaagttttgttttttattgtttattatgttttgttttttattgtttagtttatttttgtagtttatttggttgtgttttttttttttagttttttaattatggttttgtgtgtttgggaggttgaggttttgggtagattttgtgtttttattagtttttttttttttttggtttgttgttttttgagtgttgttaggttgttggtttgtgggttggtttggtttttgtggttgaagatgttaggggttggggaggtgtatgttaggtagggagagtagggttgttttttagtttggattattatttgtgaggaggagggggggttttgtagtatattagtatttttattgttataaatgtttgttagggagggaggtgtttttattatatgtattttagaggagtatattgagttttaaatgatagtaaggtttttaataggtttttgttttttttttttttatttatgagtagttttttgagaagttttattgtatttttaagttataggggagtttagtttttgggtattatttgataataaaaatgatgattagtataataatagtaataataataatttatttttgttgatttttttttgtgtgttattttaaattttataagagtagggaggggttttattaattttattaaaggtgaggaaattgagatttttggtagtaatt

SEQ ID NO: 524 - DNA, 691 bp, Artificial Sequence
  chemically treated genomic DNA (Homo sapiens)
atggggttttggtagggttggggattttatgttgggtggaaattttaagaagttagttaagggtttgtaggaggggttttggtagagagaagtattagaatgtaagggtaggtaaagttatttttatagaaggtgattgtgggttgagtttgaggttttttttagatggggaagagagaatagtatattttttttgtttatgttttggtattttatttaagaattagttgtttgttagttatttgttattggagatagttttgttggtggtttttagaaaaagtgaagtagttagaggatgaattgttatttggggaatatatttgtatataggataggaatggatgggagtggggagtgttttggggttattgtttaaatgttatttttatggtttttaagatttgtattagtagtttagttgttgatgaattataatttttggataagttgtagaggttttttttgttttatgtgtttatttttgttgtttatattgggggatttatgttttttggggttaggaggagaaaataatgagttattggggataagagaaaaataaaaatgttttgtatgtgtaaaattatttaaaatggaggtttttagaggatatttaaattttagttaattagttagaaagggttttgttgggggtatattttatgtgtttttgttatttttggatgta

SEQ ID NO: 525 - DNA, 691 bp, Artificial Sequence
  chemically treated genomic DNA (Homo sapiens)
tgtatttaaagatagtaaagatatataaaatatatttttagtaaaattttttttggttagttggttgggatttgagtgttttttaaaagtttttattttaggtggttttgtatatatagggtatttttgttttttttttgtttttagtgatttattattttttttttttagttttaggaagtataaattttttagtatgagtggtaggggtgaatatatggaatgaggggggtttttgtagtttgtttgagaattataatttattagtggttgagttgttgatgtaagttttggagattatgaggatggtgtttgaatagtagttttagggtgttttttatttttatttatttttgttttgtgtgtaggtgtgttttttgaataatgatttattttttggttgttttgttttttttgaaagttgttaatagagttgtttttgatgataggtgattaatgggtagttgatttttgagtgagatattgaggtgtgggtaggagaggtgtgttgtttttttttttttatttgggaagggttttaggtttagtttatagttattttttgtgagggtggttttatttgtttttgtattttaatgtttttttttgttagggttttttttgtagatttttggttggttttttggggtttttatttaatatgggatttttagttttgttagaattttat

SEQ ID NO: 526 - DNA, 699 bp, Artificial Sequence
  chemically treated genomic DNA (Homo sapiens)
agtagtgatggtagtgttttaaggaatttgggtttaggtattgattttgaggagttggtgatgtaggtatggggtatttatgtagggttttagtaatttttgggaaggagaatttggggtttgaaggtgaggtgagtggatttaggattggataatttgggggttttagggaagtgagatttgaagtagttaggttatattgggtttttggtagtaggtagagggttttttgtgggaagtttttggttgttggtatttggtagttgttttttgtagaggtattgggtgtagagttgtgtttattgttttgaaatttgtgatgtttagtagttttgttttagttttattatagtttttgaatgtgtgttgtattggtttttagtagtgtataattttgggttgaatatgtagtagagtagagtaaaaagatggtgtttttgtgttggtttttttttagatataagataagaaggggtgaggagggagtttttgaatatgagggttggggtgggtttttttttgttttgtttttgttttgtttagttttgttttggttttattttttaatttgttttgttggttttgaattgaggagggagtttgttagaatttgttataaagatgtgtatttgttttttgattattgtgtgggttgtttaaaaatgtgtattatattagttattttatttatattttttt

SEQ ID NO: 527 - DNA, 699 bp, Artificial Sequence
  chemically treated genomic DNA (Homo sapiens)
ggggaggtgtaaatgagatggttgatgtaatatatgtttttaaatagtttatataatggttagggggtgggtgtgtatttttgtgatgagttttggtaggttttttttttgatttagagttagtggagtaggttgggaggtgaagttggagtagggttgggtgaggtgggggtgaggtgaggaggagtttattttaatttttgtgtttaaaagttttttttttatttttttttgttttgtgtttagaaagaagttggtgtggagatgttatttttttattttgttttgttgtgtatttagtttaaaattgtgtattgttggaggttaatgtggtgtatgtttaaaagttatgatgaggttggaatagggttgttaagtgttgtagattttaggatggtgagtatagttttgtgtttagtgtttttgtagggagtagttgttaaatgttagtggttagaaattttttatggggagttttttatttgttgttgaaggtttggtgtgatttggttgttttagattttatttttttgggatttttaagttatttagttttgggtttatttgttttatttttagattttgggtttttttttttaaaggttgttggagttttgtgtggatgttttatatttgtattgttagttttttagggttagtgtttgagtttaggttttttaaggtattgttattattgtt

SEQ ID NO: 528 - DNA, 494 bp, Artificial Sequence
  chemically treated genomic DNA (Homo sapiens)
tttttgtttggagaggggaatgtgaaggaggtgaggagggagtagtgtaggaggatttgggttttttttttttttttttttttattttttgagggtttaattagttggtgaaggtttttaattagtaaaggaggaagtagttggggttggtgagggtgaggttggtagttaggtaggaaggtagtaggaggaggaggaagtggaggtggtattttttgagaggtgtatgtttagtgagttgtgaagatggtagggttggtggagtggttgttgtatttgattttttttttttttttaggatatgtgatggtgtttagtttggagttgggataaggtttttgtagttgatatttttataggagaagttttgggattggggtagtagtaaggtgtttatgttatatattgttttttgaggaaatgtggtttagtgattttttgattgtggattttgtgggaaattttgttaataaatgttaaagatatattttgag

SEQ ID NO: 529 - DNA, 494 bp, Artificial Sequence
  chemically treated genomic DNA (Homo sapiens)
tttggagtgtgtttttaatatttattgatggggttttttatagggtttgtagttaaagaattgttgaattgtgtttttttgagagatggtgtgtggtatgggtgttttgttgttgttttagttttagagttttttttgtaggggtgttggttataggaattttattttagttttaaattggatgttattatatattttaaaaaaaggggagagattagatgtggtggttgttttgttagttttgttatttttatgatttattgagtatgtgttttttagaaggtgttgtttttgtttttttttttttttgttgtttttttgtttggttgttggttttatttttattggttttggttgtttttttttttgttggttaagaatttttattagttggttaagtttttggagaatggaaaagggaaagaaggagagatttaaatttttttgtattattttttttttattttttttatgtttttttttttggatggaga

SEQ ID NO: 530 - DNA, 1362 bp, Artificial Sequence
  chemically treated genomic DNA (Homo sapiens)
aattattagagtaaattatttaatttatttgtgtatatatttttagattttttatatatgttgtaaaaaaaatagattgtattattttgttggttttttaagttgttttttgtaagtaatgtattgtgagtatttttttatggttataattattatatataaaagaaaaaaataggttttataataaatagttaaaagatattttgatttgaaattaatgaagaagggttttttggttttgtttttgtattttttgtataatgttgaaattggtaattttgtagtaaatattaatattttttgaggatttgttgaagatgaatgtgataaaaaataagaaattttattttttttattatatagttttaattaatattgttggttttgtttgagattaagtaaatgttggttttagtgtttaagtttttttttggggttttatggttttgggtttggtatttttgttgggtattttgtagggtttttgagatgtgttgtgatttatgggattttatggaagtttttttttattgtaagttttttggaggtagggaaaggagttgggatttgagtttagttggttttaagagaagggtggtggtttgtatggtgtgggtggttttgtttattgtagttggggagatgtaggttggttgtttgggtgtggtggtgggaggggttgtgggtttgtggggtggggtggtggttttgtgttgttggatttttatggagatgattttgtttttgttttatttttttttggagttgtggtttgagttggtgtatttgatttttattgtgtggttttaagaggagatagttgttattgtattgggttttatagttattttttagaggtaaagtttgtggtttttgagttgttagttttttttttggggttgtttggggtatattgtttgggttggtttagttttttagtgtagttgtttaggaagattttaagtagtgttgaggggtgtagggttttttttttgtgattttggagttttttagtagttttggaattaattaagattttgaagaggttttggggagaaataaaatttatgtgtagggtagggtttgtattgggttatgttaagtaaatttttattttttttagagaattgatttgggattgaagtaaagtttttgaatattttggaaaatgttgatttttataggtttatattaattgtttttttttttttgatagttttttttttttttttttttatggggtttaaaaatgtagggagtagggtgggggttgggttgggggaatgagggaggaatataaaaaatttattgtgaatataggttttggttataaggatagttttaagagttaatatgttaaga

SEQ ID NO: 531 - DNA, 1362 bp, Artificial Sequence
  chemically treated genomic DNA (Homo sapiens)
ttttagtatattaatttttagagttatttttataattaagatttatatttatagtagattttttgtattttttttttatttttttaatttagtttttattttattttttatatttttggattttataggaggaaagagggagagaattgttagaaggaagaaggtagttggtgtgaatttatgaaaattagtgttttttaaagtgtttaagaattttattttgattttaaattagttttttggaggaggtaagagtttatttggtatggtttgatgtaaattttattttatgtgtggattttgtttttttttagagtttttttagaattttggttaattttagagttgttaagggattttagggttgtggagggagggttttgtgttttttagtgttgtttagggtttttttgggtgattgtattgggaaattaagttggtttaggtgatgtgttttgggtggttttaagaaaaagattagtggtttagaagttatgggttttatttttaggaagtggttatgaggtttggtatagtggtggttgtttttttttggaattgtgtagtgaaaattgagtgtgttaatttgggttgtagttttggagaggggtggggtagggatagggttatttttatagggatttaataatatggagttattattttgttttataggtttgtagttttttttgttgttgtgtttggatggttaatttgtatttttttagttgtagtgagtaaagttgtttgtgttgtgtgagttattgttttttttttgaggttagttaggtttgggttttggtttttttttttgtttttagggagtttgtggtgggagaaagtttttgtggggttttgtgggttgtggtatgttttggaagttttgtgaggtgtttagtagaggtgttagatttaaggttgtgggattttaagaagagatttggatattgaagttaatgtttgtttgattttaaataaagttagtgatgttaattaaggttgtgtgatgaggaaagtggagttttttattttttgttatatttatttttagtagatttttagaaaatgttaatatttattgtagaattattaattttagtattatataggaggtataaaaataaaattaaaaaatttttttttattagttttaggttaaaatgttttttaattatttattgtgaagtttgttttttttttttgtatgtaatagttatggttatgaaaagatgtttatagtatattatttataaaaagtagtttagaaaattagtagaatggtatgatttattttttttgtaatgtgtgtaagaaatttgggagtatgtatataaataggttaaatggtttgttttggtagtt

SEQ ID NO: 532 - DNA, 1362 bp, Artificial Sequence; identical to SEQ ID NO: 530
  chemically treated genomic DNA (Homo sapiens)

SEQ ID NO: 533 - DNA, 1362 bp, Artificial Sequence; identical to SEQ ID NO: 531
  chemically treated genomic DNA (Homo sapiens)

SEQ ID NO: 534 - DNA, 659 bp, Artificial Sequence
  chemically treated genomic DNA (Homo sapiens)
atatatttttttatagtttttgttttttatttaagtaggttttagggtttatggtaagatgatttttttggggagaaagagtttgagatttagaaatttaatttgtataatgaattttggtttttttttttttttagggatttgattttttttttttttttttttttttttttgttataggattttatgttttattttagtgtagtttggttgattgatgttttattttttatatgtattgatatgatgtgtgattgtttaggtatagttggagaagttggagaagatagtattttatttttttttttagaattaattattgattggagggttaatgttttaattttgatgtgatttagtaggttatgtgagggttgtttttaataggagtagtgtttttttttttttgtgtagtttttgatttagtttggtatgttttttggtgatattgttgtttgttatatggtttagtgttgtaaatatttttatataattatatttgtttatttaatttttaagtgtttttttaatagagaaaataattattttatgagtttaaaatttgtaaattttttgtattttttaaaagattttttttaattataaaaattttttttatgttttattttaatattttataaattttgtttagtttgttg

SEQ ID NO: 535 - DNA, 659 bp, Artificial Sequence
  chemically treated genomic DNA (Homo sapiens)
taataagttaaataaaatttataaagtattagaataaaatataaggggaatttttgtaattgaagaaagttttttagaaaatataagggatttgtagattttgagtttataaagtgattgttttttttattaaaaagatatttaaaaattgaatgaataaatgtaattatataaaaatatttgtagtattgggttatgtggtgagtagtagtgttattaggaaatatgttgagttgggttaggaattgtgtaaggaggaggagatattgtttttgttgaaggtagtttttgtatgatttgttgaattatattaaggttgaagtattggttttttaattaatgattagttttgggagaggggatgaggtgttgttttttttaatttttttaattgtgtttgaatagttatatgttatgttagtgtatatagagaatgaagtattagttaattaaattatgttggagtggagtatagagttttgtgatagaagaggaggaggaagagaaagaagaattagatttttaaaggagggaaaaagttaggatttattatataaattaaatttttaagttttaggttttttttttttaaggaaattattttgttatgagttttagggtttgtttgaatggagagtaagaattataggaggatgtgt

SEQ ID NO: 536 - DNA, 518 bp, Artificial Sequence
  chemically treated genomic DNA (Homo sapiens)
aggttgaggtaggagaattgtttgaatttgggaggtagaggttgtggtgagtggagattgtgttattgtatattagttagggaaatgagagtgaaattttgttttaaaaataaataaataaataaataaaaaatgttttagtaatagtgtttttaagaatttggttttttagttttttggtagagaagatttattgttgttgttagtttttaagatggtatttgttggaggtggtaggtagaggttttaagtgtggattttaatttttgtggggattgaatttttgtggttgttgtttgtttaggtatgtttgttttttatgaattttttttatttatagggttttaaattttatgttggtgggaggaggaaggagattgggtataatttattagatttttgattgtaagagttggaggttgtttgtgggtttatttgtatttgggtttgtttttatttttttagaatgtaaattttttgagggaatgtgttgttgttattttttagttttttgagtg

SEQ ID NO: 537 - DNA, 518 bp, Artificial Sequence
  chemically treated genomic DNA (Homo sapiens)
tatttaaaggattgaaagatggtgatgatatatttttttagaggatttatattttggaagggtggggataggtttgggtatagataagtttgtaggtggtttttagtttttatagttgaaagtttgatgagttatgtttagttttttttttttttttgttggtatgaggtttggggttttgtggatgaaggaagtttatgggaggtaaatgtgtttgggtaagtaatagttgtagagatttagtttttatgggggttagaatttatatttagggtttttgtttattgtttttagtaaatgttattttgaggattagtggtagtagtaggttttttttgttagagaattggaaggttaggtttttgagggtattgttattaaggtgttttttgtttgtttgtttgtttgtttttgagatggagttttatttttgtttttttggttggtgtgtaatggtgtgatttttgtttattgtaatttttgttttttgggtttaagtgatttttttgttttagttt

SEQ ID NO: 538 - DNA, 675 bp, Artificial Sequence
  chemically treated genomic DNA (Homo sapiens)
gttgattttatggttaggtttttttttatgtttttgttattttaaatgtgggtattgtggtgttaaatttgttttttttattgttgttaataattgtagtttggttgaatttagtgatttatttttgttttaattttttttggttttttggtagtgtttaatgtgtgtgatttttttttttttttgtttttagttttttttgggatttgtgaggtgtttttttttttattttttttttaggagtgtgtttttagttttgtatttgttttttttatttttagtgtatttttgttgtaggtattattttttgatttgttatgttatttgtttttttttttattgtatttatgttttattatttgttttggtttgtataatgttagttttgtaaggggtttttttaaggttttatttttaattgattaatgttgaggatggggagtaatgtgtgtattagagggggttgggtatatgtaggtttgttgttggatggaggagaggtagtattttttgtatgtttgggtggtttttatttttaggtttgtgataagtattttttatttttttattttttgatggagttagttttatttattatgtggatgtgggtgttgtttgtggattaaggttagtgttttgttggttttttttattgtttggtattagtattatata

SEQ ID NO: 539 - DNA, 675 bp, Artificial Sequence
  chemically treated genomic DNA (Homo sapiens)
tatgtaatgttggtgttaaataataagaaaaattaataaaatattgattttggtttatagataatatttatgtttatgtggtgggtgggattggttttgttagaggatgggaagatgagaagtgtttgttgtaggtttggagatggggattatttaggtatgtaggggatgttgttttttttttatttaataataagtttgtgtgtgtttagttttttttggtatatgtattgttttttatttttggtattgattaattgaaaataagattttggaagaattttttgtaaagttgatattgtatgagttaaggtaggtaataaagtgtagatatagtgagggagggggtggatggtatgataagttagagggtgatgtttgtggtggggatgtattgagaatagagagggtaggtgtggggttggagatatatttttgagagggagatgggagagagggtgttttgtggattttgaggaaggttgaagataggagaagggaggggttgtatatgttaaatgttgttgaaaggttaggagagattaagatagaaatgaattattggatttggttaggttgtggttattgataatagtgggaagagtaggtttggtgttgtggtgtttgtatttggggtggtgagaatgtgaaggaggatttggttgtggggttagt

SEQ ID NO: 540 - DNA, 699 bp, Artificial Sequence
  chemically treated genomic DNA (Homo sapiens)
gtttaaatttaggagattttttgagatgttgtttaatatttttatgttttatattaaaagttaatggaatatgtagggggtggtttgagaatttagaatatgttttgttttttattatttttattttatttttttttagggaggtagtggatgttggagttttttaggttagaagtttaggggtaggggtatggtgggggtgttttttttattttgagaaaatgtagtggtggttatggggaggggtgttattatgtagtatttaggtttggattttagttagtagtattagtttttttttatttttgggtagtgatattgttggtgtagattgttttaggtgtgtttttgtttagttttattgtttttagttttagtttgggtttgtttttagtttgttggagttgttggatgtgtttaggtttttaggtattttggtttttttttatttgttttgtgaagattgagggaaagtagatgtgtttttgtggtaatttggagtttgtagtttgtagggattttattgttttaggtgtaggtgtgtatatgttagttgtagaaaatattatattaaattagtttgagggagttaaagtaaattataatattttaggtgttagagatttttttattatagaatttgtttgtttggatagtatgatattttttttataagattttattaataagttgtataaa

SEQ ID NO: 541 - DNA, 699 bp, Artificial Sequence
  chemically treated genomic DNA (Homo sapiens)
tttgtgtagtttattaataaaattttgtggaaaaggtgttatgttatttaaataggtaaattttgtaataggagagtttttgatgtttgaaatattatagtttgttttgatttttttagattggtttggtgtgatattttttgtaattggtatgtatatgtttgtatttggggtggtggggtttttgtgggttgtaggttttgggttgttgtggagatgtgtttgtttttttttggtttttgtggggtgggtggggggaggttagggtgtttggaggtttgaatatatttaatagttttagtaggttgagggtgagtttaagttggggttgaggatagtagagttgaatgaagatgtatttgagatggtttatattagtggtgttgttgtttgaaagtgagagaaggttgatattgttagttggaatttaggtttgggtgttgtatggtggtgtttttttttgtgattattgttgtgtttttttggggtgagaaaggtgtttttattatgtttttgtttttggatttttggtttaagaagttttagtgtttgttatttttttgggagggagtggggtgggggtggtggggagtaggatatgttttggatttttaggttgttttttgtatgttttattgatttttagtatgggatatggagatattaagtggtattttagagaattttttgggtttagat

SEQ ID NO: 542 - DNA, 698 bp, Artificial Sequence
  chemically treated genomic DNA (Homo sapiens)
tattagtttatttattaattttttttaaaaataaatttagattttttttattttttataattaaaattttttaattatagaggagagttgtgtgtatttatttagttatgtttttgttttttttttttttttttttttttttgtttttattttttttttttttttttttttttttttttttagttttttttttgggatattgagggataaagttgtaaggtattattatagattttttattttttttttttgtttattagaatgttaataagagatataatatttagaaaatagagagtagagatttttttggattaaatagtattttttttttttgtttttgtttttttgtgatttaagggagaaatgattttttttttttaagtgattttatttttttttgttaagaatttgtggatatgttatttggttagagtttagtttgtagttattatgtaggtaatttatttatgttagattataatttatttaatttgtttgtgttttagttaaatgtgtattagagtaaaagtttagatttgattatgggtaagtttaatgattaatataagttatttaggttttttttttagggtttgttagtaatgattaaaggaaaagtgttttatatttttttttatttattgtatgtgttttagataagaattttaagtaaaagtttatttagtgagataaat

SEQ ID NO: 543 - DNA, 698 bp, Artificial Sequence
  chemically treated genomic DNA (Homo sapiens)
gtttgttttattgggtggatttttatttaaaatttttatttggggtatatgtagtaagtggagaaaaatgtaagatattttttttttggttattattaataagttttgaggaaaaagtttgagtggtttatgttaattattaaatttatttatggttaggtttgaatttttattttggtatatatttggttgggatataaatgagttaggtgagttatagtttaatgtgagtgagttatttgtgtggtggttgtaggttgagttttaattagataatatgtttatggatttttgatagagagaaataagattatttagaaagaaaggattattttttttttgagttataaggagatagaaatagaaaaaaaaggtattgtttgatttagaaaagtttttgttttttgttttttaggtgttgtattttttgttaatgttttggtgaataaaaggaagaaatgggagatttatagtagtgttttgtaattttgttttttgatgttttaaaggagaagttgagagggaagggaggaagaagggaagagggagtgagagtagagagaggagagagagagaggagaataaaaatatgattaaataaatgtatatagtttttttttgtggttgaaaaattttagttatgagaaataaagagagtttgagtttatttttaggaagaattagtggatagattaata

SEQ ID NO: 544 - DNA, 695 bp, Artificial Sequence
  chemically treated genomic DNA (Homo sapiens)
ggttttatggagtttttttatagtaagaaattaggtttgtaatagggtgtaatagagtgatattttatatttgatgttttgtaaatgtagagtttgtaaatgttttttttttgatgtttttttaaggtaagttataaatgaagttttattgttttaaaaaagtagtttgttaatagttgtttaggttttttatgggattgtgttttattgagtatttgaagaaagtatttattggaaatgggtttttttgggagattgtttggattttgagtgtttggtgtttatgtttttatatttggttgttgttttttgtttttttttggttgtaggtgtgagtgtttgtttgtttaaattttgtttagtattgtttggaaaaataaaataatatggttatttgtttgggtattgaatgttttttttgaattttggttttgtttattggtttagaggtggaatgggtggggtaagttttggtgtgagtttgggaagttttgagaagatgttatgggttgggtttgttaggttggggttgtttttggttttaatttttttggaatgttttgagggttaggagtgttgttattgatggttatgggagttgttaggttgtggtttttttttttatagagaatgttagaggtatttgggaaggtatttgttagggttttgatagatgtaaagtaagttttatttat

SEQ ID NO: 545 - DNA, 695 bp, Artificial Sequence
  chemically treated genomic DNA (Homo sapiens)
atggataaggtttattttatatttgttagagttttggtaaatgtttttttgagtgtttttggtattttttgtgagaaagagagttatagtttgataatttttatagttattaatggtaatgtttttgatttttaagatattttaaaaggattaaaattaagagtaattttaatttaatagatttagtttatagtgtttttttgaaattttttaaatttatattgaaatttgttttatttattttgtttttgggttaatgggtaggattaaaatttaggaagaatatttaatgtttagataagtaattatgttgttttgtttttttaagtagtgttgagtgaggtttaaataaataagtatttatatttgtagttaaggaagggtaagaagtagtagttaggtgtgggaatatgaatgttagatatttgggatttagatagttttttaggagagtttatttttagtgaatattttttttaggtgtttagtgaagtgtagttttatggggagtttgggtaattgttggtaagttatttttttaaagtagtaagattttatttatgatttattttgagaaagtattaaaagagaggtatttgtagattttgtatttatagggtattaggtgtggggtgttattttattatattttgttataagtttggttttttgttatgggaagattttataggatt

SEQ ID NO: 546 - DNA, 695 bp, Artificial Sequence
  chemically treated genomic DNA (Homo sapiens)
gattttaaattatttttttttaaagatttttgagggagatattgtatttggttattgtagtttagagtaggtttggttatggttatgagtatgttgagttattatgtttattgtggatgatattttggagtaggttggggagtttggttggttttagaagtaagttttttttattttatgtttgttgttggttgtttttgtgtttatttgtgtgggtattgtttttttgggttttatatttgattattattgttagagttttggggtggttgagttgagttagtgttgtggttggagttttgtggaggagttgaattatatagtgttaggtttggggtttgtgggtgaggttttttttggttagtgtaggtgttatgaagtggattggaattagagtgtttttagttgtgtagattttttggttagtttggttattaataggagttatttgttgttgggtttttgttaggatggttgggtgtatgatatgtttggtttttttattgttattgaggtaaaaaagtttttgtaatatgggagtttttgggatagggagaaatataaagtaaattttatgaagtttagttttatattaggaaagaggtagggggttatgtttattgtgtagtttgtgggtgtttggttgtgttttaggtatggggtatttttttttttagtttaatttattataaatt

SEQ ID NO: 547 - DNA, 695 bp, Artificial Sequence
  chemically treated genomic DNA (Homo sapiens)
agtttgtggtggattaaattagagaagagaatgttttgtgtttgggatatagttagatatttatgaattgtataataaatatagttttttattttttttttgatatggaattgaattttataggatttgttttatatttttttttgttttaggaatttttatgttatagaggtttttttattttagtgatgatggaagagttgggtgtgttatatatttagttattttggtagggatttagtggtaggtggtttttgttggtggttaggttagttagggggtttatatagttgagggtgttttggttttagtttattttatagtgtttgtattggttaaggaaggttttgtttgtgggttttaggtttggtattgtatagtttagtttttttgtagggttttagttatagtgttggtttagtttagttattttaggattttggtagtggtggttaggtgtgaaatttaggaagatgatgtttatatagatgggtgtaaaggtagttgatagtaggtataagatgaggaaggtttgtttttggaattagttagattttttaatttgttttagaatgttatttatggtgggtatgatggtttagtatgtttatggttgtggttagatttgttttgggttgtagtggttaggtgtaatgttttttttagagatttttgaaaaggagtggtttgaaatt

SEQ ID NO: 548 - DNA, 685 bp, Artificial Sequence
  chemically treated genomic DNA (Homo sapiens)
tagtttgttatttttttataggatatgagggttgataattattttattgtatggttttggggattgatgaataaaggttaatatgtggaaaagggtaattaaagaaagaagagttatttttaggttaattagtataagtttttttgttggtatgttttaatatattaaaatagtagtaaaaataatttgtatattggtattgaaggtatagataaatttgttgaggatttttattatggtagagggatgttttatatgagtttttagtagattaattaagtttttgttagttttatttggaaatgatgttgtttttttggggttatgtagagaagtttatgttgatgaaatgagttgttttagaatggtagtttttgggtagtagagtttgggtttaaggaaggttgaaagaaggggtggtgtggagttgttaggtgtaaatgttaggttagtaatgtagtttagtttgtatggatgtgttttgtttaggaagttgtgatttggttgtattttttattttaggtgagatggaaggttgaattttattttattttttggtgaggttgatgttttttggtgtttataattttttttgtaaatatttgaaaggaatttattattttaatgttggaagagatgtttatttttttttaagaggatttgagtggattttgattgtaggttt

SEQ ID NO: 549 - DNA, 685 bp, Artificial Sequence
  chemically treated genomic DNA (Homo sapiens)
aggtttgtaattaagatttatttaggtttttttaagaaggaatagatgttttttttagtattaaaatggtaaattttttttaagtatttataaagaaagttataaatattaggaaatattaattttattaggaggtgaggtagagtttaattttttattttatttgaagtggaaaatgtagttaagttataattttttaggtgaagtatgtttatgtaagttggattgtattgttggtttgatatttgtatttggtagttttatgttatttttttttttaattttttttgagtttaggttttgttgtttgggaattgttattttaggatagtttattttattaatatgaatttttttgtatagttttaagaggatagtattatttttaaatggaattagtaagaatttaattaatttattaaggatttatataaagtatttttttgttgtggtaagggtttttggtaagtttatttgtgtttttgatgttaatgtgtagattgtttttattgttgttttagtgtattagggtatattagtgaggagatttgtattaattaatttggaggtggtttttttttttttagttgtttttttttatatgttagtttttgtttattagtttttaggattatgtaatgaggtgattattagtttttatgttttgtaaagagatagtagatta

SEQ ID NO: 550 - DNA, 589 bp, Artificial Sequence
  chemically treated genomic DNA (Homo sapiens)
gttttggggttattatttgttgatttttaatatagaatatttttgagttatgttagggtttttaattagttaggttatttaagtttagattgaattgggatatggttttagaattttttttaatattgtatgtttgttataatgtgggtagggagaggttgttggttttgtagtagttatttgatggttgtttaaaggattgtgaatttagttattattagtattttttttatttttttagatttgggtgtagttggtttagttttttatttttagttttgggaaagttttttttttagatttttgtttttttttaataagtttgtatgttgtgttaaggagtaattgtttttgttgttatgaatttatttgtttttgtgaatttatgtgttttttatttttgttttatttagaatagagaatataattattttaatattttatgtattttttataagtttatagagttttaatggaagtttggagagataatggtagtttatatagtagaagtaatagtatttgtttagtgttattgtttaagttattattatagttaatatttttaggaaatttattttttttgtta

SEQ ID NO: 551 - DNA, 589 bp, Artificial Sequence
  chemically treated genomic DNA (Homo sapiens)
tggtaaaagaaataaattttttggaagtgttagttatgatgatgatttaaataatgatattgagtagatgttgttatttttgttgtgtaaattgttattgtttttttaaatttttattaaaattttgtaggtttataaaaaatatataaaatattaaaataattgtattttttgttttggatgaggtaaggatgaagggtatgtgaatttataagggtaagtgaatttgtagtagtagaagtgattgttttttggtataatatgtaagtttgttgaggaggagtggaaatttgggagagagatttttttgaggttggggatggaggattgagttaattgtatttagatttgaaagagtagggaaaatgttggtgataattgagtttatggttttttaagtagttattaggtggttattgtagagttaatagtttttttttatttatattatggtaggtatgtagtgttgagaaggattttgaaattatgttttagtttaatttgagtttggatgatttaattgattaaggattttgatatgatttagaagtgttttatgttgggggttagtaaatgatggttttagggt

SEQ ID NO: 552 - DNA, 627 bp, Artificial Sequence
  chemically treated genomic DNA (Homo sapiens)
taatatatagtttttttttaatatagatgttttttagatgtttaatagtggtttaattttttttatttttatagtgtttttaaagtttgttggtatataaatatgaatgaatgaataatgtagaatttatttaagaaattttaaggagagagaggaggagatttatattatatagtaaataatttaataaatttgttaaatgttatgtatgtgaataggtgtttttttttttttgattttttttttttatatagaatttagtgttttttttttgttttttgttatagtatttattgtttttttttttttatgttggggagtagttgaggtttgtgttttttagtggatttgttaaattattttttttagtatgttgtttttttttttttatagattatttgttaagaaaatatattttttatgttgttaatttatatatatatgtgtattatatatatgtttatataatgagagattgttaggaaaattattattatatatatatgtattatatatattatatatatatatatatgtattatatatatatttgtatatatatgtatatggaaaattgttaggaaaaatagtatagtggtagtgttagtgttggttgttttttggtgg

SEQ ID NO: 553 - DNA, 627 bp, Artificial Sequence
  chemically treated genomic DNA (Homo sapiens)
ttattgaaagataattagtattaatattattattgtgttgttttttttaataattttttatatgtatgtgtgtgtaggtatatatataatgtatatgtatgtatatgtaatatatataatgtatgtatatgtggtagtgatttttttaataattttttattgtataaatatatatataatgtatatgtatatgtaaattaatgatatgaaaaatgtatttttttaatagatgatttgtggaagggagagagtagtatgttggaggggatgatttggtaagtttgttgaagaatataagttttgattgttttttggtgtggaagaaggaaggtgataaatattgtaatggaggatgaggaaggagtattgagttttatgtggaaagaaagggttaaaaagaggaaaatgtttatttatatgtatggtgtttaatagatttattaggttgtttgttgtgtgatgtaaatttttttttttttttttttgaaattttttgagtgaattttatattgtttatttatttatgtttatgtgttagtaagttttgggagtattgtaaaaataaaaaaggttagattattgttagatatttgggaaatatttatgttagagaaggattatatatta

SEQ ID NO: 554 - DNA, 796 bp, Artificial Sequence
  chemically treated genomic DNA (Homo sapiens)
taattttaaataaatgaattgtgatgtgttttatttttttgtgtaagtggaagatgttaatatatgtgtattatgagaaaggattttataattttttttttttgggttttgttgagatgtttttttgatttagagagaattttttaggattagtaagaaaagtatgttattattttttaaattttataatttaggaaatagtttattattttataaaattataaaagtgaattatttgagtttttttattatttgtttttttttttttaagttggttttgtataaatatgatgtatgtttattgggtgataagtttgttgtaagtgaaatgtttataggtattataggaatgatttggtgttttgtttattttattagaattttaattggggtgtgtaggagaggattttataaatggtaaggtaatttttggtagtttgtttgttagtattgtttgtgttatttttagaggagtttgagaagaggtagaggaaggtgaaatatggttggtgagtgtatggtattttttttattaggtttttgttagaagtttgtgttttttttgggttagtttgttaagttagagtgtttggttaggatagttgtttgttttgggggttttgaaggttagattttttattttagggtgttagttagaggtggtttttttttagtggtggttgggtttttttagtatatttttggggtagaatattattggaatgtagttttgaataatgggtagggtgtttagtgtagttggatattgtatttttttaggtagaggataagtttt

SEQ ID NO: 555 - DNA, 796 bp, Artificial Sequence
  chemically treated genomic DNA (Homo sapiens)
aaagtttgttttttgtttaaggagatgtgatgtttagttgtattgaatattttgtttattatttagagttatattttaatgatgttttattttaagaatatgttagagggatttaattattattgagaaagagttgtttttggttagtattttaaaataggaagtttggtttttagagtttttaaggtaggtagttgttttggttggatattttggtttggtaggttggtttaggggaagtataggtttttggtaaggatttgatggagaagatgttatgtatttattagttatgttttgtttttttttgtttttttttaggtttttttgggaatggtatggatagtgttgatagataggttgttaaggattgttttattatttatagaatttttttttatatattttaattagaattttaatgaagtgggtgaggtattaggttatttttgtagtgtttgtaaatgttttatttatgatagatttgttatttaatggatgtgtattatgtttgtataagattagtttggggagaagggggtagataataaagaaatttaaatagtttgtttttataattttataaaatgatggattattttttggattgtagggtttaggaaatgatgatatgttttttttgttgattttgggaagttttttttgaattaaagaaatgttttagtagaatttagaagaagaaaattgtgaggtttttttttatgatatatatgtattagtattttttatttgtatagggaagtgagatatattatagtttatttgtttagggttg

SEQ ID NO: 556 - DNA, 744 bp, Artificial Sequence
  chemically treated genomic DNA (Homo sapiens)
ttttttttttttagataatgttgtggttgtgtttttttttttgttagtttgtttaggtttttgttgttagtgatttttttgggttgggggtggggaggtggggggggagtgtagggttggggaggatgagttggttttttttatttttttgttgttgttttttttaagagggatggagatttggtttaagttttttggtttatttggagttgtgatagttatttttagggaatagttatgttgttttattaagtttatttttagtggtttggattttttaggtagaggttgtgggattttgttttttttaatattttagtttatttttaaaagggtttgagttggataggggttaaataggtttttttgatttggtgggttggttagatgtgatagtaatgttaaggaggttaagtttttttgtttattttttattttttttttttttatttttggattttttggtgtttttagtatatagaggtttttgagtagtttggttgtaggttttttatttatttagagtttttttttttatgtgtttatttttaattttgtagtgtttgtggattaaaggggaagggagttttaggttaatttttaaggtatagttagattagtttatttagtttggaagttaagtattttttattaaatttattgtttggattttggaatgtgttttttttagaaataatgttataaatggtgatttgttttttaggttagttataaaagtttgtt

SEQ ID NO: 557 - DNA, 744 bp, Artificial Sequence
  chemically treated genomic DNA (Homo sapiens)
aatagatttttgtggttggtttgggaagtagattattatttataatattgtttttaagggagatatattttaagatttaaataatgaatttagtaaagaatgtttggtttttaggttggatgagttggtttggttgtattttgggggttggtttgaggttttttttttttttggtttgtagatattgtagggttggggataggtatgtgagggggagaattttgagtagatagggaatttgtagttgggttgtttaagggtttttgtgtattgggggtgttaggaggtttagggatggaaaagggggaggtgagaaatggataaagaaatttggtttttttggtattgttgttatgtttggttggtttgttaagttgaaggggtttgtttagtttttgtttggtttaaatttttttgggaataagttgggatgttagaaaaaataaaattttataatttttgtttggggaatttaggttgttggaggtgggtttggtagggtagtgtgattgttttttgggagtggttgttatagttttgggtgaattgaggagtttgggttaagtttttattttttttggagagggtagtagtaaggaggtgaggggagttagtttattttttttaattttgtattttttttttatttttttatttttagtttggaagaattgttggtggtgggagtttggatgagttggtggggaaggggatgtagttatagtattgtttgggagggagggg

SEQ ID NO: 558 - DNA, 1218 bp, Artificial Sequence
  chemically treated genomic DNA (Homo sapiens)
ttttaaaagtgttggtttatttataattagtgagttgtattttttttgtggtattggttagattttataaattgtagttttttgtttatttataatggatttagatttttggatgagatgtattatatatgtgtgaaggattagagggtattttttaataataataggaataatattgttttgtgttgttaaattgtagatttttttttttaaagatttaaagtttattatagatataatttgattgttgttgtattgtaatagtgtttttttttttttttttatttaggtagattttttttttgattaaagatggtatgaatatttttttatgttatgatttatttgataaatagtttaggatgttataaaagtaaagtaggagatgttttaaataattagtggtagaaagtttgttgttgtttgggtgttaattttgttagaaagtttagatatttgtgggttgtattgtaaatttttgtatagatgtgtgtgaggttgagttttagttatatgtttgtaatagtattaggaaatattttgttatgttatttttttgggtgattttttatgattaaaagaaaaaaaaagttatatttttgttttgtgaaattgagtttgaattttgggtagtttagtagtaattagtatatgtttgaattatagttgtgtgggatggtttgtattatatattaatggtaattattgttttaaatatggaaattaaatattttaggtttaggttgattttaatttgtgggtaggaaatgtttgatttattttaagataagtttaaaagtgtgtggagttttttttggggttataaattttgtttatatttatatgtattttttttgagatagttttttgaggttttttggtagttatttttttgaatgtgggaagagattgggatttttaggaatgtaaaaaaggagaaattaaaatgtttttagaaaattttagggtgtggttggtttagagatttaatttaatagttttaagatttaaaagatgagtattaaattatatttggtttttttttttttaggtatgagatatttatatttatttagaattagtttttaatttggaagttttttgtgtttttagtatttttagattttgtattaaattttttgtaaatttttttaataatgagtagttatgtatagtattatagttgtggttttgatgtttttattattagttgattat

SEQ ID NO: 559 - DNA, 1218 bp, Artificial Sequence
  chemically treated genomic DNA (Homo sapiens)
atgattaattgataatagaagtattaagattataattataatgttatatataattatttattattaggagagtttataaaaaatttggtataagatttgagaatgttgggaatataagaagtttttaaattaggaattgattttgggtaaatgtggatgttttatgtttgaagagagggaagttaagtatagtttgatatttattttttgagttttggaattgttggattgggtttttggattaattatattttggaattttttgaggatattttgatttttttttttttgtatttttagggattttaatttttttttatgtttaagaaggtggttgttaagagattttaagggattgttttaaaagaaatatatatgaatgtgaataggatttgtagttttagagaaaattttatatatttttaaatttattttgggatagattagatgttttttatttgtagattggaattagtttgaatttaaagtatttaatttttatatttaaagtagtagttgttattggtatataatataaattattttgtgtagttgtgatttaggtatatattgattattattaaattatttagaatttgagtttaattttataagatagaaatatgatttttttttttttttggttatagaagattatttaaggaagtagtatgataaaatgttttttgatgttgttataggtgtatggttgaaatttaattttatatatatttgtatagaaatttatagtgtaatttataaatatttgagttttttggtaagattaatatttgagtagtagtaagttttttgttattaattatttaagatattttttgttttgtttttgtaatattttgagttgtttattaaataggttataatatgagaaagtatttatgttatttttaattaagaaaaaaatttgtttggatgaggagagaaggaaaaatattgttgtaatatagtaataattaaattatgtttataatgggttttaaatttttagaagaaaagatttatagtttagtagtataaagtagtattatttttgttgttattaaaaagtgttttttaattttttatatatatgtaatatattttatttaaggatttaagtttattataaataaataagaagttatagtttataaaatttggttaatgttataaaagagatataatttattggttataagtaagttaatatttttagaa

SEQ ID NO: 560 - DNA, 1016 bp, Artificial Sequence
  chemically treated genomic DNA (Homo sapiens)
aattgttattttgtttttaagatgggttatatattagtttttatttttatttttttagtttttgtttatgttatttagataattatgatggtttttttttagttattattttgtagattagttttgtattattggataaatggaattttatagtttttgtttggaataatttagtttttggaattttttatttaatatgatgtttgtggaatttattatgtagttgtatatagtaatattttatttatttttttgttgaatattattttattatttttgttagtttgaatggattttttttttatagttaagtaggttatgattaagggagataatgaagtatggaattgttttttttagagaaattataggtatggaataagaattttttgaggaggttttttttgttttttttttattaagttgtgatattatttttatatttagagaattttagagtaatattgagttttgttgagtgggtttagagttttatatggtagttgttttagtttttggtatgaggttaaaggatgatagtttttatttttttttatgtttttttgtttaattttagggaatatttttttattttgtgattgtttatatttgaaaattttatttatattttataattttttattagtttaatgttatgtggtgttaattttttgtatgttgtagtgttgagttgtaaatttgttttttttttgtagtaatttaaagtgtttgtaaagttttgaggtagataatgttattttgttatgtatgtttatataatattagtaaattatttattgtgtttttgtttattttttagatatggtggttgttttgtagaattaaaatttttgttatttttttttataattagttaataaatttaagttgagttaaggagttaggtgaagttattgtgatttgggtaaggtttttattgatagatatgtgtttttagatataagatgtgtttttagatatataattttgtttggttagagtagaatagaatgggt

SEQ ID NO: 561 - DNA, 1016 bp, Artificial Sequence
  chemically treated genomic DNA (Homo sapiens)
atttattttattttattttggttaaatagaattgtatgtttgaaagtatattttgtgtttgaaagtatatgtttattgatgggaattttgtttaaattatagtggttttatttggttttttagtttaatttgaatttattaattaattatgaaaaaagataatagaaattttgattttataaagtaattattatgtttggaagatagataaagatataatgaatgatttgttgatattatatgaatatatatgataaaataatattgtttgttttaagattttatgggtattttggattattgtaagaaaagggtaggtttgtagtttaatattgtagtatgtaaagggttaatattatatggtattgggttgatggaagattgtagagtgtgagtaagatttttagatatgagtaattatagggtaaagaaatattttttaaggttgggtaaaagaatatgaaagaagataagaattgttattttttggttttgtgttaggaattgagatagttgttatatggaattttgaatttatttagtgaaatttggtgttgttttgaagttttttgaatatgaaaataatgttgtagtttgatgaagaaaggatagaaaaggtttttttagggaatttttattttatgtttgtggtttttttggaaaagataattttatgttttattattttttttagttatggtttatttgattgtaagaaagaaatttatttaaattggtaaaagtaatggaataatatttagtaaaagaataaataaaatattgttgtatgtaattatatggtgaattttataagtattatgttaagtaagagattttgaagattaaattattttaaatgaaaattataggattttatttatttaataatgtaaaattaatttatagggtaataattaaggagaggttattatagttgtttgggtggtatggataagagttggagaaatagaaatagagattagtatatggtttattttgagaataagatggtagtt

SEQ ID NO: 562 - DNA, 708 bp, Artificial Sequence
  chemically treated genomic DNA (Homo sapiens)
gataaaaagaatatttgttttatttttttattattaggtatttaaatttagttttaaataggtatataaatagttgggtattttaggttgatgatatttatttttagggtaagtggttaattttttttttaagtttgaataataaatgtttaattatttttttattttttttaaatagtaatgtgttttgtatttagtttgtgtttgtttgttggtgtagagttgatattatttgattttattttatagagattttgtgtttgttagatgtttaaataagtggttgatttagggtaaaaatattagttaagttatttgttttatttagttaaagaattagtgtaggtaaagtaggtgagttagtagtttagtgtaggtaaagttgtgtgtttttgaatgatttttttagttgttatttttgggagggttgggtttttggggtatttttaaaggaattgttttgggtttaaggtaatatttttttttagtagtttttttttttttatttttagtggttattttaattattttaataggtaattttaaagttagttagaagtaattttagtttattaagtttgaatgtgaaaaggagtaagtaaagatttgagtttttttttgtttttttttttatgagtaatatgtgattttttaaaaattattgtagtaagaatatttaatatgaaatttatttttttaataaatttt

SEQ ID NO: 563 - DNA, 708 bp, Artificial Sequence
  chemically treated genomic DNA (Homo sapiens)
aaaatttgttaagagggtagattttatgttaggtgtttttattataataatttttaaaagattatatgttatttataagaaaagaaataagagaaagtttaggtttttgtttgtttttttttatatttaagtttgataaattaaaattgtttttggttggttttaaggttgtttgttgaagtagttgagataattattggaaatggggaaggagaagttgttgagagagaatgttgttttgagtttaaggtagtttttttaggagtgttttaaaagtttagtttttttaggaatgatggttggaaagattatttgaggatatgtagttttgtttatgttgggttattgatttgtttattttatttgtattgattttttaattgagtgaaataaatggtttgattaatatttttgttttgaattaattatttatttggatatttagtaaatatagggtttttgtgaaataggattaggtaatgttagttttgtattggtagatagatatagattggatgtagagtatattattgtttaggaaaaataaaaagatgattaggtatttattatttgagtttaggaaggaaattagttatttgttttgagagtggatattattaatttgaaatgtttagttatttgtatatttatttaaaattgagtttgaatgtttggtagtaggaagatggaataaatgttttttttatt

SEQ ID NO: 564 - DNA, 837 bp, Artificial Sequence
  chemically treated genomic DNA (Homo sapiens)
tttttataagagtaattattattaatggttattgtttggaagttggatttggaaatgatatgttggatggttatagttttgttagatgaggtgtgtgtgtgatgataagtgggaaatagtttgatttaagggatattttagtttatggttagtatagtaatgattttgggaagtttgaagttatgttttttgttgagtaataaggtatagggtgtagaaggggtaaaataagttagggagtttagttaatatgtgagatggaaatttaaggatagggatagagtatgtataaagtttagggatatagttttttgttggatattttgtttgtattaattggtaaattagattgtataataggaaagaagtttgtgatagtaaaaggggttgaaaatgggaaggatatttagagggtaggaattatgatggggttttgtggttttgtgggtagtagggagagtgtatttttggtttgtgggttttgtgagttggaagaaattaggaaagggaagttgagtatttaattttatatagattataggttaattgtgtttatttagtgtttgaaagtgagaagttgttaaggttttgtgatagttttgaaattgtaggtattagaggatagaaattttgagtttagagggaggtaggtatttttatttgtttaatttggtttttaatagtttttaattttttaatatttttaagtagaattagattaagtagaagtgtttataatagttttttaatttagtttgtatttttttttttttttttttgttttgggggttatgtgttattaggagtagaggttgtgaatgttttagaaattttttt

SEQ ID NO: 565 - DNA, 837 bp, Artificial Sequence
  chemically treated genomic DNA (Homo sapiens)
aaagggatttttggaatatttataatttttgtttttaatggtatatggtttttaggataaaagaaagagagagaagatataggttaaattggagaattattatgagtatttttgtttaatttgattttgtttgggaatattgaagagttggaagttgttgaagattaaattgggtagatgggagtgtttgtttttttttgggtttaggatttttattttttaatgtttgtggttttaaggttgttataaagttttgataattttttatttttaaatattaaatgggtatgattagtttgtgatttatgtaggattaaatgtttagttttttttttttgattttttttagtttatgagatttgtaggttaaaaatatattttttttgttgtttataaggttgtagagttttgttatagtttttgttttttgagtgttttttttgtttttgattttttttgttattataagttttttttttgttgtgtagtttaatttattagttagtataggtaaaatgtttagtaaaaagttgtgtttttgggttttgtgtgtgttttgtttttatttttaagtttttattttatatgttaattggattttttgatttattttgttttttttgtgttttgtattttattgtttaatagaagatatagttttaggttttttaagattattattgtgttggttatggattaaagtgttttttaaattaagttgttttttatttattattatatgtatattttatttaataagattatgattatttagtatgttatttttaggtttaatttttaggtagtgattattgatggtaattgtttttataagag

SEQ ID NO: 566 - DNA, 1348 bp, Artificial Sequence
  chemically treated genomic DNA (Homo sapiens)
attattttattttttttttttttttttttttattaaaaaaaaaaaataatggttagaatattggtttttataatattagtttttgttttggtagattaaaagaggtagaatttttttagtataattttgttttttaaatattttaaaagtatttaattatttggttttgtattatttataaaattttgtagttatgaagaaagtttttttttttaaatttagtttatttttttaaattaaaagtgtttttataaataagaagagaagttgtttttgttaaaattttgggtttatttaggattaatggagtttttttgttttgtaggaaaattttttgtttttagattagttgttaaagttgaatattatagatgatttttttaaagtgattttgaaaaattatatgttggaatttaaattttttaaattttatatataagattagaattttatattttaatagttatataattttataaagaattatttttgatttttttggtagattattattgtagaaggaataaaaaaaggttttataaaagtattttatttgtattgttggtagatgatttataaatgttgtatagatatgggttgattattggtttatagaagaagtattaaatgaatgatgagatatttgttggtaaatatatagtaaataaaaaatgtaatttagagttaaatatgtgtatagtgtgggttttatttttgtttataaattaagtaatgtgttttgttaattattagtagagttattgattttagatgtgtattatatagttataattttgttagagagtagattatataagttgttttttttttggttgttttattttgttttattttaagagtttgtaaattgatgattgggataaaaattataattgatattatttgtgggaaatattttataaaataataggtttagatgtaggattaaagttatgtggtagtaaaatattttattgaaaaggggttaggttttatgattttttaagaaaatagatgtgttttttttttttttgtttgttttttaattttttttttttaaataaatttttttttaattattaatgtttttttttttttgtttttttatgattgtattggagagagtttataaatggattatagatgtaggtttgtattttaaaattttaattgttataatttttggaataaaataaatgaaatatttggaaaaattatattgaattattgtaaaggtaatgatgattatgtaaatatgtttgtttgatatttatttagtatttttgggtatgagtatatgattttttagatattttaagttggagtttagggagtaggaagtaattta

SEQ ID NO: 567 - DNA, 1348 bp, Artificial Sequence
  chemically treated genomic DNA (Homo sapiens)
taaattattttttattttttgaattttagtttgaggtatttgggagattatatgtttatgtttaaagatgttagataaatgttaagtagatatgtttgtataattattattatttttataatagtttaatgtaatttttttaaatgttttatttattttattttagagattgtgatagttagaattttgaagtataagtttatatttgtaatttatttatgaattttttttagtgtaattgtgaggagatagagaggaaaaaatgttggtggttggggggggatttatttggagaaaaaaaattgaaaaataagtagagggaaaaagagtatatttgtttttttaagaaattatggaatttggtttttttttagtggggtattttattattatatggttttaattttatatttgggtttgttgttttatgaaatattttttatagatgatgttaattataatttttgttttggttgttaatttatggatttttggaataagataaaatgaaataattagaaaaagaataatttatgtggtttattttttgataaaattatagttgtgtgatatatatttaaaattaataattttgttaatgattagtagaatatattgtttggtttatgagtagagatggggtttatattgtgtatatgtttggttttgagttgtattttttgtttgttgtgtatttattagtagatgttttgttgtttatttaatgttttttttatgagttagtagttagtttgtgtttgtgtgatatttataagttatttgttaataatataggtggaatgtttttatgaagtttttttttgttttttttgtagtgatgatttattagagaaattaggggtaattttttatagagttatatggttattaagatgtggagttttgattttgtgtgtaaagtttaagaaatttagattttagtatatggttttttagaattgttttgaaagaattatttgtggtgtttaattttagtagttggtttgagggtaaaaggtttttttatgaaataaagaaattttattagttttaagtagatttaaagttttgatagaaatagtttttttttttatttatagggatatttttaatttagggagataaattgaatttaaaaaaaagaattttttttataattataagattttgtaagtaatataaagttagataattggatatttttaaaatgtttggagggtaaaattgtgttgggaagattttgttttttttggtttgttagagtagggattaatgttatagaagttagtattttggttattattttttttttttaataagaaagaaagaaaaggaaagatgaaataat

SEQ ID NO: 568 - DNA, 1125 bp, Artificial Sequence
  chemically treated genomic DNA (Homo sapiens)
tttaagttattggtttaatggtttaatttttgaggagatagaatttaagtaggtagatttgtatatttttatatgatatttattatttttttttttgtgtgttttttttttttttttttttttttttttattttttttttttgtttttttaaattttttagttaattttttttttgttttttagtttttgtttatatagaaaatttggttttagagaatagtatttaaatagtttttaattaaaatgtattatgtgtggtaatgtaaaaaattattagaatagtttttttttatttaaaatatgatttttgtttattgttttggtttttttgtttttgtgttttaggttaaatattatttagatttttgtgaggttaggtgtttttttattaattatttgaaaggtttagagaatggtatttatattaaagttagttttaatgataaaggatatttggttatggtaaatataagtattttttagttttttgttttatttggtaaaaagttatttttattttagttataatataataaaggattaattgatgggagtattttttttattttttaaaaaataaattgagttaattttatgagtttatttagaggaattaattagggaataggaaatttttaaagttatttttaaattgatattgaataaagtttagggaatagatggttttttatttgaattttttaaaatttttagtattttattaatttttttataggaatgaaaaaaaattgttaaatgaatttgagtaaattattttattaggtgtttagtttttttaagattttttttgtattaagaaaaaaagaaaatataataggtattttttttattgatattattataattttatttgtatatgtgagttttttttttagggtttattttaaattttttttgtatttttgattattaagttgggggaatgatttttttaattggtgtagttgattatgtataattgtttagagtataaggatagtgttaatatatataaagttgagaatgaggttattgtttaagtaaaatagaaaaatagaaaataatttttgttattttgttttagatatttggagatttttggggtaagagatggagaggataaa

SEQ ID NO: 569 - DNA, 1125 bp, Artificial Sequence
  chemically treated genomic DNA (Homo sapiens)
tttattttttttattttttgttttagaaatttttagatatttgaaataaaatgataaaaattgttttttatttttttattttgtttgaataatggttttatttttgattttgtgtgtgttgatattgtttttgtgttttgagtagttgtgtatgattagttgtattaattaagagaattatttttttagtttggtagttagaaatgtaggggaagtttagaatgagttttgggggaagaatttatatgtataaatgaaattatagtaatattagtagagaggatatttgttgtatttttttttttttttagtgtaaaaggaattttaggggaattgaatatttggtgaaatagtttgtttaaatttatttagtaatttttttttatttttataggggaattagtagagtgttaaaggttttaaagaatttagatgaaaagttatttgttttttgggttttgtttaatgttaatttaaggatggttttggagattttttattttttaattaatttttttagatgagtttgtggggttggtttaatttattttttgaaagatggaaaaaatgtttttattaattagttttttgttatgttgtgattgagatggaaatagttttttgttaaatggagtgaggagttgagagatgtttgtgtttgttgtggttaggtgttttttgttattaggattggttttgatgtaagtattattttttgggttttttagataattggtgagaaagtatttggttttgtagaaatttgagtaatatttagtttgaagtataaagatagggaaattaaagtagtgaataggagttatattttaaatagaaaaaaattgttttaataattttttgtattattatatgtaatgtattttagttggaggttgtttgagtattgttttttagaattagattttttgtgtggataaggattagggggtagggaaagggttaattgaggggtttggagaaatagaaaagggaaatagagaaaaagaggagggggaaaaagagatatatgagaggagaggtgatgggtgttatgtaaaagtgtatagatttgtttgtttaaattttatttttttaaagattggattattgagttagtggtttgag

SEQ ID NO: 570 - DNA, 793 bp, Artificial Sequence
  chemically treated genomic DNA (Homo sapiens)
aaatgtattgggtaaattttgatgtataataaaggttgagagtttgagatttagggatttaattaattatgtaagatgtttaaaatggaatgttgatttttatatgatatttgttaaatgtagaaaattttgtttggatttggaaataaaaatgtgagtatgaagttttggtaaaataaatttttttgaaaaatattaatattttataattatttttttattaaaataaaatagtgttaagtatatagttttttttaagtaataaatttttaaaattaaagtgaaattttgaaattatttttttaaatagtatttgtttggtagatagatggtatgttttattttattttttgtttttatttggtggagtttatggggtattttgagaattaatgggtaattaagaattgggtgttaatttaggtatttgatttggaaattgagtttttgaaaattattaattttaaatatagtgtaagttttttttattatgttattttagaaattggtaataagaatattttaaaaatatttagaaatgtaggagttagattttttgggttgtaggtggaggatatatagttgttaggaaatggaagatatttgttatgtttttgagtttttttttggtgggtagtggatggaggataataaggtttgttgtagtattaatttgggtattaaatagtaataaataaatgtgatttaagagtattgttgggagatttttttgaaagagtatgtatagtagtttttggtagtaaggaattaaggttggtagttttaagttatt

SEQ ID NO: 571 - DNA, 793 bp, Artificial Sequence
  chemically treated genomic DNA (Homo sapiens)
aatggtttagggttattagttttgattttttattattaaggattattgtgtatgtttttttagaaaggttttttaataatgtttttaaattatatttatttattattatttagtatttagattaatattatagtagattttattgttttttatttattatttgttaaaggggggtttagggatatagtaggtgttttttattttttggtagttgtgtgttttttatttgtagtttagaaaatttggtttttgtatttttaaatatttttagagtgtttttattattagtttttgggatagtataataaggagggtttgtgttatatttggaattgatggtttttaaagatttaatttttaaattaaatatttaaattggtatttaatttttaattatttattgatttttaaaatattttatgaattttattaagtagaaatgggaaatgaaataaaatatgttatttgtttattggatggatgttatttgaaggagtggttttaaaattttattttggttttaaagatttgttatttggaagaagttatgtatttggtattattttattttgatggaaaaataattgtagagtattagtgttttttaagagagtttattttattgaagttttatgtttatatttttgtttttaaatttagataaaattttttatatttgataagtattatgtgaagattaatgttttattttaagtattttgtatgattgattggatttttaagttttaagtttttaatttttattgtgtattagaatttatttgatatattt

SEQ ID NO: 572 - DNA, 936 bp, Artificial Sequence
  chemically treated genomic DNA (Homo sapiens)
attttgttgtagttataggttttgtgattgaggaatttatttttaaagaaagtgtattgggatatattttaaaagttgatgtatgatagtatggggtagataaaggttaaaaagataaggttatgattaagtaggggagaaatatatagatatttatgtaaatatttagggtatgagtaagaatttggggaaagatttggagttaggaggaggtgggtgtttggtaggtggtgagattttaataggtagaggtagaagtgaagggtaaagggaaattttgggttatatggggaaattagatttgtttgtttgtttaatattgtggtttttagtgggatttaaagttgatgttttaatgtaggatggttatgttagtgttgattagaataatgtattttttagggttatattaaaaaattatgtttagtgttttatttgtatttttaaaatatgtatatatatgtgtgggttagaaaaggttgtgtttaggatatgtatttttatgtgaattgtaggtaattgtataagtaaataggaagttgtgtaggtatgtaggtagttgtttgttgagaggtgtgtgtgggtatgggtaggtgtgggttttgtttgtttgagtataattttaaaggttttttttgatggaagggagggtaagtaagtttttgggtatttgtttttttaattgttgttgttgtttgttttttttaaggttttttttttgggtagggttatgttagggagtatttgtggttgtaagaaaaaggtgttgttttaaggtttttgttaattgttgagttggtgaataaatgttttgaaattttttttgttgagaattttattttttggttttttttttgattttatggtttagtttttttagtttattttttgttttttttttttgtttgttttttagatgtttttttgtgaatttgt

SEQ ID NO: 573 - DNA, 936 bp, Artificial Sequence
  chemically treated genomic DNA (Homo sapiens)
ataggtttatgggaaaatatttgaggaataaatagaagaagaagatagggaataaattggggaaattgggttatagaattaggaagagaattaggagatggaatttttagtaaagagaattttaaaatgtttatttattagtttggtagttagtaaagattttgaaatggtattttttttttatagttataaatattttttgatatggttttgtttagaaaggaaattttgagaaggataaatgatagtagtagttagggaagtaggtgtttagaggtttgtttgtttttttttttattaggagaagtttttaaaattgtatttaaatagataaggtttatgtttgtttatgtttatatgtattttttaataggtagttgtttgtatatttatgtaattttttgtttgtttgtgtaattatttatggtttatataagaatgtatgttttgagtgtagttttttttggtttatatatgtatgtgtatattttgaaggtgtaaatgaggtattgagtatagttttttaatgtagttttaaggggtatattattttgattagtattaatatagttgttttatattaaggtattgattttaggttttattggaggttatagtgttaaataagtaaataaatttagtttttttgtgtggtttaaagtttttttttgttttttatttttatttttgtttattaaagttttattgtttgttaagtatttatttttttttaattttaagtttttttttagatttttgtttatattttaggtatttatataggtatttgtgtgttttttttttatttaattatgattttgtttttttaatttttgtttgttttatattattatgtattaatttttgaaatgtgttttagtgtattttttttgggaatgagttttttagttatagagtttgtgattgtagtagagt

SEQ ID NO: 574 - DNA, 940 bp, Artificial Sequence
  chemically treated genomic DNA (Homo sapiens)
atggatttgtttttagaggggtatgaaggtggttgtgattttataagtagaatggaagtgatttgatttatattgggtttgggaaaattggtttaggtgtggtaaaggtatagagtgtgaaataggtggggaaaataaatttaagattttgaatttttttatggtttttaaaggggaagttatgggtatagtgaatggaggggttgtttttagtttatttggtgttgtggtgaattgttttagggtttggtatattgttattattttaagatagatgggaaataaatattattagtatgttgataagtgtttgtttttttttagtattagggttaagaaaaataaagtggggagggtattaagttttggagtaagtttttaaaaggtttttttttttgaattttttatggttgtttatttataatagttataattataatagagaggaaaagattttaattatttttgggatatattttgttaaaattatatttaagtattttttatttgtaagtgagaagtattattttttattatgtttttaaagtagtgtggggaagttgtgtgtataaattaaggtgttgttgtggtttgttgttttttgtgaatttttggaaaggattattaagaaggatgttttgataattgtttgttaggtaatttgtataagaggaaagaggtttttttgaagattattaaaaatgatttattattattggttatatatatatatgttgttttattatttaaaagtataaattatatattggtaagtaattgtgtttattagattattttaggttttgggaggagtagagaggtataaagtgtggtgattatttttaaggaaagtgtattttaattagggagataagaataattatatgtgtagtagttaaaagttatataaaagtttatgattaagtggtgagttgtgaat

SEQ ID NO: 575 - DNA, 940 bp, Artificial Sequence
  chemically treated genomic DNA (Homo sapiens)
atttataatttattatttaattataggtttttgtatagtttttaattattgtatgtgtaattgtttttgtttttttaattaaaatgtattttttttgggaataattattatattttgtatttttttattttttttagggtttaaaatagtttgataaatataattatttgttaatgtatgatttatgtttttaagtaataaaataatatgtatgtgtatgattaatagtaatgaattatttttaatgatttttagaaaggtttttttttttttatgtaaattgtttggtagatagttattagagtattttttttggtgattttttttagaagtttataaaagataataggttatagtaatattttggtttatgtatataatttttttatgttgttttaaaggtataataaaagataatgttttttgtttataaataaaaagtgtttaaatgtaattttgataaaatgtgttttaggggtgattgaagtttttttttttttgttgtgattgtaattgttataaatagataattgtaagagatttaaaaggggaaattttttaaaggtttattttagggtttgatattttttttattttattttttttagttttaatgttgaaggaaaataaatatttattgatatattaatggtgtttattttttatttgttttggaatggtggtaatgtgttaagttttgagatagtttattatagtgttaagtgagttgaaggtagtttttttatttattgtatttatggttttttttttgggggttatggaaaagtttaggattttgaatttattttttttatttgttttatattttgtatttttgttatatttaagttaatttttttaggtttggtgtagattaaattatttttattttgtttatgaagttatagttatttttatgtttttttagaaataggtttat

SEQ ID NO: 576 - DNA, 851 bp, Artificial Sequence
  chemically treated genomic DNA (Homo sapiens)
aaaatggatttttttgttgtatgtttagaaaattagatattattattatttgattatttatttattggtatagtttgttttatttattaaagaaaagataaggttgaaattggatttatttaatgtatgtttgtggttttatgtgtttgtagataataagtagttttgggtgtttgtttagggttgattttttaggttataattggtattattttgatttttttttggatgagtttatattgttatggagtttgtagttttaaataagaaaatatttataaaaatgagaggggtaaaatgttttttttggaagtagtaggggagggggtaggaaggggaggtttttgtttatttatggaaaatggatgtgtgttttatggtagttgtagtttaagtaaatataaattttgaattagagattatatttgttatttttttagtattagtaatattaaattaaaatatagttttatttggttaattttaaagtaggatgtgggtgttagttttgaaaattatatgattgggtttttagtagatattattagggttatgtttttgttttaagtaagaaagttataaaggtaatattttttgtagtattattattatgtttagtaaatagatgtaattataataatagttaattttagagataatagtttattatagaaaaaggttaagagggttttttattttttatgtgtagaatttgagttattttatattataattttattgagagaagaggtattaaaagagagataatgagaatttagggtataggtttaggtagtggggttgggtggggaaagaatttttttatttttttatgagttttagagttggtt

SEQ ID NO: 577 - DNA, 851 bp, Artificial Sequence
  chemically treated genomic DNA (Homo sapiens)
ggttgattttagaatttataagaagatgggaggattttttttttatttagttttattatttgagtttatgttttaggtttttattgttttttttttaatgtttttttttttaatagagttgtaatatgggatagtttagattttatgtatgaagagtaaaagatttttttgatttttttttgtagtgaattgttgtttttgaagttaattgttgttatggttgtatttgtttgttaaatataatgatggtattataaggagtattgtttttgtgatttttttgtttaagataaaagtatagttttggtggtgtttgttggaaatttgattatgtggtttttaaggttggtatttatattttattttggggttagttaaataaaattatattttggtttggtattgttagtgttgaggaaatggtgggtatgatttttggtttagagtttatgtttatttaaattgtggttattatgagatatatgtttattttttatgagtgaataaaagttttttttttttgtttttttttttattgtttttaaagggaatattttgttttttttatttttgtaggtgtttttttatttaaagttatagattttataatgatgtgggtttatttaaagaaaaattaaaatgatgttaattatagtttagaaagttaattttgaataaatatttaaggttgtttattatttatagatatataaagttatgaatatgtattgaatagatttaattttaattttgttttttttttaataagtgaaataagttgtattagtaagtaaataattaagtggtgataatatttggttttttaagtatgtagtagaaagatttatttt

SEQ ID NO: 578 - DNA, 1072 bp, Artificial Sequence
  chemically treated genomic DNA (Homo sapiens)
aataagtatttttagtttatgattatttttgagtaaatgaggatagtaatagtataagatttttagtggtatttttaatgaaagaattatataataatttttgattattttttgtttttatgtgtttataattttattgttaatattaagagagtgtattttgttgttattaattttggttatatttttataagtatatatagtaggttattattttgttttataaatagaagttgattaagttgtttattttgtaggatttataataaattatagtttaatatagtagtagaatgtaaggatttagaaggtttaaaatttataagtttaggaagatatttaattaatagaaattaaagtttaaatttgatttatttatttattggaaattttgggttgttaaataatatttaagtttattttgtaattagattaaagttttgggttttgtgggggttggagattggaattttattttaaaaagaaatgtgtaaggtattttgttttttattaagaagtgtaatgagtaggttttatttatgatttttagttttaaatgattgaattggtattagtgttaaaaaaattgaaaatgttttaatatgtattaattgtttaatggatgtgttgtttgtttgaaaagggtggggtggtatttaggttgtttaatgattttatatttttttatggtaaaatatttgtgatttgattatgttgtaattaaagagttatataaataatatttttggaaaggaataaatgggtttttttgaaagagggattttggttagttttagttggtattttaggtttttttatgaggagaaaatttttatttttaggtaaatttttttttttgttttttagaagttgtttttagttttatgtttgtttgtgtgtgtgttgtgagtgtagattatgggagatggggagtgggtagagggaggattttttaaaaaataaatgatatttttaatagataattttaaaataggttgaaatataagtaataaagataagtattttaaatttagaaaaggtttgggattttgaagttaaaaagtttagtaat

SEQ ID NO: 579 - DNA, 1072 bp, Artificial Sequence
  chemically treated genomic DNA (Homo sapiens)
attattaggttttttggttttaagattttaagttttttttaaatttaaagtgtttgtttttattatttgtattttaatttgttttaaaattgtttattaaagatgttatttattttttaaaaaattttttttttgtttattttttattttttatgatttatatttataatatatatataggtaggtataaaattaagggtaatttttaagaggtagagagaggagtttatttgggggtgagagttttttttttatgaaggggtttgagatattagttggagttgattaaaattttttttttaaggaagtttgtttgtttttttttaaagatattgtttatgtaattttttaattatagtataattaaattataagtattttgttatgggaaaatgtaaagttattaagtaatttaaatattattttgttttttttaggtagataatatatttattaagtgattaatgtatgttaagatatttttaatttttttggtattaatgttagtttaattatttgggattggggattataggtgaaatttatttattatattttttgatgggaagtagagtgttttatatgtttttttttaaaatagaattttaatttttggtttttataaggtttagagttttaatttgattgtaaaataagtttggatattgtttgatagtttagaatttttagtaggtggatgagttagatttgaattttaatttttgttaattgggtgtttttttgagtttgtagattttaggttttttaaatttttatattttgttgttatattgggttgtggtttgttgtgggttttatagaatggataatttaattaatttttgtttgtaaaataaaatagtgatttgttatatgtatttgtgaagatgtggttagagttgataatagtaagatatatttttttagtgttagtagtaaaattatggatatataaagataaagagtaattagggattgttgtataatttttttattgaaaatgttattaaaaattttatattgttattatttttatttgtttaaaaatagttatggattgggggtatttatt

SEQ ID NO: 580 - DNA, 795 bp, Artificial Sequence
  chemically treated genomic DNA (Homo sapiens)
ttataattatatatttggtagttggatggttattagtgttgtaggatgattagtaggtgtttttttttttttgtaggttagtttgggttggtggtttattttgtggttataagagagtgagaaaaagtgtgtaatattttttgaagtttaagtttagaattgatatatgtttatttttgttatatttgattagttaaagtaagttttaggttagtttaggtatagtaggtgaggaattagattttattttttgatgagaggagttgtaaagttatgtgtaagtttaggaagattttgtggttattttagtagttgattaggttatttagttagttttttggagttatatatgtgggttggtttttttaagttttttttgtttaaaaagttagatagagtttgtttttttagtagggtgtatattgtaggtttgggtgggttgtttgtttttgtgtttgttttgatttttagttatttttaggatgttttttttatggaggagaatgatttagttttgtttgttatgtgtattaagatgagttataagagagtattgtttttttgtaatgtaagaaatgtaatgtagttagaggttttgaaatttggtggggatagtggtagtagagattgtgatagttttgggatataggaggttattttggtttttagttttaggtgtttggagttattagatagttaaagttgtataaggtataggtatgatttgttaggttgtttagttaggttagggatgatagggtatgtttattttattagttaattagagataatttt

SEQ ID NO: 581 - DNA, 795 bp, Artificial Sequence
  chemically treated genomic DNA (Homo sapiens)
gggattgtttttgattagttggtgaggtgaatgtgttttgttatttttggtttggttgggtaatttggtaggttatgtttgtgttttgtgtaattttggttgtttggtagttttaggtatttaagattgaagattaaggtggttttttgtgttttgaggttgttatagtttttgttgttgttgtttttattagattttagagtttttgattatattgtattttttgtattataagaaagtaatgtttttttgtagtttattttaatatatatggtagatagaattgagttgtttttttttatgaaagaaatattttggaaatagttaaaagttaaaataaatataaaaataaataatttatttaggtttgtgatatgtgttttgttggaaaaataaattttgtttggttttttgggtggagaagatttgggaaggttagtttatatgtgtggttttagaaaattggttgagtagtttaattgattgttaaaatggttatggagtttttttaggtttgtatatgattttatagttttttttattaaggggtggagtttagttttttgtttgttatatttgggttggtttgggatttgttttgattaattaaatgtggtagaaatgaatatgtgttagttttgaatttaggttttaaggggtgttgtatatttttttttatttttttgtgattataaagtgaattattagtttaggttagtttgtgggaggaggagaatatttgttagttattttgtagtattgatagttatttaattattagatgtgtgattgtgg

SEQ ID NO: 582 - DNA, 706 bp, Artificial Sequence
  chemically treated genomic DNA (Homo sapiens)
ttttatttttagtatagtttatatataatgtaagtgtttaaaagttgaattgtagtattgagttgaggggtggttagttttggtgagttttggtgttttattatggtttttttatggttgtttttattttttttttagaaaagttattgagaaatggaattttttgatattatttttagttaaagttgttgaaaatagtttagaggagtgaattttatagagttttatgttttgtttagatttttggggttttttgttttatggagtttgtagagttgtgtttagattttttattttggattgttatttggtattggttttttttatgtagtttttttgtttttattgtaatttgattttttgttaaattattttttttttggttttaaatttttgttgggaaagagatgaaattagtatttggagagttggaaagggaaaaatagttgttttttataaaatgggttagggagggggaagtggagtagtatagttggattttggtgggaaagttagagtttggtgggaatgtatagtttatagtaggagagataaatatataaatttagaggggtttagtggtagtagtttaggggtttgtttgttaatggtattttgtgttgtattttttagatatagttatattttatatttatattaattattttagggttgtagagattttttttattttagagaggtaggt

SEQ ID NO: 583 - DNA, 706 bp, Artificial Sequence
  chemically treated genomic DNA (Homo sapiens)
gtttatttttttaaaatggagaaaatttttatagttttaggatggttaatgtggatatgagatgtgattgtatttgaagaatatggtataaggtgttattggtaagtaagtttttgagttgttgttgttgggtttttttaggtttgtgtgtttgttttttttgttgtgagttgtatgtttttattagattttggtttttttattaagatttagttgtgttgttttgtttttttttttttagtttattttgtgaaaagtagttgtttttttttttttagttttttaagtgttgattttattttttttttgataaaagtttgaagttaggagggaaatggtttggtagaaagttagattgtagtgggagtaagaagattatgtggaggaggttgatgttgggtagtggtttaggatgaggggtttggatgtggttttgtagattttatgagataagaagttttaggaatttaggtggggtatagggttttgtggaatttatttttttgagttgtttttagtaattttagttaggggtgatgttaaagagttttattttttaatagtttttttggaagaggggtggagatagttatggggaaattatgatgagatattagggtttattggggttgattattttttaatttagtgttatagtttgatttttgagtatttatattgtgtgtggattgtgttggggatggaa

SEQ ID NO: 584 - DNA, 982 bp, Artificial Sequence
  chemically treated genomic DNA (Homo sapiens)
ttgaatattattaaattgatttaaaatatttttttaatttgtttaattaagaagttggaatttaaaaaattttattaggagtgttttgtgtgttttttgtaatatttagtttgttatgaagttaattagttgtgttatagttgaatgttagtaaaagaatgttaagttgtaaaaggagattagaagtatattttgtgatttattttttggtaggtggtattgtttgtttgaaattatatattagtgttattatatatagttaagagggtttttagaatggattattttattgttttttttttatttaagaattttattttttgatatagatggatgtagggatgggagttggggtagtttgggagatggaatttggtggtttaggtgttgaagggttgagatagatttaggatggttaatgataggaaatttatttggttgtttaaatatggtgttaggtaattagtagttatttaggtaattgatggggttggggaagtttagtaagaggtgatagtgggttttgatgataggattgatttgtttttggaggtaggttatggaagtaggtattatttagagatgtaggtaggtggttggttttggggatgtttgttagttgtagggatgggatgttaggttttgggaagagtaagagtaagatagtattttaggattagggtaattggagtttgtggatgttgttaagaaggaggtgggtattggggaaagagatgtaggagtgagtaggtggtttaggatgttaggtttggtaggattttaagagtaagtagattttggggtagttgaagggttaagaattgtggtgttgtgaagtggtttttaggattttttaggttttttttttaggaaggtttattaaagggttttaggtgtgaaaatagtggattatggaagtgggaataggatgggatatttttaagttgggagtttttggttagaagttattggattggaaatt

SEQ ID NO: 585 - DNA, 982 bp, Artificial Sequence
  chemically treated genomic DNA (Homo sapiens)
agtttttaatttaataatttttaattagggatttttaatttgaaaatattttgttttgtttttatttttatggtttgttgtttttatatttaggattttttggtaggtttttttgagagagaaatttaagaagttttgagaattattttatagtattatagtttttgattttttagttgttttggggtttgtttgtttttggaattttgttggatttggtattttggattatttatttgtttttgtatttttttttttagtgtttattttttttttgataatatttatgggttttagttgttttggttttggaatgttgttttgtttttgttttttttaaggtttggtgttttatttttgtagttgatagatgtttttaaggttagttatttgtttgtgtttttgaatagtgtttgtttttatggtttgtttttgagggtaagttagttttgttattaggatttgttgttattttttgttggatttttttagttttattggttgtttgggtgattgttagttgtttagtattgtatttaaatagttagatgggttttttgttattggttattttgggtttattttgattttttaatatttggattgttaggttttattttttaggttattttggtttttatttttgtatttatttgtgttaggagataaaatttttagataaaaaaaaaatagtaagataatttattttaagaatttttttggttatgtgtaataatattgatgtataattttaaataagtaatgttatttattaagaaatgggttataaaatgtgtttttgatttttttttatagtttggtatttttttgttggtatttgattataatatagttaattggttttatgataaattagatgttataaaaggtatatgaggtatttttaataaaattttttaaattttaattttttagttaagtaaattaagaaaatattttaaattaatttaatgatgtttaa

SEQ ID NO: 586 - DNA, 929 bp, Artificial Sequence
  chemically treated genomic DNA (Homo sapiens)
ttttagatagataagtaaataatttttgtaaatttgagttatatttttttttttttttttaaaatttagtttaatataattgaaaattgaagtttgattttttaagtttataagggataaaagagagataggatagatagaaataattggtaatgaggagttattgggttttggttttatgggagataatagtggttttatagaaggtaatggtggatttttagttaattgaagtttgggtggaatttagttgtataattaagaagttgaatttgttttattttatttttttataatataaagagtgtgaaaaggttattttaatgtttagagagtggttttttttggaaaatatttttgaatatattatggagtagtgttaattgtagtataaaatgttttagaaattttgtaatttatgagtttaatggtatatttgaggattatgaggttttttttgtttatttataatagtttggtgattgatttagtagagaggaagtaaaatgaataattttgattattttttaatattttttttgttttgttgattttagagttttaggggtatagtatttgtaggaattgtatgtttttttggtaatattttaaaattaaatttaaaagatgaagaagaaaaatggttattagatagttataaatatgttattatttgtaaatggtattgttttgtggatatgaagttttttattgtttatttgtttttaagtttaatgatttatatataaaggtgtaaggatttattgatattgtgttttttttttgttgatattattagtttgagaattaaggataatggatagttgtatataagtttaagttttgtatttattttttagtttttttttttattttttagttgtgtttgttttttttttgaaatttgtaaagtaggaataataataaag

SEQ ID NO: 587 - DNA, 929 bp, Artificial Sequence
  chemically treated genomic DNA (Homo sapiens)
ttttattattatttttattttatagattttaaaaaaaaaataaatataattgaaggatggaaagggaaattaagaagtagatgtagaatttgaatttatatatagttatttattgtttttagtttttgggttaatggtgttaatagagaggaagtataatgttaataagtttttatatttttatatgtggattgttgaatttaaaaatagatgagtaatgaagagttttatatttataaagtaatattatttgtaaataatgatatatttataattatttaataattattttttttttttattttttgagtttgattttaaagtattgttaaaaagatatataatttttgtaaatgttgtatttttaaagttttgaagttagtaagataggaaaaatgttaaaaggtgattaagattgtttattttgttttttttttgttaaattagttattgggttattatgagtggatggaaaaaattttgtaatttttaggtgtgttattaaatttataaattgtaagatttttaggatattttatattatagttgatattgttttatggtatgtttggggatattttttaagagaagttattttttgaatattaaaatgatttttttatattttttatgttatagaaaaataaaataaaatagatttagttttttaattatgtagttaagttttatttaagttttagttgattaagagtttattattgttttttatgaaattattattgttttttatggagttaaagtttagtaattttttgttgttagttatttttatttattttgttttttttttattttttataggtttggagagttagattttagtttttaattatattaagttgaattttaaaagaaaggggaaaagtgtggtttgagtttgtaaaggttatttatttatttatttagaa

SEQ ID NO: 588 - DNA, 892 bp, Artificial Sequence
  chemically treated genomic DNA (Homo sapiens)
aaaataaaattaatatttgaatgaatattgaaatttttttaaaaaaagataaatgagggggaaattatataagtaagtaaggttttatatatatggtgttttagaaattaattagtggatagatttagaatttatatttttttttttaaaatgttttttggtagaagttattttgtaggataaattggaattaaaagagttatgaaaattgtataatgggatgaaggggttttttttgttggggaatagatagttgatatgttggatggggttagggtttaaataaaggtttttgttgagtgggagtaggtataagatagatggtttgttaaatattgttagtatgtttgtgtagtgttgtgtggtggttagagtttggataatggttattagggtattgtgtagtagtgtattggttaattttagtttagttaaagttattgtttatttttgttggttttgtaaagattaaggtagtttttttgttttgaatgtattatagttgtttagtaaagtatttttgaagttttgtttgaatttttattgttaagaggggttaagtaaaaggtggtttgtgtaaggatttgttttaagtttatatgtgaagttgtttttttttaattaatttggattatttttgatttttatttttgggtaaaattttttagagttataggggtttttttttttagtgagtttttttttgtgtggtttgaaatgtatttgttggggatttatattttttagatttatattttttattgggattgatttatttgttatttttgtggaaaaaggtaaatattattgtaaattttatttggtgaattatggggaggtggtggttttaattaaatgtgtttgtttttggaagggggtttttggtttttta

SEQ ID NO: 589 - DNA, 892 bp, Artificial Sequence
  chemically treated genomic DNA (Homo sapiens)
taagaagttaagggtttttttttgaaagtaaatatgtttaattggaattattgtttttttatgatttattggatggaatttataatggtgtttatttttttttataaaagtagtaaatgaattaattttaataggaaatataaatttaggaaatataaatttttagtagatgtattttgaattatataggaaaggatttattgagaaagaaggtttttgtaattttagagggttttgtttagaagtaagagttaagagtggtttagattagttgaggagaagtaattttatatatgagtttaaaataagtttttgtatgagttattttttgtttggttttttttagtagtgggaatttagataaaattttaggaatgttttgttgggtagttgtggtgtatttaaagtagagaaattgttttaatttttgtaaaattaataaagataagtaatagttttagttgggttgaaattagttaatgtgttgttatataatgttttggtgattattatttaggttttgattgttgtatggtattgtgtaagtatgttggtaatgtttaataaattatttgttttgtatttgtttttatttaataggggtttttgtttgaattttggttttatttagtatgttagttatttattttttaataggggaagtttttttattttattgtataatttttataatttttttgattttagtttgttttatagaatgatttttgttagagaatattttggaaagggagatatggattttgaatttgtttattgattagtttttagagtattatgtgtgtgaaattttatttgtttatgtgattttttttttatttgtttttttttaagagaattttaatatttatttaaatgttgattttatttt

SEQ ID NO: 590 - DNA, 798 bp, Artificial Sequence
  chemically treated genomic DNA (Homo sapiens)
gggatttgagaaggtttttggggaggtgatatttgatttgagatttgaagaatgaggagtttggtaaagatttggggttgattagtgttttaggaataagtaatagtaagggtaagggttttgaggtaggatagagttattaatagtttaaggagggaggtttttgggttggtgagagaaagggaaggggtttagttgggtagtgggtaggggaggagtttggattttattttttgtgagatgtgttggttttggtggtagtgggggggtttgtagttttttgttataagggttgggggtgtggggatagttagagttaaaggttttttttttatagttttggtagttttagtttagaggtgttggtttggtggttggaagattgtattgtgggtatatttggggagtagttgttgagttagggttagagtgggttatgtggtatagggtaggattgttttggagtttataaggttaagatttttaggaggggtagtggagaatattttggatgagaatagtgtgttaatgaggaggaattgtgtattgtagatgtttaggtatatggttttttgtagttttatatagtttttgttttaggatagagtgtttgggtttaatgttattttttagttttgtgatttgaaataagttatttaatttttttgggttttatggttttagttgtgaaggggatatgatattattattatagttttataggttgttttttttttttttttttttttttttttttttttaattttttgagatgtagttttattttgttgtttaggt

SEQ ID NO: 591 - DNA, 798 bp, Artificial Sequence
  chemically treated genomic DNA (Homo sapiens)
gtttgggtaatagagtgagattgtgttttaaaaaattaaaaaaaaaaaaaaaaaaaaaaaaaaaaaaagaatagtttgtggaattgtggtagtaatattatgttttttttatagttgaggttatgagatttagagaggttgagtgatttgttttagattataaagttgggaggtggtattgaatttaggtattttgttttgaggtaggggttgtgtggggttgtagggggttgtgtgtttggatgtttatagtgtatagtttttttttgttgatgtattgtttttgtttagagtgttttttattgttttttttaggagttttggttttgtaggttttaggatggttttgttttgtgttatgtgatttattttggttttggtttggtagttgttttttagatgtgtttatagtgtaattttttagttgttaggttggtgtttttgggttgggattgttggagttgtgggggagagatttttggttttggttgtttttatatttttaatttttgtaataggagattataggtttttttattattattagaattagtatattttatggagaataagatttaaattttttttttgtttattatttaattgggtttttttttttttttttattagtttagaggtttttttttttaaattattaatagttttgttttgttttagggtttttgtttttgttgttatttgtttttagaatattgattagttttaggtttttgttagattttttattttttaagttttaggttaaatgttgtttttttagaggtttttttagatttt

SEQ ID NO: 592 - DNA, 945 bp, Artificial Sequence
  chemically treated genomic DNA (Homo sapiens)
gtgttattttaggtatgttttggttttttttttgataagtatgaagttttttatgataatttagtgatatggaggtagatttgtatgatgttttgggtttgtgatttgaggttttaaggattagagggtaaggtagtagtatttggtttttatttttttttggtttaattgagttttgggggtttgtgtattgttttgagtgtttggttgaatttgtatattttgttggattaattttgatattgttttttttttattttttttgatgaaggttgttttattgaattttgtttgttggggaagttttttattgttgagagtagtagttaaaaaagttgttagttatgtggttgggtttttatttttgtagaggtaggttgagttatagtttggtggtgtggatttaggtaggaattggttaatattttgaattttgagttgttatttgttttgtagtttgttgggatgtttagtttagataatatataaagttttttggatatgggataaatttaggtttatggaaagagtaggaaggttaaagtgtgtggtattttgggtaatgatgaaggtgtaattagggagttgatatgtttgttttaaagttaagaattttaggataatttgttatttagttgaagttagtgtagttgttataaaaaagtttggggataaaagtatgttttttatttgtttttttgtttttttgtatatttattttattttttaaagttgtagtaaaggttgttgatattggaaatgtttgatgatttttgttattttttttgtaaatgaataagagtttgggtttaggttaaattatggttttatgtgttgaaagtattagttttttgaaatagttttataaatgttgatattttatttagattaggagggttaggggaaaggtttaagtaagtattaggttttattatgaaagaatga

SEQ ID NO: 593 - DNA, 945 bp, Artificial Sequence
  chemically treated genomic DNA (Homo sapiens)
ttatttttttatgataaaatttagtatttgtttaggttttttttttgatttttttggtttgagtgaaatgttagtatttgtgaagttgttttaggaagttgatatttttagtatatagagttatggtttggtttgagtttagatttttatttatttatgaggagaatagtaaaaattattaaatatttttaatgttagtaatttttattatagttttagaaaatagagtaggtgtgtaagaagatagggaaataagtaaaaagtatgtttttgtttttaggtttttttgtagtaattatattggttttagttggataataaattgttttggaatttttggttttggagtaaatatgttagttttttggttatgtttttgttattgtttaaagtattatatattttaatttttttgttttttttataggtttgggtttgttttgtatttaggaaattttatatgttgtttaaattgagtattttagtaggttatgaggtagatggtagtttaggatttagaatgttgattaatttttatttggatttatattattaagttgtaatttagtttgtttttgtagaaataggagtttagttatgtggttaatagtttttttaattgttgtttttagtaatgaggaatttttttagtagataagatttagtaagatggtttttattgagagaaatgaaaaggaagtaatattaagattgatttaataggatatataggtttaattaaatatttaagataatatgtaagtttttaaagtttaattaagttaggaggagatgaggattaggtgttgttattttgttttttagtttttgggattttaggttataaatttaggatattatgtaggtttgtttttatgttattagattgttataagaggttttatatttgttaggaaggaagttaggatatgtttgaggtggtat

SEQ ID NO: 594 - DNA, 776 bp, Artificial Sequence
  chemically treated genomic DNA (Homo sapiens)
tatatatatgtatgtatatatttagtgttttagataagggaggttatgtttaaggtagtttatttttaaatttttatttaaagaaattttgaatgttttttgggtttttgttggattttagaatttttgtttttatttttagttattgtaaatgaattttggttttatgtttatagtaattagttttagttttggtattattttaaaggaaaaatgttaaattatatttgtttgaggtttttggaatggtttaaaagtttagggaaaagggtgtatagggtaggaaagtggggtgagtgaggtattatttttttagttagaaagtgtagttttgttaggagttttttggttagtgttatttttttttgtatattgtgttgttttaggttgtgtagaagttgtagtttttgtttagttaaaaggttttgggagggtaaaaagatagtatgagtggaaggttttagttaggtgtttttgagtttttttttgaggttgtattaggttgtgtattaggagttttttttggtattgatttagggtattgggttgggttattgttttgtgtttggtattgtggtaaaattgtttgtagtgagtagggatgtgtatagtagataggaattaaaggaaaggagaaggatagtgattttggggttatttgttttgagttgattttttatttttagttttttttatagtttttttagttttgggttttgaagaggtatttttttttttgtaaagttggtttatttttatttggattatttttaaaa

SEQ ID NO: 595 - DNA, 776 bp, Artificial Sequence
  chemically treated genomic DNA (Homo sapiens)
ttttgggagtggtttaaatagagataggttagttttgtaggagaaagggtgtttttttagagtttaagattgagagggttatgagggaggttgggggtgggaggttagtttagagtaagtggttttaaggttattgtttttttttttttttttgatttttgtttgttgtgtatatttttgtttattgtagatagttttgttatggtgttgagtgtaggatgatgatttggtttaatgttttggattgatgttgagggaaatttttggtgtatagtttggtatggttttgggaagggatttaggggtgtttagttggggttttttgtttatgttgtttttttgtttttttagaattttttggttaagtaaggattgtgatttttatgtggtttgagatggtgtaatgtgtaaaagaaggtggtattggttaagaagtttttggtaaaattgtgttttttggttgaggaggtaatgttttatttattttatttttttattttgtatatttttttttttaagtttttgaattattttagaggttttgggtaggtgtgatttaatattttttttttggaatgatgttagggttgggattaattgttgtgggtataggattaagatttatttgtagtagttaagggtgaggataagagttttagaatttagtagagatttagggaatatttaggatttttttggatgaagatttgagagtaggttgttttgagtatgattttttttgtttgaagtattaaatatatatatatatatatata

SEQ ID NO: 596 - DNA, 1597 bp, Artificial Sequence
  chemically treated genomic DNA (Homo sapiens)
tgatatttagattttatttaagattaattatgttagaatttttggggtgtgttttgggtatttatatatttttaaagttttttagttgttttagtgtgggtttaaggattgttttagttttagattaattttaagagttttaagatgaatatttggggaaaaggagaagttatgagttttagataagagaaataatttgtttaaggttatataaggtggtgatggtaaagtttgttttgaaatttaggttttttttttgattgtgggttaatttttttttgatgttgtatttttttttaaaaattagagtttaggtaggtaatgtttatagtattttattttaataatattggaaattggtatagttagggttattatagtggtggggtgggagttttgatggtgattaggggagttgtaagttttttgttttatttaaattttgggtagtaatttagaaaatttaattaaagggggagaaatggggatattttgtgttttttgttttttgttataatgagtgaaatatattaggttgtaaaaggaaatgttgtttgagatgtagttttgatgttttattgttaagttttatttattgatgtaaatgtaattgttggaaattggagtttttattaatatatatatttttatatatttggggttttttttgtttttttttttttttttgggtttgtttatttattttttagggttagttttgttgttttttgggtatgtttatgttaagtttggagttttgtattggttttatatttttttatggtagataagattttaatagaattttattgttttttagagtttagtaatgtattttggaaattaggtggttatatattaaagttattgtttttttttataaatgggtttttttaaagttagtgattatgggggttttgataagtttttatgaagttttattttatatgttattggtgtgttaaaaggtgtaattttaggtttatattgtttattgttaggggttgatatatttaagtagtttttttatgaattaggtagtttaggtattttttttatttttggtattgatagatgagtaaaaggaagttatttagatggtgttatatagggttttagtttatgtggtgaatgatttttaatgtttggtttaatttatttttaaatgaaatttgttattgattttggattaaaaggataaattttatagttgttattattgatagagttatagtgtttaagtgatattttttaaggaggggagggagggtggtttgtttgagttaaggggagggtatggagattttttagggagtttggtttagtagtaaggggtagtgtaagattttatgtttagagggaagtttaaaaatattattttttttaattgaaatatttgatgtgatgtttatttttgagttttatttatataatggaaatagtagtgatatttgttttatggtatttatatgattattagaggtatgttagttgtttttagggatgggaggttttttattttttgtagtatttttagaatgaaatgagtgataggtgttatttattttagtgaatttttagagattgttttttgggt

SEQ ID NO: 597 - DNA, 1597 bp, Artificial Sequence
  chemically treated genomic DNA (Homo sapiens)
gtttaggaaatagtttttaggaatttattagagtgggtgatgtttgttatttattttattttgggaatgttgtaggagatggaaagttttttatttttggaggtaattaatatgtttttagtggttgtgtggatgttatgaggtaaatattattgttatttttattatataaatgaggtttagaggtgagtattatgttaagtattttaattgggaaagatgatatttttaaatttttttttaagtatgggattttgtattgttttttattgttgagttaagttttttggagagtttttatattttttttttgatttagataggttatttttttttttttttttgagaggtgttatttgagtattgtggttttgttagtggtaatagttgtaagatttgtttttttaatttagaattaataataaattttatttaaaaataaattaaattaggtattggaaattatttattatgtgggttggagttttatatagtattatttaaatggtttttttttgtttatttattaatgttaagagtgggggaaatatttaggttgtttgatttatggagaaattatttaaatgtattagtttttaataatgagtaatgtaagtttggagttgtattttttagtatattaataatatgtggagtgaggttttatgagagtttattagagtttttatggttattggttttgagagagtttatttataagggggaataatggttttagtatgtagttgtttaatttttagaatgtattattgagttttgaggagtaatggaattttattaaagttttatttgttatgggagggtatgaaattggtgtggaattttaggtttggtatagatatgtttagaaagtagtagggttgattttaggaggtgggtgaataagtttagagggagaggggggagtaggaggggttttggatgtgtgaaaatatgtgtgttaataagagttttggtttttagtgattatgtttatattagtgaataaaatttggtaataaaatattggagttgtgttttagatagtatttttttttatagtttggtgtattttatttattataataggaggtagggagtgtgaggtgtttttatttttttttttttaattaaattttttaaattattgtttaagatttggataaagtgaaagatttatagtttttttaattgttattgaggtttttgttttattattgtggtggttttgattgtattggtttttaatattattaaagtgaaatattgtgggtattgtttgtttgggttttggtttttaaaaagagatgtagtattaggaagaaattggtttatggttaggaaagaggtttgggttttaggatgggttttgttattattattttgtgtgattttgggtaagttattttttttatttgagatttatgatttttttttttttttagatgtttattttgaggtttttagaattgatttggagttggggtagtttttggatttatattgggatgattggggagttttaagaatatatgggtgtttagggtatattttagagattttgatataattggttttaggtgagatttgggtatta

SEQ ID NO: 598 - DNA, 804 bp, Artificial Sequence
  chemically treated genomic DNA (Homo sapiens)
taaatattgttttagtgtttggtttagttttagtttaatgttgtattttgtatttgtttattgtaagatgtgaatgttttatttaatttttttggtagatgtatttttttttatatttttttaaaaattgaaagatgatttttttattttttatttagttttgaaagggaggtatagttaatgattttgtatgtattttagaaattgatttttttagattttaatagaagttatttaagtgtatagatgtttgttggttttatatggaggttttgttggttatgaaaaaatatttttttttaattttttgtttaatttgttttaagttggtaatgaaatttgtgaatttgtgttttttttttataggaaaaatagaattttgattttttttaaaaattagaatgtaataggataatggagaaattagttttaatagtatattttttgtttgttttagagtggtgatgtaaatatgatgatgttatgtttttggggtttttgaggtttttgttaaaagtatagtagtttaggtggatttgtgtttattgtatgtttttttggtggatttttgttgataaattgtatgtttgtttttttgaaatagtattatgaagttgttaatgtttttgtataaagattattttattttgtttgttttggggataaagattttgtattaattattttgtttttttttggagtgaagagttgaagaggtaataggaaatgtttatttattgagtttttattgggtattaattgtggatatttatagaaggggtttgagtaagtatttttttattg

SEQ ID NO: 599 - DNA, 804 bp, Artificial Sequence
  chemically treated genomic DNA (Homo sapiens)
taatgaggagatatttatttaaattttttttgtgggtgtttatagttggtatttagtaagaatttagtaaataagtattttttgttgtttttttagttttttgttttaggagagagtaaggtgattagtgtaaagtttttgtttttagggtaaatagaatggggtggtttttatgtaaagatattaataattttatgatgttattttagaagagtagatatataatttgttgatagaaatttattaaagaagtatgtggtaggtatgaatttatttaagttgttatgtttttggtagaaattttaaagattttaaaagtatagtattattgtgtttatattattgttttgaaatgaataagaaatgtgttattgagattgatttttttattattttgttgtgttttgatttttaaaagagattaaaattttattttttttgtagaaagggaatatagatttatagattttattattaatttaaaataaattgagtaaaaaattagaggggaatgtttttttatagttagtaaggtttttatgtaaaattagtaaatatttgtgtatttgagtagtttttgttaaggtttaaggaagttagtttttggaatatgtgtgagattattgattgtgttttttttttaaaattgaataagaaatgaagaaattattttttagtttttaaaaaagtgtaaaaaaggatatatttgttaagaaagttggatggggtatttatattttataataaatagatgtagaatgtagtattgagttggaattgggttagatattggggtagtgtttg

SEQ ID NO: 600 - DNA, 838 bp, Artificial Sequence
  chemically treated genomic DNA (Homo sapiens)
gggaattttggagttgggatgttttaaattgagtaaggggttaggtttttgaatttatgtatttattagatattggatatgggtttttgtttttttatttgtttaaaggtatgatgtggggtgaggtagttgattttggttgagggttgttagtagttatagggttaaaattgttttgggtggtatgatttattatataaaatttgttaaaaatttgggttgattttagttttggaaataatagtaggtaagatgtggtttgagtttgggtttatttagttgggtttggttttgttttgagggtttgttgtttgttgtgattatagtaggattagtgttttagattttgtttaaagtttggtggttattgtttgttttgtagtttattttttgtagttttttgaggttttagtgattatgttattgaaaattttgtttttattttgttaattttgtagtaaattataggtttggggaggtgtgggttttttttttaaataagatttaattttatttagttgtttttatttttattttatatatgggtttttttttttttattattttgggtttgggatttatggtttttttttgtaggtagttggtaattatggtaagttttttagggaggttttaggttggagtttttttagttttagattttagtatggttggttgtttttttttaggatgggagaggggagaggttagagatggtaggaatgggttttaggggttaaggttgagaggttatagtaattttagtaattatgagaattttaatattattatatttgatttttataataattattattttttttattatatagatggg

SEQ ID NO: 601 - DNA, 838 bp, Artificial Sequence
  chemically treated genomic DNA (Homo sapiens)
tttatttatataatgggggaaatgatggttattgtgagggttagatgtggtagtgttgaagtttttatgattgttggggttattatgattttttggttttggtttttgaagtttatttttgttatttttggtttttttttttttttattttaggagaaagtggttggttgtgttggagtttggggttaaggaggttttagtttgaagtttttttaaggagtttgttatggttattagttgtttgtaaagagaggttataaattttgagtttggggtggtgggagggagggaatttgtgtgtggggtgggaatgggggtagttaagtggaattgaattttgtttaaggaggaggtttatgtttttttaggtttgtaatttattgtgaggttgataagatgaaagtggaatttttagtggtataattgttgggattttggggagttgtgggagatgagttgtgaggtaggtggtggttgttaggttttaagtaagatttggggtattgattttgttgtgattatagtaagtgatagatttttggagtggggttaggtttagttggataagtttaggtttaggttatgttttgtttgttattgtttttagggttgaggttggtttgagtttttagtaggttttatgtgatggattatattatttaggatggttttgattttgtagttgttgatagtttttagttaaagttagttgttttattttatgttatgtttttaggtgggtgaggggatagaaatttatgtttaatatttggtagatatatggatttaaaggtttggttttttgtttgatttggagtattttagttttagagttttt

SEQ ID NO: 602 - DNA, 938 bp, Artificial Sequence
  chemically treated genomic DNA (Homo sapiens)
tatttttattgtatagatgaagaagatgaggtataataatttgtgtaagtttatatagttaatgtgttggagttaggttttgaattttgatagtttgattttagattattttttttttttagtatttatgttttggtgttttttgtggtatatttagaagatggtttgtatgtgtatgtgtttatttttgtgtgtgtgtatgtatgtatgtttatgtaggattgggaatgtaggggagttagagtttagttaggaaggagagaggaaatatgatttttttgttgtatgtgggtattgtaattttagttaggtaaagtgttggtttgttgtagtttatttttatgtttttatttagaagttttaatattagagttgatggtagaaaatgtgtagtaaaatgtggggaggttgttgggtaatggtttttgtaaagtgttaattgtttattgagattgtagattttgtttatgttttaggatttgaattattgataggttttaatttattttgggtttataaagtgggttttttttttaaataggtttttaattagttatgtttttttgggtttgttaagaagttttagttgataagtatgtttgttgttttaattttttgaagttggttgtgtggtttgattttggtttgttttaaggaaatttttatgtataatggttttggatgaaaatttatgagaattaagtgttgattttgtgttgggtttttagttgggtgttttatatgtattgtttttgatttttattgtttagagaagtaggtagtatttttttaaggatattttaattttagagaagttgaattaattgtttaagtgattattatgattatattttagattgttatgggttaaattgtgtttttttaaatttatgttttgaagttttagtttttagtattttggaatgtgattgtatttg

SEQ ID NO: 603 - DNA, 938 bp, Artificial Sequence
  chemically treated genomic DNA (Homo sapiens)
taaatatggttatattttaaggtattgagagttagagttttaaagtatgaatttgagggaatatagtttagtttgtaatagtttgaagtataattatagtggttatttaaataattaatttaatttttttgaggttaggatgtttttgaagagatattatttgtttttttaagtggtaaggattagagataatgtatgtaaaatatttagttgggagtttagtatggagttagtatttgatttttatggatttttatttaagattattgtgtatggaagtttttttaaggtaagttagaattagattatatgattagttttaaagggttaaggtagtaaatatatttattgattggagttttttggtaggtttagggaagtgtgattgattggaagtttgtttagaggaggagtttgttttgtgggtttgaaataaattagaatttgttaatagtttagattttggagtatggataaagtttgtagttttaataggtaattaatattttataggggttattatttagtggtttttttgtattttattgtatattttttgttattagttttggtattgaagtttttaaataaaaatataaaaatgagttataatagattagtattttgtttggttggagttatggtgtttatatgtaataaagagattatatttttttttttttttttaattggattttaatttttttgtatttttagttttgtataaatatgtatgtatgtatatatatagaaatgagtatatgtatatgtaggttattttttgagtgtgttataggaggtattagagtatggatattgggaggaagaggtggtttggagttagattgttggagtttaaagtttgattttggtatattaattgtgtgggtttgtataaattgttatgttttattttttttatttgtataatgggagta

SEQ ID NO: 604 - DNA, 816 bp, Artificial Sequence
  chemically treated genomic DNA (Homo sapiens)
taaattaggaaggtattaattggtgtatgttttgtaagtgttgttagaattagagttattgggttggttgataggagtttagagggtagtttttttttttttttgagtttgtttttttagttattttttttaaaagttgttgggttgatgtttgtattttggttggttttgatgttagttttgatggggttattttggaatttgtttgtataggttgttgagggtgtgagaatttaagtagataatttttagttttattttttttgttgtgttaggttgttagtgttagttgaggaggtttttttttgtttttgtttgttttttttgattgttatgtaatgtttggtagtaggaggtaaatttttttttaatttttaggtttgttatagtgtatgaattttattgtggggagttatagtgattgagtttagtagttaggttttatgttgagtgttataaattaggtttattattagttttttttggtagatgttatagttaagaatttgtttattgtttgtgagatttagttgtttttgtatattgttaaattagggttgatagatttattggggatttaggggatttttatgatattttggttgggtgttgttaggaattttattttgagagagtaggaggtgatatagtttttggtaaggtattttagatttgagattttatagtttgatgtatggggagtagaattagggtatgattatttgtaggttatttggattttttggtatggtggttttttgtgtgtttggttgtatatgtaagaatttttaggggatttgttaaaaaatatatatt

SEQ ID NO: 605 - DNA, 816 bp, Artificial Sequence
  chemically treated genomic DNA (Homo sapiens)
gatgtatattttttaataagttttttagaggtttttatgtgtatagttaggtatataagaggttattatattaggaaatttaggtagtttgtaggtgattatgttttgattttgttttttgtatattaggttgtgagattttaggtttgagatgttttgttaagggttgtgttattttttgtttttttagaataagatttttggtaatatttagttagagtgttatgaagattttttaaatttttggtggatttgttagttttggtttaatagtatgtagaggtggttgggttttgtaagtagtgggtaggtttttggttatggtatttgttaggagaagttggtaataggtttgatttatgatatttagtatgggatttggttgttgagtttaattattgtggttttttatggtggggtttatgtgttgtaatgggtttggaaattggagaggaatttattttttgttgttgaatattatataataattaagggaaataagtagaggtaggagggggtttttttagttggtattggtagtttggtatagtaaaggaggtaggattgggagttgtttgtttgggtttttatgtttttgatagtttgtgtaagtaggttttagggtggttttgttagagttggtattagagttagttaagatataagtattagtttagtaatttttagaagggatggttggggagataggtttagaggaggaaaagggttgttttttaaatttttgttagttagtttagtagttttaattttaatagtatttatagaatatgtattaattaatatttttttgatttg

SEQ ID NO: 606 - DNA, 1072 bp, Artificial Sequence
  chemically treated genomic DNA (Homo sapiens)
gggttatgtatttagtatagttattggtatagaataaatatttattatttgttaaatgaatgaatgaatgtgtatgtgtgtttgtgtgtgtgtgtgtgtatgtatgtttatatgtgagtgtgggtgtttgggtttttgagagtggggttattaatgtttgagtgggtgtgagggttttatatttgattatgtgtttaggtttttgtaagtttagaatttgattatgtagagataatgaatttttttgtatttttttgatttttatttgtgtttttatttattttttttagggttttttttgtttggggagttattttttttattagtttgtagttagtttttatttggatttttatttttgtgtgttttttggaggatatagatggtaggagtatggaattggaagtatttggtaatgaagtagtaatttattttgtaatttttttgtatttattgtaataatgtttgttttgatgggttttgtgtgttgaatgtagtttttaatgtgtaatttagtgggaattgtggtgttttgtggtttttattatgtttatttattgttaagtgttgttgagaatttttttatttgggatgagggaattatttgttttagtaattgatttttgaaattttttttgggttggggtatttgtgaagtttttggtgatgtgttattgtttttggtttgtgttttggatatttatgtgttttgttgaagtatgtaaattgttataatgtgaggaaatgtgatataaaaataattttggggtaataaatattagaggagttttaagattggtatagttttttttggttttgttttggggttagggagtattttttgttggtagtgttggtagtaaaggtttgagatgttttggaatgattattgtttatttttttgtagttgtttagttggtttgttggagaagggtgggtgagattttttttaggaaggtaggaatagttggatgtggattgttttttttttttgtagttggttaatagaattataggttttgttttggttaaagggaatttgttatttttgattatttaggtggttgtatat

SEQ ID NO: 607 - DNA, 1072 bp, Artificial Sequence
  chemically treated genomic DNA (Homo sapiens)
gtgtgtagttatttgaatagttaggggtggtagattttttttagttagagtaaagtttgtggttttgttgattagttgtgaaaaaaggagatggtttatatttagttgtttttgtttttttaggaggggttttatttgtttttttttagtaggttagttgggtagttgtaggaggatgggtagtggttattttagggtattttaggtttttgttgttaatattgttggtaagagatgttttttagttttaaggtaggattaggaaaggttgtgttaattttggagtttttttggtgtttgttgttttggagttatttttatattatatttttttatattatggtaatttatatattttagtagagtatatgagtgtttaaaatataaattaggaataataatatattattaggagttttgtagatattttaatttagagaaggttttggaaattagttgttaaaataagtggtttttttattttgagtgggagaatttttagtaatatttgataataagtggatgtgatgaggattataaagtattataatttttgttggattgtatattgaaagttgtatttagtgtgtggagtttattagagtaggtattgttgtgatgaatatgaagggattgtggaatgaattgttgttttattgttaagtgtttttgattttgtgtttttgttatttgtgttttttggaagatatatagaagtaaaggtttaaatgggggttggttataggttggtgaggagggtagttttttaggtaaggggagttttaaggaagatgagtgggagtataggtaggggttagaggagtgtaagaaaatttattgtttttgtatggttaagttttagatttatagaaatttaaatatataattagatgtaggatttttatatttatttaagtattaataattttatttttagaaatttaaatatttgtatttatatatggatatgtatgtatatatatatatatagatatgtatatatatttatttatttatttaataaatagtgagtgtttattttgtattagtgattatgttaagtatatggttt

SEQ ID NO: 608 - DNA, 1039 bp, Artificial Sequence
  chemically treated genomic DNA (Homo sapiens)
tatttgttagtttttgttatttttttagaaaagtttattgtaatttgtgtgtgtgtgtgtgtgtgtgtgtgtgtatattatagttatatgtatggaatattttttttgagttttttttaaagttttttagagggtaggatttttttgtagttgggtgtgtggtagataatagtttagtgtttgagtttttaagtgttgtgagggatgttagagttttaattgagaattatttttttggtgttttattttgttttgtttggttttttttatttagtttttggagggttttttttagtttagtttgaaagagtatttagttttttagaggaggggtagtattttgttgtgatgtgagtttaattgtttttagattgagtgtttttgtgggataatagttttagttggtgttttttgaattaatatgtttattgaaggattgaagatggtgattaggtttgatagtattagttttggtgggatagttgtagtgttatagagttgtatgggattgtaaggagatttatttgtgtggaatggagatatatggttggaattatttgtttttttttttttgtaattaaaatatttgggagtagtaaagggttggaaaatgaggagaaagtagtgaatatttttttttgtttagttttgaataatttagttatggggttggggtattagggggtataagttatttggtataggttggtttaggagttgtaatggtttaaaggttaggtaatttgtaaatgtgatttgggggttttgtttttggtgttttattttatttttttttgaaagtatgtagaattggtttttttttgaagttgtttttaaaatgttttataaaaaaaaaaaaaaaggttaaatgataatgaaagtgtagggtttattgttggagtttgatataggttatgatttttatttaagagttatatttttaatggatttaattaagttagtattaagatttttagtaaagatattaagtttggaaggaatggtgtttaagggtgttttttattttttttagaaggat

SEQ ID NO: 609 - DNA, 1039 bp, Artificial Sequence
  chemically treated genomic DNA (Homo sapiens)
gtttttttaagaaaagtaaaggatatttttaggtattattttttttaagtttgatgtttttgttaagggttttgatattggtttgattggatttattggaggtatagtttttagatgaaggttatagtttgtattaggttttaataatgagttttatatttttgttgttatttagtttttttttttttttttgtaaaatattttagaaatagttttagaaagaaattaattttatatgtttttaggaaaaaataaaataaagtattaaaaataaaatttttaagttatatttataagttatttggtttttgggttattgtaatttttggattagtttatattaggtggtttgtattttttgatgttttagttttatggttggattatttaaagttgagtaggaagagatgtttattgttttttttttattttttagttttttgttgtttttagatgttttaattatagaggaaagggagtagatgattttggttatatgtttttattttatataaataaatttttttgtggttttatgtagttttgtggtattgtgattgttttattgaaattgatgttgttgggtttaattattatttttaattttttagtgagtatgttaatttagggaatattggttgggattgttgttttatggaaatgtttaatttagaaataattagatttatattatagtaagatgttgttttttttttggggagttgggtgtttttttagattgagttgaaaaaagttttttaggaattgagtgggaagagttaggtagggtagggtgagatattaaggaaataatttttggttgagattttgatattttttatagtatttagaaatttaggtattgggttattatttattgtatgtttagttgtaaaaaggttttgttttttgaggaattttgagaagaatttagaggggatgttttatatatgtagttgtagtatatatatatatatatatatatatatatataaattatagtgagtttttttgaggaaatagtaaaagttggtagata

SEQ ID NO: 610 - DNA, 1246 bp, Artificial Sequence
  chemically treated genomic DNA (Homo sapiens)
tttatgtgggaataataaaatgtgttttagatgtttgaaaaggttagtgttgaagggttaggggtatggggggagattttaggaggtgagggatattatttatttaatataagtgtgtttttttttttttttttgatttttttagtttgtaagattttggtttgtagttgttagggaatatgttaaagtttaggtttaggaggggttagggtaggtgaaaggggaagaggtatttggattaattattggttgtttttaaatgtttaaagttggtatttatatatttgattttttttatagttttttttttttagatttaatgtttaggtttttttgattttaaaattgggttatttgaatgttaaatttttgataattttttaatagaggtgtttattaatttgtgttaaattagagtttagtgtttttggaaatatatgtgatatttatatgaatattaaatgtttttattaggtatagtatttatatgatgaatattaaatgtagagtttaatgtagggatatagattttgttttgaggatttgttaatatatttttgtgtttttttagtggtattggttagttttgtttgttgtttatttttaggtgatgagatgtggtaattgtggtattggttgaaataaataaatggtattttaattattaagtttagagatggagtagtaaaggaggttatagttgattatttaggagttagtaaaaggatgtttatttagtatgtaagatgatttttaaatattttataaaaggtgataattttttttgattaaagaatatattatttataagtgattttaatgttttttttttttttttttttattgttatttttttgttttttatttttattgtatgttgtagtatttgtttagtgatgaagttttttgtaataaataatttataaagtaatttataagtatattatttttagtaataagataagatttggaagaaagtgttttattgatatatatatatatatatatatatgttttttggtttataagtagtaagttattagaatattaataattaaggtttatgggtttggggtgaagggtgttataagttatagtgttggagtttttatatataagttatgtaaagtgtttgaagtgtatttgtataataaataagagaaaatttattaaaaatagtttttttttttaatttttgtatatagttgttatggttttgtttatatggtgtgatattaagtgaaga

SEQ ID NO: 611 - DNA, 1246 bp, Artificial Sequence
  chemically treated genomic DNA (Homo sapiens)
tttttatttagtattatgttatgtggataaagttatggtagttgtgtataaggattaagagaaaaggttgtttttagtgagtttttttttatttattatgtaaatatattttagatattttatatggtttatgtataagggttttagtattatggtttataatattttttattttaagtttatggattttagttattggtgttttgatagtttgttatttataagttaaggggtgtgtgtgtgtgtgtgtgtgtgtattagtaaaatatttttttttaggttttattttattgttaagaataatgtatttgtaaattgttttataaattatttattatgaggggttttattattgaataagtgttataatatatagtgaaaatggggggtaggaggatggtagtgaaggagggagagaagaaggtattggaattatttataaataatatattttttggttaaagaaagttattgttttttatgaagtgtttggaagttgttttgtatattaagtgggtatttttttgttgatttttgagtgattagttatagttttttttgttgttttatttttgaatttggtgattaggatgttatttatttattttagttaatgttataattgttatattttattatttggaaataaatagtaaatagggttgattggtattgttgaggaaatgtaaagatgtgttggtaagtttttgaagtgaaatttgtgtttttgtgttgggttttgtatttggtatttattatgtaagtgttgtgtttaatgaaggtatttggtatttatgtgggtgttatatgtatttttagggatgttgggttttaatttagtataggttaatggatatttttattaaagggttattgaaagtttgatatttaaataatttagttttaaaattagagaaatttagatgttaaatttgaaggagagaaattgtgagagaagttaagtatataaatgttaattttagatatttgagagtaattaatggttgatttaagtgttttttttttttttatttattttgattttttttgggtttaggttttggtatattttttgatagttgtaggttgaaattttgtagattggggaggttagggagagaaggaagggtatgtttgtattaaatgaatggtgttttttattttttaaaatttttttttatgtttttggttttttagtattaatttttttaggtatttaaggtatattttattatttttatataaa

SEQ ID NO: 612 - DNA, 976 bp, Artificial Sequence
  chemically treated genomic DNA (Homo sapiens)
tttgtgtattttttatttatttttttttattaataatattatatataattatagtatagtgttaaaatgaggaaattaatatagtattatattgttaatttgattatagaatttgtttagattttattaggatttatgtgtatttttgtgtgtatatgtatgtgtgtgtgtgtggtttatttttatttttaaggattgtttttttttataatttttatgttaaggttatggagttttagttattgttaggtagaggtggagttatatatgattgtgtttttatataattatattttttttatttaagaatatttattttatatggagaaatagattatgtttattaattattttagaaagtatgtaattttattagattaagttttgtttttgggtattgattaatagagggaatggttttttagtgatttagaatttttatgatatggtttgtggagattatattttggggttagttgtttaaatgtattgttggaattttaggtagaaatgtgtaatggtatgttaagggttgttgagttgttatagtttaagtagggttatttgtggtttttaaagagaggttgtaattttttatggtatttataaattttagtttttaagagttagggagaaaatgtaattatgttgtttgattgagttaattttttttttattttgttttttttttatttttattattattttatttttaattttgagtagtttgtatagttgttttagggtaaagaatatggtatgagatattatttttagtattattttagggttagataaaatggttaggtattttttttgatttaatgagggaaagttttagaaagttgttgataaagtagaaattttttaatttgaggttttgaatatttattgttttttttgagtaagatagaaaagttttatttattggttggggtatttttaatggtagttgtaggttagggatagttatgtt

SEQ ID NO: 613 - DNA, 976 bp, Artificial Sequence
  chemically treated genomic DNA (Homo sapiens)
gatatgattgtttttggtttatagttgttattaaaagtattttagttaataagtaaaatttttttgttttgtttagaaagaataatgaatgtttaggattttaaattagaaagtttttattttgttaataattttttgggatttttttttattgaattagaagggatgtttggttattttatttggttttgaggtaatgttaaaggtaatgttttatgttatgttttttgttttgggatagttatgtagattatttagggttgggggtagagtgatggtgggagtgggagaggggtaaggtggggaaagagttagtttggttaaatagtatggttgtattttttttttgatttttgaaggttgagatttgtggatattataaaaggttatagtttttttttggaagttataaataattttgtttggattatgatagtttagtagtttttggtatgttattatatatttttgtttggaattttagtagtgtatttgagtagttggttttaaagtatggtttttatagattgtgttgtaggggttttgggttgttggggagttgttttttttattagttaatgtttagagatagagtttgatttaatgaaattatatattttttggagtgattaataaatatggtttatttttttatatgggatgaatatttttaaatgaaaggaatgtgattatgtgggggtgtagttatgtatagttttatttttgtttagtaatggttaaaattttatgattttggtatagagattgtaaggaaagatagtttttaaaaatagaggtaaattatatatatatgtatatatgtatgtataagagtatatgtaagttttggtaaaatttggataaattttgtaattaagttaatagtatgatattatgttaatttttttattttgatattgtattgtggttatgtgtgatattattaatggaggaaggtgagtaaagggtatatagg

SEQ ID NO: 614 - DNA, 1061 bp, Artificial Sequence
  chemically treated genomic DNA (Homo sapiens)
tgtgtgattttttatgggggatatagaagggggagtttagttggggattttgagttttagttgtttttggaatatgattgtatagattgtggtttgaaaggaagtggtagagaagaaaaatttaaaatggttgttaatagtttgttttttggaggttttagagttttgggggttatggatgtatggttatgtagggtgagtaattgtgatgagagaatagaaaggaaatttaaataagagaatttaaagtagagatgagttaaaaattagtaatatgaattattataagtgggtagttatgtttggtaggagatttaggtaaagtgagggtaaattttttagtttttttttgtggaaaatttataaagtttagattggagaaaatgtattgatagttttgaagttggtattttaagttggaatgtttttttaaagtagtatataatggtataatttaataattttgattattgtggaaaaatgttatgtgttaatagtgattttttataattttgtttagaaaatttgaaagaaatgtaaaaaatggatttgtagttttggtagtaggtagagaaatagtagtagagggttgtaggttagtaattgatgttttaaatattattgagtgttttgtttgtaattttaggggagaatgataataattaaaagtataaatttataagttatttttgaggaggaaaatgttgaatgtatttaaagtgaagggggtttgttgaaatgtttaagtttttttagtgagtttttagatatgtaatgattagttttatgtttatagagtgattttttttttaaatgttttaaagtgttataaaatggaatagattattaatttatgagattttttgggagttagtgatgaaattataattatatgatatttttatatgtttagattttatttgattgtattggtttttgttataaatagtatagtatattgtttaaaaggatgaaatgaaatttttttttttttttttaattgatttggggttttattatgaggtagatttgagtttgagtttgtatttattttttttagt

SEQ ID NO: 615 - DNA, 1061 bp, Artificial Sequence
  chemically treated genomic DNA (Homo sapiens)
attaaaaagggtggatgtagatttaagtttaaatttgttttgtagtaaagttttaagttagttgggagaaggaggaaaggttttattttatttttttaaatagtgtattgtgttgtttgtaataaaggttggtataattaagtaaggtttgaatatgtgggaatgttatatggttatagttttattattggtttttagggaattttatgggttaataatttattttattttgtggtattttggaatatttgaggagaaagttattttgtgaatataaaattaattattgtatatttgaaagtttgttggaaaaatttaagtattttaataaattttttttattttaagtgtatttagtatttttttttttagaaatgatttgtaagtttgtgtttttaattattattatttttttttgaaattataggtaaagtatttagtgatatttgaaatattaattattggtttgtagttttttgttattgtttttttgtttgttgttagggttgtaaatttattttttgtattttttttagattttttgaataaaattatggaaaattgttgttggtatatggtatttttttataatggttagagttattgaattgtgttgttatgtgttattttgagaagatattttaatttaaaatgttagttttaaaattattagtatgttttttttaatttgagttttataaattttttataggaaaaggttaagaagtttgtttttgttttgtttggattttttgttgagtgtaattatttatttgtgatggtttgtgttgttgatttttagtttatttttgttttgagtttttttatttggattttttttttgtttttttattataattgtttattttgtgtggttatgtatttatggtttttggaattttgaggtttttagagggtaaattattggtagttattttgaattttttttttttgttatttttttttaggttgtgatttgtgtagttatgttttaaaggtaattggaatttaaaatttttgattagatttttttttttgtattttttatggaggattatata

SEQ ID NO: 616 - DNA, 1052 bp, Artificial Sequence
  chemically treated genomic DNA (Homo sapiens)
attgattttatagaattaggtaagtttttataagggtagatattagagttaattttttttaggatagttttggggaatatttggtttttgggttttagatatttggtttttgaattaaggaggttttattaagaaggttagaaagggggtattgttggtaattatggtagtgagatggatgggtaatatggggttttttgggttgggtgtagtttttattttgttttgttttgtagaggagtttggttttgttgggtatagtttattatggtgagtatgtaaataattatagtataggggttattttagttagtttaggaaaggtataagagtatgataaatatatgtaatttgtaaattggttagttttttgtaataatttagaggttttagttaggagtaatagaaattttttaattattgatgtttaaggttggtattgttgttggttgaatattttatgtataaatgaatttttattaggttatttgttgtttttgatgaggtttttgtgggttttattgtttggtgtttagtagggttttgttaatgggttttatgatggatgatgtattgttttgtagtttaaataatgtagtgtggaataggtttagtgttggtgtattttatttatatattaattgagtggttattttgaatatgaagaaatatgagaggggaagtggttggtattgaatattttatggttatgagttttataggaagtgaatgtttttagtttagagttaggtttggttatgtgtgtaagagagaattggtattaatagtttaggagatgaggtaagaataattttttaagttaggaggggagttattaattggaattgatgagttttttattatttggatatagtttgttggtgtttttttaagttagtaaaatatttgttttttgtttgtattttttggtttttagaaatttttgtagagaagggagtttgtttaagttattatatgttgattttttaagttatgtggatggaatagaagttagtatgtagtggaaaatagtatagtttattgagaaaggg

SEQ ID NO: 617 - DNA, 1052 bp, Artificial Sequence
  chemically treated genomic DNA (Homo sapiens)
tttttttttgatggattatgttgttttttattgtatattaatttttgttttatttatatgatttggaaagttagtgtgtgatggtttgaataaatttttttttttgtagaagtttttgggaattagaaggtataggtaggaagtagatattttgttgatttgaaaaagtattagtaggttgtgtttagatgatagggggtttattaattttagttagtggttttttttttggtttgggggattatttttgttttgttttttggattattaatgttagtttttttttatatatatggttagatttaattttgggttggggatatttgttttttgtggggtttatggttatgaaatatttagtgttagttatttttttttttatatttttttatatttagagtggttatttaattgatatgtaaataaagtgtattagtattgagtttgttttatattgtattatttaagttgtaaaatgatgtattatttgttatggggtttattggtgggattttgttgggtgttgggtaataaagtttataagagttttattagaagtagtgggtggtttagtggaagtttatttatgtatgaaatatttagttagtaatagtgttagttttaaatattagtaattggggggtttttattgtttttaattagagtttttaaattattgtaaaagattggttaatttataaattatatatatttgttatgtttttgtattttttttgaattaattgaaatggtttttgtgttgtggttgtttgtatatttgttatggtgagttgtgtttagtagagttgggtttttttgtagagtagaatagggtggaagttgtatttagtttaggaagttttgtgttgtttatttattttattgttgtgattgttggtagtgttttttttttggtttttttagtggggtttttttggtttagaggttaagtgtttgaagtttaggggttaaatattttttagggttattttgagaagggttggttttgatgtttgtttttgtggggatttgtttagttttgtgaggttaat

SEQ ID NO: 618 - DNA, 787 bp, Artificial Sequence
  chemically treated genomic DNA (Homo sapiens)
tttgaaattttattttaatatgaaaaaaaaaaaaataaatttaaaattaaaaattaaaataatatggggaatatttttttttaaaaattattatattttttatgtaatgtttgtttgttatgaattattgtataaattaagttttgtttaatgtattaaggttataaaattaatttggttaatatgttgattattatatagtggttttgttttttatagtaattttgatattatttttttaaggtagtaatagaagggttttttttatttattttttatgtgtttttgatattattttgtgtttttggatttttttattgtatgttttttagaaataaattaagtttgaataagttgttttagttaatgaagtgtgtttttggttttttttttgtggtttagaattatttggtaaaatattaattgttttaggatgtatttttttttagttttgaaatattgtaatattaagttattataaataaagagtattgagataataatatataagaatgtgtataaatggaaattattgtaatttttttttaaattaaggatgtgtggatgttttatgaataaatatttaggatatttggataaatatatattatgtgtttatatagataaaaatagaaaggagtatttttttttattttatttttttattttaagttatataagttttttgtagggtataagtttagggtaattattgtttagaaatgtaaattatgtaatttaaaatgatttaagtttttaaatattttttatttaagttttatatttt

SEQ ID NO: 619 - DNA, 787 bp, Artificial Sequence
  chemically treated genomic DNA (Homo sapiens)
gggatgtaggatttaggtggggagtgtttgagggtttgagttattttgagttgtatggtttatatttttgagtagtgattgttttgggtttgtgttttgtgagaaatttatgtgatttggggtgggggagtgaggtaggaaggaatgtttttttttgtttttatttatgtgaatatatagtatatatttatttagatattttaaatgtttatttatgaggtgtttatatgtttttaatttaaaaaaggattatagtagtttttatttatatatgtttttgtgtgttgttattttaatgttttttatttgtggtaatttagtattgtaatattttaaaattaagagaaaatgtattttaaaataattggtattttgttggataattttgaattatggagaaggagttaaaagtgtattttattagttggaataatttatttgagtttaatttgtttttaagagatatatagtggaaaaatttagaagtgtaaaatagtattaaagatatatagaaaatgaatgaaaagggtttttttgttgttgttttggaaagatggtattaaagttgttgtagaggatagagttattatgtaatgattaatatattaattaagttggttttgtgattttgatatattgagtggggtttgatttgtgtagtggtttatgataggtaaatattgtatgggaagtgtggtaatttttggaaaaaaatgttttttatgttgttttggtttttggttttgagtttgttttttttttttttatattgaagtaagattttaga

SEQ ID NO: 620 - DNA, 871 bp, Artificial Sequence
  chemically treated genomic DNA (Homo sapiens)
gaggaaattgaggtttaggttgttttgtgttgttgtttagaatttagggaagtttaggatgtttttttttaagttatgttggggtgtttaggtttagtggagaagtggggtatggttatatgaatgatatgtagttggtagtatatagtaggtatataagtgtttgttgaatgaatatttatatgaaattggaaaggagttttttaaagatggagttagtaggagatagtgaagttgtttgtgtgggttgggggagtttgtttttgtttttgttttagtttatttttggtttggtttgagtattttgagaagtgggtttaggagaggtttttggatttttgggtttttggatagttagggtgagggtgttttgttatatttttaggagagagtatatttaaaataatttttttttttaaaaatttagtgttaatggattttagatgtttgtttgttatataatggggtttgttttaatagtgttaatttttagatgtgtagtttggaattaagaagtttattggttttttgaggatattgtgagttaagttgagagttgtttgggggagagatatggatgtgtagaattagggatgggagaggagttagggtgtttttttgttgtttattgggttgtttatttgttttgtagttgtttttagattgaaagataggaagggtgtttttgttttttttttttttagttttgattttgagtaggggtttttaggggataattatagataggtagtttggggagggtttgttttggaatttggtttaagtaggtttagttggatgagtttggagaagtttttggtttttttgtttttgaatggaaaatagaataatgttattttatttagagagg

SEQ ID NO: 621 - DNA, 871 bp, Artificial Sequence
  chemically treated genomic DNA (Homo sapiens)
tttttttgggtagaatggtgttattttattttttatttaaagatagggaggttaaggatttttttaggtttatttagttaggtttgtttgaattagattttaaagtagattttttttaagttgtttgtttatgattgttttttgggagtttttgtttagagttaggattgaaaaaaaaggaagtgggaatattttttttgttttttagtttggggatagttgtagggtaggtgagtagtttagtgggtagtaagaaggtattttggttttttttttatttttggttttgtatgtttatgttttttttttgggtagtttttagtttggtttatagtgtttttagggggttaatgggttttttgattttaggttgtatatttggaagttgatgttattaaaataaattttattatataataaatggatatttggaatttgttagtattgagtttttagaaaaagaaattgttttggatgtgtttttttttaagaatgtggtaaagtgtttttattttggttgtttaggaatttagggatttaggggttttttttgggtttattttttaaggtatttaggttaggttagaggtgggttggggtagagatagagatagatttttttggtttgtataggtaattttattgttttttgttggttttatttttggaaggtttttttttaattttatgtaaatatttatttagtaaatatttgtgtgtttattatgtgttgttaattgtatattatttatatggttatgttttgtttttttattgagtttaagtattttaatatggtttaagaaaaaatattttggatttttttggattttaaatagtaatgtaaaatagtttgagttttagttttttt

SEQ ID NO: 622 - DNA, 866 bp, Artificial Sequence
  chemically treated genomic DNA (Homo sapiens)
aatatattattagattatgatatttttttattataatagtttaaggtggtgtttttgttatgatagtttgtttattttttttttagagtgtatgttaaaataattttttattgtaattagtggattttttagtagttttttttttttttttatttttttttggagtttggttttttataataagtttttaggtgtatttggagttgttatttgtaaatgtggtaggatttttttttattagatttttgtttttgtttttttttttgaagagtaaatatgttgtattagaaggaattagtggtttattgttattggtaaagttgaggtagtgggaggattattttttttttgggtttagtaatttttttagtggttagtagatagtagtataatggttagttagtgtgaaattgtgtaaattgttttataaataatttgtaatgtataggtaatagggagaggttatagtttatggataaatgattttttgttattttggggtattaaattagggataatttggattttattatggggatttattaattattatgggttttttgtatgtaagtttgttgggatttaggtttgtttggtgttttttgtggtattatgatgggggtaaaatatttttaagtagggttatgagaaagagaatgtaagtatttttaataaattagttaggggtgaattttgtaggagttaagtattttttttgtggaatttgttttttgaagaaatttttttgaagtgtagagaaaaatataataattttaataattaatatgtattgggtatttattttgtgttaggtattgtgttaagtttttttttttttttttttttttttgagatggagttttgtt

SEQ ID NO: 623 - DNA, 866 bp, Artificial Sequence
  chemically treated genomic DNA (Homo sapiens)
agtgagattttattttaaaaaaaaaaaaaaaaaaaaaaagatttagtatagtgtttggtatagagtaaatgtttaatatatgttaattgttaaggttattatgtttttttttgtgttttaaagagatttttttagaaagtaagttttatagagaaaatatttggtttttatagggtttatttttggttggtttgttaaaggtatttatatttttttttttatggttttgtttggaagtgttttgtttttattatgatgttataagaagtattaagtaggtttgagttttagtaggtttgtgtgtgggaaatttatagtagttaatgaatttttatggtgaggtttggattatttttggtttaatattttgaaatggtagggagttatttatttatgagttatggtttttttttgttgtttgtgtattatgagttatttatgaggtaatttgtatagttttatattggttggttattatgttgttgtttgttaattattaggagggttgttgaatttagagaaaaaatggtttttttattgttttggttttgttagtgataatgagttattgattttttttagtgtagtatgtttgttttttagggaagagaatagggataaaagtttgatgaagagaaattttgttatatttataggtagtaattttaaatgtatttgggggtttgttatgaaaggttggattttagaaaaaaataaaaaaaaaagagagattattgggaaatttattggttgtagtgagaggttattttaatatgtattttgaaaggagagtaggtaggttgttatgatagggatattattttggattattgtgatgagaaaatgttataatttggtgatgtgtt

SEQ ID NO: 624 - DNA, 716 bp, Artificial Sequence
  chemically treated genomic DNA (Homo sapiens)
ttaagttttttaagttttttatgttgttttattttttttagtattgttgatttaattttagggggattttttttttgatgtttttatgttttgttttttttttttgtagattttttggtagtttttttgtgtagaatagttatttggttttattttttttgtaaggttggagttgttgttttatttttttgatttatatataataataaaaaaaattatttttgttatgtgtttttttatttttattaagtggttgaaatttaatttgattgtttgagtatttttggttggatttgggttggagttgatgggattttatgagggttgtaaaagttaagtttttaatatgttttaaataaattggtgtgtaaaggagaaatgttagaagaaggaatatggttgtagatgggaggtttgggaatgttagttgtagtattggggtataggtggttttaataatgtatataagtttggttgtaagttgtttttataagagtagaagaggttgtagaattatttttaggaggttgagattaaattttttggtttttgagtgtatatagttttgtatggtttttaaaatatagattttaggattatttataataatataaatttgtggttaattttgttgaatttttatttagatttaagttgtgttgttagtagaaatgtaattgtgttagagaaaaattgtttatattttttgagatatt

SEQ ID NO: 625 - DNA, 716 bp, Artificial Sequence
  chemically treated genomic DNA (Homo sapiens)
agtattttaagaaatataaatagtttttttttaatgtaattgtatttttattgataatatagtttgggtttaaatgaaaatttagtagaattaattataggtttatattgttatggatgattttggaatttgtattttaaaagttatgtaaaattgtgtgtatttaggagttgagaagtttgattttaattttttgagagtggttttgtagttttttttgtttttgtagaagtaatttatagttaaatttgtgtgtattattaaagttatttgtgttttagtattatggttagtatttttaagttttttgtttgtagttatgtttttttttttaatgttttttttttatatgttaatttgtttgagatatgttaaaagtttgatttttataatttttataaaattttattgattttaatttaaatttagttagaagtgtttggataattagattgagttttaattatttgatggagataaagaaatatatagtaagaatgattttttttattgttatatatgagttaagggaataaaatagtaattttggttttgtaagggagatagaattggatggttgttttgtataaaagggttgttaaagaatttgtagagggaagaaatgaggtatggaggtgttaagagaaaggtttttttgaggttaaattaataatgttggggagaatggggtggtatgaggagtttgaaaagtttga

SEQ ID NO: 626 - DNA, 777 bp, Artificial Sequence
  chemically treated genomic DNA (Homo sapiens)
gattgaggtttgttatttggtttttttgaggtttagtttttttgtttgtaaaatggtattttaatggtatttaatttatggaggtgtttggggggataaggttagttattttgtaggtaggtggggtttttggttttttttatggggttttgggatttttggttttggaatttttaaggtttagtttttttagggtttgtatggttttttttttgttgggataatttatagttttagggttatagttgttgttgttttattttttttttttttttgattttttttttttttattttggttttatttttttagaattagtttgtttttgttttttgtttttatggttttataaatgagttatgggtttgatttgatttaattttgttgtaattgttatttttttaagtttgtttttttttatttggttatttatgagattataaaaatttaaataggatggggttttttttagtttggttttttggttttttgggattttgggttagggttagtagtttttggagattgaggtggggtttgtggagtttttgtggggagggatttggtgtttttagtaggattgggtattttgagttttgggttgtagttttgttgttggatagttttgagagaattgtttgagttttttgatttttttagtattttttttagtaggttttagaatagggaattaaaatttaggtatttttgggttagaaggtgaaaggatgagtaaggtggtttggtgttggttttggtgaattggagagaataggt

SEQ ID NO: 627 - DNA, 777 bp, Artificial Sequence
  chemically treated genomic DNA (Homo sapiens)
gtttgttttttttagtttattggagttagtattaggttattttatttatttttttattttttggtttagaggtgtttgggttttggttttttgttttaaagtttgttaaggaggatgttggggaaattagaaagtttgaataatttttttaaggttgtttagtaatagagttgtagtttgggatttgggatatttagttttgttggggatattaagtttttttttatagaagttttatagattttattttagtttttaggagttgttgattttggtttggagttttgggggattaggaggttgggttggggaaggttttgttttgtttaggtttttgtggttttgtgagtaattgagtggaaaaaaataagtttgaaaagataataattataatgaaattaaattaaattagatttgtgatttatttatggagttgtaaaaatagaaaataaaaataagttggttttggagaagtgaggttagggtgaggaagggagaagttggggaagggaaaaaaataaagtaatagtagttatggttttgggattgtaaattattttagtaaggagggaattatgtgggttttggaggggttgggttttgggggttttggagttaggagttttaggattttgtgggagaggttagagattttatttgtttgtaggatggttgattttgtttttttaaatatttttgtgagttgggtattattagggtgttattttgtagataaggaagttgagttttagagggattaagtgataaattttgatt

SEQ ID NO: 628 - DNA, 878 bp, Artificial Sequence
  chemically treated genomic DNA (Homo sapiens)
ttgtttttttaaatgtattttaagggttttttattttgattattgtttagtggtattgttgtagaggaagtaggagggtgtttggtggagtttgggaggtttatgaatttttgtatttggagaaatgttaatgttgagtttatatttttttttttgtagtatagaagattattattaggtttgtgtgtagaagtttaagtagttagagggggtttttgtgaggtttgtgggatttttttggttagaagatgggttatggtggaggaaggttatgttaaatggttgtgatttattgtttatagggaagagtatgtaatatatatttaggagggtttaggtagttggaattgtggtggttttatatttttaaagtgaattttaaatttgatttatttatgttgtttttatagtaataggaaaattgttttgatttatagttatggaagattttgtaaaagaaattgtaggaggaaaaaaagataatgttaggaaaaaaaaaaatttaatgaagtattatttttttatttatttagttaattgagaataatagtttgtgtatttggtaattaaatgggaagtggtattttgtgttgtaatatgaatttgtttatattaagtgatttatttttttgtttagatatattgtattgagaattttttttaagtagaaagttattaaaaatgtgagaataagtagtttttattaatttgaagtatttggggatttagaggaatgataaatgtaaatagtttagaatttagaaattgttttgaatatttaaattttagattttgggaatgtgtgtatgtttttagttagttagatgtagataatttttttttttgtgaggtttttttttatttatattttgtttgga

SEQ ID NO: 629 - DNA, 878 bp, Artificial Sequence
  chemically treated genomic DNA (Homo sapiens)
tttagataagatataagtgaaaagagattttatagaaagaaaaattatttatatttgattaattgaagatatgtatatatttttagagtttagagtttaaatgtttaagatagtttttggattttgggttgtttgtatttattatttttttaagtttttaaatgttttaggttagtgaggattgtttgtttttatatttttaatagttttttatttgaagaaagtttttagtatagtgtgtttaaataaaaaaataaattatttaatgtgagtaggtttatgttgtaatatgaaatgttattttttatttgattgttaaatgtataaattgttatttttagttgattgaataagtgaaagaatggtattttattaaattttttttttttttggtattatttttttttttttttatagttttttttatagagttttttgtggttataggttggaatagtttttttgttgttatgagaatggtataaataagttaagtttaaaatttattttgggggtatggagttgttatagttttggttatttaagtttttttgggtgtgtgttgtgtatttttttttataggtagtggattatagttatttaatatggtttttttttattatggtttattttttggttagaaaaattttataagttttgtagaggttttttttaattgtttgggtttttatatatagatttagtaatggttttttgtgttgtaaggagagaaatataagtttaatattaatatttttttaagtgtagaaatttatgggttttttaaattttattaagtatttttttattttttttataataatgttattgagtaatgattaaaatgaggagtttttggaatatatttggaagggtag

SEQ ID NO: 630 - DNA, 906 bp, Artificial Sequence
  chemically treated genomic DNA (Homo sapiens)
atttttgggattattgaaaagttttataattatttataaatatgtaaagggtgtttataagattggagtaagggtggtggtatggggtaaagttagtagtgtttttttaggtgttttgtgatagaggagaagggtgtatttggtttgttgtagtttgagtagattttggggttgaaagttatttttttgattatgtgtttagattttataaaattatagtttgggtttattggttgggtaatattatttgaagtgagtagaataatttaaatttttttatttgtaatataaaaggaaggggttatttgttttagggatgggtatgttttggtgtaatttggtagagtattttagtaattttattagatgttaggttagggtaaaagtggaaatgtgtttgtttagtatattttgggttgattatttggagtgtatgtttttgatttatttgtatataatttatttagggggtgttgtaagagttatgtgatggttaaaggaatttaatgtgttttttattatgttttttaaataagtttttttatgttgattgttttttggaattaagaagttttatttttttagttttgtgatagattttaaaatgagatttttataaatttgagaataagttttagttttggttttaggattatttgttttgattttaagggttagttgaggagtgtgaaggttaggatgagttatggggtgagtgaaaattgtagttgggaaagttttgttttgaggagtttgtatttatgtttttatatattttgaagtaattagtttttatttgtatttgtggtttttttgtttttttggttttatgaggagatagtagttttgttatttattttttgagagatagtgtggtaaagttagggatagtatgggttttagaat

SEQ ID NO: 631 - DNA, 906 bp, Artificial Sequence
  chemically treated genomic DNA (Homo sapiens)
gttttagagtttatgttgtttttaattttgttatattgttttttaaaaagtaagtgatagagttattgtttttttatgagattaaagaaataaaaagattataggtgtaggtgggggttggttgttttagggtgtatagagatataagtataagttttttaagatgaggtttttttagttataatttttatttattttatggtttattttagtttttatattttttaattaatttttagggttagagtagatagttttggagttaaagttagaatttgtttttagatttatgaaagttttattttgaagtttgttatggggttggaagaatgaagttttttggttttaagagataattaatgtagagagatttgtttaaaaaatataataaaagatgtattgggtttttttggttattgtatagtttttgtaatattttttggatgagttatgtgtaaatgaattagaaatatgtattttaagtaattaatttaagatgtattgggtagatgtatttttatttttgttttaatttgatatttgatagagttgttgagatgttttgttaaattgtattagggtgtgtttatttttgagataaataattttttttttttgtgttatgaatggggaggtttgaattattttgtttattttaaatgatgttgtttagttaatgggtttgggttgtggttttgtggagtttggatatatggttaagagggtgatttttaattttagagtttatttaggttgtagtaggttaagtgtattttttttttttgttatgggatatttagaagggtattattagttttattttatgttattatttttattttagttttgtaggtattttttgtatatttgtaaataattgtggagttttttagtaattttaaaagt

SEQ ID NO: 632 - DNA, 744 bp, Artificial Sequence
  chemically treated genomic DNA (Homo sapiens)
atgggattataagttaaggaatgaggaagtttttagaagttggaaaaggtaaaaaaagaatttttgttttttataagagtttttagaaggagtatagttttgttgatattttgtttttagatttttgatttttagaattgtaagagaatgaatttgtgttgttttaagttattaagttggtggttatttgttatagtagttatagaaaattgtttattgtaggatgaaaagttatttttttttggtattttttaaaggttaatttaagagtatggattgttttgtattttttaggagtattattgtaaagttgatttattattttttttatttgttttgtattattgtgttggggtttattaatgttttgttattgggtgttttgtgtgtaagtagaagtgtgttaagaattaattgttttgatttttattttttgttggtgttttgttatttgtgggttgtttggtttgatatatgaattattttttagttgtttggtgttggggaggtatagttattagtttttaaatattttagatatatgttaattgtaattttaatatatattttttttttattgttattttggaattgttttattggtaatgtatgaaatatgaataagaggaaataattgataaggtattattgttgattaaggggttaatttttgaggaagattaaaaatagatgtttttgaagaagaaagaattgaggaagtgaattttttttttttttaatttt

SEQ ID NO: 633 - DNA, 744 bp, Artificial Sequence
  chemically treated genomic DNA (Homo sapiens)
agagttaagaggagagaagatttatttttttagtttttttttttttaaggatatttgtttttaattttttttaaaggttagttttttagttaatagtggtgttttgttaattatttttttttgtttatattttatgtattgttaatggaatagttttagggtgatggtagaaaaaaaatgtgtgttgaaattgtaattggtatatgtttgaaatatttgggggttggtgattgtgtttttttagtattaggtagttggagagtaatttatatgttaagttaagtagtttatgaatgataaaatattaatagggaataaaggttagagtgattgatttttaatatatttttatttatgtatagagtatttgatgatagggtgttaatgagttttagtatggtgatgtggaataaatgaaaaaagtaatgaattgattttgtaatagtgtttttggaagatatagaataatttatgtttttagattagtttttgagaaatattaggagaaagtggttttttattttgtagtgggtagttttttgtggttgttgtaatagatggttattgatttagtggtttaaaataatataaatttatttttttatagttttaggaattagaggtttaaaagtagggtgttagtagggttgtgttttttttagaggtttttgtagggggtagggattttttttttgttttttttagtttttggaggtttttttattttttggtttatgattttat

SEQ ID NO: 634 - DNA, 1032 bp, Artificial Sequence
  chemically treated genomic DNA (Homo sapiens)
aaaaagaaaagaaaagaagaaaagaaaatataaaatgtttagttatttaggatataattgtgtggtttgattgtttagttgtattattttttttatttggaaagtgttttagtgattatagaagttgttagaatttttaaaagtaagaagaaagtgatgggaaaatgtgttaaatttataatgggagaatattgtgttattagaaaattatatgattttggtaattttaggagtatggaagaaagattttaaataagtttttgattatgtatttttttttaaatttttttgaatgttgaagaaatgttaaattttattaagttttatagttagatttaatatagatataaatttttttaatgtttgttttagttaaaagtgagtggaatattattgttaaattagtgtatgtgggagaattatttgaggaaaattaaaataggtatagttgggaatattaagttgtggttatattagatgtaagtaggtgtaatagtaaaattttttaggttttaatggattgggttattttgttttttagtttttatatagatgagttttgttttggggtaatatggttgtagtttgagagtttatttgaaggagtttattttttttttattagtttatgagtatagtgtaattttagttaatattgttatatagtttttagttgggttatttggttaaatgtttttagggaaagtagtaagatagaataaaaggataaatgtaatgtggttttttgttttgagtttttgtagttgtggaattatattggtagttaattattattatgttgtatttgtgattataaatttttgttatttaagatgttatttaagttttataagaaatattttgttttttgtggtataatttttttgaggttgggtttgtgtataattataattatagagatttgttttttgtgttttgtggatatgttagtaggtatatagtgttatttgtgtgaaattgaaaatgatattttttattggtgggtgaattgggaaatagtattttgtttat

SEQ ID NO: 635 - DNA, 1032 bp, Artificial Sequence
  chemically treated genomic DNA (Homo sapiens)
atagatagggtgttgttttttagtttatttattagtagggaatgttatttttaattttatataaatggtattatatatttattagtatgtttatgaagtataagaaataggtttttatggttatagttgtgtataaatttgattttaaggaaattgtgttatagaagataagatgttttttgtgagatttgaataatattttaaataataggagtttatgattatgagtataatgtggtaatgattaattgttaatgtaattttatagttataggaatttagaataagaaattgtattgtatttgtttttttattttgttttgttattttttttgaaggtatttaattaaataatttagttaggagttgtgtaatagtattagttgaaattgtattgtgtttatggattaatgaaagagaaatgagtttttttagatagatttttaaattgtaattatattgttttagaataaagtttatttgtatggaaattgagaagtaaaatagtttagtttattagagtttaaagaattttgttattgtgtttatttgtgtttaatatggttatggtttaatgtttttaattgtgtttattttgattttttttaagtaatttttttatatgtattggtttaatgataatgttttgtttatttttgattgaaatgaatattaaagggatttatgtttatattaaatttggttgtaaaatttaatgaaatttaatatttttttagtatttaaaaaaatttagaaaaagatatatagttagaaatttgtttgaaattttttttttatatttttaaggttgttagggttatataattttttagtgatatagtgtttttttattgtggatttgatatatttttttattattttttttttgtttttggaaattttagtaatttttgtagttattggagtattttttagataagaggagtgatataattgaatggttaggttatatagttgtgttttgggtggttggatattttatgtttttttttttttttttttttttttttt

SEQ ID NO: 636 - DNA, 874 bp, Artificial Sequence
  chemically treated genomic DNA (Homo sapiens)
ggttttattatgttggttaggttggtttttaatttttgattttgtgatttgtttgttttagttttttaaagttttgggattataggtgtgagttattgtgtttagtttaattttgtttttataggtattggtttttattttttagttattggtttttttttttttgtaatttaggtttgtaatataattttttagttttttaaggaaaatagaattaaagatttttaatagaagattttagtttattaatatagttaatagttattaaagttatttaggtattggtttaataaaaaattaaagggttgtagtaagtgattagatttttattatttatttttgtgagatgggttttagagggttttgtttttgttgatattaattatttttattggtagtttgttaatatataagtagtttatagtagaatattgtagattgtagggtatttttaggttatatagttttaagtttttagaataggaattgaggtttggaagaaggttagtgtagtgtatttagtgaatggataaattgaattattattttataaggttgtaagtttatgtattaatggaattaatatggaattagagttaaattattgttttaaatatttaatgtatgttaagaaatttatttaattattaagtattgaaattataatatttttaaatgaatttataaagtaaaatagttgaattaatgatttgtaaggattttttggtagataaattttattgggaattaatatattattgttattaagaaagtaggtttaataaatgaataaaagaaatttagttaggtagagaggtttttgtttgtaattttagtattttgggaggttgaggtaggaggattgtttgtggtt

SEQ ID NO: 637 - DNA, 874 bp, Artificial Sequence
  chemically treated genomic DNA (Homo sapiens)
ggttgtgggtgatttttttgttttagttttttaaagtgttgggattatagataagaatttttttgtttggttgggttttttttatttatttgttggatttgtttttttggtagtagtggtgtattgatttttagtaggatttatttgttaggagatttttatagattattagtttagttgttttgttttgtgaatttatttgaaagtattataattttggtatttagtaattagatggattttttgatatgtattagatatttaaggtagtaatttaattttggttttatgttgattttattagtatatgggtttgtagttttgtgaaatgatgatttagtttatttatttgttgagtgtgttgtattgatttttttttaagttttagtttttgttttaggaatttgaggttatgtagtttgaaaatgttttgtagtttgtagtgttttattgtgaattgtttgtgtgttggtaggttattggtaagaatggttggtgttagtagggatggggttttttgagatttattttataaagatgagtggtgaaaatttgattatttgttgtagttttttagttttttattaagttgatgtttgagtagttttaatagttattagttatgttagtagattgagattttttgttagaagtttttagttttgttttttttgggggattaagaaattatattgtaggtttgaattataggaaggggagaattaatggttagggaatgagagttaatatttgtaaaagtagagttgggttgggtgtggtggtttatgtttataattttaggattttgggaggttgaggtgggtagattatgaggttaggagttagagattagtttgattaatatggtgaaatt

SEQ ID NO: 638 - DNA, 938 bp, Artificial Sequence
  chemically treated genomic DNA (Homo sapiens)
ttgaaagataaaagggtgatattatagaaatggaaaatattgtgtttgaggttgtgtatggtgtagtggaaggttatagtttaggggttggttattttgtgtttgagttttttttagtttgtttttgagaagtattgggattttaaattagttataattaagttttggattttatatttgtaaagtgaggatagggagatttatttgatggggttgttgtgaaggtgaagagagaggaagtttgttaaagtaattaaataatatttggtatgtggagttttgtgttttgttttgttttgaaattttttttggtgttgatttgaatgtttttttttgatttggttaatagttgtgttatttttggttagtgatttgtggttgggttgttagttgatgataggtagttttttaagtaggttataataaggtggtaattgattttgttttttgaggatgtttgtttgggttttgttagaagttaagggttttttgatgtggggttttggttttatattgtggtattttgaataattttttatgggttggtaaaaggtgttttatattttagataggttttaggaggatgatttgttttttttaaggagaattgagaatttttagatgattggaaggttttgtatttttattttagtatttttgatagatttttttatatgtggtaaatatagttatagttggaggtttattgttggttgttaataggtagtgaattgttgttgaattagatagtttatgtatagggtatttttattattatagaaagttttgttggttagagtatttaaagtatatttggtttttttttttagttattttgtttattttttgtttgtatttttttttggtatttgtgttgttgttattttagttttagtttttaatgtttaataatattttgatagattaatagagttgtg

SEQ ID NO: 639 - DNA, 938 bp, Artificial Sequence
  chemically treated genomic DNA (Homo sapiens)
tataattttattgatttattaggatgttattaggtattgggggttggaattggggtggtagtagtataaatattaaggaggaatgtaagtaagagataaatagggtggttagggggagaggttgaatatgttttagatgttttgattaatagaattttttgtgatgatggaaatgttttatatgtggattgtttgatttagtaatagtttattgtttgttaataattgataatggatttttagttatgattgtgtttgttatatgtgggagaatttattggaggtgttaaaatgagagtatagaattttttaattatttgagaatttttagttttttttgaagaaagtaaattatttttttggggtttatttgaagtgtgaaatgttttttgttagtttataaagaattgtttagagtgttatagtgtgaaattgaaattttatattagggagtttttggtttttagtagaatttgaatagatatttttggggagtaaggttaattgttattttgttgtgatttgtttggggaattgtttgttattggttggtagtttagttatagattattagttaaaaatggtataattgttgattgaattagagagaaatatttaggttagtattaggaaaggttttgaagtagggtgaggtatagagttttatatgttgggtgttgtttaattgttttgatagattttttttttttttatttttataataattttattaagtaggtttttttatttttattttgtagatgtgaagtttgaagtttagttgtaattaatttgaagttttagtattttttagaaatgggttggaggggatttaaatatagagtgattagtttttgaattgtggttttttattatattatgtataattttaaatatagtattttttatttttataatgttgtttttttgttttttaa

SEQ ID NO: 640 - DNA, 782 bp, Artificial Sequence
  chemically treated genomic DNA (Homo sapiens)
gttgattttttttatatttattttttgtaatagtttttttagttatattgtttgattgttataggaaaggatgttgtagattttttttgagtggtgattaagtgaaatgtattaaagaaatgaggatagtgagtaattaagatgtttgaagtaatattggaaagggagttaggtttgagttatttttttttgtagttagtgtgtagtggaagtggtttgtgggtgttttatatttggattggagagtaaagtataattttagtgttaagggaagttttttatgtttttggaatagtgttttatatttttttgaaaaggtaataaaatatgtgtatttgttgattaggaataaatgttaaagtgtttattatgatggaagtgtttgatttttatggttttgataagttgttataggattttatgaatttttaatggttggtttatatttaggggtttttagtttttgagggtggtaaaaggtttatagagatgttatttttttagtatattggtttttgttaagattggtgtttatttaaagtattttttgttttttgaatgtatagagattttgttgataataagaaatttttttgggtttgaaattagatgaaaagattttttatttagaaagtgtttattaatttatttaaaaatatgatttggattatttattatatgttagggtttattttgggtatattgaggaataagatagggtttttgatttttgagtttgtattttagttaggggatataggtattaggtaagaaaataaata

SEQ ID NO: 641 - DNA, 782 bp, Artificial Sequence
  chemically treated genomic DNA (Homo sapiens)
tatttgtttttttatttagtgtttgtattttttaattagaatgtaagtttagaggttagggattttgttttattttttagtgtgtttagaataagttttgatatgtagtggatgatttagattatatttttaaataaattaataaatattttttgagtgggaggtttttttatttaattttaggtttaagaaagttttttgttgttagtagaatttttgtatatttgaaagatgagaggtgttttaaatagatattggttttggtagaagttagtgtgttaggagaatagtatttttgtggattttttattatttttagaaattgaaagtttttaaatataggttagttattaaagatttatgagattttgtggtgatttattagagttatggaaattggatatttttattatggtggatgttttgatatttgtttttaattagtgaatgtatatattttattatttttttagggaagtatggggtattattttagaagtataagaggttttttttagtgttgggattatgttttgttttttaatttaaatatggaatatttatgagttatttttattgtatattggttgtaaaaagaggtggtttagatttgattttttttttagtgttgttttaggtattttagttgtttattgtttttatttttttggtgtattttatttaattattatttaggagaggtttgtagtatttttttttgtggtaattagatggtgtggttaaaagaattattgtagggaataggtatgggaggaattaat

SEQ ID NO: 642 - DNA, 1229 bp, Artificial Sequence
  chemically treated genomic DNA (Homo sapiens)
atttaaattttatgtgttatgatgtagatatttataggataagtaagaataataaaatttttagttttgttttttagtataagataattgaagatatttgtggtgaaaagtatttttgttattaggaagatagataatagttagtaattaatgtttttttgttgtataagttaaaaagtttattaaatttattttttttttagtgtatatataagaatatatttggatatttttgtaaatttatatttaagaatagtgttttttaaattggttatttgaaagaaatttaaaggaaaaagtagatatttttataatatgtttttgttttgttgtagtttgtaattgtgaatttttgtaaattgttataattttggatgaatgatgggaatataataggttgtagaattggagaatgttaaatttttgtttttaatggtaaaatatgttttttttatttttattagaatgtgtgatttatgttatttgaaattaaattttaaatataatgagttattagtgtaatagtttattattaatagtggttttataaataatatatttttattatatatatgtagtttgttgtgaagttagtaaaaggtattttaggttattgaagttttgttgtgttagtgtggttgtagattagaaggatatttttatgtgaattaagatggatgttaattttttttgttgagagttaggttggttgtttttttttgtatatatggtagatggattggttaattagtgtttgttgagttttgggtttgaaattatagagaagttagataattgtggttatgtagtttttgtttatgagtgtaaataagataaataattatttgttatttgggaaaaaaattaaaatgtttattttggatttttattaaagtgttaatggttttataaaatagttgtgtaaatttaggtttttttagtaagtattattttagggggtttgtaaagaaaggaatatatatgaaaaaattaatttttaaaaattttttttatattttagtattgagaagaaaatagaggaggttttatttttattttgtaaatatgtttgagaataaatgatttttaattgggagatatatttgagaataaatagtagtttaatatttatttttttttttttttttggtgttatttaaaaaattgagtattattgtagtttgattttttgttttaggagattaaagtattttttttgattgggtatt

SEQ ID NO: 643 - DNA, 1229 bp, Artificial Sequence
  chemically treated genomic DNA (Homo sapiens)
aatgtttagttagagaaaatgttttaattttttaaaatagagaattgggttataataatatttagttttttaaatgatattaaaaaaaaaaaaaaaaataggtattaaattattatttgtttttgaatatgttttttagttaaaaattatttgtttttaaatgtgtttgtaaaataaaagtgagattttttttattttttttttaatattgaaatatgaggggaatttttaaaaattaatttttttatgtatatttttttttttataggttttttaaaatgatatttgttgaaaaagtttggatttatatagttgttttataaagttattgatattttaataaaagtttaaaataaatattttaattttttttttaaataataagtgattgtttgttttgtttgtatttgtgaataaaggttgtatagttgtagttgtttagtttttttgtaattttaggtttaagatttagtagatgttgattaattaatttatttattatatgtgtagaaagagatggttagtttgatttttggtagggaaaattggtatttattttggtttatatggagatgtttttttaatttatagttgtgttggtgtaataaaattttgatggtttgaaatattttttgttggttttatagtgagttgtatgtgtatgataagaatgtattatttataagattgttgttagtaatgagttattatattaatggtttattgtgtttggaatttgattttaaatggtatggattatatattttgatgaaaatgagaaaaatatgttttgttattaggaataaagatttaatgttttttaattttataatttgttatatttttattatttatttagggttgtaataatttataaaagtttataattatagattataatagagtaaggatatattgtggaagtgtttgtttttttttttgagttttttttaaataattgatttgagaaatattatttttaaatatgaatttgtaggagtatttaaatgtatttttgtgtatgtattgaaaaaaaaatggatttaatggattttttaatttgtataatagaaaggtattgattgttggttgttatttatttttttggtgatagaagtattttttattataagtgtttttaattattttatattggagaataaaattgaaggttttgttgtttttgtttgttttgtaaatatttatattatgatatataaggtttagat

SEQ ID NO: 644 - DNA, 878 bp, Artificial Sequence
  chemically treated genomic DNA (Homo sapiens)
agttaagtatgttgtgttttttatggatgagattgtgttttatgattattttattttttgtattgggtagtagtattaggtaaggttgggtatagggggtgtaagttatgtgtttggagagttttatgaaagttatttatatgtttattggggtatatatattttgggtaaagagtatttttttgtttggatagttgttgttttaaatttataaaagtattttttagggtttgtatatataattagaattatgtttgtaaatttttttagaaatttattttaagaaaaatattttgtttgaggataaaaattatagtaagttggagaaatgttattttttaagttgttgtttaaaagtttaatatatattgtttgttttagtagaatttagatgtaattaggtatgtatttgtggtaaattaatttatgttttaagaggttaatatttggttgtggtaatgggtttttgtaaaagtattgtaaatatgtgtattttttgttgatttttattttattttgttttttagttatgaaaataggaaatttgattgattggttttttagtgtttatgttttttttttagttaaattttttatttatatttgagtaaagtattgttggataatattgaagttgtttaatgttttagggtagtagattttaatattttattttgtaatatgtatgagtgttttatgtagtttatagtagtaaggtatttttttagtgataagaggtttattttaatttaaggatgaagttttagattaagtttgtgaaatttatggtttatgggtttaaggtggttttgaatgtggtttaatataaatttgtaaatttttttaaaatattatgatttttttttttgtagtttttt

SEQ ID NO: 645 - DNA, 878 bp, Artificial Sequence
  chemically treated genomic DNA (Homo sapiens)
aaaaaattgtaaaaaaaaaagttataatgttttaagaaagtttataaatttgtgttgagttatatttaaagttattttgggtttatgggttatgggttttataaatttggtttaagattttatttttgagttagagtaagttttttgttattggagaaatattttattgttgtaaattatatgaaatatttatgtatattataaagtggaatattaaaatttgttgttttaagatattgaatagttttagtgttatttagtaatgttttatttaaatgtggatggagagtttaattaaaaggaaagtatggatattgggaaattaattaattagattttttatttttataattgagagataaaataaaataagggttgatagaaggtgtatgtgtttgtaatatttttgtgagagtttattgttatagttaaatgttagttttttgaggtataaattaatttattataaatgtatgtttggttgtgtttggattttgttagggtgagtagtatgtgttagatttttggataatagtttaaagaatgatatttttttaatttgttgtgatttttatttttgagtagaatgttttttttggaatgggtttttgggagggtttgtggatataattttggttatgtgtgtgggttttgaagggtgtttttatgaatttagagtagtagttgtttaggtagagggatgttttttatttagagtgtgtgtgttttagtaaatatatgaatggtttttatggagttttttagatatgtggtttgtgttttttgtgtttggttttatttggtattgttgtttggtgtagaggatgaggtggttgtagggtatgattttgtttgtggaaagtataatgtgtttggtt

SEQ ID NO: 646 - DNA, 703 bp, Artificial Sequence
  chemically treated genomic DNA (Homo sapiens)
tgtgagtttgggaggtggtgtagtttaggttatatgggatagggtttttagatagttttgttaaggtggttgttatttattagagtgttttgggtagggtttggattttagatttaggatagaaaggtaggttggggaggttatatttgttatggttagtttattttttgggttttagattgtagtttatttttaggtttttattttttgtgtttttgtagtttttgtttgtttttttttttttagttgttttatttagtagtttttgttataatttgttttttttgtatggaggttttagaggtttttattaaggttggtggttaaaggttggtttagtatgtgttgtgttttattggtttattttaagattttgtttttttaggtttgggtaataaaaaagggggtggttttagtgtttgttggttttttgtagttttatatataaaagggtaggtgataaagatattttttgggatggtaggtgttggtgttggatttttttttgagtgtatgggtagaagaaaggtaaggttgggtttttttgggtagtgtagatatgtaggggtaggagtgtgggtagggtttttggggaggggaaggtttaggagggtgaggagtattgatgtagggtttgttattgagggtagttgattagaaaagttttattttttttttaaagtagggtggttggataaattta

SEQ ID NO: 647 - DNA, 703 bp, Artificial Sequence
  chemically treated genomic DNA (Homo sapiens)
tggatttgtttagttattttgttttggggagggggtgggatttttttaattggttgtttttggtagtggattttgtattagtgttttttgtttttttgggtttttttttttttgggggttttgtttatatttttgtttttgtatgtttgtgttgtttggggaagtttagttttgttttttttttgtttgtgtatttggggaggaatttgatattaatatttgttattttggaaaatgtttttgttgtttgtttttttgtgtgtggggttgtagggagttagtgggtgttggggttgtttttttttttgttgtttaggtttgaaggagtagggttttgagatgggttgataagatatggtatgtgttgggttggtttttgattgttagttttaatggaggtttttgagatttttatgtggggagggtaggttgtggtgggggttgttgaatggaatagttggggaaggaaaagtggataaaagttgtgggagtgtagagggtggagatttaggaatgggttgtggtttaggatttagaggataggttggttatggtaggtgtgatttttttagtttgtttttttgttttgggtttggggtttaggttttgtttagagtgttttgatggatggtagttgttttggtaaggttgtttgaaaattttgttttgtgtggtttgggttgtattattttttaggtttata

SEQ ID NO: 648 - DNA, 905 bp, Artificial Sequence
  chemically treated genomic DNA (Homo sapiens)
agatgaatggaaaaaataaagatttgtttaggaaaaagaattaaagattttattgaataagaaagaaataaggttgttatagttttagggagaggagttatttttgaagatgtgaaaatttgtagtagaatttagtaatgagattttaaagttatgggtttaagaggggatattttggtattattaaatatatatgttaattgaaaatgaaagtatattttatttgtgaaagaatgagatataaaattatttttttttaggtagtttagttttttttattaaatgttgatagttatagtgagtagagatggtgaatgttattgagattattgttttattgaagtggatgtttattttaaaaagttattatttgtttgatttagggtgaattttttttaatgggtatattgtatattgtgtggtaattttttttttgaaataagttatttgatgagaagaatgaaaattttggtttaaatggttgtggaaatgtttattagttgattatggtttgattttggaatttttagttggtttgggaatggtaaatataatatgtggtaagttttttatttataattttttaggtataggaataggttttttgattgtttatgagggatagaaaaagtagatggtaggtgagttggtttttattatttagaaaagtagtggttataagatgaaggttttatttgataaatttgatttagtttgtagaggatattataggagaatttaggagggataaaggggttgtgatgaattgtttttgagggtgttttttaaagatatttttattgtgtttatatttttttttaattatataagataatggtattttttagttttttatgtgtttttgttgtagagttttaattgttaatttagttaagggtttttaa

SEQ ID NO: 649 - DNA, 905 bp, Artificial Sequence
  chemically treated genomic DNA (Homo sapiens)
ttgggagtttttggttgagttaatagttggaattttgtagtaaaggtatatagaagattgaaaaatattattgttttatatgattaaaaaaaaatgtaagtatagtaggggtatttttggaaagtatttttaggaatggtttattgtagtttttttgttttttttgggtttttttgtgatgttttttgtaggttaaattaaatttgttaagtggagtttttattttgtggttattgtttttttgagtgatgagggttaatttatttgttatttgttttttttattttttatgggtaattaaagagtttatttttgtgtttagagggttgtaaatgggaagtttgttatatgttatgtttattatttttaagttgattaaagattttaaaattaaattgtggttaattgatagatgtttttataattatttgagttaaggtttttattttttttattaaataatttgttttagggaaaaggttgttatataatatgtagtgtgtttgttaggaggagtttattttgaattaaatagatggtggttttttaaaataaatgtttattttaatagaataatagttttaatggtatttattatttttatttgttgtaattattagtatttgatggagagaattgggttgtttaagaaaaaataattttgtattttatttttttataagtgaaatgtatttttatttttagttaatatatgtgtttgatagtattagagtgtttttttttagatttatgattttggaattttattgttaaattttgttatgaatttttatatttttaaaaatgatttttttttttaaagttataataattttgttttttttttgtttagtgggatttttggtttttttttttggatagatttttattttttttatttattt

SEQ ID NO: 650 - DNA, 753 bp, Artificial Sequence
  chemically treated genomic DNA (Homo sapiens)
ttaatatgaataataaatttgttgtttattattttaaagttttaaaagagagtttttagaagggtaatttttagtttttttaggagaataatttgaaatgaaaatgaagattatatatattattaagttgaaaaatataatgttattttttttgagggatggtttaatatgttaatgtttaatttaagaattttaaaaatgtttttttattagtaattttaaaataaaaataagttgttatataaagtatggttaaaatattattaaaggtatgataaggattgaaattgtagttaatttagtatatagtatatagattattggattgttttagttttttttatgattaatattaattgatatggttgaattgattttgtagtaaggtgttttaattgttgaaatttattatgtgggttgtgttttagagttttggtttttttgtggatatgtttgtaattttgtaggattgattttattagtatagttagaggtttggtaagtgtttgatattaggtaaggttggattttatatttatggttttttataaaatgttagatgtgatatggggtttttttaatttttattattaattaatataattaaaattttaagatataattttttaaaagtataaaatttagaaaatttaaaatatttataaaataataaatttgatattataatttttaaagaggtttagtaatataataatataattttgtgtttatgatgaaaaattttttgaaaat

SEQ ID NO: 651 - DNA, 753 bp, Artificial Sequence
  chemically treated genomic DNA (Homo sapiens)
atttttaaagaattttttattatgagtataaaattgtattattgtattattaggtttttttggaaattataatgttaaatttattattttgtaaatgttttaagttttttaaattttgtatttttgaaaaattgtattttgaaattttggttatgttgattaataataagagttgaaggaattttatattatatttagtattttgtggagaattgtgggtatggaatttagttttgtttggtgttgggtatttgttaagtttttgattgtgttaatggggttaattttgtagaattgtaggtatgtttatgaagaggttgggattttggagtatggtttatgtgatgagttttaataattggagtattttgttgtagaattaatttagttatgttaattggtattgattatgggaagagttggaataatttaatgatttgtgtgttgtgtattaaattggttgtagttttgatttttgttatatttttagtggtattttagttatgttttatgtagtgatttgtttttgttttagaattattaatagaagggtgtttttaaagtttttaaattaaatattagtatattaagttattttttaagaggaatgatattgtgttttttagtttgatagtatgtataatttttatttttattttaagttgtttttttgaaggagttgaaagttatttttttgaaaatttttttttaaagttttgaaataataggtaatagatttattgtttatattgg

SEQ ID NO: 652 - DNA, 1053 bp, Artificial Sequence
  chemically treated genomic DNA (Homo sapiens)
aaaaattattttatttaataatttatttttttaaaaaattttgtatgtgtttataaattattttttttaagatttttttttttttatatgggttttagtttttataaattttgatatttatatttttaaaattattgtataatgtttaatttagtagagtttatatatggtaaatagtttagtaagtattaatttaaagttttagtattttagtagattttttttttatattagaaataaatagataaatagataagtgaaaaaggaaggaaggaagaaaaaaaaatatgaattatgttttttttaggttaatgtttaagtttgttttaattatgttttttgatatattttaaggtttatattagttaaggtaaatattttaagggattgagtagatggatgttgtagtttagaaagtgtgtggtaaatttaggatttaagagtggaataaaagatttattttttttataattaagtttttgattaatgttttaggttttttagtatatatttgtaattatttatagaggtatttattgtgttgggatttgttttggaatattaggtattaagttatttggtagtagatggaagtatatttttgttgatatatgttgtaatgaaaggatttgtgtaaatttggttagtaaggtagtagaatgttatgtatttgaagattaataatgtaaataattatgatgttaattttgttatgtttgtgttaattttatttgttgagatgtggaattaaattttgaagtttgtgggttttaaaaatttttagtatatatttgaattaaataagtttttttttattattggaatttagagttttaattaaaaaatgtttttttaggttaaatttatgggaattatgaattaaattttttaataagttaatattataatttgtaaatgaatttattttgtattgtaagatttgtatgtgtaaaggtaataatttgtaaaatggggtatttaaaaaatatgattaagttgttatattgatgttaaagatagtagataggtatgtagttgagataaagttatatg

SEQ ID NO: 653 - DNA, 1053 bp, Artificial Sequence
  chemically treated genomic DNA (Homo sapiens)
tatgtgattttattttagttatatgtttatttgttgtttttagtattagtatagtaatttagttatattttttgaatgttttattttatagattgttgtttttatatatataaattttataatgtaaaatggatttatttataaattgtggtattagtttgttaaaggatttagtttataatttttataaatttagtttagaaaagtattttttaattaaaattttaaattttagtggtgaaaaggggtttatttgatttaagtatgtgttaaagatttttaaagtttataagttttaaggtttagttttatattttaatagatggaattaatataagtataataaagttaatattatggttgtttgtattattaatttttaaatgtatggtattttgttattttgttagttaggtttgtatgaatttttttattgtaatatatgttaatagaaatgtgtttttatttgttgttggatagtttgatgtttgatattttgagataagttttagtataatgagtatttttgtgagtaattataggtgtgtgttgaggagtttagggtattaattagaggtttaattatgaaaaaggtggattttttgttttatttttggattttgagtttattatatattttttaaattgtagtatttatttgtttggttttttagaatgtttgttttgattgatatggattttaaagtgtattaaaggatgtgattaaagtaggtttaaatattaatttggaagaagtatggtttatgttttttttttttttttttttttttttttatttatttatttatttgtttatttttgatgtaggaaaaaagtttgttgaaatgttaaaattttaaattagtatttgttaaattatttattatatgtgaattttattgaattaagtattatatagtaattttaagaatgtaaatattaagatttgtagaaattaagatttatgtaaagaaaaaaaagttttaggaaaaatggtttgtgaatatatataaagttttttaggaagataagttgttaaatgaggtaattttt

SEQ ID NO: 654 - DNA, 902 bp, Artificial Sequence
  chemically treated genomic DNA (Homo sapiens)
ttgttgagatgtggaattaaattttgaagtttgtgggttttaaaaatttttagtatatatttgaattaaataagtttttttttattattggaatttagagttttaattaaaaaatgtttttttaggttaaatttatgggaattatgaattaaattttttaataagttaatattataatttgtaaatgaatttattttgtattgtaagatttgtatgtgtaaaggtaataatttgtaaaatggggtatttaaaaaatatgattaagttgttatattgatgttaaagatagtagataggtatgtagttgagataaagttatatggtttttttattttttggattttagttaattattttaatggaatttgttattatgagtaagaaggttggaaagagagggtaaaataatagatggttagtttattttattttgttatttatgtaagatagtgttttgaggagatatagtgtttgtgtgaagttgttaaagatagtattgggggagggtaaatgggggggttaaagagggaattatatgattagttagttaaattatggttatatgtttgtttttgttgtttttttatattgaagtggaataatttgaagattgtatttttgtgataatattttaaaattaggaataattatgtggtatttaaagaagagttgttgtatatttttaatagtgggatatttataaaatgttttatttatttttaatttagtagaattttttttttattatttttattatatattaagatatagttataatagaagtttttgaaaaatataataaaaatttgaaattttttttatagtttttagggttttatatatatatgggaaagaatgatgtttttagatatgagttatttatgtgtaatttttatgttttt

SEQ ID NO: 655 - DNA, 902 bp, Artificial Sequence
  chemically treated genomic DNA (Homo sapiens)
aaaggtatgaggattgtatatgaatgatttatgtttgagagtattatttttttttatgtatatataaagttttggaggttgtgaggaaggttttagatttttattatattttttaaagatttttgttatagttgtgttttaatgtatggtggggatggtgaaagaaggattttattgagttagaaatgagtggggtattttgtggatgttttattattgagaatatgtagtggtttttttttgagtattatgtggttatttttaattttaaaatgttattataaagatatagtttttgagttgttttattttagtgtggagaagtaatggaagtaggtatatggttataatttggttgattggttatatagttttttttttaatttttttatttatttttttttagtgttgtttttggtgattttatataggtgttgtgtttttttagggtgttgttttatgtgggtggtagggtagggtaggttagttatttgttattttgttttttttttttaatttttttgtttatagtagtaggttttgttgaagtgattggttgaggtttagggggtgagggagttatgtgattttattttagttatatgtttatttgttgtttttagtattagtatagtaatttagttatattttttgaatgttttattttatagattgttgtttttatatatataaattttataatgtaaaatggatttatttataaattgtggtattagtttgttaaaggatttagtttataatttttataaatttagtttagaaaagtattttttaattaaaattttaaattttagtggtgaaaaggggtttatttgatttaagtatgtgttaaagatttttaaagtttataagttttaaggtttagttttatattttaatag

SEQ ID NO: 656 - DNA, 894 bp, Artificial Sequence
  chemically treated genomic DNA (Homo sapiens)
tttgtagttatttttaagtggggagttgaaattttaaagtttgatttttttttttgttgaatagaaggggagatgtgtaagaatgatataattttattttagatattaatttagaggaagaggatgggagttattatattgatttttaaaaggggataagagatttatatttatatttttaagtttattatagattattaattatgatgtaatttgttataatagggggattttttttgaagagatggtgttaaaatttgattatgaggtttttttatgtgaagagagaaaagggggtgtttggggattatttatgagaatttggggagggttttaattgtataaattagttgtgggttatagaatgtttgtttagtttattagtatttgttgtttatagtgattatttatttaatagattggttgtgaataagatgatgggattagtgggtttatgttttagagagttttgtttattattaatatgagttatgttttgtttaggaattattttttttgttgaagaaatattgtgatgtaatatgataaatatgtttttattatgagtgtagatttgtttagaaagatttgtattaaggtggttgtattttgtatgaattatatgttggggaggggtaggtagtattaaaaattagttttatttgagtttttaagttattatggtatatgtgtttgttttattataaattttaaaggtttgtgatgtttggtttttattgtttaagttttttttttttttgtaagggtggaattatttgtttgtaatattagtaattattatgtattttggaattgagtagagagtgtgtttgagtgtgtatgtttagattggagggaattatttttatttttaaagttaaattttattttttt

SEQ ID NO: 657 - DNA, 894 bp, Artificial Sequence
  chemically treated genomic DNA (Homo sapiens)
gggggagtagaatttgattttgaaggtaggggtaattttttttaatttaaatatgtatatttgagtatattttttgtttaattttaaggtgtatagtaattgttggtattataaataggtaattttatttttgtaaaggaggaggggatttaaataatgaaagttagatgttataggtttttgaggtttatagtgaagtaggtatatatgttataatgatttgaaggtttaagtgggattagtttttagtgttatttatttttttttagtatgtgatttatgtaaaatgtagttattttaatgtagatttttttagataaatttatatttgtgatggggatgtgtttattatattatattgtagtgtttttttaataagaggaatggtttttgaataggatgtagtttatgttaatgatgagtaaagttttttggggtatgaatttgttgattttattattttgtttatggttagtttgttggatgaatggttattgtaagtagtaggtgttaatgagttgagtaagtattttgtggtttatagttagtttgtgtagttggagttttttttagatttttgtggataatttttagatatttttttttttttttttatatggaaaagttttatgattaaattttggtattatttttttaaagggaatttttttgttgtagtaggttgtattgtggttggtaatttgtggtaagtttgggagtatgaatgtgggttttttgtttttttttgagagttagtgtggtaatttttattttttttttttggattagtatttggaatggagttgtgttgtttttgtatatttttttttttatttaataagagaaagaattagattttaagattttggttttttatttgggaatggttgtgaa

SEQ ID NO: 658 - DNA, 796 bp, Artificial Sequence
  chemically treated genomic DNA (Homo sapiens)
tttttatgaggtttttttaggagggttatttttgaggttaatttgttggggtttagtgtgatgaaagtagggtgggtttgtttttagtttatggttgtgtgggtagtagagatatgttttgaggggttttggggaagtagtttgggatgtatttttttttagtatttttataaaattaggttttttttattgtggtaaagggtgatttttttatttgggtaggatttggagtttattatttgtgtttagaatgtttatgggtagggaaggattgttgtgtttgtttatttgaatatggggtaatgtgttgttatttaaatggaggaattagtgatgaatgggggaaattgtttttttttttgttttgtttttagaaggagataaaaattttttttattttagtaaataatgtttttatgtgggtgttagtgttttgtagtttgtataagtttagttttgtgtgaattattaattgttatattgtgttttggggtttatagttagtggtatttttttttggtgggtgatttttattagtttttaggttaggtttggagaatgggaaggtttattatttttgggattataggttaggtatatggttattggaggttagtaggttttgtgtgtagattgttttttgtgtttagaggtgtggttgttggaggtagtgttgtttttatgagattttgttatagtagtagttaggtgggggatgggaggggtattaataatttatatataatagggtgatgggggaggagggggtgggagattgttggagttatggtttatt

SEQ ID NO: 659 - DNA, 796 bp, Artificial Sequence
  chemically treated genomic DNA (Homo sapiens)
ggtgggttgtggttttagtagttttttattttttttttttttgttgttttgttgtgtgtgaattattgatgttttttttattttttgtttggttgttgttgtgatagagttttatggaggtggtattgtttttagtagttatatttttggatatggaaggtagtttgtatgtagggtttgttggtttttagtggttgtgtatttggtttgtggttttagggatggtgggtttttttgttttttgagtttagtttgggagttggtgggagttgtttattgggagagggtgttattggttgtgggttttagagtgtggtgtggtgattggtggtttgtatagagttgggtttgtgtgggttgtggggtattggtgtttatataagggtattgtttgttgaggtaaaaggggtttttgtttttttttggagatgggatagagggaggaataattttttttatttattattaatttttttatttgaatagtagtatattgttttatgtttaaatagatggatatggtagtttttttttgtttgtaggtattttgggtataggtggtgggttttgggttttgtttagatgaaggagttgttttttgttatagtggggagggtttggttttgtggaaatgttgagagggggtgtattttgggttgtttttttaaggttttttaggatatgtttttgttgtttatgtagttatgggttgggggtaggtttattttgtttttattatattgggttttagtaggttggttttaagggtgatttttttggaggggttttatggaag

SEQ ID NO: 660 - DNA, 887 bp, Artificial Sequence
  chemically treated genomic DNA (Homo sapiens)
agaggttgtttaggtatatattagttttttatttatgaggttttttatttttaatataattaatgtttttttaatagattttatattattatttgtgtaaagttaggagtaagtgtttaatatttgatagtattttttgtttataaagtttgtaattaaattaaggaggaggaagttttgtttttatggagttgagggttgagttgggagatgatattagtgttttttagttaggtattaaagtgttgtgaggataaggatgttaggagttatttatgagatttgggtagtagtggttttgagtttttaaggtttttttttaatatgtagatggtgaagtgatttttttttgtaattttgttatatttttaggtattaatttttagaataattttgttttttttttttttgttgtgagtatttgtaatagtttgattttttagaaatttttatagagagtaaaagtgttttaaatagttggagatggagttgtgtgtatgtattgtttgttttagatagaaattaaatgttttgagaaaaattaaatgttattaagatgtgaagtgagttttgatatgattaaggtgagtgtaatttagtttttaatattttatattatatgttttattttatttgattatttttttaattgtattttttatttattgattttttaggtttgtgggaatgtttttatttatttaattttagttattaatataaatatatttatatatagatagaaatatggttgtgttatttttatttttagatttttgtttgtgttattttttttaattagaatggttttttttttatttgttttttttgttttgttttgttttgttttgagatagagttttattttgttatttaggttggagtgt

SEQ ID NO: 661 - DNA, 887 bp, Artificial Sequence
  chemically treated genomic DNA (Homo sapiens)
gtattttagtttgggtgatagggtgagattttgttttaaaataaaataaaataaaataaaaaaaataagtaaaaggaaagttattttagttgggaaaaatggtatagataaaagtttggaaatgagaatggtataattgtgtttttgtttgtgtatgaatgtgtttgtgttggtggttagggttgggtgggtggaggtatttttatagatttggagggttagtgaatagaaaatgtagttaaaagggtgattaggtggggtgagatgtgtggtgtaaagtgttggaggttaggttatatttattttaattatattaaggtttattttatgttttagtaatgtttggttttttttaaaatgtttgatttttatttagagtagatagtatatgtgtatagttttatttttagttatttgaaatatttttattttttgtaggaatttttagggagttaaattgttataagtgtttatagtagggaaaagaaagatagaattgttttggagattgatgtttgaggatgtggtagaattataggaaggggttattttattatttatatgttgaaggagagttttggaagtttagggttgttgttgtttaggttttatggatggtttttggtatttttgtttttgtagtgttttgatgtttggttggaaggtattgatgttattttttagtttagtttttagttttatgaaggtaagatttttttttttttaatttagttgtaaattttgtgagtagagggtgttgttagatgttaaatatttatttttggttttgtatagatgatggtgtggagtttgttaagagggtattggttgtgttagaagtgaaaagttttatggataagaaattggtgtgtgtttgaataattttt

SEQ ID NO: 662 - DNA, 794 bp, Artificial Sequence
  chemically treated genomic DNA (Homo sapiens)
ggttattttgaatataattatttaggagagagttaggtttggtattgtttgtaattagttttttattaagttttagggtagtttatttttatagtaagaattttaggattttagggtgttagttagaaatgggggaagggtttaggagtttttggatgtttttttgttaggagttgatttagtatttttgttattaattttttggatgattgtggataatttttttttttgagttttagttttttaatttgtaaaagataggttttaaagagataagtttttttttgttttagtttagtaattaagttgggtattgttttgattattggtggagatagttaggagggggttggtttttttagggttttagagatagaggtgtattgaagttggagtttgtaatttaggtagtagatttgaaatttttgttggatttgagggttagggaggtttttgggatgtaaataaattttttgtgtttttagagtagagtagagagtttatgttgtagttttattttagttgattagattagttttgggtgttggttttttgtttttttttagttttttttattgatttttaaggaagttattttttagattaggttagtttgttttatagatggttttggtagggtttttttaaggtaaggagtatttttattttgggtagttgggttagttatgtgttatatttgtttttatgtttagaggttagagtgatattgttagtttttgtaggtttggttattgattgttgggttttattaagttattgtttttatatatatt

SEQ ID NO: 663 - DNA, 794 bp, Artificial Sequence
  chemically treated genomic DNA (Homo sapiens)
ggtatgtgtggaaatagtgatttggtgaagtttagtagttagtggttaggtttgtggggattggtggtgttattttagtttttgggtgtgggggtagatgtggtatatggttggtttggttatttagagtggggatattttttgttttggagaagttttgttggagttgtttgtgggatagattgatttggtttggaggatggtttttttgggggttggtgagggaggttgggaagaggtaggaagttagtatttagggttgatttaattagttgagataaggttgtagtgtgggttttttattttgttttgagaatataggaggtttgtttatattttgagagtttttttagtttttggatttagtagggattttggatttgttgtttagattataagttttaattttaatgtatttttgtttttgaggttttgagggagttagtttttttttggttgtttttattggtaattggagtaatgtttagtttggttattgggttgggatagagggaggtttgtttttttgagatttgttttttatagattggaaaattgaggtttagagaagggaattgtttatgattatttagggagttagtaataagggtgttgggttagtttttggtagggagatatttagaggtttttgaattttttttttatttttagttggtattttaggattttggagtttttgttgtgggaatgggttgttttgaggtttggtgaaaagttggttgtaggtagtgttaggtttggtttttttttgagtgattgtgtttagagtaatt

SEQ ID NO: 664 - DNA, 785 bp, Artificial Sequence
  chemically treated genomic DNA (Homo sapiens)
aattttgttgtatatttaaaatagattttattatttataggagttggttatgagtgttgattttataattttatttttttttaaaaaattaaaaattttataaaatttatatttagttgatagaggttttgggggaaattatagtttggaaaatggattagttagagtatttagattttatggaaatgttgggaggttgttttgagggtgggtgttgtgagaaggtttggggagaggtgggttagggttgttaatgggggtagggttgtggaaggagttgtttgtgtggggttttggtgataattgtggggtttagtggtttttgtgggtgttgataggagtttggtggtgagtgatggaggaggtggttgtaaaataggttattgttgggtgtttggggtttattttgtggatggtgttgttgttaagttatttttagaatttgataaggatggatgttttgagtggttttttggggtggggggaattaggaagtagtgaattaattgaaattgtggtgaagttttttttttttgaagagtgagagagtgtggtatgagagtgtgtgtttgtatttatatgtgtttatataagtatttgtatatatgagggatttagttggaaaggggataggtggtttttaaaagtttaagtttatatttttagggttggggggtggggtgggttaatgataatttttttttttatttagtggtaagaaattatattgttaggttgttaaaaagattttttgggatttggggtgggagtttatagttagatgg

SEQ ID NO: 665 - DNA, 785 bp, Artificial Sequence
  chemically treated genomic DNA (Homo sapiens)
ttatttaattgtgaatttttgttttaaattttaaaaagtttttttggtaatttaatagtatagttttttattattaagtgggggggaaggttgttattagtttattttattttttaattttaggaatatgagtttgggtttttaaaagttatttgttttttttttagttgagttttttgtatgtatgagtgtttgtgtgggtatatatgaatgtaaatatatatttttatattatgtttttttattttttaggaagaaaggattttattatggttttagttaatttattgttttttggttttttttattttagggagttgtttggagtatttgtttttgttgaattttaaaggtagtttagtaatagtattatttgtagagtgaattttgggtgtttgatggtaatttattttataattgttttttttattatttattgttaggtttttgttagtatttataggaattgttgggttttgtggttgttgttaaggttttatataaatagttttttttgtggttttgtttttattggtaattttggtttatttttttttgaatttttttatgatatttatttttaaagtaattttttagtatttttataaaatttgggtattttgattaatttgttttttgaattataattttttttgaggtttttgttagttggatgtggattttgtaggatttttaattttttaaaaaaagatagaattatggggttagtatttatgattaatttttgtaggtggtgagatttattttagatatatggtaggatt

SEQ ID NO: 666 - DNA, 776 bp, Artificial Sequence
  chemically treated genomic DNA (Homo sapiens)
gttttggtttttagttttattgtattttatttgtgttaaggttatgggaatttttttattgtttttgttagtagatgttatttagtatttattttaagatatttatattttgatttggaagagattagaagtattttgtagtttgtgtggataagttttttttttgatttatagtttttttatttttgtatttaggagagggatggtagtgttgagggttgtgggatttttttttttggaggtttttttatttttgtggtttttgtgtggtttagtttttttttgagttggtttaaggggtaatttgatttaggttagttggtggagtatgaggtagtgtttagttgagtgttatggtattttattaagtttgaaatgtgattgttattgttgttatattttagtgtttttaataatttttttataaatgagaaaaatagagtttttttaaatgttttttttttgatattaaggaaagtgtatggaattttgtttagaggtttgagtttgggtgattttaggagtggttttagagtttgaggaaaggtttggggggtggagggggtgtttttttagttttaggtaaagtagtgagttgggggttatttgttgttttttttgtgtttgggtttgtaaagttagtggttgttgtttaaattttattttttttaatatgttaggattgtttattttaggttatttatttatatggttatggtttagaggttttagatttatatgtttagtggggttaaggatttaggtaatgtaaattg

SEQ ID NO: 667 - DNA, 776 bp, Artificial Sequence
  chemically treated genomic DNA (Homo sapiens)
tagtttatgttatttggatttttgattttattaggtatgtgagtttgagatttttgagttatggttatataaatggatggtttagaatgagtaattttgatatgttaaggaaaatgggatttaaatggtaattgttgattttatagatttaggtgtagaggaaatagtagatagtttttagtttattgttttgtttgaaattggaaaaatattttttttgttttttaggtttttttttaagttttggagttatttttggggttatttgggtttaggtttttgggtagggttttatgtgttttttttgatgttagaggaaaggtatttggggaggttttgttttttttatttgtaaggggattgttgggggtgttaaagtgtgataatagtagtgattatattttggatttaataaaatattgtgatgtttagttagatgttattttatattttattagttgatttggattaagttattttttgagttagtttggaggggagttggattgtgtagaggttatgaggatgggggagtttttagggaagagaattttatgatttttagtgttgttattttttttttaggtatgagggtgaggggattgtaagttagaggggagatttgtttatatgaattgtagggtgtttttggttttttttgggttaaagtatgagtattttggggtgggtgttgaatggtatttgttggtagagatggtggaagggtttttgtggttttgatataggtgaagtgtagtggggttgaggattgggat

SEQ ID NO: 668 - DNA, 786 bp, Artificial Sequence
  chemically treated genomic DNA (Homo sapiens)
tttaatgatatgttttttagtatgtatttttattgttatgtgatatatgattgtatattgtttggaattggtatatagtaagtgtttattaagggttatatttttattatttattaatgggtttgttttttgttatagttaattttttgttgttaatatttggtttaatggagtttttttgtttttttggagaggattattagttttttatattttttttgtattttgttttgtggtttagtaggttggttattttttttgtaggtagttttatggtggaggttttatgtggttgtttttttatttgtttgagttaagtgtttttggggaatgatttggagtttgatgggaggaggagatttttttgtttttttttttagttttaaatttaattgaaattgttttgtaataattgtatttgtggtttgtgaaagttgtgttttgtggtgattagggattgagattagttggtgaaaaatttggtataggggtatatatggtattattggggatattaagtaagttatggataatgggggagatagagggtttttgtaattagaaattattgggaattttggttatttttttttgttgtagatatgtttttgttatgttgggttggtgtaggaatatgttgttttttttagtattagttttttttttttttagtaatataggtggtaatgtggtagagtgtttaaagtgtttttgtagttagattgtttgggtttgaattttggatttgttattttttagttgtgggattataaaggattttgtttt

SEQ ID NO: 669 - DNA, 786 bp, Artificial Sequence
  chemically treated genomic DNA (Homo sapiens)
gggataaagttttttgtggttttatagttaggaggtggtagatttaggatttaaatttagatagtttgattgtagagatgttttgggtattttgttatattattatttgtgttattgggaaaagggagaattgatgttgggaggaatagtgtgtttttatgttggtttggtatggtggggatatgtttgtagtagggagaggtggttgaggtttttagtggtttttggttgtaggagttttttgttttttttattgtttgtggtttgtttagtatttttagtgatgttgtgtgtgtttttgtgttaggttttttattagttaattttagtttttggttgttatgagatatagtttttatagattataaatgtaattattataaggtaattttagttagatttggggttgggagagaaaatagaagggttttttttttttattaggttttgaattgttttttaggagtatttaatttagataaatggggaagtagttgtgtggagtttttattgtagagttgtttgtaggggaagtggttgatttgttgggttatgaagtagggtgtaggaaggatatggggagttagtgattttttttaagggggtagggggattttattaaattagatgttaatagtaagaagttggttataataggggatgggtttattggtggataatgaaaatataatttttagtaggtatttgttatgtgttagttttaagtaatgtatagttgtgtgttatgtaataatggggatatatgttgagaaatgtgttgttagg

SEQ ID NO: 670 - DNA, 793 bp, Artificial Sequence
  chemically treated genomic DNA (Homo sapiens)
ttgtaagtttggaaatttaagtttagtttttgggttggtggtttattggttgtttgattttaaataggttgtttgttttttttgagtttttatattattttaagtttataaggttaattatttttagaggtggggagaggttagagggtaggtaggttttgttgtgggtaggtaggttttgtttatttttatttttttaagggtgaggttttaaggtatgagttgtttttagtgtaaaagttggtattaatagtagtaatttataaatttttggagaggtttggtattttttatttagtgattgttgagtttgattgatggggttatgttggtaaattagttattatttagtagagatattttttagagatgttaattgtttagtgtttatgtgtttttatttttttttggtataggtggttggttgttgattttttgttattattgtttgataatagtgtttgatttgtttatatagattagggtttttgtatgtatgttgttagtatttaattattagttagtatggtgtatgaagtatggtttattaatgtttttgaggggagtaaataggtgttggtagaaatttatttttgtggataaatttgtggatatgtgtatttttatatgtgtttatttagtttttaagtataggaatgagttagtgttatgtgtgtatatgtattttgtgaattatttatatgttggttaagaagtagttttagatatatatgtataggatggagtatatgtatgtatataataggtaatgttatatggggttgtgttagga

SEQ ID NO: 671 - DNA, 793 bp, Artificial Sequence
  chemically treated genomic DNA (Homo sapiens)
ttttaatataattttatgtagtattgtttgttatgtatatgtatgtattttattttgtgtgtatgtgtttgaggttgttttttagttggtgtatgagtagtttatagaatgtatatgtatatgtgatattgatttatttttatatttgggggttaagtgggtatgtatgagggtgtatgtgtttatagatttgtttatgggaatagatttttgttagtatttgtttgttttttttaagagtattaatgaattgtgttttatgtgttgtgttggttggtagttagatgttaatagtatgtatgtaggggttttggtttgtgtagataaattaagtattgttattagataataatggtaggggattgatagttagttgtttgtgttagggaggggtggggatgtatgagtattgggtaattagtatttttaaagggtgtttttgttgaatggtggttaatttgttgatatggttttattagttaaatttagtagttattgagtggggaatgttgggtttttttaaagatttgtgagttgttgttgttggtgttagtttttgtattgggagtaatttatattttaagattttatttttaagaggataagggtgaatagagtttgtttgtttataatagagtttgtttgttttttgatttttttttatttttgaggatggttggttttgtgagtttgggatgatgtggaggtttggagagggtaagtaatttgtttagagttaaatggttagtgggttattaatttaggaattgagtttgggtttttagatttgtag

SEQ ID NO: 672 - DNA, 718 bp, Artificial Sequence
  chemically treated genomic DNA (Homo sapiens)
tggaggagattattgagggtatgttttttaggttggaagagttttgtagtttggttgatttggtgagtggttgtttggaaggtgtgggtttaggtttaggttagattttaggtttttgttggagttttttgtggaagttattttggtggtgagttagtaattaggaggaatggggtagtggttagtgttgagaggaaagttatgtgtaaatattttttttttttttttttttttgtttttttttttttatttaattttaagtgttttttgaggtggttattttgattttgttttttttttgagatggtttttattttgtagaggagttaggagtggattataaggtggtatttttgggtattgatgtagggagttgtttagtggggatgttagattatatttaattttttttagttttgtattgttttttgtgtaaatatggagatagttaggaaatggttttaggtttgtgaggtttaggaggagttttttgtttaggttatagtttgtggtggagttgggtattgagtttttttttgaatttttttgttttttttgtttttattttttattttgtttggttggtttaaatttattagtttggttgaggaggaagatggaagataatggtttagaagataaagttttttatgttagagtttttagaaattgtttttagaggttgggtgtagtggtttatatttgtaattttagtatt

SEQ ID NO: 673 - DNA, 718 bp, Artificial Sequence
  chemically treated genomic DNA (Homo sapiens)
agtgttgggattataggtgtgagttattgtatttagtttttagaggtgatttttagagattttggtgtgggaggttttgttttttgggttattgttttttatttttttttttagttaggttagtagatttgggttaattagatagagtaggaggtaaaagtagagagaatagaaggatttaggaaggaatttgatgtttaattttattatgggttgtggtttgggtaagaggttttttttaggttttgtaggtttgaagttattttttggttgtttttatgtttgtataggggatggtgtagagttgaggaaagttaaatatagtttagtgtttttgttgaatggttttttgtattggtgtttgagagtgttattttgtggtttatttttggtttttttgtggaataaaaattattttgagggaaggatgagattaagatggttgttttaggaagtatttggggttgagtgagagagagagagtgagagagagagagaggagggagtgtttgtatgtggttttttttttagtgttggttgttgttttattttttttggttgttaatttattattaaaatggtttttgtagaaaattttagtaagggtttgaagtttggtttgggtttaaatttatgttttttaggtagttatttattaggttagttaggttgtaaaatttttttagtttgaggagtatgtttttgatggtttttttta

SEQ ID NO: 674 - DNA, 1055 bp, Artificial Sequence
  chemically treated genomic DNA (Homo sapiens)
tattaggtttattgttttagagaatattatgttgggtataattaaatttagggagagaaataggtgggaagagtaggtgtttgttttaagatggttttgattgttttagggtataaatttatggaaaaatatttaatttagaaaaaaaaaaattattttaagtatatgtatttatatttattaaataaagtttaaaatataatttttggggatttttaagtaataaaatgatttatgttaggatatgatgatttagtgggaaagagggaattttattatttatgtgttttttttaaaaaattaatttgttttttggataggtgatgggagtttttgttattagattgttttaagaaaattgtttagtaaaataaaataaaaaattttttttaaataatttaagttttaaagttgagtaatttgatgtaggttagtttttaatttatgtttttgtaggatatatagagttagggagttagttggttaagtttgggggtttgaattaagaaggatttattagttgaaaaattttaaaattttgtgttatgtgaaggaattttttaaaatattggattttatttaggtgtagtgagttgtttaaagttatggtaattttttttttgttgttatattatttttatttttgtgtttttagatttttttttgttttgtaatgttttgttgggatttttgattttgtttgaggttttgtggttaagggttagggtttttattgaagttaggaatagtttggattttttagtgtgaattttgtttgaagggttatatattttttaaattttagagaatatttaaatggttttttagtaattattgagaatgataaataggaaagattttgattgttttgtttggtttttttgttttttttgatatgattagaaaaaattatttgagttgatgataaatgttgttttgggattttatttttgttattagttgtgggttgatttggggtgtatgatttgatatttgtgagttttagttattttatttgtaaaatggggataatgttgtttgttttttagggttgg

SEQ ID NO: 675 - DNA, 1055 bp, Artificial Sequence
  chemically treated genomic DNA (Homo sapiens)
ttagttttgagaagtgggtagtattatttttattttatagatgaggtaattgaggtttatagatgttaagttatgtattttaggttagtttataattggtgatagaggtggaattttaaggtagtatttgttgttaatttgagtaattttttttagttatgttagagaggatagagaaattaaatagaataattagggttttttttatttattatttttagtaattgttgaaaagttatttggatgttttttgaaatttaaaaaatgtgtaattttttaggtaaagtttatgttgggaagtttaggttgtttttgattttagtgggaattttggtttttggttatagggttttaggtggagttgggggttttagtaaaatattgtaaaataggaaaaaatttaaggatataaaaataaaagtgatgtggtagtgggaaaggggttgttatggttttgagtgatttgttgtgtttgggtgggatttaatgttttggaaggtttttttatatgatatagagttttggaattttttggttggtaaattttttttaatttaggtttttaggtttggttaattagttttttggttttgtgtgttttgtgggggtgtaggttggaaattggtttgtattagattatttagttttgaaatttaaattgtttgaagagaattttttgttttgttttgttggatgatttttttggaatggtttgatggtagaggtttttattatttgtttagaggataaattgattttttagaaaggatgtgtgggtggtggaatttttttttttttattgagttattatattttgatatgagttattttattatttggaggtttttaaaggttgtattttgagttttgtttaataaatataaatgtatatgtttaaaataatttttttttttttaaattaagtatttttttgtgaatttgtgttttggaataattggaattattttagagtagatatttgttttttttatttgtttttttttttgggtttggttgtatttggtgtgatgttttttgaaataatagatttggta

SEQ ID NO: 676 - DNA, 829 bp, Artificial Sequence
  chemically treated genomic DNA (Homo sapiens)
tgtattttttattttaatattatttggttgaaatttttggtttagttttagattatttttgtttaatttttgtaaataaggttatatttgggtatttatggtttattttatgtttttttttatgatagatgtttgtttgagtttagtttttgtagttattgttttttattaaagtagattttttttttttttttgtttatggaggagtgagggggaattgttgagaggaggggtagattggttagggagggggtgattgagaataggaagaagatggggtgagatttgagaggtatgttttggatataataaataagtttgttgttttgtttagaaagggatttgggatttttaattttattagagttttaaaagtattagtttaaagttaaagttagatatatgtaaagttgtagtttttgggggaatttagagtttaaaaataatattttttttgatttaaaaattataagggaatatttatggtatattttttgattaaaaaaggaaagtgaaaaataaggtttttttttttttttttttaattattataaaattaatttgtgtttattttattaagttatgatttttgttggttttaagtgagtttaatttatgttggttatagatatgaggggttgggaagtttgggtatgttttagtgaattgaattggttttttttgaatggttgttattttttttttttgttttttttagtataggaaagttattaaggagttgtttatgttagtatatttattatttagatttttagggtattgtttatttgagaggttagatatagtggggtttattaaagttttaaag

SEQ ID NO: 677 - DNA, 829 bp, Artificial Sequence
  chemically treated genomic DNA (Homo sapiens)
ttttgaggttttggtgagttttgttgtgtttggttttttagatgaatagtgttttgggagtttgggtgatggatgtgttggtgtaggtggttttttggtggtttttttgtgttaaaggaagtagaggaaggaaatgataattatttagaaaggattggtttagtttattaggatatgtttaagttttttggttttttgtgtttgtggttaatatgaattgggtttgtttgaggttaatagaagttgtgatttgatggaataggtataagttagttttatgatgattaagaaggaaaaaaagaaaattttattttttattttttttttttaattaagaagtatgttgtgggtgtttttttgtggtttttgagttaaagagagtattgtttttgagttttgagtttttttgggggttgtagttttgtgtgtatttaattttaattttgaattaatgtttttagggttttggtgggattgggggttttgggtttttttttgaataaggtagtaggtttgtttattgtgtttaaagtgtgttttttagattttattttattttttttttgtttttaattgttttttttttggttaatttgtttttttttttagtagtttttttttatttttttgtgagtaaaggagggggaaggatttgttttggtggaaggtggtggttgtagaggttgggtttaggtgaatgtttattatggggggaggtgtggaataagttatgagtatttaaatgtggttttgtttgtagggattgaataagggtggtttggggttggattgggggttttagttaagtaatattggggtgaaaaatgta

SEQ ID NO: 678 - DNA, 793 bp, Artificial Sequence
  chemically treated genomic DNA (Homo sapiens)
gttgtttggttttttaggaattagttgtagttgggattttttgtagttttttttgtagtaagttggggtagttatgagttttgtttgtttaatgtggggttaggtgggtatgtttgttgtgtttggtagttttgatatttttagattttgttggaagatgtttgtggtttgaaagtttattttgtagttgttttattttgggatgtagtttttgtattggtaggattaatgtaaatagaatttgtttggtttattttttgttgggttttaataggtttgtaatgttattgtttgttagggagagttatttggtgatattgttaattaaaattatgattttgggggtaagaaaaaattttaaaatgttgaagttattttttttaatagaaattttattttgaaggtgtttatggaggttaggttgattagaaaaatttataagttataaataagtttaaatagttttatttaatttatttaatttggtgtttggagtttttatggggagaggtgtttggtattaatatagggtgggggtggttatttttatttttagtttttgggttttagagttgagaggagggagagaattgaatttttttggaagaatgtggaattgttgagtagatgttttggaatttgttgatttaggtatttgggagtatagtttgattggttatttttgtgttaagttatttatagtttaatggttatttttaattggaaatttattttaaagtggtggtagtgatgggggagtggttgtatttgtaatttattattttatatagag

SEQ ID NO: 679 - DNA, 793 bp, Artificial Sequence
  chemically treated genomic DNA (Homo sapiens)
ttttgtgtgaaataatggattatagatatagttatttttttgttattgttattattttaaaatgaatttttaattgaaaatagttattggattatagatagtttggtgtagagatggttggttaggttgtatttttagatgtttgggttagtaaattttaaagtatttatttagtagttttatatttttttaagaaagtttagttttttttttttttttagttttgggatttaggggttagagatgagggtggttatttttattttgtgttgatgttaggtatttttttttatgaggattttaggtattgagttaagtaaattaaataaaattatttgagtttatttatggtttgtgggtttttttggttagtttgatttttgtgagtatttttaaaataagatttttattagggaagatgattttagtgttttaaaatttttttttgtttttagagttatggttttaattaatagtattattgagtggttttttttggtagatagtggtgttgtaggtttgttgaggtttggtgaggaatgagttaagtagattttgtttgtgttaattttgttagtgtagaagttgtattttagggtagagtgattataaaatgagtttttaggttatgagtattttttagtagaatttgggggtgttaaggttgttagatatagtaggtatgtttgtttgattttatgttggataggtagggtttatggttattttagtttgttgtggggaaggttgtagagaattttagttgtagttggtttttgagaggttaggtagt

SEQ ID NO: 680 - DNA, 860 bp, Artificial Sequence
  chemically treated genomic DNA (Homo sapiens)
agaaggggaatagatttggggagttatagtagatttttgtttgggttgattttgtttattagaggagttattggggggttttggagtttggaagttttattgttttgttgaattagatagggtggaaatgtttggtgttattatatttaaaaatatttttatatgaaaatgttttatatgaaatttataagtaggaggtgttattggttgggaagatatttaaagtgaattattgagaagagggaatagatatgttatttatttttttaaggtaggtaatagtaaaaggtgaatgtgaggggaaaatattttatttaatgtaatagtgagttgttttttttggttttttgaataaatagtaattaaattatgtaagttgtgatagtaaaattgtttgaaaaattaatttttttattataattgtttagatatttatatttttataaataggagttaattttatttgtggtttttatgagtagaatgtgatatgggttgtgggtgtgttgtaatttattatggttgtaggtgatagttgtaaaagtatatgtttaaaaaatgtattaatgtgtttggatgaatttgtgtttttggaggtgtttttttttgtagtagaattagagatggttatgatgttggagttgtgaagggaggttggtattttggtgtttattggttaatgttttggaagtgaagtaatgtttagtatttagtggtattaatagattgtttgattttaattttgtttttagtttattaagaaagtatttggtggggttagggtttgttttggttatatttgtttagtttattttaaggttatttgtaggtattaggtttggtttaataataaaaaggat

SEQ ID NO: 681 - DNA, 860 bp, Artificial Sequence
  chemically treated genomic DNA (Homo sapiens)
gttttttttattattaagttagatttgatgtttgtaaatggttttggggtgggttaggtaggtgtggttagggtagattttggttttattaagtgtttttttggtgaattggaaatagagttgaagttagatagtttattgatattgttgggtgttgagtattgttttgtttttaaaatattaattagtaggtattaggatgttaatttttttttatggttttagtattatggttatttttaattttgttgtagaaaaagatatttttagaggtgtagatttatttggatatattagtgtattttttagatgtgtgtttttgtaattgttatttatagttgtggtaaattatgatgtatttatagtttgtgttatattttgtttataaaagttatggataaagttaatttttatttataaaaatgtgggtatttaagtaattatggtgggaggattggttttttaagtaattttgttgttatagtttatatgatttaattattatttatttgagaaattaaaaaaagtgatttattgttatattagataaagtgttttttttttgtatttattttttattgttgtttgttttgaaagaataaataatgtgtttgttttttttttttaatagtttattttagatatttttttagttaatggtattttttatttgtgggttttatgtgaaatatttttatgtgaaaatgtttttaaatgtgatgatattaggtatttttattttgtttggtttaatagagtaatgaaatttttagattttagagttttttggtggtttttttgatggataggattaatttaggtaagggtttgttgtggttttttggatttgtttttttttt

SEQ ID NO: 682 - DNA, 5907 bp, Artificial Sequence
  chemically treated genomic DNA (Homo sapiens)
gttgttggagtagggttttagtgtattgtgagtttttgttttttttgttttgtagtgttgtgagttttttttttttttgtgtttggttttgtttgtgttttttttggtgtgggtatttgtagatttgttaggaggttgatgagaggtgtttttatagagttttgtttttttttagatttttaaatgaaaagaaagagaaaagttaattttttgtttttattttgtatgtatttggagagtggttggtggtgagtgatttgtataattgttttttttgtggtgtttttggatgggtggagagaatttgggtgattgagtttgaggttgagtttttttgggagtgatttatgttagttatttttatttttaagggggatttgtggttgggtttatgtgtgaaggatgggtgttagggaaattgatttatagatgatttgttttgtgagagattgataatttagttttgtgggtttttggggtgtttagattagtttttagttagaggatttggggttgtatagtttttggattttggagggggtggtttgggggtgggagattgtgagtattagtttatgttggtttttttttattttgtggtggtgaggtgggaagggttaggatgtgagtttagtattttttttagaaatgtagtattttgtttttttattttttttgtttttggtgtttttttttttatgtgtttttttttgttttttttttaagggtgttttttttttgtttttagtttatgtttgaattttttggtgttttttttttttttttttagttttttttttatgttttttgtttttgggtattttttttttttaattttttatttttgtattgtttgattttgaggggtgggagtgtattgggttgtgtatgggtgggggtgttgtgttagttttgtgtagttgttttgatgttgttgttgttgttgttgttgttgttgttttttgtagtttagtttgtgttttgtggtagttttgtagtgtattagttattattgttgttgttgttgttttgttagatttgttgttagtttgtttggtttagttttgagagagttttgaatgttagttgtgagggttatgagttagagagttttggggtgttgtgtggagagtaagtggagatagtgattttgtgttttttagtttttgtttttttgtattgtgttttttgtatttttgggtttttttgttttttttgttgtttttattgttgttatggttattttgttttgtagtaagttgtttaatgtggttatgtttgtgtttaataagttttaggttaagatgagtggtatgtttgttaggatgggtttttaggtggttatggatgaggaggtggtgggttttgtgtattgtgatgattttgattttgagtattgttagggtttgtagatggatattttgaaagttgagggagagttttgtggggatgagggtgttgaagtgtttgttgagggagatatttattattagtgaggtagtggagtttttttgttgttttttggttttaaggattaggtgggaggtggtggtgaatttgggggttatgataagtttaaaattatggtgtgggaggtaggttggaatgtgattaatgttatttaggtaagtgtgggatttttagttttgtttgttttttttttttttagtttagtgtgttgggttttgtttttgatagttgtttggtgattttggtttggagatttttttttgtatttaggaatttttttttttttattttttttagttttgtgtggggatttatgtttttaggtggtgttttttgttttaatttatgtttttttttaatggtattagttgtaagattgttaggttgaagtttggtttgagatatttgtttggagatattgtaaaagtgaaggaaatggggggagggagtaggaagtgatgagaaagaaagaaaattaggattggagggtatggtttggttttggattttggaatggatttatagttgtatttttgggaggaaagaagaaggggaaattgttgaggttggagttttttttttttgtatatatgtatagatatgtatatgtatataggtaggtatattatatgtttatagtttttttttttatgaataaaggtgtaggtataggtgtatatgatatgtatttatatatagattatagtattatttttaaatgtatttgtgtatatttttatagttttataaataaaagtatatatttgtatatattaaatatatgaatatttgtttgaatatatgtatatatatatgtatagatgtatgtagataggaattagtttgtttttttgggtgtggttttgttggagatatataggtatatatatatgaaagtatatatatgtttttatataaatatatttagtttgtaataatttagtattatttgtgtatagatttgttttttttgtttgaaattttggttgtattgtaaagaggtggttagtttttttttgtgtgattttggtgaagttttttttagaggttaagaatggtttttgttttttaggttttttttttttatttttaattttttattttttattaggtggtgtaggatttttatatagggagtaggtttggagttttggtaatgatttttgagttagtaggggttggtaggttgtagttttttgggttgaaggagattttagttttaggtaattttggttttttatagtttggttttgtggtgtttttggagtgtattattattggggttatggaaggtaggttttttgggagtagaggttttttaggggttgttttatgtattggggtaagtaggattttattgggttttgaatattagatggtttgatttaaggtgttttttgttttggggtttggtgagatggttttgttggattatggatttggggttgtttttgtttttgttgtgttttgtgattttttggggtgttttttaaggttttgtttgataggttttaagggaggttagggtaggaggttggaggtttgtaggtttttgggattttggattttgttagtttttagtttttgtgtggattttaaattttatagttttgtttgtttgattttgaagtttttggttttagatttttgtttggtttggttttttggtttttttggtgtttttttgttaagtttttttttttgtttgtttttttagtttttatttagtttttttttttaggttttgtttttgttttattttaattttagttttgttttaagatttttaatttttagttttgtttttttttttttgtgtgttgttttttaagtgtttttatattgtttttgtttttgttttttaggggttttgttttatttttagtttttttttttttttattttattttttttttgttttataattgtagtttttaatgtttttttttttggtttgagtttgagatgtttgagtttttttttttagtttttgtgttttattttagttttattataaattttgtgtttattttttttattggtttaggtttagtttattattttttttagagtttttttttgattatgtttttttttgtttttttttatttttttttttaattttttattttgtttttgtttttagaaattattttgaagtatttttttttttttttgtggtttttttttatttttagtttttttttattttagtttttttgttattattagttattagtgtattttttttttttagatttgtttatatatttttttttttttatttttggtttgatatttgggtttattattagtttttttatatttattttgtagtttgtttttaattttttttttttggtggtttagatttaatttttagtgtttttagtgttttttttgggttatagtgttaagttatgttttttgggttttttatttgttgttaagtttgttgagtgtttgtgtttggttgtttttttgttttatagggtatgtttgtgttgggtttattttatgttattttgtatggtggttatttggggttgttttttattatttttgttgttgttgtgtgttgttatattggtaagatttttattgtgtgtttgtatgaggagaatgaagatggtgaggtggtgtgtgtgtgggatttgtatgtggttatagttaatgtttgttgtgttttgtgttttttaatgttgggtggttgagtggtgaatgtagtgtagattattgagttggtgatgatgtgtattttgtatgtggtggtgagtggtaattttatgtataatagttttttggggttgtttgtgttgtagaagttttggtttattattgttatggttgtgttgttgttttgtgttttttttaagaattttaaggttgtgtttaagtttagtttgttgtgtattttggtttattttgttattaatattttggttatagtttattgtttattgtgggtgtgtgattgggtttgggagaaggttaagttttatattgatgttaagaagttttttatttttattggtattattgtgtttagttatatgttttagatttttttgtttttgttggagggtaatatgtagtagtttagtgagttttattgtatgatgaattggatgtatattgtagtttgtgtgtttaagggtttttttgtgtttgttgtttattttatttgggttgatgagattaaggaggttattatggataatttgtttggttttatttgtgttgtggttaatatttttttggtggttaaggtgttgttgttttattttttgttattttttgttgttgttgaggtgttggagaagttgtttttttaggaaggtagttgtgttttttttttggtttgttatagtggtgatgggtgtttgaagttttgggggttgatgttgtgttgtgtgtttgttgtttttatgttgtttatggttatttatgtgttgtattttgtgttgtttatgggttttattggtagttttatgggtgttggtttttgttttttgttgtttagttttttttatttgtgtttgttttggtgtaagttgttgtggtattaagttttttttgatgttgttatttttgttattggtggtatttgtagtgtgtttggttttgtgtatttttttgagggttttattgaagtttattgaattaatgtggaggattagggtgtaagggtgagtttttgttgtgtttttgtgtttttttttttttttttttattttgtttttattagtttagtgtgttttgttgttgtgttgggaggttaagttttaaatatttttggtttttagtttttgattatttggggatgggggggatgggaggggatagggatttatgatttattgtgtttgtgtttttgttgtttttttttttttataatattttggttttggggggaggtggggtgtatttgtgggtagggttttttgtttttttaagtggggttttgatattttggttttagttattgagggggttgggaagggagggagagggggtgtagtttgtaggtgtggtaatttgattttgggggaatattttatatttatttagagtttggaatttatagtgtttagttatttttagtaagagtgttttttattttggagatgttttaattttgtagtgggaaaggttgattgggaaatttattttgggtgggtaattttttttaatgaagttggaaggtgagaagttgtggtggggttagtttgtttgttggtttttaggaatttaaatttttattttgtgtaatttattaggtgtggaattgttttattgtgtgtgtggtgtgtttgtggtgaataagatgaaatgtatattagaaaaaaatttatttttaatttagagtgtggtatataattatatttgtaaataaagaagagataaaggtttgtgtggtttggtgttgggtttgtg

SEQ ID NO: 683 - DNA, 5907 bp, Artificial Sequence
  chemically treated genomic DNA (Homo sapiens)
tataaatttgatattgggttgtgtaagtttttgttttttttttatttgtggatataattatgtattgtattttaaattagagatagatttttttttgatatatattttattttatttattatgagtatattatatgtatagtagaatagttttatatttgataaattgtataagatgagagtttagatttttgaaaattggtaggtaagttggttttgttgtggttttttgttttttggttttgttgaaggaaattgtttatttaaaatggattttttagttagttttttttgttgtagggttgaaatgtttttggaatgggaagtgtttttgttggaaatggttggatgttgtagattttgagttttggatggatgtgaaatatttttttaaggttaagttgttatgtttgtgagttgtgttttttttttttttttttttaatttttttgatgattggaattaaagtgttggggttttatttggaaggatagagaattttgtttgtaaatgtattttgtttttttttaaaattagggtgttgtggaaaagaaaggataatagaaatgtagatgtgatggattgtgaatttttgtttttttttattttttttatttttgaataattagaaattaggaattagagatgtttaaagtttggttttttaatgtggtggtagggtgtattgggttggtgggggtggggtgaggggagaagggagagagtgtagaagtgtggtgggggtttgtttttgtgttttagttttttgtgttggtttggtaggttttgatgaggtttttgagggagtgtatgaagttggatatgttgtagatgttgttgatgatgaagatggtgatgttgaagaagatttggtgttatagtagtttgtgttagagtaggtgtaggtgaaagaggttgggtagtaagaaatagaggttggtgtttgtgaggttgttggtgaggtttatgagtagtgtgaagtgtggtatataaatggttatgagtagtgtgaagatgatgagtgtgtagtgtagtgttagtttttaggattttaggtgtttgttgttgttgtagtaggttgggaaaaaggtgtggttgtttttttggaagagtgatttttttagtattttgatagtggtaaagaatggtagaggataggataatagtgttttggttattagaaagatgttgattatggtgtggatggagttgggtaggttatttgtgatgatttttttggttttgttggtttaggtgaggtaggtgatgagtgtgaagaggtttttgagtatgtaggttgtgatgtgtgtttagtttattatgtagtggaatttgttgggttgttgtatattgttttttagtgaaggtaggaagatttgagatgtgtagttgaatatgatgatgttaatggagatggggaattttttgatgttgatgtagaatttgatttttttttaggtttagttgtgtgtttgtgatagatagtaggttatgattaggatattgatgatgaagtgggttagagtgtatagtagattgaatttggatatggttttgaggtttttaaggaaggtgtaaggtagtagtatggttgtggtgataatggattaggatttttgtgatatgggtagttttgggaagttgttgtatatgaggttgttatttattattatgtataggatgtatgttattattagtttgatgatttgtgttatgtttattatttggttgtttagtgttgggaagtgtggggtgtagtaggtgttggttatggttatgtatgagttttgtatgtgtattattttgttgtttttattttttttgtataggtatgtgatgaggattttgttggtgtagtagtatataatggtggtgaagatgatgagaaataattttaggtagttgttgtgtaggatggtgtagggtaggtttagtatgaatatgttttgtggggtggagaggtaattagatgtggatgtttagtgaatttggtaatggatgaggggtttggggggtgtggtttaatgttgtggtttgaagggggtgttaaggatattgagaattgggtttgagttgttggggaggagaggttaagagtaggttgtggggtggatgtaggggaattaatagtgagtttgggtgttgagttagagatggagagggagggatgtatggatggatttgagaaggaaaggtgtgttaatggttggtgatagtgagagggttagggtgggagagggttgagaatagggagaagttataggagggaagggagatattttgggatggtttttggggataggaatagaatgaggagttgggggaggagatgagaagggatagaagggagtgtagttggaaaggggttttaagaaaggtagtgagttgggtttgggttagtggaaagagtgggtatgggatttgtggtggggttggaatggggtatgggagttaaagaggaaaatttgggtgttttaggtttagattagaggaggaaatgttaaaggttgtagttgtgaggtgaaaaggaaatagggtagagagggagaggggttgaaggtggggtaaagtttttgggaggtaagaatagagataatgtgaagatgtttggggagtagtgtgtggggaggaggaagtagggttggaaattgagagttttaggataaggttggagttagagtgaggtgagggtgagatttaaggaaggggattaagtggaggttggggaggtaagtaggaggaggagtttggtgggaaggtgttagggaggttagaaagttgaattgagtaagagtttagaattagaagttttagggttaggtggatagggttgtagggtttagaatttatatggggattaagagttaatgaaatttagggttttggaggtttatgagtttttagttttttgttttggttttttttggggtttattaaatggagttttgaaagatgttttgggaagttgtggggtatagtgaaggtgggagtagttttgggtttgtgatttagtaaggttgttttgttgggttttggagtggaaagtgttttgggttgggttatttggtgtttggggtttggtggagttttgtttattttgatatatggaataatttttgggaggtttttgtttttagaaaatttgttttttgtggttttagtgatagtgtgttttagggatgttgtggggttaagttgtaagggattggggttgtttagagttgaagttttttttggtttagaaagttgtggtttgttagtttttgttagtttggaggttgttgttaagattttaaatttgttttttatgtaggagttttgtgttgtttggtggggagtggggggttaggaataaggggagagggtttagagagtaggggttatttttagtttttggagagggttttgttagggttatatggggaggagttggttgtttttttgtggtgtagttgggattttgggtgagaggggtgagtttgtgtataggtaatgttggattattgtggattaaatgtgtttgtgtgggagtatgtgtgtgtttttgtgtgtgtatatttgtatgtttttaatagggttgtatttaagggagtaggttggtttttgtttgtatgtatttgtgtatgtgtgtgtgtatatgtttaaatgaatatttgtgtgtttggtatgtgtaggtatatgtttttgtttgtggagttgtaggggtgtatgtaggtgtatttggggatagtattgtggtttatatatagatatatgttgtgtgtgtttgtgtttgtgtttttgtttgtgggaaggggggttgtgggtatgtggtgtgtttgtttatatatgtgtgtgtgtttatgtgtgtgtgtggggggaggagattttgattttagtgattttttttttttttttttttttaaaaatgtagttgtgaatttgttttagagtttaagattaaattgtgttttttaattttgatttttttttttttttattgttttttgttttttttttttattttttttatttttgtagtgtttttggataggtgttttagattgaattttagtttagtggttttgtagttggtgttgttgggagggagtgtgggttagggtggaaaatattgtttgggggtgtaggtttttgtgtagggttgggagggatggagaaagggagatttttgggtataggagggggtttttaggttgagattattgggtgattgttgggggtagagtttggtatgttgagttgggaggggggaggataggtagaattgggaattttgtgtttatttggatggtgttggttatgttttagtttgttttttatgttgtgattttgggtttgttgtggtttttgaatttgttattattttttatttggtttttggagttggagggtggtagaggagttttgttgttttgttgataatggatgttttttttgatgggtgttttagtgtttttgtttttgtagggtttttttttggtttttaggatgtttatttgtaggttttggtggtgtttaaagttgaggttgttgtaatgtgtgaagtttattgtttttttatttgtggttgtttgaaaatttattttggtgaatatgttgtttattttggtttgggatttgttggatatggatgtggttatgttggatagtttgttgtggagtaaggtggttatggtggtggtggggatagtggaaaggatagaaggatttgaggatgtggggaatgtgatgtaagaaggtgagggttggggggtgtaaagttgttatttttgtttgttttttgtgtggtgttttggggttttttggtttatgatttttgtagttggtgtttgaggtttttttagggttggattgggtaagttggtagtaggtttggtggagtggtggtggtggtggtggtggttagtgtattgtggagttgttgtggggtgtgagttgggttgtggagggtggtggtggtggtggtggtggtagtggtgttagagtagttatgtgaagttggtgtggtgtttttatttgtgtgtagtttaatgtgtttttgttttttggaattaggtggtgtgggggtgggggattggagagaggaaatatttggaggtaggggatgtgaggaaggggttaggagaagagaaagggggtgttgagggatttagatgtgagttgggggtagaagaagggtgtttttgggaaggaggtgggagggagtgtgtgaaagagggagtgttgagggtaggggaggtgggggggtgaagtgttgtatttttaggggaggtgttaagtttgtattttggttttttttattttgttgttgtagggtgggagggggttggtgtgggttgatgtttgtagttttttatttttggattattttttttagggtttgggagttgtgtagttttagattttttggttaaggattggtttgggtgttttgaaagtttgtaggattgagttgttagttttttgtggagtgggttgtttataagttagtttttttggtatttattttttgtgtgtaaatttggttgtgagttttttttgaaggtagaagtggttggtatggattgtttttaaggaagtttagttttaggtttagttatttgggttttttttgtttgtttagggatgttgtgagggaagtgattgtgtggattgtttgttattagttgttttttaaatgtgtgtagaatggaggtgaaaggttggtttttttttttttttttgtttgggggtttggaagaaggtaggattttatgaggatattttttgttagttttttagtgggtttgtgaatgtttatgttgagaggggtgtagatggggttaggtgtggaggaaagaagggtttgtggtgttgtaaggtggaggaagtagaggtttgtggtgtgttggggttttgttttgatggt

SEQ ID NO: 684 - DNA, 2001 bp, Artificial Sequence
  chemically treated genomic DNA (Homo sapiens)
ggaattttatttatgtttggtttttttatttattttgtttatagtgtgtgttttagtttagggtgtgtgtgtgtttggtgtttgattttgggttgtgtgtgtttatttggtgagatgttgagagtggggggagtgtttttgttggtgtatttgggtttaggttaggggattttttttttttatttttgtgtgggtgtgggggtgtgtttgggttagggtgtgtgtgtttttgtgtttgtgtgtgtgtgtgtgggttagggtggtgggattgtgtattagggtagggtgtttgtgtttgtgtttgggtttgtttggtttgtatgttggtgtgattttgatttggatttgtgtttttggatgttgagaggttagtgtggtgggggtgtttagttttttggaggagtattatgttttgatatttttgttttattgttttaaagttggtttggggttttgtagggagtggtttgtatggggagggtttgtgtgttgtgtttttgggaggggtaagagagtgggggtgtagggggtgggttaggtttttgggtgtggtgtgggtttgggggatttgtgtggttgatgttaggttattttttaaatagagttggtagtgtgttttgtttggtattttttgaagagttagattgtggttggtgttagtgttattgtttggtttatttgttagtttgtatagttgtgttgttgttgagtgttttgtgagtggtgttttgaggattaggaatggggttttgggtgttgggtgtgttttgaatttggtgtatgtaagagtttgggagtgtttgagttgtttggttgtttggagttttattgtttaggattgggagatgttggaaatgtaattgtttgttttttgaggagttgttgtttttgggattttttggtattgtgtgtattttggttagtagtttttggagaagatggtgtttttaatgtttgatttgtgtggttgtggtagtgttatgtgagttttttaggtgattgtagggttatagtagtttagttgttggtgtttttttggaaattatgatttttggtgtgggtttatggagttatggtttatagggttttgggttgtgtggggttattttagttgtggagggtgtgtaggttgttttttgtttttatgtttttgtttttttgtatttatttgtgttatagttttttgtgttgttgtgatgatttgggttggagttgtttttttggtgtgttttgttgtttttgtggttttagtgtgggtggttagaaatttttttagaagttttgtttttgtgatttttttgggttgatgtttagtgagtttagtgtttttagtgtgtttgttgttgttgtgtttgttttttgtttttttggttttaattattttggtttatttaagttgggtattaagtggttgttttaagtttttattgtgggtgtgaagaaggggggtatttgggttgtgttggagtttatttgagtatatttggatgtgtgggttttgggtatggaattttatttttttgataggaattatggttgtgggttggattggtataggtaaggattaggagttttgttttgtgtgttgggtttttgattgtttttattgggagagttatttgttttttgtgtttttttttttttttaatttaatttattgtatgggtttaggttgatatatagggttatggggggttatagtagaatttatttagaattttttagtgataatttagatgggtagtttttggaattgtaaagggtgtttttttgttattggagttgttggaaaaggattatttttagttaaatttaagtgttagttaaagggttaattttttttgtgattagtttttagggtgtttaaggaagggataggtgaggatttgtgttgtttgaatatggtattattttaattttttgtaggtttttgttggtatttagtttttgaaggattttgagaaagataaggtagtttagagattttttgtagtaaggttt

SEQ ID NO: 685 - DNA, 2001 bp, Artificial Sequence
  chemically treated genomic DNA (Homo sapiens)
gagttttgttgtaaggggtttttgaattgttttattttttttagggttttttaggggttgggtattagtaaagatttatagagggttaggatggtgttgtgtttaggtagtataggtttttgtttgttttttttttgggtattttaagggttggttatagagggagttagttttttagttggtatttaggtttgattggagataatttttttttaatgattttagtgatgagggaatgttttttgtagttttagaaattgtttgtttagattattattgggaagttttgggtaaattttgttatagttttttatggttttgtgtgttagtttgaatttatataatgagttgggttaaaagaaagagaaaatataagagatggatggtttttttaatggaagtgattagagatttggtgtatggagtggagtttttggtttttatttgtattaatttagtttgtggttgtagtttttgttaaagaagtggggttttgtgtttaaggtttgtatgtttgggtgtatttggataaattttagtatggtttgggtgttttttttttttatgtttataatgagggtttggggtaattgtttggtatttagtttgggtgagttggagtggttggaattggagaggtgaggggtgggtatggtggtggtgggtgtgttgggagtgttgggtttgttgggtgttggtttggagggattataggggtgggatttttggagaagtttttggttgtttgtgttggggttgtggaggtagtgaggtgtgttgaggaggtggttttgatttaggttgttgtagtagtataggaagttgtaatataggtaagtgtaggagagtgagagtgtgaaggtgaagagtagtttgtgtgttttttgtggttgaggtggttttgtgtggtttaggattttataggttatggttttatgggtttgtgttgggggttatggtttttgagggggtattggtggttgagttgttgtggttttgtggttgtttagagggtttgtgtggtgttgttatggttatgtgggttgggtgttgggggtgttgttttttttgggggttgttgattagggtgtgtatagtgttagggggttttgggggtagtggttttttggggaataggtggttgtatttttagtattttttggttttaggtgatggggttttgggtagttgggtggtttgggtgtttttaggtttttatgtgtgttgggtttggagtgtgtttagtgtttgaagttttatttttgatttttggagtgttgtttatgaaatgtttggtggtggtgtggttgtgtgggttggtgggtggattggatggtggtgttggtgttggttgtgatttggttttttgggaaatgttgagtggagtgtgttgttggttttatttaaggagtggtttgatgttagttgtgtgggttttttgagtttgtgttgtgtttagggatttggtttgttttttgtgtttttatttttttattttttttagaaatatagtatgtgggttttttttatgtaggttattttttatggagttttaggttagttttggggtggtgaaatgaaggtgttaaggtatagtatttttttgggaggttggatatttttattatgttggttttttgatatttagggatatgaatttaggttgagattgtgttgatatgtagattagatagatttagatgtagatgtaggtattttgttttgatgtgtggttttattattttgatttgtatatgtatgtataggtatagaagtatatgtgttttagtttggatatatttttatatttatgtgggggtggggaggagaagttttttaatttgggtttagatatattgataaggatattttttttgtttttgatattttgttaaatggatatatatagtttggaattggatattgagtgtatgtatgttttggattgggatatgtgttgtagatgggatgggtggaggagttgagtgtgagtgagatttt

SEQ ID NO: 686 - DNA, 2448 bp, Artificial Sequence
  chemically treated genomic DNA (Homo sapiens)
ttgttttgtttttatgataaaagttaatgggtttttagtatttttattaaaaaatagttatgtagatagtgttttggtggttttgttttgtattttaattttggggtgggggaaaggggttaatgtttttgtagttttaaattgggttattatttgtttattgagttgaatatgatgtggttttgtttggtgtgtttttgttggttttgtgtttgtgttattttagtagggtttgtagtaggtgaaaggtgaggttaatggatagagaagggttgttttgttgtggttgtttgtttgttgttttgagttttaattggttgggttttgtgtgggtgagaagtgtttgttagtagtaagaggagtgtgtgggttttgtattttggttttgtgttttggggttttagtgtagatttgggttttggatttggttgttttggggtttttttggttgtttttagggtatagttgtattaggagtagtagtgtggttagtagtgttgtgttttgtttgttttatggtgttgttggttttggatatataggggtagtgtagggtgaggtgtgtttgggatagttgtaggtgttgtttttttttttgtgtttgtttggtgatttttttggttgttgtttaatgtttgtagtttgttttttagttttagttattgtgttagtgttgttttattttttttatttagtttttttttttggaggagtgtggtggttgagttgagtggagttttggtgtagggggaggttgggtggatgttttgagttatttataggttgttggtgagtgtttgtatggtttaagattgagttttagtttttgttttttggggtaggttgaagatgttttggggaatatagggtttgttttggtgtgttgttagttttatatagtgttaggatagttttgattgatgttagtgaagaatatgtattgattgtagaagtaatgatagttatagttttgagtttgatggttggtgggttttggagggtgtatttttttatattagtttttgtgtttttgggtgtagtgttggaagtagtattggatgtaggaaagtgagaagttggttggggtgtaaagattgttttgggatttatgggagttttattgttttgtttagaatagttagtaatgattagggttgtttttagattagattagtttgggttgtgtgttttgatatatgaaagggaggtgggattgtgaggttgtttatggtgttgattttgttttttgtttttagaagtggttagaaatgtgagaatgttgtgttgttggaatttattgtttttttgtagttattagttttgtaaatgtaggtattaggagtttattgttggtatttagttaatatagtgggatttattgagaggtagtttgttataattaaagttttttagtatttttatttttttttagttttaggatttaaatttgtagggttgtttgataggtattatgtaatagagggtttttagtatttgagtgtttttagattataaatggttggtttatttgtttttgagtttgttaaagtagtttagtaaagtttagttttttttttgggaattatagtagtagtgtaattttgtttatgagtagtaaagaaatatgggtttaagtttttgttaatttttggtgtggataggttattttttttttattaattttagggtttttatttgtaagattgggtttggttaggtgtggtggtttatgtttgtaattttaatattttgggaggttgaggtaggtggattatgaggttagtagtttgaaattagtttggttaatatggtgaaattttatttttattaaaaatataaaaattagttgggtgtggtggtatgtgtttgtggttttagttatttaggaggttgaggtaggagaattgtttgaatttaggaggtggaagttgtagtgaggtaagattgtgttattgtattttagtttgggagatagagtaagattttgttttaaaaaaaaaaaaaaaaaaaaaaaaaaaaattgggtttggtggttttttggtttttttttagttttagaaatgattttttaatagttttttgtttaaaaatttatttattattattgtagattttggattatatatttaataatatatttattgaggtattatataaagggttttgggagtttttaaagagttggagttataagaagtttaggtagggttagagtaataaatgtgtttatgaagagtggggatgagtggtatttgttgggatatgggtgtaaagttgataaggttatgaaggtttaatagatatttatggagtgtttagtatgtggtgggaataagattattattaagggttttaaagtagttagtgtatattttagagtgaagaggggtattgtagggtgttagtttttttaagttttgattggtaatttaattttgtggaaattgg

SEQ ID NO: 687 - DNA, 2448 bp, Artificial Sequence
  chemically treated genomic DNA (Homo sapiens)
ttagtttttatggggttgggttgttggttagagtttaagaggattagtattttgtaatgtttttttttattttaaaatgtatattgattgttttagagtttttgataatagttttatttttattatatattaggtattttataaatatttgttgaatttttatgattttattaattttatatttatattttagtaaatgttatttatttttattttttatagatatatttgttattttaattttgtttaggttttttgtagttttagttttttagagatttttggaattttttatatggtgttttagtaaatatgttattaaatatgtaatttggaatttgtagtggtaatgagtaagtttttaagtagaaaattattggggagttatttttagagttggaaagaagttaagagattattaagtttaatttttttttttttttttttttttttttttgagatagggttttgttttgttttttaggttggagtgtagtggtgtgattttgttttattgtagtttttgttttttgggtttaagtagtttttttgttttagttttttgagtagttgggattataggtgtatattgttatgtttggttaatttttgtatttttagtagagatggggttttgttatattggttaggttggttttaaattattgattttgtgatttgtttgttttggttttttaaagtgttgggattataggtgtgagttattgtgtttggttaagtttagttttataaatgaggattttgaggttggtaggagggaggtgatttgtttatattaggagttagtagaaatttgaatttatatttttttgttgtttatgggtagagttatattgttgttatgatttttaggagagaaattgaattttgttaaattattttggtaaatttaaaagtagatgggttagttatttgtggtttgaaagtatttggatgttagagattttttgttatatggtgtttgttagatagttttataaatttggattttggggttggaaaaagataagaatgttgggagattttggttgtggtagattgttttttagtgggttttattgtgttggttgagtgttagtggtggatttttgatgtttgtatttgtagaattgatagttgtagggaggtagtgggttttagtggtatagtgtttttatatttttggttatttttagaggtagaggatggggttagtattatggatagttttatggttttgttttttttttgtgtgttagaatatgtgatttggattagtttggtttggggatggttttagttattgttggttgttttaagtggggtgatgggatttttgtgggttttagagtagtttttatgttttagttggttttttgtttttttgtgtttagtgttgtttttagtgttatgtttaggggtatgaaggttggtgtagggaggtgtgttttttggggtttgttagttgttagatttgaagttgtggttgttattgtttttataattagtgtatgttttttgttgatgttagttggagttgttttggtattatataaggttggtgatatgttgggatagattttgtgttttttaaggtgtttttagtttgttttgagggatagagattggagtttaattttggattgtatagatgtttgttgataatttgtgagtggtttagagtgtttgtttagtttttttttgtattaggattttgtttagtttagttattatgtttttttggggagggaggttgggtggaagggatggaatagtattggtgtagtggttggggttggagggtaggttgtgggtattgggtggtggttggaggggttgttgggtgagtgtggggaggggagtggtgtttgtagttgttttaggtgtattttattttgtgttgtttttgtgtgtttagggttggtggtattatgaggtaggtgggatgtagtgttgttggttgtgttgttgtttttggtatagttgtgttttgggagtagttagaggagttttgaggtggttgggtttaggatttgagtttgtgttggagttttggggtatggaattagggtgtggggtttgtgtgttttttttgttgttggtggatgttttttgtttgtgtggggtttggttgattgggatttgggatggtaggtgagtggttgtggtgggataatttttttttgtttattgattttattttttatttgttgtggattttgttggagtggtgtggatgtagagttagtgggagtgtgttgagtagaattgtattatatttgatttggtgggtaagtgatggtttggtttggggttgtgaaaatgttgattttttttttttattttagagttgggatgtggggtagagttattagggtattgtttgtgtgattattttttaataaaagtattgaagatttgttggtttttgttgtagaggtagggtag

SEQ ID NO: 688 - DNA, 2820 bp, Artificial Sequence
  chemically treated genomic DNA (Homo sapiens)
tttaggggataatatttaggtatgttaatggagtttaaaatgttaaggaaattatattataattttgtttagtatattataggttgttaaattgaaatgttatgttagttaggagtgtagtaatttttattttttggttttatttaattaggaagttttagtagagtgaagtttgttaagtgtttgttgttagaatttgaaggaatttgagtgagtaagaagagtgtttgatttattttatagaagtttgtttagaaatggaggagttagtgtttattgaagttggttttgtttttggtttgtttatatggagtttgattagttttagttatgtttattttggtttgggagatttgtaaagtgtttttttttttaatttttttgtattattttgaagtttagggaagtaaagagaggggtatatttggattgtaaaattaatgttttttgttgtttaggagagaagggaatgagagagagagagagatagatagatagagagagagagagagagagagagagagagagagagagagagagagaaattttattgaaatttagtttttttagaatttgtgtgatttggtttttaatgggagattagtgtgattttatggtatttttgttaggaattagtgatttttttgtagttattatttgatttattgtttttttgtttatttttttttataaagttattttttttttattttagtaagatttttttttttaatgatgataaagtttttgttttagtgttttttttaggattggtgtttttttaaaatagtgaatttagaaaattattttgtttaatattttttaaaatttttgtagttttaatgtaagtgtaagtatgtaaaggttttttgttatatttgtattttttgtttattttagaattattttttatttttgggtttgtaatagttttttttgtttttttggatagaggtgggtggtattaggggtttagggtagtaggaggtgaggggttgaggaggttgttagggtaggttggtttgtgttggatatgtgtgtttttttgtggagttaaagggttggggatgggggttttggatttattagagtaattttagttggtgggtgtttggtagttatttaaggaggtagggaaagtagtgagttttattgggtgggttatgatgagtagtatgatgggtagtagtagtagttagtaaaagtttttgtaaagtgtttagttgttgtattgttgtggggatttttatagtattatgattagtttgtgtaattttgtagtagtaaatggtttttgaggaatataggattgtgggggttgggtagtgggttattgagtattttgtggatggtggtagtagaggtggtggtggtggtagtggtatttggtggggaagtagtagttaaatttgtgtatgattttgagagttttagtaatatttagggattgggtttagttttggagtgagagggttgtttgttgagaagttgtgttggagatgtgggaagttgttgttataaggagggagttttgggaagttggaggataggaggagatgggagtttaggggtagatgagtggagtttgaggaggtagggtggagggagagttaaggtgttttgtagtttggtagttgttttttgagttttgttgtttgtatttttttggtgtttgggaagtagtaggtttttagtttgtttggggttatgtgggaagaggtagttgggttttgattggtggagtaggatgtaggttttgggagggaggggttgatgaggaggtgtaaggatgtaaggaggaggtggttgtggaagttatagatgggtttgtttgttaggtgttggtttgagtggggttaggtggggatggtttaaatgagaagtttgggttttagggtgggttatttgtatatttatatattatttgttttattttttgttttaggatgttttttattgaaggtggggtttggattagtgttttttttttgtgtgtgattttgggttgtgagtgtgggttgtggttgggtggtgtttttttgagttggagatggtgggggtggaggtgttagaggagtagtagtagtagggtagagaggggtgagttggtgtgggagagggtgttttgttggtgattggtgttttagtgtgtgggagtgtgttgtttaggttgtagggggatgtaggttgggaatgttgtggtggagaggttagggatgtttttttagggatttataggaaagagggtgagaggtgatggtgttagaattgtttttgttgatttggaagtaatagtagtattttttataagagtgtgtaattttaaggttgtttgttgaggtagtttagttattttggtaggtgttttttttttttttttttttttttttttttttttttaggttttttgtagttttgatttagtttaagtgtttgtaggtttgaatttttttttttattatttgtttttttttagtttgtagtttattagtgtgtttatttgggaggtgtggttagatgtgtttggaaggttagattggttgggataagtggtttgagagaaagagaaaggtttttttgtatatgttgtgggtgggttgttgggagtattggttgggtagtggtgtttgggaaggggagagtgggttttatttgttggtttaggtagtgattttgtgttttttatttgggtttttgttggatggttggtgatttggggtgatgagagaaggtttaatttggtaggagtttttggttttgtgtgttttttttattttttttagtgggaagggtaaatggtatagtgggatttgttttttg

SEQ ID NO: 689 - DNA, 2820 bp, Artificial Sequence
  chemically treated genomic DNA (Homo sapiens)
tggaaggtgggttttgttatgttgtttgttttttttgttggagagaatgaaagaaatgtgtagagttagagatttttgttgagttagatttttttttgttgttttaggttattggttatttggtaaagatttgagtaaggaatgtagggttattgtttgggttaataaatggagtttgtttttttttttttggatgttgttgtttggttgatgtttttggtaatttatttgtggtgtatgtagaggagttttttttttttttttagattatttgttttgattaatttgattttttaaatatatttgattgtattttttaggtggatatattaataggttatgggttggagaggagtgggtgatgaggagagggatttaaatttgtgaatgtttgggttgggttggagttgtggggggtttgggaggagagaggggagaagagagaaggaaggagagtgtttgttgggatggttgagttgttttggtgagtagttttggggttgtatgtttttgtgggagatgttgttgttgtttttaggttggtaagagtggttttaatattattgttttttatttttttttttgtaaatttttagagaaatgtttttggtttttttgttgtgatatttttagtttgtatttttttatagtttaggtggtgtgtttttgtatgttggagtgttggttgttagtaggatgtttttttttgtgttgatttgtttttttttgttttgttgttgttgtttttttgatatttttgtttttattatttttagtttggagagatgttatttagttgtggtttgtatttgtggtttggggttatgtgtggaagaggggtgttagtttggattttgtttttggtagggggtgttttggagtggagagtgaggtgaatggtatatgagtgtgtgggtagtttattttgaagtttgagttttttatttgagttatttttgtttagttttatttgggttagtgtttggtgagtgagtttatttgtggtttttgtggttgttttttttttgtatttttgtatttttttgttgattttttttttttgggatttgtattttgttttattaattagagtttgattgtttttttttatgtgattttgggtgggttgaggatttgttgttttttaaatgttagagggatgtgggtggtagagtttgagaggtggttgttgggttgtggggtgttttgattttttttttattttgtttttttgggttttatttgtttgtttttggatttttgtttttttttgttttttggttttttagagttttttttttatggtagtagttttttgtgtttttggtgtagttttttagtggatgatttttttgttttggggttgagtttagtttttggatgttgttgaaatttttgagattatgtgtgggtttggttgttgtttttttgttgggtgttattgttattgttgttgtttttgttgttgttgtttgtgggatgtttagtagtttgttgtttggtttttgtgattttgtgttttttggaagttgtttgttgttgtagagttgtatgaattagttatggtgttgtgggagtttttgtggtagtgtagtagttggatattttgtgagggtttttgttggttgttgttgttgtttgttatgttatttattgtagtttgtttggtgaagtttgttgttttttttatttttttaagtgattgttaaatgtttattggttggaattgttttggtaagtttagaatttttgtttttgattttttaattttgtagaagaatatgtgtatttagtatagattagtttattttagtggtttttttagttttttattttttattgttttagatttttaatattatttatttttatttagagaaataaggggaattgttgtaggtttgggggtgaggggtggttttgggatgggtagaaagtgtaggtgtagtaggaaatttttgtatgtttgtgtttatattggagttgtgaggattttgagaaatattaaatgggatggttttttgggtttattgttttgaaagagtattaattttaggggaaatattgaaatagaagttttgttattattaaagaaaaaagttttattaggatgaggaagaaataattttatgagaaagaatgagtgagaaagtaataaattaaatggtgattgtaggggaattgttgatttttggtaaaggtgttatgaggttgtattggttttttgttgaagattaggttatatagattttagaggagttgggttttaatagaatttttttttttttttttttttttttttttttttttttttttttttttttatttatttattttttttttttttttattttttttttttttaggtggtaaaagatattggttttgtagtttagatatgtttttttttttgtttttttaagttttaaggtagtataggggagttgagaaaaagaatattttgtgggttttttaggttggagtgggtatgattgaggttggttaggttttatgtaggtgagttgagggtggaattgattttagtgggtgttgatttttttatttttggataggtttttgtggagtgggttaggtattttttttgtttgtttgggtttttttagattttgatggtgaatgtttggtaggttttgttttgttgaagttttttaattaaatagggttagaggatgggagttgttgtatttttagttggtatagtattttggtttgatagtttgtagtatattgggtagaattgtggtgtaatttttttggtattttaaattttgttaatatgtttgggtattgttttttagg

SEQ ID NO: 690 - DNA, 5907 bp, Artificial Sequence; identical to SEQ ID NO: 682
  chemically treated genomic DNA (Homo sapiens)

SEQ ID NO: 691 - DNA, 5907 bp, Artificial Sequence; identical to SEQ ID NO: 683
  chemically treated genomic DNA (Homo sapiens)

SEQ ID NO: 692 - DNA, 3685 bp, Artificial Sequence
  chemically treated genomic DNA (Homo sapiens)
taagtttttttttttggtgtataggtatgtagttataggttaagttgtgatgtgagttttgtgtgtgggatttttgtaaaaggtttgtttgatgtgttgggtgggaattgagtttgggttaattgtttggaaggtaattatgtttattattatattattaatgttgtatggtgtgggtagttttgttgtgttggtttggggtttttattagtgtgttgttgatgtttggggtaggttggttttgatgtttggtttgtttgtttgtttgtagttttgtgttgttgtggtttttttaaaggttgttttgtgttttattggtgtaaggttagtgtggttgatttgttatgtttgtttgtttttgggggtgtttttgtttatttgttgttttgggtttttagagtttttttttaataggtgtttgggggggaaatggttggtgttggtagggtttttatttttatgttttttattgggtgtagggttttgtgtgttgtagaaagttttttttgataattattttgagttggtagtttgttgggtgttgtgtagggttagaggaggttttttggttgttgttattaagttgtggatgagaagaaaagataggaggttaaggaggtttagaaggttaaagggttaggtaggttaggtttgagatggtattttgtgattagttggagggtggaggaaggagaaggagggtttataggttgggtttgaggtggtggtttaaaaagtatggttgtttttttgttggggaattgaattttggttttttgtgtgataggtggggatatttattattatattaatgaggatgatggtgatggttgttgggatgttagattttattttgattgtggatgtttagttttgttttgatttttttttttgatggtaggggttgggtgtgtgtttgttttttatttgttgtttgttgtttgttatttgttatatgttatttgttatttgttatttgttttttgttattgttggtatgatttattttgatatttaataaagtattttgtgattttgttgggatttggagttggagttggattttgataggtattggagtggtgtggaatttttttgtgtgttttgtttgttgtttttaatgtggggattgtgttggggtaggaggaggtgtgggtgaaatagttaggttgttgtttttaggatgtggtgggtgtatgttttgtggggtttggtgagtggaggtgtgggggttggggtgtgtgttggtggtggttggtttgatgtggattttttgggtttggggtggggatgtgggggtgtttatgttaatgttagttggttttgtttatttggtgtttgttttttttgtgtggtttgttggttgtgtattgaatttagataggtgttggttaagggtgtaggtgtttgtgttgggttttagttatgttagtggtgaagtgttttggtgtgttgttaggatggttgagtggtttaaggtgttgtgtttaggttgtagttttttttggaggtgtgggtttgaattttatttttgataagttgattttttggtttgtttgttggagggtaatgtttatggtaattttggagtatttttggttgttttttgttttgagtttttgtttgttttttagattttagtttttttgaagtaagtttttaaaatgttgttgttttttaggtatgtttgttttttttgtttatttgttggttgttgtagaaatagtttaggattatgtgttagtgtttgtgattttttattaattgttttttggatagatgttttttttattattttatatgtttttttttttggttttatatatagtgagtgattgtgattattttttatgtttttttttgtttattttttttgtttgttttttttttatttgtttaaatagatatagtttagattttttttttatttttttttttttttttttttttttattggtttttgtttattgtttattgttttgaattgttgttgtgttgtttagaggtgttttggtttgaatagtttgtttggttttattttttaatttttgattgttgagtagtagtgagtgatttgtttgtggagttgtatatatgttttttattagaggtatgttatttaatattttgtttttttttttgattttttggattttggttgtgtattttattttgttgatattttagttaggttgttgattttattttgttatttgtgttttttttttgttaatatttgtttgttggtttatttgtagtttggatgtttgttggttagaggtagtgggaattttgtatatagttgggtaggtgagtttaaatttggaaagatagtttaagaggaattatgagtggaagttttagatttttgttatttgtttataaatgtttggttttgttgggattagttttgtgttatagtgtatttttatgtgggaagttgtggtttgggttgttttagttatatttagtgtgttttttttagggttagttagttgtggttttgttgaagtgtttttttgttttttttttgtgttttagtttttttattagtttagggggttggattttaagtgtgagttggtggtgtgggttagagtgtaggagtgaggtgtttatggatttggtttgtgtttttgagttgtatgttatggttgtgagatttgttttttattgttgtttttgtttgttgatatatttattttgttttttatttgttggtgatataagtgagaaggttggttttatggtggtgaaaaaaaaaaatattatatgaaagaaagaaagaaagaaagaaagaaagaaagaaagaaagaaagaaagaaagaaagatagaaagaaataataaaaataaaatataaaaattttgggtttgtgttggggatttgtgtttagtaaggtttgttatagtaaatttgtttatatgggtatttgggtgtgggttatggttggttttttttttggagattttggtgggtagttttttgattttgggtggtagagaaagtgtaagatgggatgagttggtttttttttttttgttttttttttgtgttttgttttaggttttttgatgtgatgagagtttttttttttgtttgttttattgggttagttttttgtggatgttgtaataggatggaggtttatggtaggtggtgattagtgaatggtggttggtggtgagttttgttgtgttagtttttgttggtgtttgttattggtgtatgggtggtttagtggtagaatttttgtttgttatgtgggaggtttgggtttgatttttggtttatgtagtatgtttttttattttggtgttgtagtagtattaaggtgtagttgtgtttgtttttgttgtttttttatatttggggtgtgtgagtgagtttggtattggttgtgtttttatgtgtgatggttttttgtttttttttttgtgttttttttgattgatttagggatgagtttattttttgtatttatatattttggtgataataatttttttagatatgagagtgtgttagatattagaatttggtagttttttggttttgtttttttttattgttttgttattgtttttgtttgatgtattttattttatggaatattgttaggtattatgggtttgtagttatttgtattattttttttttttatattttattgttttgtttttttt

SEQ ID NO: 693 - DNA, 3685 bp, Artificial Sequence
  chemically treated genomic DNA (Homo sapiens)
gagagaggtgaggtggtgaaatgtgaagagaaggggtggtgtgagtggttgtaagtttgtggtgtttggtggtgttttgtgaagtgaaatgtgttgggtagaggtggtggtagggtaatgaagagaaataggattaggaggttgttaagttttggtgtttggtgtgtttttgtgtttggaggggttgttgttattaaggtgtgtgggtgtggggggtaggtttatttttaagttagttgagagaggtatggaagaaagggtagagggttgttgtgtgtgggagtgtagttggtgttggatttgtttgtgtgttttgagtgtaaggaggtggtagaggtgagtgtagttatgttttggtgttgttgtagtattaaaatgggagggtgtgttgtatgggttgggaattgaatttgggttttttgtgtggtaggtgagaattttattattgaattatttatgtattgatggtaaatgttaatggaagttggtatagtggaatttgttattagttgttgtttattggttattgtttgttgtgggtttttgttttattgtagtgtttatgagaggttggtttgatggggtgagtagaaggggaggtttttgttatgttgagggatttgaggtggggtgtggagggagagtggagggagagaggttgatttgttttattttgtgttttttttgttgtttagggttgagagattgtttgttggggtttttaggggaaggattggttgtggtttgtgtttgaatgtttgtgtgggtagatttgttgtggtgggttttgttgagtgtggatttttggtatagatttagagtttttgtgttttgtttttgttgtttttttttgttttttttttttttttttttttttttttttttttttttttttttttttttttttttttgtgtggtgttttttttttttattattgtggggttagtttttttatttgtgttattagtaggtgagaggtgggatgggtgtgttagtgagtgggggtggtgatggggaatgggttttgtagttgtggtgtgtggtttagaaatgtagattaggtttgtgggtgttttgtttttgtgttttgatttatgttattggtttgtatttggggtttggttttttgggttggtagggaggttggagtgtgagaaaggagtggaggagtgttttggtagagttgtagttggttgattttggagaaggtgtgttgggtgtggttgggatggtttaggttgtggttttttgtgtggggatgtgttgtggtgtagagttggttttggtggggttaggtgtttgtgggtgggtgatggggatttagggtttttgtttgtgattttttttgggttgtttttttgggtttggatttgtttgtttggttgtgtgtagggtttttgttgtttttggttggtaggtgtttgggttgtaggtgggttggtaggtaggtgttagtgggaagggagtataggtagtgaggtgggattggtgatttggttagggtgttggtagaatggaatgtgtggttggggtttgaggggttggaggaaaggataggatgttggatggtgtgtttttggtgggagatgtgtgtgtggttttatgagtgagttgtttgttgttgtttagtggttagaagttggagggtgaaattgggtgggttgtttaggttaggatgtttttgggtagtgtagtggtgatttaaggtggtgggtggtgggtggaggttggtgggaggaaggagggaaaaggaggaataggggaagaatttgggttgtgtttgtttgggtgagtgaggagaaggtgggtggaggagataggtagggaagagtgtggaaggtggttgtggttgtttgttgtgtgtggggttagggaagagggtgtgtgaggtggtggggagggtgtttgtttgaagggtaattggtagagggttgtgggtgttggtgtatggttttgggttgtttttgtgatagttggtgggtgggtaggaagaatggatgtgtttgagaagtggtggtgttttggaggtttgttttaagggggttggagtttggagagtgggtaagggtttaaggtaggaagtggttaaaggtgttttagggttgttatgggtgttgttttttggtgggtgggttaaaaggttggtttgttaggagtgggatttgaatttatgtttttaggggagattgtgatttgaatgtagtgttttagattgtttggttattttgatggtgtgttggggtgttttgttgttggtatggttgggatttggtgtgaatgtttgtgtttttggttggtgtttgtttgggtttggtgtgtaattgatggattgtgtggggggagtgggtgttaagtgaatggagttggttggtgttggtgtggatgtttttgtgtttttattttggatttaaagggtttgtgttgggttggttgttgttggtgtatgttttagtttttgtgtttttgtttgttgaattttgtagggtgtgtgtttattgtgttttaggagtagtggtttgattgttttgtttgtgtttttttttgttttggtgtgatttttgtgttggagatagtaggtagggtgtgtggggaggttttatgttgttttggtatttgttggggtttggttttggttttgggttttagtgggattgtagggtgttttgttgggtgttggggtaggttgtgttaatggtggtggggggtgggtggtaggtgatgggtggtgtgtggtgggtggtgggtggtgggtggtgggtggaaggtgagtatgtgtttggtttttgttgttgggggaggggattaaggtagggttaggtgtttgtggttggagtggggtttggtgttttggtgattgttgttgttgtttttgttagtatagtggtgagtatttttgtttgttatgtgggagattggggtttgattttttgatggggaggtagttgtgttttttgggttgttgttttggatttagtttgtgggtttttttttttttttttttgttttttagttagttgtagggtgttattttgggtttggtttgtttggttttttggttttttgggtttttttggttttttgttttttttttttgtttgtggtttggtagtggtagttgggaggttttttttggttttgtatggtgtttaatgagttgttggtttaaagtggttgttggaagaggttttttgtgatatatggggttttgtgtttggtgggaagtgtaggagtggggattttgttggtgttggttgttttttttttgggtatttgttggggaagggttttgggggtttgaggtggtgagtgagtgagagtgtttttagaggtaggtgggtgtaatgggttagttgtgttggttttgtattggtggggtgtggggtggtttttggagaggttgtggtagtgtggagttgtgggtgggtggatggattgggtgttggggttggtttgttttgggtgttggtggtgtgttggtgggagttttgggttggtgtggtggggttgtttgtgttgtgtggtgttggtggtatagtggtgagtatagttgttttttaagtagttgatttgggtttgatttttgtttaatgtattgggtggattttttgtggagattttgtgtgtggagtttgtgttgtagtttggtttgtggttgtgtgtttgtgtgttggggaaggaggtttg

SEQ ID NO: 694 - DNA, 3104 bp, Artificial Sequence
  chemically treated genomic DNA (Homo sapiens)
gtgggtgttgttgagtatggggaggtgttgaaatagttttggtgtgttgatttaagttttgattggtagagttatttggtgattgatagggggtttttatggtgtttgtgttgttaatttgtttattttaatagtggagttagtttgtttgttggtgtgtttgagttgagttgagtttgaattttaagttgtggagttagtattttttttagttggggttgtttgtttttggttgttgagttattgttgttatttggtagtgtgttttgttgttttaatttgttttattaataagtgtttggtatatttagttaggtttgtgggtatttgttgtgtgttttgttttgggtttagtgtttttgttgttgttggtattgttttgatgttttagttgtttattttgaattttagtttttagtaagtggttggggtatgtgagattttggaagagagtggtgatgtggagtgtttgggttgttttttttggttgttgtttgtggtttttgtggtttgtgaggtttttaataagaatgagttggtgttatgtgtatgagttattgtggttttttatggtggtaattattgtgagttttattatattttggaaaattataagtttattaaggagttgtatgttaagttgtaggtgttgtggtttgaagtatattattaggaggttgagaagttgtgtggaagatttttgggatttgtggataagtattgagtaaggaagaagtttttgttgttgtgtattatttgggatggtgaatagaagatatattgttttaaggagtgtatgtggtatttgttatgtgagtggtatttgtaggatttatattttaattttagtaaaaaatgtgagtttgtttaggtaattggattgatttttatgtaggtgggtaattggtttaaaaattgttgataaagggattgagtggttgtagttaagaataggttggtatttagaggtttttgtgttttgagtgtattggggaggaggtgggtggaggtatttttggtgtttttatttagtttttggtgattttaatttagtaggagttgggagtgtggtttgttttgggttaagagttttgtgttttgggtttttggttgggagtttttttgttggttttgtttttttatttgttggttttttatgtttgtgggtagttgtagtagttggttttggttattaaattaaggttttattgggatggagaggggaagagaaataaaaaattaaaattttataaatagttagggattttaagatttaaagttaatttttgttagtttgggtataggtttttattattaattgaagtttggtttattagtaatgtgttggttttatgttaattattatttttaaagtttaggtatatttttttttaatgttttgaaaatagtttttaatggatttttgagaaatgggaagttgagtttttttttttttatgtgttgtttgttatttttgttttaaaatagtaaattagtttgtgggttgaggttttttgttttttggagtgtggattttgattagttaaatattttgtggaagagtttggttttattttttaggtttaaatgttttttataattttttttgtttttaggttgggttgatttgatttaatgtgattgtgggagtatttgtttaggtgtaagttttaggtagatgtattgttagaaatggtattttatgtttttgggattgatttgtttttgttatttatattttgtttattttttgatagttttgtaaattttttaaaagtgtataataaatagggaggatattgtaagtttagtatataaaagatttgggagttgtggtgttgagaaagggtgtgaattatggtggggtataatagtagggatttgtggaggggtggttgtggatttttgtttgatttttgttgttttgttgagtaatttttgttttaattgttggggtttttggaagaatttttagttgttgggttggagggatgtaggaggtggtgggggtgggtgatgggtggttgtgttatgagttgtgatttgtgtttttttttttttttgtagattttagtagtaggttttgttatagggttttgggtgggtattatgggtggagggtgatggtatgttagaggtgttgggtgttgttattagtttggttgttagtttatttagtaaggtggttattttagttatttttattatgtttagtgatagtgagtgtgatatttgagttgtttatttaggatgtttagaagtagattttagtgtaaaaatgagaaaaataaaatgaaagaggggaagaagatgagagatttgtaaatttagtgttatagaagttaggtgattagggatttgtgggtttgggttgttgttttttgttttattttgtggttggtttggttttattggtgttttttggttgtgattatgggaattagtgtgaggtttgatttagtattatgttttttttgttttgtttttttttaaggattttgttgtaaagtttttttggaatttgaattgtaagttgagtgtttgtttagatttttttatgggtattttatgttgaaaggatgttgttatatatgtataatttttgttttaaagtttttttttaataaaatatatatatgttgtttatttatttatttaagagattgttatggtaggtttttttgtagtttggggaatttgttgtttttaaatatgtaggttggtggtgatgggttttgtgtggagaagttaaataataaaataatttagtgggtaatttttttaattaagggagttgtttttagattttttttttttttattattattaatattattttttttattaggtatgtagggatttttgagtaaatggtttttggaaggttttatttatatattttttgttttttttggtgttttttggtatatgttttaaataatttatggtaggtttataattattttttatgttaaattatatgtatgtgtatatatgtatgtatttatataaatatatgtatgtatttatataaatatatgtatgtatgtatatatgtgatatatttaaggttagaaattggtaatatgtgagtgtttttttta

SEQ ID NO: 695 - DNA, 3104 bp, Artificial Sequence
  chemically treated genomic DNA (Homo sapiens)
tagagaggatgtttatatgttgttaatttttagttttaaatatattatgtgtatgtatatatatatatgtttgtataggtatatatatatgtttgtataggtatatatatatatgtatatatgtgtaatttgatgtgggaggtggttatagatttattataggttgtttaaaatatatattaggaagtattaaagaaggtaaaagatatataggtaagattttttggagattatttgtttaagggtttttgtatgtttggtgaagggaatgatattaataataataagaagaaaaggaatttgagagtagtttttttaattaagaaggttgtttattaggttgttttattgtttggtttttttatatagaatttattattattagtttgtatgtttagaaatagtaagttttttaagttatagagaaatttattatggtggttttttaaataagtaaataaatagtatatatatgttttgttaaaaaaaaattttaaagtgaaagttatatatatgtaatagtgtttttttgatgtgaaatatttatgggagaatttgggtaggtgtttagtttgtagtttgggttttgaagagattttgtagtaaaatttttaggaaaaagtaaagtaagaagaatgtggtgttgggttaggttttatgttggtttttgtggttgtggttaaagggtgttagtgaagttaggttggttgtggggtggggtgggaaatggtaatttgagtttgtgggtttttggttatttggtttttgtggtgttggatttgtaggttttttatttttttttttttttttattttgttttttttgtttttatattggaatttgtttttgagtattttggatgggtaatttagatgttgtatttgttgttgttggatgtgatggagatggttgaagtggttgttttgttggatagattggtggttgggttggtggtgatgtttagtatttttggtgtgttgttgttttttgtttgtagtgtttgtttggaattttgtgataggatttgttgttggagtttatggggaagaaagggaatatgggttatagtttgtaatatagttgtttgttgtttgtttttattattttttgtgtttttttagtttggtggttagaggtttttttgaagattttagtagttaaggtgaggattatttggtaaggtgatagaggttgggtaggagtttgtggttgtttttttgtgggtttttattgttgtgttttattatgatttgtgtttttttttagtgttgtagtttttaggttttttatatattgggtttgtagtgttttttttgtttgttgtgtatttttgggagatttataggattgttaggaaataaatgaagtgtgggtgataaggatagattggttttagggatatgggatattatttttaatggtgtgtttgtttggggtttatgtttgagtaagtgtttttgtgattgtgttggattgggttggtttgatttaaaggtaaaaaggattgtaaggagtatttgggtttgggggatgaggttgggtttttttgtaaaatgtttggttaattgagatttatattttgggaaatgaaaagttttggtttatggattagtttgttgttttgagataagagtggtaggtagtgtatgggaagaggaaaatttgattttttattttttaaaagtttattgaaaattgtttttaaagtattagggagggatatatttgggttttgaaaatgataattaatatgaaattgatatattgttaataagttaggttttgattaatagtaggagtttgtgtttaggttgataagaattagttttgggttttggggtttttaattgtttgtaggattttaattttttatttttttttttttttttgttttagtgaagttttggtttggtgattgggattagttgttgtagttgtttgtaggtgtggggagttagtgggtggggaagtagagttggtaagggaatttttggttaggagtttagaatgtagggtttttaatttaagatagattgtgtttttaatttttgttgaattggagttgttagggattgggtaagggtgttagaggtgtttttatttgttttttttttggtgtgtttaaagtgtggaggtttttaggtattgatttgtttttggttgtagttgtttggtttttttgttggtggtttttgaattagttgtttatttgtgtaggggttagtttggttgtttgggtgagtttatgttttttgttggggttagggtatggattttgtaggtattatttgtgtagtaggtgttgtgtgtgttttttgaagtagtgtgttttttgtttgttgttttaaatggtgtgtggtagtgggaattttttttttatttggtatttgtttataggttttaggggttttttatgtagttttttagttttttggtagtgtgttttaagttatagtgtttgtagtttggtgtgtgattttttggtgaatttgtggttttttaggatatgatagagtttgtggtagttgttattgtgaaaggttatgatggtttgtgtgtgtagtattgatttatttttgttgagggttttgtaggttgtaggggttatgggtagtgattagaggaagtgatttaggtgttttatattgttgtttttttttagggttttatatattttggttatttgttgggggttgaaatttaagatgggtagttggaatattgaggtagtgttggtggtggtgagggtattgagtttggagtgggatatgtagtagatgtttgtgggtttggttgagtgtgttaggtgtttgttgatgaggtggattggggtagtgggatatattattgggtggtggtggtggtttaatggttgggagtggatgattttgattggaggaggtgttggttttgtggtttggggtttgggtttggtttggtttaggtatgttggtaggtgagttggttttgttattggggtgggtggattggtggtgtgggtgttatggagattttttgttagttattgggtggttttgttaattaaagtttgaattagtatgttaggattattttagtatttttttgtgtttgatagtgtttgt

SEQ ID NO: 696 - DNA, 2528 bp, Artificial Sequence
  chemically treated genomic DNA (Homo sapiens)
ggtttgatttttggtttttttttgttagtgtaattattattatggtgtgatttatttttttttttttaagaatgttgaatggtattattttagaggtaggtgagttatgtgttaggttttttttgatgttttttgttttttgggttagtgtgtatattatgtgagtgtgtgtgtgtgtgtgtgtgtttttgttgggtggaatgaagaggagtgtgtgtttgttttaaaaattaaattgtgttttgtaggtttaaaaatatatatttttttttagagttttttgataggatttttgaaattttttttttgtttttttttttgattgtttttgattttttttaggattagtgtttggggtgttaggtagaggttttggttttattgattttttagtagttagtggttttagggatgtgtttttgattttttggggagttgttgggggtgttttttttttggaagggatggaaggggggttgagaagatattgttttttatatgtgtaggggttaattggaaattggttttatttatatttttttgttgttgtttagttttaatttagtgtagttgtttttgtgtttgattttagtggatgtagtgtgggatttttttttttatttttgtagagttgagggtaggtggtgtaataaattttaggtaaaagagtattagattttagaagagttgtattttagatttggtgtaggtttttttggggagaagagtttaggggttatagagaatagaggtttgaaggaagtaaaagttggtgagaggttttttttttgttgtgaagggtgagggtaggtagagaatgtgtgaaagggtagggttttggttgggaagtattgtttagtgaaaggttggtaagggtgtgtagttggagtgtggttttgggtatttttttttaggtagttgaattttttgtattttagttttgtttggttgatttttatttgttttgagggaggattttttagtaggattgaattagaagtgtgtttgtgtagtagttttagtatggatttgttaattttagtgtagggggaaattttttatatggagtattttagtttttattgtttggagaaaggttttagtgtgttttggtaatttgtttattttttatttagtgtagtttgggtatttagggttaggtggtgtggtattgaatgtatggtttttagttttaggttgatgttgatgttttattgggttttgggtgtttaggatagtgttagatgttggatattgttttaagagttgtgttttttaaattgaaggggttttttaattagtttaatagggtttggaggaaaggtaatgttttttttttaaagggtaaatttagaggtgtagaattatggtttttaaaatttaggtagagagagattttaagttatttttgtttttaaaatatgtatatttgttgggttatttttttttttttaattttaattgttttgtgggtttaatttttttttttttttttttagggaattttattgggtttgggttttttgtttatgtagatttatttgagttggtgataagggtgttgtagtttttttgatttttatagagattttaagattttgaatttttagttttaattattatgttttattatagtttggttgtttatttttttaaaagtggtaatagtagtgggatgggtgttgttagaatagaaaggaaagaaagtttagtggattgtgtgtgtttaattgtgagggagagtagtgttggttaagggatttgttttattatatttggtagaattttgaatttagaggagatttaagattttatttttgatgtaggttagagagaattatatgtatttgttttttagtttaggaattgaaaaaatgaatattgtaatttttatggaatatttgtgggttatttagattatagttgggagaagggggaatatttttttttttgtttttagttattgggttttagtttttttgttggagaggtgaaagaaagtagaggtataaagatgttttttttatttaaagtgtttatttaaagttttttgagaatgaggagtggggagtttttaggtaattttttttgggggttttaagataaaaagagtagaaaatttagggttatatatttaatttgagggtatttttttttattttttttgggttttttttttaggaattgtgagagaaggtagggttggatttatggggatgtatttttgtagagttaataaggattttttaaattttagttgatttttattttatttttagttttttttagattttttgtgtttattgagaaggaagaattttggtagtttgtttttttataggaagtagtaaatgttattggatgtaggaatttataatttgagttttataagagtaggaatagttaggatttaatttggaaattgattgtagaaggtgttttgttttgtttgtatttagatgattaataaatttgtgtggaatagaagaatgaatggatgattggagggtttataaaatttttgtgtt

SEQ ID NO: 697 - DNA, 2528 bp, Artificial Sequence
  chemically treated genomic DNA (Homo sapiens)
aatatagaggttttgtaagttttttaattatttatttatttttttattttatataagtttgttaattatttaggtataggtaaggtagaatattttttgtaattagtttttaagttgaattttagttatttttgtttttataaaatttaggttataagtttttgtatttagtggtatttgttattttttgtaaagaagtaaattgttaggattttttttttttagtgaatgtaggaagtttggagaaagttgggggtggggtgggggttagttggagtttgggaggtttttgttagttttgtggaaatatgtttttatgggtttagttttgtttttttttatagtttttaaggaggaagtttaggaagggtgggaaggaatgtttttgaattgggtgtgtgattttgggttttttattttttttgttttggagtttttaagaaagattgtttaagagttttttgttttttatttttaaaggattttaaataagtattttaaataaggaaagtatttttgtatttttgtttttttttatttttttagtagaggggttgaggtttggtggttggggataaaaaaaaaaatgttttttttttttttagttgtagtttgaatggtttgtaagtgttttataaaaattatagtgtttatttttttagtttttgagttgagggataggtgtatgtggttttttttagtttgtgttggggataagattttaagttttttttaaatttaaagttttattaggtataatggggtaggttttttgattagtattgtttttttttataattgagtatatgtagtttattaagtttttttttttttttattttgatagtatttattttgttattgttgttgtttttaggaaagtggatggttggattatagtggagtataatagttggaattgagagtttgggattttagaatttttatgaaggttaaaaagattgtagtgtttttgttgttggtttaggtgggtttatatgggtaaagaatttgagtttagtagaattttttaggggggaggaaagggaaattaaatttatagaatagttagggttgagagggaagaagtaatttaataaatgtgtatattttgagagtaaaggtgatttaaggtttttttttatttgaattttggaggttatgattttgtgtttttaagtttgttttttaagaaggaggtgttattttttttttagattttgttaagttggttaaggagtttttttggtttgaaaggtgtggtttttaaaatagtatttagtgtttggtattgttttgagtatttaaggtttagtgaaatgttagtgttagtttgaggttgggaattatgtgtttagtgttgtgttatttggttttggatgtttgggttgtgttggatggaaggtgagtggattgttgggatatgttggggtttttttttagatagtggagattgagatattttatgtggaaaatttttttttatattgaggttggtagatttatattggggttgttgtatgggtgtatttttgatttagttttattaggggatttttttttaagataaatgggagttagttaagtagagttgggatatggggagtttggttgtttggaaaggggtatttgaggttatgttttagttgtgtatttttgttagttttttgttgggtggtattttttggttaaggttttgtttttttgtgtgttttttgtttatttttattttttgtgataaaaaaaaaattttttgttagtttttgttttttttaaatttttgttttttatagtttttgggtttttttttttaaaggggtttgtgttaagtttagaatatagtttttttgaaatttgatgtttttttatttgagatttgttgtgttgtttgtttttagttttgtagaaataaagggagaagttttgtattgtgtttgttgagattaggtgtagaaatggttgtgttgggttaggattgaataataataaaaaaatgtgggtgaagttagtttttagttaatttttatatgtgtgagaaatagtgtttttttggttttttttttattttttttaagaaagagatatttttagtagttttttggagggttaggagtgtgtttttggagttattgattattggaggattagtggaattaggatttttgtttggtgttttggatattgattttgaggaaagttaaagatagttaaagagaaaggtaaaaggagggttttaggagttttattaggagattttgaaagagaatgtgtatttttgagtttatgaagtgtggtttaatttttaagataaatatatatttttttttgttttatttaatgaaggtgtatatatatgtatatatatttatatggtatatgtattggtttaaggggtagagaatattagaaggaatttggtatataatttatttgtttttagagtggtattgtttagtatttttagaggaaaaggagtggattatgttgtaatggtggttgtattggtagagaaaagttgggagttagatt

SEQ ID NO: 698 - DNA, 2280 bp, Artificial Sequence
  chemically treated genomic DNA (Homo sapiens)
ttgttttggttttatgtttgtaaggtttttggtttaagaggtttattgattttttttgtttttttttagttgattataaaataaataaataaataaataaataaataaataaataaataaaaaagtaggatattaaatttgttatttttagagggttttttagtttttttttttatttttgaattgagtgaagtggtgttgatttttattttttgggtatgagtttttgtgtatttgggagatttttgaatatttttggagaagttagaaagttttgggagatggttttgtttgttgttgtattagattgggttttgtaaaggatgtattttttgagttttttttttgtatgtttagtggggtttgttttgattttatttgagggatttattggaggagaggtatggggatgttgtttgagtagtggatttttttggtgtggagtaggttgtttttaggtagagtttgatgggtttttttttttgggtgtttttggttttttggattttagtaggtttgggaaggttttgggtttttttagttgatgtttagagagtttttattttttaagttttgttattgaatttattggttggtgtgtttttgattgtagggtaagggtttgtgtatttttaaagataagtggggtttttggaaggtttttaggtagaaatgagtattatggggaatggtttgtttttaagataattttggggatatggatataataagatagggtggtaagttttaataaggtgggtgtgtggtgtttgagggtggttgggttgggttgggtttggttttgtgtttattttgttaagaattgtttgggtatgggttttgtgggatgttttgtggtttatttttttttttaggatgtaaggaggaatgttttggtgtgtggttagtagtggtgggtattggtttaatggttatggaatttagtattggtagttggttttttttatattgtaggtgtgtagtgtggttgatggagttttttgggttgaggatttagttaggttgttattttggttgtttttatgggaaggggtattaggtaaattgtttaaggttttgagtttaggttttttggtggaggtttttgttggttttgtttagattatggttgttattaggtttttgagttatggttttttgtttgggaatggtttggtgttttggttgtttagttagttttggtgtttttttttggggtttttattgtttgattttgtggtggagtttgttttttttggatttttagagattttggatttgtttgagtatttgttttagttttgtttggttttttaggatagttttaagttatttttttttaggtgagtatagtgaagggtgtgtgggattgttaagttagttttttttgatggtagtattgttttagaaatgtttatttgttttttttttatgtttattttttttgttttttgttgaggaaaaaatgttaatagtgttttgtatatggtggattagtattttggttgttttgggttagttttggtttatttgtgggattttgtttttggtagatgggatttggtgggattttttttattagtttgtttttttgataaattagaaagtggtttttttggattgttttggggatggatttgatttaattgtatttttaatgatgtgttaggatgggaggatggtggaatttgtagggatgagaaggagattgggtatatattaggattttagttttggttttgttttttgggatatattggtatttgggtatttttatgggttatggtaaggttagtttgattaagaggttaaaggtgattggtgttttattgattgttgggggtttggttttaaattttaggtgaatttataattttggaatagtgggattggtatttgggttttttttatgtggtagtattggtaaggggttgggggaagagtttatgttagtttatgttatgtaggaagggagttagtggttattttaaatatattttttttttttatatttggtttatgtttaattttttatggttttgtttagaaggttgtatgtataatatatatagaggtgggtatttttttgatgatttgtgtgtgttgtgggggagtggtagatggtttagttttaagtgttttgatttttttgtttaaatatattttgtgatggaaagtttatgttgattttgtttggtatttaaggtgtgggtagtggtttaatgtttgttgtgggaatatagttgtgttgaatgttatttttaagatagataaaatagt

SEQ ID NO: 699 - DNA, 2280 bp, Artificial Sequence
  chemically treated genomic DNA (Homo sapiens)
attgttttgtttgttttgagaatagtatttaatgtgattgtgtttttgtagtagatgttaggttgttgtttatgttttgagtgttggatgaggttaatataggttttttgttatagaatatgtttgggtaggaagattggaatatttggggttgggttatttattgtttttttatggtatatatgagttgttagggaaatgtttgtttttgtgtgtgttgtatgtgtagttttttgggtagagttgtggagagttggatgtaggttaggtgtgaggaggagaggtgtgtttggggtggttattggttttttttttgtgtgatgtaggttggtgtgggttttttttttagttttttgttggtgttgttatgtgagaagggtttgggtgttggttttgttattttggaattgtgggtttatttgaagtttgaggttaaatttttagtggttagtgggatgttagttgtttttgattttttggttaagttggttttgttgtgatttgtgagaatgtttaagtgttaatgtgttttggggggtagggttggggttgggattttagtgtgtgtttagttttttttttgtttttgtgggttttattatttttttattttaatgtattgttagggatgtggttaggttgggtttatttttagggtggtttaaggggattgttttttggtttgttaggaaggtaggttagtaagaagggttttgttgagttttatttgttaaggatagggttttgtaggtgggttagggttggtttaaagtggttgagatgttgatttgttatgtgtggggtgttgttggtgttttttttttagtaaagggtggagggagtggatgtgggggaagggtaggtgggtatttttggagtaatattgttattaagaggaattggtttggtaattttgtgtattttttgttgtgtttgtttggggaggagtggtttgggattgttttgggggattaggtaggattagggtaggtgtttggatggatttgaggtttttggaggtttgagagaagtaggttttgttgtggggttgggtggtggaagttttagagagaggtgttaggattagttggatagttaggatgttgggttgtttttggataggaagttatggtttgggagtttggtggtggttatgatttgggtgggattagtggaggtttttgttagggagtttgggtttggggttttgggtagtttgtttggtgtttttttttgtgggagtaattggggtgatggtttagttgggtttttggtttgggaggttttgttggttatattgtatgtttgtggtgtgaggagggttgattgttagtgttgagttttgtggttattgggttggtgtttgttgttgttggttgtgtgttggggtgtttttttttgtgttttagggaggaaggtgggttgtggggtattttgtggggtttgtatttagatggtttttgatgaggtggatgtaaggttaggtttggtttggtttggttatttttagatgttgtgtatttgttttgttgagatttgttattttgttttgttgtgtttatgtttttgaggttgttttggaggtgggttgttttttgtggtgtttatttttgtttgggggttttttggggattttgtttgtttttgggggtgtgtaggtttttgttttgtgattagaggtgtattgattgatgagtttggtggtaaagtttgagaaatggagattttttgggtattggttaagggggtttggggtttttttaggtttgttggagtttgggaagttgggggtatttagaaggaaggatttgttggattttgtttggggatagtttgttttgtgttagaagggtttgttgtttaggtagtatttttgtgttttttttttagtgggttttttaggtagaattggggtaggttttattggatgtgtagggaggaggtttggaggatgtattttttgtaggatttggtttggtatagtagtagatggagttattttttggggttttttggtttttttgagggtgtttaggagttttttaagtgtgtaggggtttgtgtttaaagggtggaggttggtattgttttgtttaatttaggagtggagaaggaagttagaggattttttggaggtggtaggtttaatgttttgtttttttatttatttatttatttatttatttatttatttatttattttgtaattaattgaaagaaggtagaaggagttgatgggttttttaggttggaaattttataagtataggattaaggtag

SEQ ID NO: 700 - DNA, 2251 bp, Artificial Sequence
  chemically treated genomic DNA (Homo sapiens)
ggattttgagttgtttttaggtagttaggagtggttttagtggtagttgtaaattttagtagttgtttgtgttgtttgtggttggggtggagggtagttagagttggggattaaggttttgtgttatttgtgtgtatagttttatatttgaatgttgtttttttgtagatgagattggtgggtattgtaaagttgggatttgtttttgaaggaaaaaaaatagtgagtaagaaatttagtattattttttattgatttattttgttgtattttttgttttttaagtttttgaaagttggtaattttgattttggtgtttaaaaattgatagttattgagattggttttgagaagttgaagatttggtagtttttagattgagtaggataaggtgaaagtaggttggaggtgggtttaggatatttgagggttgattttgggggtttgtgaggttgttattgttgttgttgttataggtgagatggtgttgggttgatgttggggttaatgggtagagaatgtagggatgtggtttttgttgaagagagttaagaagggaagagtgtgttttttaaattgtttttgtaatttgtttttagtgagtattttattgatttagaatttattgagaatagtattagtgagttattttttttttgagatgggttttatttattttggtaatggagtgagttggattgtggggaggaagaggaatgggaaaattagtttataaatattaatgttagtaagagtgtgttgttggtaggatgtattgtgagtttggagattttggtggttgtagttggtaagtggttataatttagaaagtaggattgagttgttttttttgttttattagtgtattgttttttgggtgtgggtttaatattttataagtggtaatttttgtttatggtagttttgttttttttttattatttttagatttagttttgtattttaaggttgtgtattgttagttattattatgtttatttttggggttaatttgtttgtttttttgagttttgattggttgaatagtttagtgattattttggtggtgatgtttatttttggggtggtgggtaatttggtggttattgtggtgttgtgtaagttgtgtaaggagtagaaggagatgattttttatatgttggtatgtgggttggttgttattgatttgttgggtattttgttggtgagtttggtgattattgttatgtatatgaagggttaatggtttgggggttagttgttgtgtgagtatagtatttttattttgtttttttttagtttgtttggttttagtattatttgtgttatgagtgttgagtgttatttggttattaattatgtttatttttatagttattatgtggataagtgattggtgggttttatgttttttgtagtttatgtgtttaatgtgtttttttgtgtgttgtttaatatgggttttggtagtttgtggttgtagtatttagatatttggtgttttattgattggattattaatgtgatggtgtatgttgtttatttttatatgtatgtgggttttagttttttttttatttttgttattgttttttgtaatgtgtttgtgtgtggtgtgttgttttgtatgtattgttagtttatgtgttgtattttgttgggtattgagtagtattatgtggttgtggttgttttggttgttttttggggttattttgttgtttttttagttttgttgtgttttagtgatttttggtgttgttggagtttttgttgtattgtgggtgttgagatttagatggttattttatttattgttatttttttggtggtgtttatttgttttattttgtttgtggtgagtgattggggttggggttttatttggttttttttttgtatttattttttgtgtttattttttgttttttgttttttttttgagtttttggtagtgaatgtgttgtttttaggttggggttgggatttttatattgttttttagagtaggtttaattttttttgaagttttaattttaatgagatttagtaggtgttttgtttttatattttttagtttatgtttttggaagtttgggtttttttttttattgagatagtttttattttttgttgtttgatattggttgagttttttaagaaaattttttgttttttttgttagatgtggaggggagtttgttgtagtgtgatttagtttatttttttgtattgtgaattgtgaattgta

SEQ ID NO: 701 - DNA, 2251 bp, Artificial Sequence
  chemically treated genomic DNA (Homo sapiens)
tgtagtttatagtttatagtatggaggaatgggttaagttatattatagtaggtttttttttatgtttaatagagggggtggggggtttttttggaagatttggttagtgttaggtagtaaggggtaagggttgttttggtggagaaagaaatttaggtttttgggaatataaattgggggatgtaggggtaaagtatttgttaaattttgttagggttgggattttaaagagggttgggtttgttttgagaaatagtgtgggaattttagttttgatttaaaggtgatatgtttattgttaaggatttagagggaaagtagggagtggggaatggatgtgggaggtggatgtgagaaaaaggttgagtagggttttagttttggttatttattatgagtgggatggagtagatgagtattattagggaggtggtaatgagtaagatgattatttggattttggtgtttgtgatgtggtggaagttttggtggtgttgaaagttgttgaggtgtggtaaggttggggaggtagtggggtggttttgggaggtaattgaggtggttgtggttgtgtggtgttgtttggtgtttagtgaggtgtggtgtatgaattggtggtgtatgtggagtagtgtgttgtatataagtatgttgtagaggatggtggtgagaatgaggaaggagttgaagtttgtgtatatgtaggagtaggtggtgtgtgttgttatgttggtggtttagttgatgaagtattaggtgtttgggtattgtagttgtgagttattgagatttatgttgggtagtgtgtaaaagagtatgttggatgtatagattgtaaagagtgtgaggtttgttaattgtttgtttatgtagtggttgtagaaataggtatggttgatggttaggtagtgtttgatatttatggtgtagatgatgttgaggttggataggttgaagaagagtagaatgaaggtgttgtatttgtatagtggttggtttttgggttattggttttttatgtatgtggtgatggttattgggtttattaataaagtgtttaataggttggtgatagttagtttatatattagtgtgtagaaggttgtttttttttgttttttgtgtgatttgtatagtattatgatggttattaggttgtttattattttgaagatgaatattattgttgggatggttattgggttgtttagttggttggggtttaaggaggtggatgaattgattttgggagtggatatgatagtggttggtggtgtgtagttttggagtgtaaggttgggtttggggatggtagaagagagataaagttgttgtgagtggaaattattatttgtaaggtgttagatttgtgtttgagaaatgatatattgataagataaggggagtaatttgattttattttttggattgtagttatttattaattgtggttattaaaatttttaggtttgtgatatgttttgttaatagtatatttttgttgatattaatatttataaattgatttttttatttttttttttttttataatttaatttattttattgttaagatgaataagatttattttaagggaaaagtagtttgttagtgttatttttgatagattttgaattaataaaatgtttattgaaaataagttataaaagtaatttggagagtgtgtttttttttttttggttttttttggtgagggttgtatttttgtgttttttatttgttgattttaatgttagtttaatgttattttatttgtagtggtagtagtggtggtagttttatgagtttttagggttagtttttagatgttttggatttgtttttaatttgtttttattttgttttgtttagtttggaaattgttaaatttttggttttttaaagttggttttagtggttgttgatttttggatattgaggttagagttgttagtttttaaaaatttgggaaataagaggtgtagtgggatgggttagtgaagaatggtgttggattttttatttgttatttttttttttttaaagatgagttttagttttgtagtgtttgttggttttgtttgtgggaggatagtgtttaggtgtgaggttgtgtgtgtaggtggtgtggagttttggtttttagttttggttgttttttgttttagttatgggtagtatgggtggttattggagtttgtggttgttgttgaggttgtttttggttatttgggggtggtttggggttt

SEQ ID NO: 702 - DNA, 2586 bp, Artificial Sequence
  chemically treated genomic DNA (Homo sapiens)
tttgtgtgggtgtgggagtagttttgttgggtgtttgtagttgtgggagttaagttttttttttaggtgtaggtataaaagtttatggtttttgaataatgtggggtagaggtttttttaagtaatgtttaattggttgtttttaattaaggaaagagaggtttttagttttatggtaatttaagtagggtagttttaggttaaaggtattttagaataataagattattttaagaaatggaatgttttattggatatttgaataggttttttgttattggaattggtgtgtattgtattttaattagtatttttgtgtggagggaggtgatttagtttaggaaagttaattatagaaagaggtgatttttgaaaggattgttttagtgttattagaatatatgtgattatattaaaagtttaggtggatatttgtagttagtttggatttggataatttaatattgttggtagaattgaagggaataagttattttaattttattttttgtatgtgtagtgttgagtgagttgggggtgggaggatagtggtttgtttattgtttttttttaaaatttgagatttgaaaatatggaggttttatttgtttttttagtttttgattgttaataaaaaaataaattttgttggttatattttttttttattttaaaatagtaattttatggtttgtattaagttttttagaagtttattttatttgttttgggttagggagggaataatgttaggaaaagttattggtgtttttttatttttgttttttttagggtgtaggatgtgtgggttggtgggtttgtgattttggaatgttttttgttatttttttgtgtgaatttgaaaggattgggaggtgttgagagtagagtttagggttggtgtattttgtggtgttgagtgggtggtgtgtttgggtgtttaggttgggggatttgtagttgttttattgtggaggggaaaatatgtagttggagggtgtgtgttgtgtgggttgtgatttgttattttattggttattttggggtttttttaagtttttaggtagggttgtgagagttttttagagttgaagttttggaggttgatttgtgggtttggttgttatgggaatttggttggtttaaagaagttttttttttgggtatttggaattttagtttagtgtggggtattggggaagtggtgttggggggttgggttgggggattttagttggtagttttggagagggtttatttttggggttgttgggtgaggttggtatgatttttggttttaaaaggaaagtttttgttttttgttttggtgtgagaagttaaagatttattttgagagtggagagagaaatgttattggtaatgttttttttggaaagtttgagaggggttttttggatatattatttagtgtttttaaattagagaagtagtttttttttggtgtttgggtttagaagttgttatttatttagtttatggtttgaaattagtatgggaagtgttggggtaaggttttgttggagattagaggtttgtttgttgggaggagtttttgggggatggggattttatttttttgtttgttttggtttttatttgggatgtttttgtaggagtttagaaagatgatttattatatggttttgggatagagtagtgtgtttaattttgagggaattttgtgtgtttttttgaggttttagttttttaaggtattgttgtttgtttttttttttttagattgaaattggggaagagtgtgggtgtttttttgttttgatgagtttgtttttttaaatgtttattttggttgtattagagtatttgggaaattttgaaaggtgtttaggttttatatagtagtgtttttttatttagtttttgtttttgggtttttttaagagagtttttattttatgttttggtttttttttgatgttgggtttttgaggtaggtatggagtttttttgaaagtagttgtttatttgtgtttttttggtgtaaagttagagtttattttgttgggggaaggggaggtagaaaagattatagttgggaaagtgtgttttttgttttgtttttaaaatatgttttaagattgttattgtgattgttaggagagttattaatgtttaggggttataaaggaatttttgaatttttggttttttttaaatttttaggtttttaaaattttagtgggggttttttggggttgggatttaggttggtattgttgggaggattttgtttagtatttttttattaatattttatgaaggtaggtttttgttttttttggagtttttttttttggaatgtttttaaattttggttaatttatttttttgtgagttattttagggttttgtggtttgggaagagatgtgttaattttgtgggtttgtgtgtagtttttagttgtaaagtgttgtaagtgatttttttgatggttttttttgattgaagagtttgggaattaaagagaaaaaaaataattttatttttaaaagaataagttattattgtggtgatattgtggtggaggattttggtgatggggt

SEQ ID NO: 703 - DNA, 2586 bp, Artificial Sequence
  chemically treated genomic DNA (Homo sapiens)
attttattgttaaagttttttgttatagtattgttgtagtgatgatttgtttttttgaaaataaagttattttttttttttttggtttttgagttttttggttggaaagggttgttaggggggttatttgtagtattttgtggttaaggattgtgtgtagatttgtggagttgatgtgtttttttttgggttatagagttttaggatggtttataggggagtgagttagttagagtttgggaatattttgagaaaagaggttttagagaaggtaggagtttgtttttgtgaaatattaataaagggatgttaggtgaggtttttttagtggtgttagtttgaattttagttttaagagatttttattagggttttaggaatttgggggtttgggaagggttgagggtttagaaatttttttatagtttttagatgttgatagtttttttaataattgtgatgatagttttgaggtatgttttaggaataaggtgaaaagtgtatttttttaattgtgattttttttattttttttttttttaataaagtaaattttaattttatattaaaggggtatagataggtaattgtttttagagggattttgtgtttattttggggatttgatattgaagaaagattgaggtatgaggtagagatttttttgaaaaaatttaaagatagaggttgagtagggagatgttgttgtgtgaggtttgggtattttttagagttttttagatgttttggtgtagttgaagtaggtgtttggggaggtgaatttattggggtaaagaagtgtttatatttttttttagttttggtttagggaaagaagaatggatggtggtgttttggaaagttagggttttagagaggtgtataaagtttttttaaagttgggtgtgttgttttgttttgggattatgtagtggattgtttttttgggtttttatggaggtgttttaggtgggaattagagtaagtaggagaatggggtttttattttttaggggttttttttgataggtaggtttttagtttttgatgaagttttgttttggtgttttttatgttgattttgaattatgggttgagtgagtggtgatttttgagtttaggtattaaagaaaaattatttttttggtttgggggtattaggtagtgtgtttagaagattttttttgaattttttaaagaaaatgttattaataatatttttttttttgtttttaaaataagtttttggttttttgtgttagaataagaagtagaaattttttttttggagttaagaattgtgttggttttatttagtgattttaagggtaggttttttttggagttgttggttgaggttttttaatttagttttttagtgttatttttttgatgttttatattaaattggaattttaggtgtttggaagaaaggtttttttggattaattgggtttttatagtagttagatttataggttagtttttggggttttagttttaggggatttttatagttttatttagaggtttggggagattttaggatgattgatggggtaatggattataatttgtatggtgtatgttttttagttatgtatttttttttttgtggtagggtgattataggttttttggtttgagtgtttgggtgtgttgtttatttagtattgtagagtgtattagttttgaattttgtttttaatattttttagtttttttaagtttgtgtaaggggatggtaggaagtgttttgggattataggtttgttggtttgtatattttgtattttggaaggggtgaggatggaagagtattggtgattttttttagtattgttttttttttggtttagagtaaatgagataaatttttgaagggtttaatataagttatagggttgttattttggaatgaggagaaaatgtagttagtgggatttgtttttttgttggtaattaagagttgggaaaatgaatgggatttttatatttttagattttagattttaaaagggggtaataaatgaattgttgtttttttatttttaatttatttagtattatgtgtataggggatggggttggggtaatttgttttttttagttttgttagtaatgttgaattgtttaaatttgagttggttgtgggtgtttgtttgggtttttggtgtggttatatgtattttaatagtgttaagataatttttttggaggttatttttttttgtagttgatttttttagattgggttgtttttttttatataagagtattggttgaagtatagtatatattaattttaatgatagagaatttgtttgggtgtttagtgagatattttattttttagaatgattttattattttaaagtatttttagtttgaagttgttttgtttgggttgttatagagttggaagtttttttttttttaattagaagtggttaattagatgttgtttggaaaaatttttgttttgtattgtttaagagttataaatttttatgtttgtatttggggagggggtttgatttttgtggttgtgagtgtttagtggggttatttttgtgtttgtgtggg

SEQ ID NO: 704 - DNA, 2325 bp, Artificial Sequence
  chemically treated genomic DNA (Homo sapiens)
agttttagtagtttggtttggttgtggtggtggtagtagtagtagtggtggtggtggttgtggtggttttggggtatttgtagtattatgtatttgtttgtattgttattatttataatgtggtggatttgtggagattttattgttttattatgggtagggtggggttttggggtatttgtgttttgtgttttttgtgtttttggagtaaattttttatttttagtggaggaagtgggagtttggggatagggtgaagagagaggatgggtttttagtgtaattgtagagttagttatagaagttttatgaaagtggaagttagtttgttagtttttttatttagtttggtgtgttttatttttagtagtaggtgtttgagtattgttttattaatattggggttttagggattttgaatgttatggtggataaattagaggttaattgtttgggatttggggtgggtgtgtttgaatttgtgtggtatttttgtgttggggtggttaaagtgttttgatgtttttggttaagtttgtgtgtttttttgtttggtttaaagggaggtgattagatagtgtaagtttttatttttttttaattttgtgattttgtattttgtgtattgaagatttttatttgttttgtatgtttttttttttttttgttaagtaattatgtgttttgaaatgggaaagggatatagatgtttggttgggtttttttgggtgggtttttgaaatgtgttttggttagtatatggggtgggagtattttgtttgagttttatttttttattttttttttgttggtttgtaggaggttttgatgttagttaggtatttaatggtaagaggatgaggatggtgtttattagtatgtaatttttggagttggagagagaatttttttttaatatgtatttgttttgattttggaggattgaaattgttatttatttgaatttgttggagaagtaggtgaaaatttggttttagaattgttgagtgaagtataagaaggaggggaagggtatgtagaggaatagttatgtgggttgtaagtgtgttgggagttaggtgtattatgtgtgttttgaggatgaggattttttgttgttggttttagttaatgatgataaggagattttttttttatgagggagggtttttttttttatattttttgtttttggtagattaggtaatgttaaggtgtggggtatttaggggttagaatttttgtttattgtagtggttttatttggagaagaaatgaatttggaagttttggaatggataagttgggatttgattttttgtgttttttttttgatttgtttatttaggattttaatttgaagttatagatttttttaaaaaatgtaaataatttataatttaatttatttttgttgtataatagaggaaaaatagggttggtttaagtttaatattgtatggggtttttgaaagtatatgttagttttttatttttatttttttttagaatttgataagaatataggatttattgattattttttgttgttgtttttaaataaaaatatttaagttgaaaataatttagaaaattagattttgtaggttttgttttttgaaattttgtttggggagaatttaaaatttaagttgttggaagtttttttgtatgtgaataggtttatataaaatttatatttatatttatttaaataaatgaaataaaaattagaattttaaatttgtggtgtttgttttttttatttttttttgtttttttttttaatgtttagagaaaggtatatgtaggaaaaagttgtttgaggaatttgaggaaaatgttgagtaagaatttggtaatgtgggttttttgattgagggagtttgtggtttaatgggttttttatgtaatagaatttttgttaaggagatatttttagttatgatggtatttattaggtagtgtttttttatttttaaaataggtaatttttttatagttgataggataaattattttatttggaatgatattgattattaatgataggtaaatttttatttagtaaggaagggtaaaaattttttatttagtttttgtttttttttttttatttttttattttttttagtatgaaaatttgaattatgtgaaggaatttgtagagttagaatagttttaggaagagtaataatttattaaataggttagaagtaaatagtggaaatttaataatgatgttataagtagaattagtgggttttttttaatgttaagaaaataaaaagttagggataggaagtattttgtttaaagatttat

SEQ ID NO: 705 - DNA, 2325 bp, Artificial Sequence
  chemically treated genomic DNA (Homo sapiens)
ataaatttttgaatagaatattttttgtttttgattttttgtttttttaatattgagggaaatttgttaattttgtttgtagtattgttattaagtttttattgtttgtttttgatttgtttgatggattgttgttttttttaaaattattttgattttataaatttttttatataatttaagtttttgtattgagagaaatgaggaagtagaaagaagaaaataaaaattagatgggggatttttatttttttttgttaaataaaggtttatttgttgttaatggttagtgttattttaaatggagtgatttgttttattaattgtgaggaggttgtttattttaaggatggagaggtattgtttggtagatgttattatgattaaaggtgtttttttggtgaaagttttgttatatagaaaatttattgagttataaatttttttagttaagagatttatattattaagtttttatttaatattttttttgaattttttagatagtttttttttgtatatgtttttttttagatattggaggagggggtaggagaagatagggagagtaaatattatagatttaaaattttggtttttgttttatttatttaaataaatataaatataaattttatataaatttatttatatataaagggatttttagtgatttagattttaaattttttttaggtgaaattttagaaagtaagatttataaggtttaattttttaaattatttttaatttgggtgtttttgtttgaaaatgataatagaaaataattaataaattttgtgtttttattgagttttgaaagagagtagggatggggaattgatatgtgtttttaaaaattttatatagtgttaaatttaaattaattttgttttttttttgttatatgataagaatgagttgaattataggttatttatattttttaaaaaaatttgtaattttaagttggagttttagataaataggttaagaaggagatgtgaagggttaggttttggtttgtttattttagaatttttaggtttgttttttttttagatgggattattgtaatgagtaaggattttggtttttgggtgttttatgttttggtgttgtttggtttgttaggagtgggggatgtgagggaggaggtttttttttataagggggaaatttttttgttattgttggttgaggttggtgatagggagtttttatttttggagtgtgtgtagtgtatttggtttttgatgtatttgtagtttgtgtgattgtttttttgtgtgtttttttttttttttttgtgttttatttggtggttttgaaattagatttttatttgtttttttgataggtttaggtaagtggtgattttaattttttggagttgagataggtatatgttggaagagaattttttttttagttttaggagttgtgtgttagtgaatgttgtttttatttttttgttattgggtatttggttggtgttagagttttttgtggattggtgaagagagggtagagaggtaaggtttgggtaaggtgtttttattttatgtgttaattaggatgtattttagggatttatttggggaagtttagttgaatatttgtattttttttttattttaaggtatgtggttgtttagtggggaagaaaagagatgtgtaaagtaaataaaggtttttgatgtgtaggatgtgaagttataggattaaagagggatgggggtttgtattatttgattgtttttttttgagttaagtggagaagtgtgtaggtttagttaaaaatgttaagatgttttagttgttttgatgtggggatgttatataggtttaaatatatttattttaaattttaagtagttaatttttggtttatttgttgtgatgtttgaggtttttaaggttttagtattaataaggtaatatttgagtatttattattaggagtaaaatgtattaggttgagtggagaagttggtaaattaatttttatttttgtggaatttttgtggttgattttatggttatattaaaagtttgttttttttttttattttgtttttgggtttttattttttttattggaggtggaaagtttgttttaggagtgtgaaaggtgtggagtgtaggtgttttaagattttgttttatttatggtgaggtagtggaatttttgtgggtttgttatgttgtaggtggtggtggtgtagataggtgtgtggtgttgtgggtgttttaaggttgttgtggttgttgttgttgttgttgttgttgttgttgttgtggttgagttaggttgttggggtt

SEQ ID NO: 706 - DNA, 2501 bp, Artificial Sequence
  chemically treated genomic DNA (Homo sapiens)
tttgtaaatggagatatttttattatttttatagtattatatgtttttaaagtttgtatttatattttgggtgataaatgaaggataagatttttttttatttttgtgaggatgattatagtatgattggatgggtttgttatgatttttatttttttttgtgtttttattattgttttattaattttagtttttttttatagggtagtatagaatttaattagtagaaagagatttagttatgtagattagagatttgtttaagtgatggtatgtaagaattaggaaggaaagttttttgtttaaatattaataggttttttttttaaagtaattattattttttaaatttaatttataaggtgatagtatttttaaattaattaaattagaattttgggttggataattttaaatatgatttattagtattttttattaattattggttttttaggtttttaagtttatttattaggaattttatttttaatattattttattaattttagttgtaaataagagaatatttaaaggttgaggaatttttagtggtaaagttttgtttatgttaagtaataaaggataagttagtttttgttgtgattattttgttgtattgataagttatgtatttttatttaaggatttaaatttttattttttttaagaattgggttaaaattgataaattaaatttatttatggtttattgattaaaggttgttgtataataagtttttgttatgtttagtagttggatttatagtgttagaaatttataattgtttgatttttttttttattatattgtgaaaattgttttttaaatgtaattaattttaaaattttaatagtattgtggttaggtgtggtggtttattattgtaatattaatattaggtataggtgaggggattgaggttaggatattgaaattagtttgggaaatatatggagatttggtttttggaaaaataattagttttgtgtggtggtgggtgtgaggttttggttaattgggaggttatagtgagttatgatgatattgtattatagtttgtgtgatggtttatgttagtaagttttggagtatttgaaataagttgtgttgggtattttatttattggagagtgattagtgattgatgtttatttatagtgattagagatgtatgttttgatagtagtataaatttagtaggtgtgaataaatggtaaagagaaattgggtaaataagtattatggttttttagttgagaaagtgggggttttaaaaagggttttttgttgatagaaagggatgtttaattattgaaattgtagagggtgtggttttggtgtttgagtgtgtagattatatttatggtggtgattgttttgtgtttggtgtgttttgtataggttatggtgttttggattatgttttttaggaatatttttagtattttgtgagtttttttgtagatgaggttggagatgtgttttatgttgttgtggtgagtaaggtgttggatggttggtttggtgatgttttggatattgttgtgtagtattttatggtggtgtttagtgttgtttttgttaagattttttttgtttttgttgtggttagatatgatgagtaagaggagttttatttaatgttttgtgaggattttggtttgaggtagtgtttttatatgatagttggtggattgaattgagaatttgaaagaagttggtgggaagttttgttttggtgggggaggggaaatttaaagggttaaattgaaatagggggaaaaaaaaagtgagttttttgtttttgtgttttgaattttgtaatgtgtatagtattttgttattatgttatgaggttttaaaaaattgtttttgaatgtagaagatatatattaatattgtgggaaatataagaaaggataagaaattaagaaattataatgttattttattatataggttagttaattatgtattttgtagagtagttgtatatatttttttaagaaaatgtatatagtgttgtatatggagttttgtaatttttttatattgattataatttaattaatttttattaaagagataaaagtgatgttttggtgtttatgttttttaggaattattaatagttataattagttttttagtaattttttaattggttgtattttaaaaataatgttttttatatttaatataaatgtattttttttttatatttgggattaatattgaaatttatgattttattatattaaaatttaaattttattatattaatatttaaaattgtattagaggttttatgatttggtattatgggtttttgtattattttttttttaaattttttaatttgttttattaaggtttttggataattttagagattttttgtgaagtttgaataaaatttttttgagattttgataattgtattagttttaggatttaattggaatagaattaaaatttttaaaataagtttttata

SEQ ID NO: 707 - DNA, 2501 bp, Artificial Sequence
  chemically treated genomic DNA (Homo sapiens)
tataagagtttgttttaaggattttaattttattttaattaagttttaaagttaatgtaattattaaaattttgaagagattttatttaaattttataaaaggtttttaaagttgtttagaaattttggtgaaatagattaggaaatttggaaaggaaataatgtggagatttgtagtattaaattatgagatttttaatataattttaaatattaatgtaataaaatttaaattttggtgtaataaaattataaattttaatattggttttaagtatagagaaaaagtatatttatgttgaatgtggaaaatattatttttaaaatatagttgattaaaaaattgttggggaattgattataattattgataatttttaagaaatatagatattaaaatattatttttatttttttaatagaaattggttaaattataattaatataaggaggttataaaattttatatataatattgtatatatttttttggaaaaatatgtgtaattgttttgtaaaatatatgattaattagtttgtgtgatgggataatattgtagttttttaattttttgtttttttttgtattttttatagtattgatgtatattttttgtgtttaaaagtaattttttaaagttttataatgtggtaataaaatattatgtatgttataaaatttagaatatggaaataagaagtttgttttttttttttttttattttggtttggttttttagatttttttttttttattggggtgggattttttgttgattttttttaggtttttagtttggtttgttaattgttgtataaaggtgttgttttaggttagagtttttataaagtgttgggtgagattttttttgtttgttatgtttggttgtggtaaaggtgggaagggttttggtaaaggtggtgttaagtgttattgtaaagtattgtgtgataatatttagggtattattaagttggttatttggtgttttgtttgttgtggtggtgtgaagtgtatttttggttttatttatgaggagatttgtggggtgttgaaggtgtttttggagaatgtgatttgggatgttgtgatttatatagagtatgttaagtgtaagatggttattgttatggatgtggtttatgtgtttaagtgttagggttgtattttttatggttttggtggttgagtgtttttttttattaataaaaggttttttttagggtttttatttttttagttgaggagttgtgatgtttgtttgtttagtttttttttattatttgtttgtgtttgttgagtttgtgttgttattggagtatgtgtttttagttgttgtaagtaggtattagttattaattgttttttagtaaataaaatatttaatataatttgttttaggtgttttagagtttattgatatgggttgttgtgtagattgtagtgtagtgttattatggtttattgtagttttttgattagttggaattttgtgtttattattatgtaaggttaattatttttttaaagattgggtttttgtgtgttttttaggttagttttgatattttggttttaatttttttgtttatgtttaatgttggtattatagtagtgagttattatgtttggttatgatattgttgaggttttagggttagttatatttaaggggtaatttttgtagtgtagtggggaggaaagttaagtagttataggtttttggtgttgtgaatttaattgttgaatatagtaagaatttattatgtaataatttttaattagtggattgtaaataagtttagtttattggttttggtttaatttttgagaaaggtgagaatttgaatttttgagtagaaatatgtagtttattagtataataaagtgattataataaagattaatttattttttgttatttaatgtgggtagagttttattgttgagaattttttagtttttgagtgtttttttatttataattgaagttgataagatggtattaaaagtgagatttttagtaagtaaatttaaaggtttgaaggattagtgattaatgggaagtgttaataagttatatttgaggttatttaatttgagattttgatttaattggtttaaggatattattattttgtgggttagatttgaaaaataataattgttttaaggaaggaatttgttggtatttaaataaaaaatttttttttttgatttttatatgttgttatttagataaatttttggtttatatggttggatttttttttgttagttaaattttgtgttattttgtgaaaaagaattgagattaataaaatggtagtgagaatatagggaaagataaaaattatagtaagtttatttagttatgttgtagttatttttataaggatagggaaggattttgttttttatttattatttaaagtgtgagtataaattttaaaaatatatgatattataggaataatgaagatgtttttatttgtaaa

SEQ ID NO: 708 - DNA, 2168 bp, Artificial Sequence
  chemically treated genomic DNA (Homo sapiens)
tagggtttagatttggttttagaatgagaggttatgttagttgaggtagtattagtgggaattttggttttgtttttgggaaatgtggttataaagaaggtagatgaaagtggatggttgttattggattttagattgttttgtttttttgagtttttgagaaggattgttttttagattagttattagggaagagttggttagagagatgggttttttagagtaaaggatttagatttggttttagaatagaagggttaggtatatgggataggttggtaaggtgtttgtataggtaggtggtttgtgtaaagtggattttggtgggtgttattttgtttttttgtgggttgtttttgtttatattggtgtgtggggaatggggttttttgtattttatgttttttgtgtgtttgtggtttttttatagggggtttttgtgagttagggagtaattgttgtttttgtgttttaggttagttaggttaggttggtagatgggattttttaatttgttttggtaagtggagattttgtttatgatattttggtttttttggaaggggtgtttttttagttttaggttttttggtggtttttgtatttaggtaaaagttaggaggattaggatttatagtgtgatagtttgttgggtttttgtatggtgggatagtttgggtttgtttaagtggggttatagggttaaggtgtgtttaagttatttgtgttttaggggagtttgttgtggggttggggttggggtttttaggttgttatggtggtatgggaattttaagttggggtagtttaattttgttagtttgtttttttagagatttttatgtggtaggtgtagatgaaaggtattttggtgtttttttaggtgttttaggttttggggtgtttatttgtatttttttttggtttgttgttggatgagttttttttgatattagagtttttgtagtaggtataattttttttagaaatggaggttttgggggagttggaggttttggaagagggtgttttgttggaagtattttttaatgaggaagaatattgggttttgttggaggagattttagatgtggggtttggttaggattgggttgtggtagagtggtggtttttattttggggggaatatttggttggttatggaggggtgtgttttttttttgttttttttattgggttgattggtttaggatttttgttttatagttttaggtttggtgagaagttttatataatggagaattgttatttttttttgggtattttggggatggtagagttggtttaggtattagtatgttgattgtttattgtgtatgtgtgggtttgtatgtagttgtttgggttgtgggagtagtttgggtagagtttttatgtttttttattatataaatttgtttgattatttttttatttttatattttaatattggaaaatgtatttttttttgggttgggtggagatttatgttttgtgaaattttgagagtgtgtagtgtttaggtttgataattttttggtggtttgttttttttgtattattgtgttattgttgttggtttgtttgtgtttttgtagttttttagttgttattatggagtgtttgttggtggaatatagatttttagtttattttgttagttttttggttaggtttgtgtttattgtgtattttagttgatgtgtaagggagttagttggtttttttttgtttttgtttgtttgtgaaattttggttgaggtttttttaatattttttaatgttttatagttaaagtttggagaatagttatattttttggatgtttagtttagaaatatgttataatgttttttttttgtagagtgtagggaagatttgtattatttgggtgattagtgtagagatatattataatgttttttgtataaaaagattggaaatgatttatattattttggtgattagtgtataggtatgttagaaatttttagtaggttgaatttagataagggttatattaatttggtgattattgtagagatatgtgaaaatttttgtgtagatagagtttagataagtgttatattatttagtgattagtgtaggggtaatttgtgaagttttttttaggtagagtgtagataagtgttttttttttggagtg

SEQ ID NO: 709 - DNA, 2168 bp, Artificial Sequence
  chemically treated genomic DNA (Homo sapiens)
tattttagggaggaaatatttgtttatattttgtttaaaggaggttttatgaattatttttgtattgattattaggtgatgtaatatttgtttaggttttgtttatatgggaatttttatatatttttatagtgattattaaattgatgtaatttttgtttaggtttagtttattggggatttttgatatatttatgtattgattattgaggtgatgtaaattatttttagtttttttgtataggggatattgtgatatatttttgtattgattatttaaatgatgtaaattttttttatgttttgtagggagggggtattgtgatatatttttgaattgaatatttaggagatgtaattattttttaggttttgattatagagtgttggaaggtgttgggagagttttagttagaattttatggatggataagggtagagagaggttagttggtttttttgtatattagttggggtgtataatgagtgtaggtttagttaggagattggtaaagtgagttagaggtttgtgttttattgataggtgttttatggtggtagttgggaggttgtaggggtatgggtgggttgataatggtggtatagtggtgtagaggaggtgagttattagagggttgttaggtttggatgttgtatgtttttagggttttgtgggatgtgggtttttatttagtttagaggaggatgtattttttagtgttggggtgtgggggtgggggggtggttaggtgggtttgtgtggtggaaaggtatgagagttttgtttgggttgtttttatagtttaggtggttatgtgtaaatttgtgtgtgtgtagtaggtagttgatatgttggtatttgggttggttttgttatttttaggatgtttaggaaagaatggtagttttttattgtgtggagttttttattgggtttagaattatagggtaggaattttaggttggttagtttggtggagggggtggggggaagatatgtttttttatagttagttaggtgttttttttgaaatagaggttattgttttgttatgatttgattttggttaaattttgtatttgaaattttttttagtagagtttggtatttttttttgttgaggggtgtttttagtgaggtgtttttttttaaggtttttagtttttttggggtttttgtttttaggaaaggttgtgtttgttgtaaaaattttggtgttgaaaggagtttatttagtagtaggttgaaggggagtgtagatgagtgttttgaaatttggagtgtttgggagggtgttgggatgttttttatttgtatttgttgtatggaggtttttgggagagtaggttggtgaggttgagttgttttggtttggggtttttatgttgttatggtgatttggggattttagttttagttttataatggatttttttgggatgtgggtggtttaggtatattttggttttgtgattttgtttgagtaggtttaggttgttttattgtgtaagggtttagtaggttgttatgttgtgggttttggtttttttggtttttgtttgggtgtaggggttattgaggagtttgaagttgggagagtgttttttttagaggagttggggtgttgtaggtaaaatttttgtttgttggggtaggttgggagattttatttgttggtttggtttggttggtttggagtatggggatggtaattgttttttggtttataaaagttttttgtgggagagttgtaggtatgtagggaatgtggggtgtaggaagttttgttttttatgtattggtgtgggtgaaggtgatttatgagggagtagggtgatatttgttagggtttgttttgtataggttgtttgtttgtgtgggtgttttgttagtttgttttgtgtgtttggtttttttattttgaaattagatttgaattttttattttgggaggtttatttttttggttagtttttttttggtggttggtttggaaagtgattttttttaaaggtttggaggagtagggtagtttgggatttggtgatggttgtttgtttttgtttgttttttttgtggttgtattttttgggggtagggttgagatttttgttggtgttgttttagttggtgtgattttttattttgaaattaaatttggattttg

SEQ ID NO: 710 - DNA, 2490 bp, Artificial Sequence
  chemically treated genomic DNA (Homo sapiens)
gattagtatggttattatatttatagttattagttttagagttatttttttttttagtttagggattgtaattgtttttttagtattgagaagtatagttattatatttatagttattagtgttatagttattttttttttttttttgggtattgtttggatttgtttattatagattattatatttatggttattatgtttatagttatatttttttttattttagagattgtttatatttttatagtgtttattattatgattattataattagggttattggttttgtggttatttttttttttattttaggaatagtttatattattaaagtgttgattattataattatgggttttatagttatttttttttttagtttagggatggtatttatgtttttagtgtggattagtataattattatatttataattagaggttttatggtgatttttttttttattttggggattatttatattgttatagtgttgattattattattataattgtggttattggttttatggtaatatttttttttagtatatagattagtggtatttttttattattgattattatggttattatgattatagttattggttttattattaatttttttttaattttagggataatttttatttttttagtgttgattattattgttattatatttgtagttattagtagtatagtgatttttttttttgttttagggattatttatatatttttagtgttgaatattatggttattatatatgggtggtttttgttttttagtagtttttatatggtgtgtatagtttggattttggttattttgggtattttgggtattatttatattatagagttttttatggtgattttttatattttagtagtaattattagtattatttagtatttgattttagttttgtttagtttttattttagtagtaggattattgagttatttttttttttagggatgattattttgggttatattaggggtatttttaggattatagttatagttatatttagtaagatttgtattttgattttgttgtttagtagttttatattggtttttataattatggtggtgattatgggttgtgagttttagtgtgtttggttagagtggttggattatagttattttatgttggggttttttggtggggattttgatatttattttaatatttgtgtggttggaggggtagtttgtgagtagtttttgggttttgagtgttgtgtttaggtttagtttggtgtttttttgtgggagttgggttaggttgtggaatgtagtttggattttggtttggtttgtaggaattgtgagtaggtggggaagtttaagatgtgttttaattatgaaatttgtgtgttttgttgtaattatggttattgttttagtattttggttattagttttatggttatgttttttttaattttggggatgatttggatttttataaagttgattataatagttattatgattgagtttattggatttatggttattttgttttttattttagggattatttggatttttatagagttgagtattatagttattgtgatggtgtttattggatttatggttattgttttttttatttaggtaattgttggtattttatatgtgagtattatggttatgatatttatagttattagttttaaagttatttttttttttagtttagggattgtaattgtttttttagtattgagaagtatagttattatatttatagttattagttttatagttattttttttttttttttgggtattatttggatttgtttattatagattattatatttatggttattatgtttatagttatatttttttttattttagagattgtttatatttttatagtgtttattattatggttattataattagggttattggttttgtggttatttttttttttattttaggaatagtttatattattaaagtgttgattattataattatgggttttatagttatttttttttttagtttagggatggtatgtatgtttttagtgtggattagtataattattatatttataattagtggttttatggtgatttttttttttgttttggggattatttatatttttatagtgttgattattattattataattgtggttattggttttatggtaatatttttttttagtatatagattagtggtatttttttattattgattattatggttattatgattatggttattggttttattattaatttttttttaattttagggataatatttatttttttagtgttgattattattgttattatatttgtagttattagtagtatagtgatttttttttttgttttagggattatttatatatttttagtgttgaatattatggttattatatatgggtgatttttgttttttagtagtttttatatggtgtgtat

SEQ ID NO: 711 - DNA, 2490 bp, Artificial Sequence
  chemically treated genomic DNA (Homo sapiens)
gtgtgtattgtgtggggattgttgggggatagggattgtttgtgtgtggtggttgtggtgtttggtattgggggtgtgtgggtggtttttagggtagaggagggagttattgtgttgttggtggttgtaggtgtggtggtggtggtggttagtattggggggataggtgttgtttttggagttgaggaggggttggtggtggagttggtggttgtgattgtagtggttgtggtgattagtgatgggggagtattattggtttgtgtgttagaggagggtgttgttatagaattagtggttatagttgtggtggtggtggttagtattgtgggggtgtgggtggtttttgggatggaggagggggttattgtggagttattggttgtgggtgtggtggttgtgttgatttatattggaggtgtgtgtgttgtttttgggttggaggagggggtgattgtgaagtttgtggttgtggtagttggtattttggtagtgtgagttgtttttggggtggaagagggggtggttatagagttggtggttttggttgtggtggttgtggtggtaagtattgtggaggtgtgggtagtttttggagtggaggagggtgtggttgtggatatggtggttgtgggtgtggtggtttgtgataggtgggtttaggtggtgtttagggaggaggaggggatggttgtaaagttggtagttgtgggtgtggtggttgtgttttttagtgttggaagggtggttgtagtttttggattggagaagggagtggttttggagttggtgattgtgggtgttgtggttgtggtgtttatatgtggggtgttagtagttgtttgggtggaggaggtggtggttgtggatttggtgggtattgttatggtggttgtagtgtttggttttgtgaggatttaggtggtttttggggtggaggatggggtggttgtggatttagtggatttagttgtagtggttgttgtggttagttttgtgaggatttaggttgtttttggagttgaggagggtgtggttgtagagttggtggttggggtgttggggtagtggttgtagttgtagtagaatatatggattttatagttgaagtatattttgaatttttttatttgtttatggtttttgtagattaggttaaagtttaggttgtattttatgatttggtttaatttttgtagggggatattaggttgggtttgggtatggtatttgaggtttaggggttgtttatagattgtttttttggttgtatggatgttggagtaggtgttaaagtttttgttagagggttttggtatggggtagttgtagtttagttattttgattaggtatattggggtttatagtttgtggttattattgtggttatgggggttgatgtggggttgttgggtagtagggttgaggtgtgggttttgttgggtgtggttgtggttgtggttttggaggtgtttttggtgtggtttggggtggttgtttttggagaagggggtgatttggtggttttgttgttagggtgagggttggatagggttggagttgagtgttgggtggtattggtggttgttgttggggtgtgggaagttattgtggaaggttttgtgatgtgggtggtgtttaagatgtttgaggtggttgaagtttaggttgtgtgtattgtgtggggattgttggggggtagggattgtttgtgtgtggtggttgtggtgtttggtattgggggtgtgtgggtggtttttagggtagaggagggagttattgtgttgttggtggttgtaggtgtggtggtggtggtggttagtattggggggatgggagttgtttttggagttgaggaggggttggtggtggagttggtggttgtgattgtagtggttgtggtggttagtgatgggggagtattattggtttgtgtgttagaggagggtgttgttatagaattagtggttatagttgtggtggtggtggttagtattgtggtggtgtgggtggtttttgggatggaggagggggttattgtggagtttttggttgtgggtgtggtggttgtgttgatttatattggaggtgtgagtgttgtttttgggttggaggagggggtggttgtgaagtttgtggttgtggtagttggtattttggtagtgtgagttgtttttggggtggaggagggggtggttatagagttggtggttttggttgtggtggttgtggtggtaagtattgtggaggtgtggatagtttttggagtagaggagggtgtggttgtggatatggtggttgtgggtgtggtggtttgtgataggtgggtttaggtggtgtttagggaggaagaggggatggttgtaatgttggtagttgtgggtgtggtggttgtgttttttagtgttggaagggtggttgtagtttttggattggaggagggagtggttttggagttgatgattgtgggtgtggtggttgtgttggtt

SEQ ID NO: 712 - DNA, 2500 bp, Artificial Sequence
  chemically treated genomic DNA (Homo sapiens)
ttaaaataagtagggttttttttttggggtattttatttttttttttttttttaaattataaggttttaatagaggagtaaattttatgtggttttttaattgttttaaaagtgattaattattaaattgaatgtgatgtgtattgttattttttaaggaaaattttgagtagttttgaaagatagaattataaaagggaaaaattatttttttagggttagtttttttataaaataaatttgttttggggtttttttttggaaaaatatatatagggttttaagtgtgtgtaggttgattggttatataattatttgaatttagttttgaaaatagtttttttttgtgtttttaatgtaaaggaataattaaaatttaaagtgtattttttttaattagttgaaagttttagtaatgtatggtattgtgggtatttaggagttaaaatgtttttatttataaaaaatgatttaaataatggtttgtgtttaagtttttatatttgttttgtagagaagttttggttggtagaggtaggatttgtaattttttgggttgtttgattttatgaggggtgaggtatgtattgtagtgatatggattatttgtgaagtttttgggtgggagttgtttaaagattaatttttttgggtttttgttattaaaagtgtttttgtgaatagtgtgattggaaatttgtgtgggttggagattgtggtgtggttgtttttttaataggtgatttgtttttttgtttgaggtttatttttatgtaaagagtttgatattagagtattttttgttgttaaatgttttttttagttttgagggagagagttatgtggagttggaagagtttattttgaagagaggggttttggggagttttttttaagatttagaggttttgtggttatttttgttgggttttgttaagatttgttagaaggaatgagttgtgtgttttagttagttggtttttgttataggaagaaatgtttttgtagtgggtttaattgtttttgggttgagtgaattttttgttgtataatttagtggtgtggattttgttttttgttattttgttgttgtgttgagtggggtgggaaagtttttggagttgttagttgtgtagtttgtggttatttagatttgaggtgtgggtgtttgtgaagggtttttgtggggtggttggggttgttggggtatgtagtgtgggggtgtggtttggtgatgttgtgggtggggatttggtatttgggtaggttgtgtgtgggtgtggggtgagggtgttgtggggattgggatgtatggtttgtgtgtgggatatggttatggaggatgtgggagtagttggtttggggttggagtttgagtttgagtttgagttggagtttgagtttgtgttggagttggaattggagtttaagttgggtgttggtatatttgaggtgtttttttgattttggattgatgtgatgggtattttggtaagttatttggggagggggtggtgtaggaagtatagtttgtagtagtttttttgaaattgggggttttttttttgtttatttattgggtaatttattttgtagaggtgtttttttttggttttagtttttagggggttaaatatatatagtataggattttaaattttaattaaaaaataattagttataggttttgttaaaaggtgttttttaaataattgggtatgatatttaatagtttaatttgggatatttgttgatatgttggtgtggaaaaggtgagaaagaggtttttaaaaagtagatgtaaataaatatttggttggtgttggattagggaaaaggttgatgttattgatgtttatttttttattatttgttgtgtgattataagagggaaaataaatatttttttatttagaattgttaaaatgtttgtttatttttttttgtagttttttaatttgtggagttataggatatttgttttatatgtttggggttaaaataataggatttattttgttaaatttgtgttgttatgtattttgaaatgtttagtgattaaaagtgtttttggatttggtatagtttttgggaagtagtttttttgtatggagggtgaagttttaatttgtttagggttgaatattttggggaagtaatagatttgttttggtggagttgtagttaggtaggtagattggaattagatgggtgaggtttattatagttagatattttaatttatatataaaagataattttagtttaaagatttggaatggttagatgtgtagattattagaaaagtttttagatttgttttgagattttatattttttgagtgggaggagatggagtgaaagtttttttttgggaatgataaattgtgtatagtttttagtatagtgattaaatttttgggttttaaagtaagttatattaggttaaatgttagttttttaattgattgtttatatgattttggttaagttatttaat

SEQ ID NO: 713 - DNA, 2500 bp, Artificial Sequence
  chemically treated genomic DNA (Homo sapiens)
gttgaatgatttggttaagattatgtaaatagttaattggagagttggtatttgatttagtataatttattttgaagtttaagagtttaattattgtgttaaaaattgtatatggtttattatttttaaagaagaatttttattttatttttttttatttaaaaaatataagattttaaagtaaatttagagatttttttgataatttgtatatttggttattttaagtttttaaattaaagttgttttttatgtatggattaagatgtttgattgtaataaattttgtttatttgattttagtttatttgtttaattatagttttattaaagtaaatttattatttttttaaggtatttaattttgagtaggttaaaattttattttttatatagaagaattgttttttagagattatgttaaatttaggggtgtttttagttattggatattttaaaatatatgatagtatagatttagtaaaataagttttattgttttagttttaaatatataaaataaatattttgtaattttataaattgaaaaattgtaaaaaaaagtaggtaaatattttggtagttttgagtaaggaaatgtttgtttttttttttgtggttatataataaatggtgaagagataaatattagtaatattagttttttttttaatttagtattaattaaatatttatttatatttattttttgaaggttttttttttgttttttttatattaatatgttagtaggtgttttagattaaattgttgaatattatatttgattgtttaaaaaatattttttgatgggatttgtggttggttattttttaattagggtttgaaattttatattgtgtgtatttagttttttaagaattagagttagagaaggatgtttttgtggagtgggttgtttagtgggtgggtgagaagggagtttttggttttagaggggttgttgtgaattgtattttttgtgttgttttttttttaggtaatttattaggatatttattatgttggtttagagttgggagaatgttttggatgtgttagtatttggtttgggttttggttttggttttggtgtgggtttgggttttggtttgggtttgggtttaggttttggttttgggttagttgtttttgtgttttttatggttgtgttttgtgtgtgggttgtgtgttttagtttttgtggtgtttttgttttgtatttgtgtgtagtttgtttggatgttgggtttttgtttgtggtgttattgagttgtgtttttgtgttgtatgttttggtggttttggttattttgtgggggttttttgtaggtgtttgtattttgggtttaggtggttatgggttgtgtgattgataattttagaaatttttttattttgtttggtgtagtaatagggtagtaggaggtaaagtttgtattattgagttgtatggtggggaatttgtttggtttagaagtaattaaatttattgtaaaggtgtttttttttgtgatgggaattaattaattaaggtatgtgatttgttttttttagtaagttttggtaggatttggtaggggtggttgtggagtttttagattttggagggagttttttgggatttttttttttaaaatgagtttttttagttttatatgatttttttttttgaggttaaagaaagtgtttagtaataaaaggtgttttgatgttaggttttttgtatggaaatgagttttggataggagaataaattgtttgttgaaagagtagttgtgttgtggtttttggtttgtataagtttttaattatgttatttatggaaatgtttttggtaatggaaatttgagaaagttaatttttaagtgatttttgtttaaaggttttataagtagtttgtgttgttataatgtatattttgttttttgtgaagttaagtgatttaaggaattataaattttgtttttgttagttaagatttttttgtaaaataagtgtgaaagtttgggtatgagttattgtttggattattttttatgagtgggggtattttggtttttgaatgtttataatgttatgtattgttagggtttttggttaattaagggaaatgtgttttgggttttaattatttttttatattagggatatagggaagggttatttttgaaattaaatttaaatgattgtgtagttagttagtttatatatatttggggttttgtgtgtgtttttttaaggggaagttttaggatagatttattttataagggaattagttttggagaggtgattttttttttttgtgattttattttttaagattatttagagttttttttggaaggtgataatgtatgttatatttgatttggtgattgattatttttgaaatagttaagaaattatatggagtttgtttttttgttagggttttgtggtttaaaaggaaaaaaaaaagtgagatgttttagggagagagttttgtttgttttga

SEQ ID NO: 714 - DNA, 2243 bp, Artificial Sequence
  chemically treated genomic DNA (Homo sapiens)
aaggtgttttgttaagtgattttggggagagtagttttttgttttagttttatttttttttgttttagtttttaagggtattgtttattttagttttattttagggttttaaaattggtttttatgtttttgtttttttttttttttggttttttttttttttttttttttttttattaaatttattttttgggtattttatttttggttatttagattttttggtatttagtagtttatagtttttttttagatttgttaatgagttttgtttattgtaaagagggttattgatttttattaataatggaatttttagtgtttttttagtaattttagggatgttgatgtggggtttttgggaaataggatttgagtatgtgagttttagttttatagagagagggttagtgagtgttgggaggggattgtgtattgtttttaagttgtatattttgttgattatttaataattttttttatatttgtataatttttttttatttttatatttttttgtttattatttttagatttatatatgatttaagtaataaagttttatttgtaaatgggaaattttttaattagagggtgagggtgatttgtttaaggttatatagtaaaatgtattttttaatattgagaagttagatattgatttatataggtattaaggaagttggggaagtttttttttattattgttagtaggtttggttttttaattttgttattatgtttggtgtatttgtgaaatatgttgattatgtttattatggattttttagtttgagtgttgtttatttttgtttttaaaaagtttttaggaaataaagataattatttttttttttttatttaagttagggtttttatttgggagtgttggaaggagggttgaggatagagtaaaaatatggataaggtgtagtagaatgaatttaatttttttttaatgtgatgggataagttgtttaaaaatgagagggtaggattaagtttgagatttggtttattttggttagggttaagaggagatgtaggtggatggtggaagtttagttgtggatagtgttttagagagggagaagtagggagagttgggtgttagtaatatatggaagaattaagttgggatattttagttttagttagtatatggtagattttatttttaaaagagtattaaatttattttttttagttttatagttggggtgatagttatgggggtaggataatggttttggtgatttggtgtttgattttttttggttgttttaggaattagatattgtgggttttattttgatttaagtgtaagttttgtatgatatggtgtgtgtaggttttaggtgtatatgtgagtgtggatgtgagtgttagtaggaaatatagttttgttttgagtatagggggttttttttgtatttttttgggaatgagaaataggaatggtttttgttataaggaatagaaataattttttggtttttaagttgttggatggggtgggagtgaggtgggagttattttatgtttgtttttgggaattatttgtattttttgaattattaagttttgattgtttaaataaaaatgtttgattttttaaagtagattttttagttagtagttagtttgggttggtttgtattttaagtttgaaaaataggatagtgtagtttttattttttatattttttaaagaattaggaaaggattttggttaatgtatatgggtgtttgataataaatttttaatattttttaatgtaggagaaagttttatgttggtaattgattaagaggagttatttagagtttttttgaatttgaggttaaggttagagggtaagttttgtgtttagagggtgattgataatttgtaggttgtggtagggagtgatggagtgttggttttttaatattttatttaggtaggggtaagttatttggttagggttatgttgtgttggggttttaggtttgggggtttggagagtttttaaagtatttataggggatttttagttttttattttttgtggagttggagttggggaggggatttagtaattgggattttaataggaggatgaatttagggaggaagaggatagggagggttttgtgtttaggttttattggggatatttttataggagttgttttaggagattttaaaggagtaatggataggtttggtttagttatttggttatatagatgtgggtttt

SEQ ID NO: 715 - DNA, 2243 bp, Artificial Sequence
  chemically treated genomic DNA (Homo sapiens)
aaagtttatgtttgtataattaggtggttgaattagatttgtttattgtttttttgggattttttgaggtaatttttgtggaaatgtttttagtgggatttgagtataggattttttttgttttttttttttttggatttatttttttgttggggttttggttgttaaattttttttttagttttagttttatagagggtggagggttaggggttttttgtgaatgttttggaggttttttaaatttttaggtttgggattttgatatagtatagttttggttagatggtttgtttttatttgggtaaggtattgagaaattaatgttttgttattttttattataatttgtaaattgttagttattttttgggtatagggtttgttttttggttttggttttagatttaaaaaagttttgggtggttttttttagttagttgttggtatggagtttttttttgtattgagaggtgttgggggtttattgttagatatttatatgtattagttaaggtttttttttggttttttggaaagtgtgggaagtgagaattgtattgttttattttttaggtttggggtgtaggttagtttagattgattattggttgaaagatttgttttgggaagttagatatttttatttaaatagttaaggtttggtgatttagagggtgtagataatttttaagagtagatatgaagtgatttttattttatttttattttgtttagtagtttaagaattagagagttatttttgttttttgtaatagaggttatttttgttttttgtttttaagggaatataagaagggttttttgtgtttgggataggattgtgttttttgttaatatttatgtttatgtttatatgtgtatttggagtttgtatatattgtgttatgtagggtttgtatttgagttaaggtggggtttatggtgtttggtttttgaagtagttgaggagggttagatattagattattaaggttattgttttgtttttatgattgttattttgattgtgaagttggaggagatggatttggtgtttttttaagagtggggtttgttatgtgttggttgaggttggggtgttttagtttagtttttttatgtgttgttggtgtttgattttttttgtttttttttttttgaagtattgtttatagttggatttttgttatttatttgtatttttttttggttttggttaggatgggttaggttttagatttggttttatttttttatttttgagtaatttattttattatattaaaaaaaaattgagtttgttttgttatattttatttgtgtttttattttgtttttagttttttttttagtatttttaaatagagattttaatttaaatgaagggaaaaaaatgattgtttttattttttgaaggttttttgaaagtaaagatgagtaatatttaagttgagaggtttataataggtatgattgatatgttttataaatatattagatgtgatgataagattgagaagttaagtttgttgatgatgatgaaggagaatttttttaatttttttagtgtttgtgtgagttggtgtttagttttttaatgttggaggatatattttgttatgtggttttggatagattatttttattttttgattaaaaaattttttatttgtaaatagggttttattatttggattatatgtgaatttaaggatggtaggtaaaaaagtatgaaaatgggaaagagttatatagatataaaggaggttattagatggttagtaaagtgtgtagtttgagggtagtgtatagtttttttttagtatttattgattttttttttgtgagattgaaatttatatgtttaggttttgttttttaaaggttttatattaatatttttgagattattgggaaagtattagaagttttattgttagtagaaattaatagttttttttgtaataaataagatttattagtaaatttgaaaaaaaattgtgggttattaggtattaaagggtttagatgattaagagtaggatatttagaagatgagtttggtggaaaaggagaagaaaggagaggaggttagagaaagaagagaataaaagtatgagggttaattttgaggttttggggtagaattaaggtaggtagtgtttttagaggttgggatgggaaagagtgaggttggggtaggggattgttttttttaaggttatttaatagagtatttt

SEQ ID NO: 716 - DNA, 2246 bp, Artificial Sequence
  chemically treated genomic DNA (Homo sapiens)
tgtgtgtgtgtatatttatatatatatatatatagttgttagttgtgtatatttgtagtttaagttggatatatgtgtaaattgtgtttttgtgtgtttattttttttgagttttggttgtgtaatagtgggagggggttggggggggttattgggtagtttattttaaaataaaagaaaaattgtttttatattttttttattttgggagtaggattttttgagaaggggggtggggtgttgtgtgagtgaattaaattgaattaatgtaagtttttatttatttaaaagtttttttggatttggattttgggggtgggggtgtggattgtggaaaagggttggggttgatatgggagttggggggatagtaagaattgttttgtttttttggaaaagttgtttggtagtttttatttttgttttatggttgtgggtggtgaggggaggggagtagatgttggagtttaatttttaaaaagtgtttttatataaattttggtattatagattttgggagggtgaggatgataaaataaatgatattaagataatagaattaagagtatgtgagggggtgagaagtgtttgagattttgtttgagttttatttggaaaaggatttttatttaaatttttgttttttttttttattttattttgattaatttttggggttaaatatgattttattttttaaattgggtttatggtaagtgagagggtaaagggattggggtgttttatgtgggagagggatttggatttgttagtttaggagtaggtgtggttaaatttttgtagatatttgggtgggtgattttaggaggtgtttttgataattatagtaatttggaagttatattttgttttttgtgttttttggtttagggtaggatttggaaatgtttgttagattgggaaggatgtagttgttttgttagttgtttgatttttaattggtgaggataagaggagttgtggggtttttttgtggtttggggataaggttagattatggtttttgtggatattttttattttttaggttgtggttaattttgttaatttgatgatttggtttttagggttgggtgtgttatgtggttggttttttttttttttttagggtttttttggaggtggttagggtgggttggggtttggttttggttaggttttgtgggtgagtttagttgtatttattttattttgtttttaggtttggttttggtggttttatttgggtgtatggtgaggttgtgatgttttagtgttgttttttttggggttttttttttggggggtatatgggggtttttgtttttgttttgaaggttttgggtggggtgatggtattaataatttaatagtgtttagagtttgtgagtgagaatagaaagagattttttttagttttatattttaaaaaataataataataaaatgtgttttggtttgtagttttgtaaattgtgggttttatggtgggtggatgtgaggttgagtggatggagattgggggtggggtgtggatttgtatttttttgttttggttgggtaggttgtatttggttgtttatttttaatattttatttttatgtggtttaaagtttagtagggttttttttttttgttattttttttattgggaaaatttttttaggaaagtggtttaaaaaaaatatgtttatatgtatttttaataaatttttttaagatatttataaattggttatttttatttgtttggattttaaatttgaaagattaatttgtgttttttttttgagaattagtgatgtgaagtttagagagggtgagtattttgttttaggatatatagtgtgttagggataggtttggatttaaaatattgtggtgtgtttgtagtttagtgttgttggtggtttgggatttgaaattttgatttatgatttttatttttttggggttgattataaggaaggtagattttgttagtggtaaggtgggatggggaggattttttaggaaaagggagtttttttgtgagtggtgtaagggtttttggagttttagttgtagttgttattttgtgtgtggtaaggggttgtgtttggggagggggtattttttttttatttttagtaggaagtagttggtgtgggttggtgtgtgttttatggatttgaggagtatttttttattggttttgtgttgttttgatggtgggaagagggatgtgtgggtgggtggatgtagg

SEQ ID NO: 717 - DNA, 2246 bp, Artificial Sequence
  chemically treated genomic DNA (Homo sapiens)
tttgtgtttgtttgtttgtgtgtttttttttttgttgttggggtagtgtggggttaatgaggaagtgttttttgggtttgtggggtatgtgttggtttatgttagttattttttgttgggagtggggagggggtgttttttttttaggtatggttttttattgtatgtggggtggtggttgtagttgggattttgagagtttttgtgttgtttgtggaggggttttttttttttgaggggttttttttgttttgttttgttattggtggggtttgttttttttgtaattaattttaggaaggtgagggttgtgggttgggattttgagttttggattgttggtggtgttgggttgtaggtatgttgtggtgttttgggtttagatttgtttttgatgtgttgtgtgttttagggtaaagtgtttattttttttgggttttatattgttagtttttagaaagagagtgtgagttgattttttaaatttagagtttgggtgagtagggatggttagtttatgaatgttttaaagaagtttattaaaggtgtgtgtgggtatattttttttaagttatttttttggaaagatttttttggtgagagggatggtagaagagggaggttttattagattttggattatgtggaggtggggtgttgggggtgggtagttgggtgtagtttgtttggttagggtgaggaggtgtaagtttgtgttttgtttttggtttttatttgtttggttttgtgtttgtttattgtggagtttatagtttatagaattgtaagttagggtatattttattgttattattttttagggtatgggattggaagggatttttttttgtttttgtttatggattttgggtgttgttaaattgttggtgttattgttttatttaagatttttgggatgaaaataaaaatttttgtgtgttttttgaggaaaaggttttgagggaggtggtgttgaggtgttatggttttgttatgtgtttgggtgaagttgttggagttaggtttgggggtggagtggggtgggtgtagttggatttgtttgtgaagtttagttggagttaggttttgatttgttttggttgtttttagagaaattttgagaagggagaggaggttagttgtgtggtgtgtttagttttggaggttaggttattaaattgataaagttggttatagtttggggaatggggggtgtttatgggggttgtggtttggttttgtttttgggttatggagaggttttataattttttttgtttttgttggttggagattaaatggttgataaggtagttgtgttttttttagtttgataggtatttttaagttttattttgggttgaggagtgtggggggtggggtgtgatttttaggttgttgtgattgttaggggtgttttttggagttatttatttgagtatttgtggagatttggttatatttatttttgggttggtaagtttaagttttttttttatgtggagtgttttggtttttttatttttttgtttgttatagatttagtttaggaggtggggttgtgtttgattttaggagttaattggggtaaggtgaggggaggggataaagatttgagtgaaaatttttttttaagtgggatttaaataaggttttaaatattttttatttttttatgtgtttttgattttgttgttttagtgttgtttattttgttatttttatttttttagagtttgtaatattaggatttatatggagatattttttggaagttgaattttaatatttatttttttttttttgttgtttgtgattataaaataaaagtaaaaattattaagtgatttttttagggaaatgaagtgatttttattgtttttttaatttttatgttgattttaatttttttttatagtttatgtttttatttttaaagtttaagtttgaaagagtttttgggtgggtggagatttgtattgatttaatttagtttatttatatagtattttgtttttttttttagggggttttgtttttaggatggaggagatataaggatgattttttttttattttaaaataagttgtttagtggttttttttaatttttttttgttgttgtgtagttggggtttgggggagatgagtgtataaaaatgtggtttgtatgtgtgtttggtttgggttgtgggtgtgtgtaattggtgattgtgtgtgtgtgtgtgtgagtgtgtgtgtgtgtg

SEQ ID NO: 718 - DNA, 2357 bp, Artificial Sequence
  chemically treated genomic DNA (Homo sapiens)
tttgtagtttttgggagtgggaatgttggggataagagttgaagggatgaaggatattggagatggttagggggaaatttggtgtgatttttttttagggttgtgtgagggtttttaaatttttatttttgtttagggttggtagtgaggttttattatagggataagtttggtagattttttttttttttaggtttttagtaaaatgttgggttttttgttagtggaaaatggaagaaaagtttggagtgtttttggagttgtttgtttgggaagaaatgaattttgattttagttttggtttgtgtattggaggttttagggttgtgagggttgtttgggtagagtttaggttaagaaggagtttggttgaggataggagtttggggtttgtgtgggagatgggatttttttttaggatgtttgggttggtttgttgggaggtggtggggttttttttttagggttttgtatttgggttttatattgggtgaaatttttgggttggggtttagtatgtgagattgttgttttatgtgggttatatagattatttttttgtgggttgtagtttttggttattggttttttttttggtgttggggttgtttggagttgttgggagttgagtggtttttggggaggtggtgttgtggtgtttagggtgtggggtttgtttttgtgtgtttgagggtgggggttgtataggagttttttttggggttggtttttgaggtgttgtattttttattagttttttgtgattgaaattgaaatttttatttgtgtaatttttttagatgggtttgaggttggggtgtggttgggatttgggtggggaggggtaggggtggagtgaaggtggggtttgggggggtgtgtgtggatggggagagtggaattgtgggtgtggatttttaagtatagatgttagagaatgtttgttgttttggtttgttggtttaggggtatgatttttgttttgggtgtgagaggttttgggtttaaattttggatgagtttgtttttttttttttttttgaatattattatttttttgtggtgaagattgaggagttttatggagttttggttgtagggaatttggtttttttgtggtagttgtaggtgttggggttgatttgattttttgtttttgtttggtttgtggttttttgttttgtttggttataggaaggatttgtttgtgttttttgattggagttttttatttgggagttttgagtgtgtttaaggtttggtgttgaggtagtggattttagatttgggatttgaaaggagggtaaatatttttattgttgtgtttgtttttgtggatgtggttttagattttgggtggttatggaatttggtttgggtgtgtagtttttttttgagtgggttggttttaagtttaaatttttgatgagtttagggttttgaattttttttttttttttttttgttttttttttttttttttttttttttttttttttttttttttttttttttttttttttttttttttttttttttttttttttttttttttttttttttttttttttttttttttttttttttttttttttttttttttttttttttttttttattttttttttttttttttttttgttttttgttttttttgatagtgtttttttttgttgtttaggttggagtgttggagtgtagtggtgtgattttggtttattgtaattttaattttttaaatttaagggatttttttatttttattttttaagtagttgggattataggtgtttattattatgttaggttaagtgtgtgtgtgtgtgtgtgtgtgtgtgtgtgtgtgtgtgtgtgtttgtgtgtgtaaaattgaggttttgttgtgttttggaggttggtttttaatttgtatttaagtaatttttttattttggtttttttttataaagtgttgtaattataggttagaattattatgtttagttggttttttttttttttaggttttgaggttgtagtggtgtgtttttttggtatatggtggggaagaggtgtggttttgggagtttgtgatgtttttggggagtttaagtttggtttttagttttttgtttgaggatggaggaggatttggggggttttttttagttggtggttttagttttttaggggtggtggagatagtaggaagttttaaaatttgagttgggttttttgtttggagttgtagggtgtggtaatgttgaagtttgttgtgtttttgttttttatgggaattagaatttggtttaggataagtattgggaaagggggatagtttgtgattgaggaaattaggattgatttagaatagtgta

SEQ ID NO: 719 - DNA, 2357 bp, Artificial Sequence
  chemically treated genomic DNA (Homo sapiens)
tgtgttgttttggattagttttagtttttttggttataaattgttttttttttttgatgtttgttttggattggattttaatttttatagggagtaggggtatggtgaattttaatattgttatattttgtgattttaagtaggaaatttagtttgggttttggggttttttgttgtttttgttgtttttggagaattgagattattagttaggggaagttttttaggtttttttttgtttttgggtaaagggttaggagttgggtttggattttttagaggtgttgtaggtttttggaattgtattttttttttgttatgtattggagggatgtgttgttgtgattttaggatttggaaggaaaaggaattagttgagtatggtggttttggtttgtaattgtagtattttgtgaggggaggttgaggtaggaagattgtttgagtgtaagttggagattagtttttagaatatagtgagattttggttttatatatataaatatatatatatatatatatatatatatatatatatatatatatttagtttggtgtggtggtgagtatttgtagttttagttatttgggaggtggaggtgggaggattttttgagtttgggaggttgaggttgtagtgagttgagattgtattattgtattttagtattttagtttgggtaatagaaggagatattgttaaaaaaaataaaaaataaaaaaagaagaaaaaggaaaataaaagagaaaaagaaagaaagaaagaaagagagagagagagagagaaagaaagaaagaaagaaagaaagaaagaaagaaagaaagaaagaaagagagaaaaagaaagaaagagagaaaaagaaagaaagaaagaaaagaaaagaaagagaaatgaaggaaaaaaggaaggaagtttgaaattttgggtttgttggaaatttaaatttagaattgatttatttaaaggaaaattatatgtttagattaagttttatggttatttgggatttagggttatgtttgtagaggtagatgtggtggtggaggtgtttgttttttttttgggttttggatttggggtttattgttttagtgttaggttttaggtgtatttagaatttttaggtggaaggttttagttaggaggtgtaggtgagttttttttgtagttgggtaaggtgaggggttgtaagttggatggaagtgggaagttggattggttttggtgtttgtagttgttatggagagattaagttttttgtggttgagattttgtgaagttttttaatttttattgtgagaaaatgatggtgtttagaaaaaaaaaaaaaagtgggtttgtttgggatttgaatttgggattttttgtatttaaagtgagaattatatttttagattaatgagttaggatgataaatgttttttgatgtttgtatttggaggtttatatttgtggttttattttttttgtttatgtgtatttttttagattttgtttttattttatttttatttttttttgtttgggttttggttatattttaattttaagtttatttgggagggttgtgtaggtggaggttttggttttgattataggaagttggtaggaggtgtagtgttttggggattagttttgggaagagtttttgtatgatttttgtttttaggtgtatagaggtggattttgtattttgggtattgtggtgttgtttttttgagggttatttggtttttagtggttttaggtggttttagtattgagaggagggttggtgattaggggttgtggtttgtggggaggtggtttgtgtggtttgtgtgaggtagtggttttgtgtgttgagttttagtttagaaattttatttgatgtgaaatttgagtgtaggattttgaggaggagattttgttgttttttagtaggttagtttgggtattttaggaagggattttgttttttatatagattttgggtttttgtttttagttgagtttttttttggtttgagttttgtttaggtgatttttgtagttttgggatttttgatatatgggttggagttggggttagagtttatttttttttaaatgggtggttttagaaatgttttaaattttttttttgttttttattggtaagggatttagtattttattgggagtttaaggaggagaaaggtttattgggtttgtttttgtggtgaggttttgttgttggttttaaatagggatgagggtttgaaaatttttatatagttttaagagagagttatgttgagtttttttttggttatttttagtgttttttgtttttttagtttttgtttttgatgtttttgtttttgggagttgtagg

SEQ ID NO: 720 - DNA, 2290 bp, Artificial Sequence
  chemically treated genomic DNA (Homo sapiens)
taataaggtttttaaagtttttatatttaatgtgtggttttggaattagaagtattgtaattatttggaagtttgtttgttataaatatagatatttagattttgttttagatatattgaaatagaatttgtattttaataaaagatttagaggattgtttttatattgtgtgtgtgtgtgtgtgtgtgtatttaaaaagatataggtgttataattttttattgtttggttaattttaaaatttaatattgtataatggatattttttatgttaatatagatttatgttattatttattataaataaatagtaagttattgtatttattgttattgattggtatttatattaatttaatattttgttattgtaagaaatattttgatttagaaatgttgatgtaaagatttttgagtaggatatttaggagatattgattttgttatatttttttttttgttatattttgttgttttaatagattatgtgggtatattatttttattgattttttttttttttgtaaatgtaaattttaattgaattataaggttagtttatagtgtatttgtgggtagatttttttaaaatgtatggtattttaaattttgttttatgagaggtttaggaaaatgtttattaagtttttgtgattttaatattgtgttaggttatggtaaagtgaggtgtttttgatgtttgggttgttatagtgtgttttttagttattttggtaatatttgtgatttgagggttattttatttgtgttagtaatttgtgtgggttgggaggtgttaatgagagtagggtttgaaattagtgtttggtgtttgatggttgtttagtgatggttgttgatgttaatttttggttggatggatttatatttgttttttggttattgagagggtagttatgaatatttaaaagggtttttttattataaatgtttatagaggtttttttgttatgagtatttaaaggggtttttttgttttttgggatatggatagtttgggtagagatatgtagttgtgggtgattttggttgaggtgaagtttttggatatgatggttgggagggtgtattgttttttgattattgtgtataatatttgttgttggaattagaaaatttgatttaaggagtttgttaagttataggtgatatattaaggggtgttgggagtgggattttgtgagagtgtttttttatattgtgtttttttttgttttagggagtagttatttggtttttgttgggatggagggaggattgggttttttgggaaatagtgataggtttttgtgtgtgtgttttttttgtttttttttgttttttgttttgtttaggattaggagatggggagggtagggtggagaaaagttgatttagagtttttttatttttttaatttgggtttagaaatttgttaataattttaaaatttgtgtaatttggttttatgattttgttgttgttttaagaattatgagaataaaattttttattaattgttttttgaattataaagtgtttgataattttaggaattgtaggattagtggaaaggtttattattttatattttaataaatatttgttaagtatttattatataatgggtaatagatatgaggaatatggaatggatatagttttgtttttatagaatttagaaattaatgagggggttttagtatagatttaattattaagaaagttaatgttttgagagggtgtttttattttttaatttaaagtgggtagaattttttttgtattttattgtgttattttatattatgtgtgtgaatggatggttattagtttagtatgattatatttttttaggtaaatttttgatataggaaatgtgataagaatttttgaaatgtaagtaataaataattgaaaattttaagagatatttttaataaaaagtagtgttgaatatagttggattatatgtgtagaaaaaaaagatgtttgtaattttagattaaatttatatatatttttttgtatatatgtagaaaaatttatgttaatgattagaagagtaatgagaaaaaggatttttatgttttaatttttgttttgttaaaaaaattgatgtattatttatttattaaagtgtatagattttaaaagtaaagtttgatgaatttataaaaaaataaatatgtgtgtgtgtagatagatagttagatagataatttttattagttattatttggattaaataatagaatatgtttattattttagaagatttttagtgtt

SEQ ID NO: 721 - DNA, 2290 bp, Artificial Sequence
  chemically treated genomic DNA (Homo sapiens)
agtattggggattttttggggtagtgaatatattttattatttgatttaggtggtagttaatggagattatttatttagttatttatttatatatatatatatttatttttttgtaaatttattaaattttatttttgagatttgtgtattttagtaagtaaataatatattgatttttttaatagagtaaaaattagaatatggaagtttttttttttattgtttttttaattattaatataggtttttttatatatatataaagaaatatatgtaaatttaatttaaaattatggatattttttttttttgtatatatagtttagttgtatttaatattattttttattaggaatattttttgaagtttttagttatttattgtttatattttaaaaatttttattgtattttttatattaaaaatttgtttgagaaaatgtgattatattgaattaataattatttatttatatatatgatgtaaaataatatagtgagatatagaggaaattttgtttattttaaattagaagatagaaatatttttttagaatattaatttttttgatggttagatttgtattaaaatttttttattagtttttaagttttatgagggtagggttgtgtttattttgtattttttatgtttattatttgttatatagtaggtgtttaataaatgtttgttaaaatatgaaataatgaatttttttattaattttatagtttttggagttattaggtattttatgatttaaagggtagttaatagagaattttgtttttataatttttaaggtaatagtaaaattataaaattaagttgtatagattttgggattgttaataagtttttaaatttaggttgaagaaatggggaggttttaggttagtttttttttattttgttttttttattttttaattttaaataaaatagaaaataaagagaaataaaaagagtatatatatagaaatttgttattgttttttgggaagtttaattttttttttattttggtaggagttagatgattattttttggggtaaagagagatgtagtgtgaggaggtgtttttataaggttttgtttttagtattttttagtgtgttatttgtggtttgatgggttttttaaattggattttttggttttagtggtaaatattatgtatagtaattgggaggtggtatatttttttggttattgtgtttaggaattttattttagttgggattatttgtagttgtatgtttttatttgagttatttatattttgggggatgagggaatttttttggatgtttatggtgagggaatttttgtggatgtttatggtgagggaatttttttgggtgtttatggttgtttttttggtagttagaaaatagatgtggatttgtttggttaaggattagtgttgatgattgttgttaggtaattattagatgttaagtgttagttttaagttttgtttttattggtgttttttaatttgtgtgagttgttaatgtgaatagaataatttttaggttataggtgttattagagtaattgaaaaatatgttgtggtagtttaaatgttagaggtattttattttgttatggtttggtatggtattaaaattatagaggtttagtgggtatttttttggattttttgtaagataaagtttaaagtattatgtattttaaagaaatttgtttatagatgtattgtaaattggttttataatttaattaaaatttatatttataaagaaaaaaaagattagtgaaagtgatgtgtttatgtggtttattaaggtagtaagatataatagaaagggagatataataaagttagtgttttttagatgttttgtttagaggtttttatgttagtgtttttgaattagaatgttttttataatagtaaaatattggattaatatgaatattaattagtagtgatggatataataatttattgtttatttatgatgaataataatgtagatttgtgttgatataagagatatttattatatagtattaaattttaaaattgattaaataataagaaattgtgatatttgtatttttttaaatgtatatatatatatatatatataatgtaaaagtaattttttgggttttttgttaaaatgtagattttgttttagtatgtttgaagtaaggtttaagtatttgtatttatgataagtaagtttttaggtgattataatgtttttggttttggggttatatattgaatatagaggttttaggaattttgtta

SEQ ID NO: 722 - DNA, 2367 bp, Artificial Sequence
  chemically treated genomic DNA (Homo sapiens)
gatgtgtgtggtggtaagtgtttggtttgtattttttttgtattttgtaattttgattttggtggtttttagatttggtgaaattgtgaagttttggttttaggagttttttagatttatggttttagatttgaatttttagatttgtttgatttttttttatgttgttttggggatttttttttattttttgttttatgatttaaaatataggtttataggttttagagatattttgtgaatttttttttggggtgttttgaattgtgattgtagatttgtgtttttagttttagtggggaattttattgtttgggaatttagagtttatagttatgattttagatttgagtttatagagttagaggtgatattggaattttgttgttgggaatatttaaatttttaagtttatatttgggattttttaaattttgttttggggttttttaggttgtggatgtttgttttgtgtttatgatttgttaaggatttttatatttaggttgggttttggattttatattttagtgtttagatatgttgggaatgttttatgttaatttggggtttttattaagagaatttttattagatttgtatttttttttttatgtgtgtatttagtttaggtttttttaagttttatgggtgttttttagatttgaggaggttgtaaatttgattttttatatttgttttatttatttgtggataatttgtttttgtaaatttagatttttatttggaggttttagattttttttaggtttagttgttggaaatgtgtgtttgaagggagggtgtgggtttaggggtgaagtatttattggtttttttttttttttttagtagtgagttgtagttatgtttttggttaatttgtttttgaagggtggtggtggtggtggtgggggaggtgggggtttgggtgggggtttgggaaatgtgtttggaggtttgattagtggggttgggggtggtggtggtggtggtggtggtggtggtggtggtggaggtggtggtggtggtggaatggttatgtgtattttaggtggagttattagtgttattaggtaaggtggagattattagaggggtggggtttgggaatgggaggagttttagtgaggtgtggtttgggaggggtgtggtttaaaaatagaataggattaatttggaggttaatttgggtatatgaattaggttggggaggtttggtttgagagttttgttgtaagggggtggattttagtgaggtggatattagttattgggggtggtgtttgatatgggagtagtttgattgtgtgggattaggataatgtggttttgaggggattgatgtggagttttggtgggtggggtttatgggtttgggtttagtttgtattggttaatttggagatgaatgttaaaggtgtggagttaatgtgtttgagtgatattttatggaaggggtttgatttatgagtgtggttagaggttttaggtgggttaatgaggaggtgagtttaggaggaagtaagatttaatggggtagggtaaatggtttagaatgggttgggtttgttgggaattggttggattaatggagaaaaatgttttggtagggatagggtaggttggtttaattagttatggttatttagtagtgattttttgaaggggtggggattaatggttggggtaggatgttgggaagatgggtatttaggaagtgggttatggagtagggttttgggtagatggtatttgaggaggataaggttttgggaagttggggtagagtttttatgaagtgagttttttaaggggtggggttttttgattttatgtgggattttttaggtttagggtggttaagatgattgaaatttgttattgggtaggtgtgtttggtaggaggggagttttttaggggattggtttttgggtttttttgagggtggggttggtttgaggaagggagaagaggggtatgattagggtagtgtggattgggatagatgaggataagaataaatgaaaggtatagtaattaagtaaggaagataatggttggggtttggagtgttggggttgatggttttgtagtgttgtttgttggaggttttgtttttggtattaattttttttttttatttttttgtagtgaggtggttgtgtagtataatttggagtttttggtaagttttttttgtaattagattttttttttttgttaaggtttttttgaggttttatttttgtttttgtagagaagttttattttttttttttttttgtgaaatttttttgttagttttttttatgttgtgtttgtagttttgttatgggttttagttatgttttatatatgtgtat

SEQ ID NO: 723 - DNA, 2367 bp, Artificial Sequence
  chemically treated genomic DNA (Homo sapiens)
gtgtatgtatgtggggtatggttaagatttatggtgaagttgtagatatggtatgggaggaattggtagaggaattttataagaaggggaggaaggtggggtttttttataggaatagggatgggattttgaagaggttttggtaggagaagggggtttggttgtagagggggtttattgggggttttgggttgtattgtgtagttgttttgttgtgaagagataagggggaggggttagtgttaggggtggggtttttaatgggtagtattatagaattattagttttaatgttttagattttagttgttattttttttatttggttgttgtgttttttatttgtttttgtttttatttgttttaatttatattgttttggttgtgtttttttttttttttttttaggttaattttatttttgaggaaatttagagattggttttttgggaggttttttttttgttaggtatatttatttagtggtagattttagttattttggttattttaaatttaaaaaattttatgtagaattaaaagattttgttttttggagggtttattttatagaggttttgttttagttttttaaggttttattttttttaggtgttatttgtttaagattttattttatggtttgttttttaaatgtttgtttttttaatattttattttagttattggtttttgtttttttaagggattattgttaagtggttgtggttaattaagttaatttgttttatttttattagggtatttttttttattaatttagttagtttttagtaagtttagtttattttgggttatttattttattttattaggttttgtttttttttgggtttatttttttattaatttatttaaaatttttgattatatttataagttaagttttttttgtaaaatgttatttagatgtattggttttgtatttttaatgtttatttttaggttagttaatgtaggttgagtttagatttataagttttatttgttaaaattttatattagtttttttaggattatattgttttggttttatataattagattatttttatattaagtattgtttttaatgattgatatttgttttattggggtttatttttttatagtagaatttttaaattaggtttttttggtttaatttatgtatttaggttagtttttaggttaattttattttatttttagattatgttttttttagattatgttttattgaggttttttttatttttaggttttgtttttttgatagtttttgttttatttgatggtgttgatgattttgtttaggatgtgtatggttgttttattgttattgttgtttttattattgttgttgttgttgttgttgttgttgttgtttttggttttgttgattaggtttttaagtatattttttaggtttttatttaggtttttgttttttttgttgttgttgttgttgttttttaagaatgagttaattaggaatatggttgtgatttattgttggggggaaaaaaggggattagtgggtgttttgtttttgagtttatattttttttttaaatatgtatttttggtagttggatttgggaggaatttgaagtttttgggtgggggtttgagtttgtgagggtgggttgtttgtggatgggtggggtaggtatgggggattaggtttgtaatttttttaggtttaaaaggtatttgtggggtttgagggagtttggattgggtgtatgtgtgaaggggagggtgtagatttggtgggggtttttttggtggggattttaagttggtgtaaggtgtttttgatatgtttgggtgttagaatgtgagatttagagtttagtttgaatgtagaggtttttggtaggttatgggtgtggagtaaatatttatggtttaaagggttttagggtggggtttaggaaattttaaatgtgggtttgagaatttaggtatttttagtggtaggattttagtgttatttttggttttgtgggtttgggtttaagattgtggttgtgagttttgggtttttggataatggggttttttgttggaattgggggtatagatttatgattgtggtttaggatattttaaggaagaatttatagggtatttttgaaatttatgggtttgtattttggattatgagatagagggtggagaagggtttttgggatggtataaaaggagattgaataggtttgagggtttgaatttgagattatggatttggggggtttttgaggttgagattttatggttttgttgggtttgggggttgttaaagttggagttgtggggtgtggagggggtatgggttgggtgtttattgttgtatatgtt

SEQ ID NO: 724 - DNA, 2383 bp, Artificial Sequence
  chemically treated genomic DNA (Homo sapiens)
ataataaagatgtatatatgtatgtttttataaaatttagttgagattttatttttattttataaatattttatttaatagtgtatgaatttaattgtagataaagagatagaaatagaaatgaaggaattttttaatttttgattatagttagagagatatttttttaaaggaattttttaaggataaatgtatattaaattaagtagaagatattaagatttggagtggtttttttatttttttttataattaggttgattaaggtgtgagttgattttggtataatgtatttattttaagtttgatgatgtgtttattattttaaaaggtttttttgtgttttttgtagttagttttgttttttttttgaggttagtagttaatgatgtagtttttgttattatataggttagttttaattgttgtagaaatttattttgatggtgttatatagggtgtattttttttattatttggtataatgtttttgagatgatttatgttattttatgtttttgtaatgtgttttattttattgttgggtagtttgggtagttggggtagattgtagtatattttggtgataggtgagattgtggttttgatttgtaggttttggtgaatatgagtaagggtatttgggtgttgggagagatttttttttttttatagaaagtaagtgtgttatgttaataattgaatggggattttgtttttattttaaagaatagtatttgattgtgtagttttttttttggttttaggaggtgagaatatattttttgttagtatagatattttataaatttttgtggaggttgtggttagaagtagaggttgtgtgaagggtgattttgggggttatgaaaaaatatgaaggtttttatagagtatgagaatttaaaagattggagattatgaagtgatttgtaaaaagtagttttaagtagaaagggaagagaagagttttgtggttatttagtgttaaaagagtttatggtggtggagaggataatatgttattttttgttttttattattgtgattgtaaggagaatatttaatatgttatttaagttataaaattgtagttttaagaataatttttataggggagtttatttttttattataaaaatttaggggaaagtgtggatgtagttttttattattataaattatgtagttgagttttttatatttggggaaattgtaggggttagtatatttggagtgtaatggataagttttgttttgggaaaattatttttgtgattatggtattttttttgttaggtaagtatgattttatatatttttgttttgttatagttttatatattttattttttatatatatggttatttgttttgtgtatttttgagtttttttagttttgatatatagttgggatttttaggtttgattagtggttttgaatttgtttttatggtatgggagtttttttgtggtgaaatagttagtggtgaagtagtagtttttgtgttgttttatttatatagaagttgttttatttgtgatgttattgatagtgttttttttgttttggtttgtttttttgttttattttttgttatttagttgattaatatggtgttagagtttgtgggggtagtgatgtttgtttttgtttttttttttttttttttttgtttatggttttttttaaagaagtgggtgtttttgttgtagttttttgtttgttttttgttttgtgttgttttgttttgttgtttaggttggagtgtagttgtatgattttggttttttgtaatttttgttttttgggttgaagtgatttttttgttttaggtttttgtatagttgggattataggtatatgttattaagtttggttaatttttgtgtttttagtagagatggggttttattatgttggttaggttgattttgaatttttgattttaggtaatttgttgattttggttttttaaagtgttgagattataggtgtgagttattatgattgtttagaagttggtttttagtttgtgttgttgaggatttttttggtagaaatttggagtttgtttatttttttttaaataatggtttgtaatgtgtagattaaaatatggaggattatataagaaattggtttattttatattattatttttgtgatgtagtattttatttgaaattggaagttgtttgatattagagaaattatatttatgaaattagagaggttgtttagatgattgtaaattagttatttttatttgttttattattagtagtgttataaggatggtggtttaattttaggaattttgtagggtttttttaaatatagtaatgtataaatatgttgttttagtagagtatattgga

SEQ ID NO: 725 - DNA, 2383 bp, Artificial Sequence
  chemically treated genomic DNA (Homo sapiens)
tttagtgtgttttgttggggtagtatatttgtatattgttgtatttgaaagaattttataagatttttgaaattggattattgtttttataatattattagtggtaaaataagtaaggatggttggtttgtagttatttgagtagtttttttagttttatagatatggtttttttgatattgaatggtttttaattttaagtagaatgttatattataaggataatgatgtgaagtgaattagttttttgtgtaattttttatgttttagtttgtgtattataagttattatttgaagaagggtggataggttttagatttttgttaaagaggtttttggtaatataggttaagaattggtttttgggtagttgtgatggtttatgtttgtaattttagtattttgggaggttgaggttggtggattatttgaggttaggagtttgggattagtttggttaatatggtgaaattttgtttttattaaaaatataaaaattagttgggtttggtggtgtgtgtttgtaattttagttatgtggaagtttgaggtaggagaattgttttaatttgagaggtggaggttgtagggagttgagattatgtgattgtattttagtttgggtgatagagtgagatggtgtaaaataaaaaataaataaaaaattataatagaaatatttgtttttttggggaagattatgggtggggaagagagggaaaggaggtagaggtagatattattgtttttgtaggttttggtattatgttggttggttgagtggtggagggtggggtagaaaagtagattgggatgaggaaggtgttgttggtgatattatggatagggtgatttttatgtagatgaggtagtgtaggggttgttgttttgttattggttgttttattatgaaggagtttttgtgttgtgggagtgggtttaggattgttggttggatttgagggttttagttgtgtgttagggttaggaaggtttgggggtgtgtggggtaagtgattatgtgtgtaaagggtgaggtatatggagttgtgatagggtagaagtgtgtgaagttatatttatttggtaggggagatattatgattatgaaggtggtttttttagggtgaggtttatttattgtattttggatgtgttgatttttgtgatttttttaaatgtgggaaatttgattgtataatttgtggtagtgggggattgtgtttgtgtttttttttgaatttttgtaatgaaaaaatagatttttttataagggttatttttaaaattgtagttttgtggtttgggtggtatgttaagtgttttttttatagttgtaatgatgggaaatagaaagtaatgtgttattttttttgttgttgtgagtttttttaatattaagtggttgtagggttttttttttttttttttatttggggttgttttttgtagattgttttatagtttttagttttttgggtttttatgttttgtgaaaatttttgtgtttttttatagtttttagagttattttttatatagtttttgtttttaattgtagtttttgtaggagtttgtaggatgtttgtgttagtggggaatgtgtttttattttttagagttagggaagaaattatgtagttgggtgttgttttttgggatgaaagtagggtttttgtttggttgttaatataatatgtttgttttttgtaggggaagggaggttttttttggtgtttaggtgtttttgtttatgtttattgaggtttgtaggttagaattgtagttttatttgttgttagaatgtgttgtgatttattttaattatttgaattatttagtaataaaataggatatattatggaaatatgaaatagtgtggattattttaaaaatattatgttgagtgatgaaaagagtgtattttgtgtggtgttattaaggtgaatttttataatagttaaaattaatttgtatagtgatagaaattatattattgattgttggttttagggggagggtggaattgattgtaaagggtataagaggattttttagagtaatagatatgttattaaatttgaaatggatgtattgtattaaagttaatttatattttaattaatttgattgtaaaagggaataagaaaattattttaaattttaatgttttttatttaatttagtgtatgtttatttttagaagatttttttagaaaaatatttttttaattgtaattgggagttgaggaatttttttgtttttgtttttgtttttttgtttgtagttaagtttatgtattattaaatggaatgtttgtaaaataaaaatagagttttagttaaattttataaaagtatatatatatgtgtttttattat

SEQ ID NO: 726 - DNA, 2417 bp, Artificial Sequence
  chemically treated genomic DNA (Homo sapiens)
aggtaatttgtttattttagttttttaaagtgttaggtttataggtatttgatattgtatttggttaatttttggtatttttagtagagatatggttttattttgttggttaggatggttttttaatttttgattttgtgataggtttgttttgattttttaaagtgttgggattataagtgtgagttattatgtttggttttaggaaatttggatttttaatgtggtatttttaaattttgaaattttggtaattaatgtaatttttagaagattgtgggttaggtagattgtattttatggaggtagaaaaggaggtttgaggttgggtttggtggtttatgtttgtaattttagtattttgggaggttgaggtgggtagattatgagattaggagtttgagattagtttggttaatatggtgaaattttatttttattaaaaatataaaaattagttgggtgtggtggtagtgtttgtagttttagttatttgggaggttgaggtagaagaattgtttgaatttgtgaggtggaggttgtagtgagttgagattgtgtttttgtatggtagtttgggtggtagagtgtgattgttttaaaaataaataaataaaaaattagttgggtgtggtggtgtatgtttgtaatttagttatttgggaggttgaggtaggagagttgtttgaatttaggaggtggaggttgaggtgagttgagattgtgttattgtattttagtttgggtaataagagtgaaattttgttttaaaaagaaaagaaaagaaaagaaaaggaggtttgagtttggtgtggtggtttatgtttgtaattttatgtttgggaggttgaggtgggaggattgtttgagtttggaagtttgaggttgtagtgagttattattgtgttattgtattttagtttgggtgataagagtgagattttgtgtttaaaaataagtttaaaaaaaaaaaaaaaaaaaaaaaaaggtttgtaatagagatgtgattttttaaaatgttatataggtaagtgggggttgtatagtttatggtttttagaaagttttttttgggaatgtaaaataatatttattttgggatttttagtttttaaattttttgagtttagaggttttgaagatggattaagtgtaaagtttttgattttatatattgttttttgttttttttgtattatattttttattttttgagtattgtggtttttttgtttttgggattttgttttttgttatttggatggtttgtaaggttattatttgttattttattttatttgggttatgttggttgtaagtttggtttttattttgtatttttggagagttatgtgtagatttttttttatggttttattatatttttttaagataggtagtttaggtttgtgttttttgttgatatttagtattgaggggtagtttttgaggttatgtagatttttttaatttatatgtatagattgatttggggaattgtgggagttagttttgtgttggggtagtggtagatttgaggtgtgaggtgtgtatgtgtagtgtggtttttattgtgttattgtgagtttagagtgtatggttggattatgagtatgtttgtgttggtgtttgtgtgtttgtgtatttttttttgtttggtgtgtgttgtagttgttgggattattttggggttgtgttgtttttttagtaagtgtatgtgtgttatggttttagttagtatgtttatgagtagtttttgttgtagttttaggtagttgtttttttttagtaatatttggtttttggattgttgtatttgtgttttttagttttaggtggtttgtgagagtagtggtgattgtgtttttgttagttggtttttagtggtttattgtttgttgtggaatatgaaggtttggttgttgaggtgtatgtatggtgtgttgtaggtgaggtttagtttggtttggtgtgtgttgtggtttagtaggtagaaggtggatagggagggtatgtggtgtagtggtggttgttgtggtgagaagggttgtgagatgtgattggtttaaaattgttgtagtgtttgttataggtggttggtatggtttgtagttgagtatttgaaggttgttagggtgtggattttgtagggtatgtaggtgtttgaaggggagttttgggagtgttggtgatttgtgttgtgtttttgttttgggagtttggatgtttagaatgatgaaggtgagttagggggtgttgttgggagataagagtttgggtgagtagtgtgtttggtataggttgttttttaaattgtgaggttggtggatatgttttagttttgtagttatggttgtggttgtgttttattagttgttggttattgaggagtttgttgttttatgttgtataggtag

SEQ ID NO: 727 - DNA, 2417 bp, Artificial Sequence
  chemically treated genomic DNA (Homo sapiens)
ttgtttgtgtagtgtggaatgatgggttttttggtggttagtagttggtgagatatagttgtagttgtagttgtagggttaagatatgtttgttggttttgtggtttgagaggtggtttgtattaagtatgttgtttatttggatttttgttttttagtagtgttttttggtttgtttttattattttggatatttgggtttttgagataagagtgtagtatgagttgttagtgtttttgaggtttttttttgagtatttgtgtgttttataaggtttatgttttggtaatttttgagtgtttggttatgagttatgttagttgtttgtggtagatgttgtagtagttttgggttgattatattttgtggttttttttgttatggtggttgttattgtgttgtatgttttttttgtttattttttatttgttggattataatatgtgttaggttgagttgggttttgtttatggtgtgttgtgtatgtgttttagtaattaggtttttgtgttttgtggtgggtggtggattattgagagttagttggtgaggatgtggttgttgttgtttttgtggattgtttggggttggaaggtgtaggtgtagtggtttaaaagttaagtgttgttggaggagaataattatttgaagttgtagtaggaattgtttatagatatgttgattgagattatggtgtgtatgtatttgttggagaagtagtgtaattttgaggtgattttgatggttgtggtgtgtgttgggtagaggaagatgtgtaagtgtgtaggtgttagtgtgggtgtgtttatgatttagttgtgtgttttggatttgtagtgatgtaataaaggttgtgttatgtatgtgtgttttatgttttgggtttgttattgttttagtgtgggattggtttttgtggttttttgggttggtttgtgtgtgtgggttggggaggtttgtgtggttttggggattgttttttggtgttgggtgttggtaggggatgtaagtttaagttgtttgttttgggagggtgtgatggggttgtggaggagggtttgtgtgtggttttttgggagtgtggagtggaagttaagtttgtagttgatatggtttagatagggtggagtggtgggtaatggttttgtaggttatttaggtaatggagggtgaagttttggagatggaggaattgtggtgtttagggaatgaagggtgtggtgtggagggagtggaggatggtgtatggggttggggattttgtatttggtttgtttttagggtttttaggtttaggaggtttagaaattagaagttttagggtaagtgttattttatatttttaagagaagttttttggaaattatgggttgtgtggtttttatttgtttgtgtggtattttggagagttgtgtttttgttataggtttttttttttttttttttttttttttaaatttatttttaaatatggggttttgtttttgttatttaggttggagtgtagtggtgtgatgatggtttattgtaattttgagtttttgggtttaagtagtttttttattttagttttttaaatgtgggattataggtgtgagttattgtgttgggtttaggttttttttttttttttttttttttttttttgagatggagttttgtttttgttgtttaggttggagtgtaatggtgtgattttggtttattttaatttttgttttttgggtttaagtgatttttttgttttagttttttaagtagttggattataggtatgtgttattatgtttggttaattttttgtttgtttgtttttgagatagttgtgttttgttgtttaggttgttgtgtaggggtatgattttggtttattgtaatttttattttgtgggtttaaatgatttttttgttttagttttttgagtagttgggattataggtgttgttattatgtttggttaatttttatatttttagtagagatggggttttattatgttggttaggttggttttaaatttttaattttgtgatttgtttgttttggttttttaaagtgttgggattataggtgtgagttattgagtttggttttaggtttttttttttatttttatagaatgtagtttgtttggtttatagttttttaaaaattgtattagttgttaaagttttagaatttggagatattatattaaaaatttagattttttggggttaggtgtggtggtttatgtttgtaattttagtattttgagaggttgaggtgggtttattatgaggttaggagttaaaaggttattttgattaataaggtgaaattatgtttttattaaaaatattaaaaattggttagatgtggtgttgggtgtttgtaagtttagtattttgggaggttgaggtgggtagattgttt

SEQ ID NO: 728 - DNA, 2463 bp, Artificial Sequence
  chemically treated genomic DNA (Homo sapiens)
tgtatagttttttagtataagtaatagtagtttaattttaagaaaaagatattttaaaggttgtatattaaaagttgttagggatttagttgtttatattttatgaaaagtatagattatatttgtttagttagttgtgtattttaattggttgagaaggtgtgttgggggttgggtttgagggtgagtaaaaggtaagattattagtttgggttgatgtgggggttaaggggagagtagaggaataatttgtaagatttgagttttgaagttttttgggttatggaggttagaaaagggtttgttaaagttaggtttaagttttggtaaggtggaattgggaaaaaaaaaaaagaaagaaaaaaaaaatgaaatttgaaaaaataatagtgagtaggtttttgagttttagtgtttatagtgaagttgttaaatgtagtaggaaagtaggtgtgtgttttttttttttttttgtttttttagagatttgagtttagttttttttttttatttttattttagttgagtttaatggttgtttttgttgtggagttgggttggaagatgttttgtttttttgttgtgtttgttttagggaatttttttgttttattttttttgtttgatgaggggtagtggttgttgttgttatgtgtgttggtagttgttaagtgaggttgtttttgtgatgtggtgatagttaaatggtgtgataggaggagttgtagttgtggttgtagtgtttgtatggagaggtttgaggtggtttttggtgttgtttagagggagtgattagatgaatagtttggtgagggtggtgagaggaagtttgttatgagtgttttagttttttgttgtttttgatgaattggatggaataagttgtgtttttagtaggggttgtgtttttatgaatttttagttgttttttttttttttttttttttttttttttttatttttattttgagttttgttttgttttttttttttgttagaggtggttgtgtttaggtgtggagtttatattggagtgtaatggtgtttaattttgaatggggggagattttgtttatggaattgtaggtaagggttgtggttttggtgagaggtgttggtggaggagatagggagagagttttgtgtggtgttggggattgaggaaagttttgtggttgttgtgtttttagtttgttaagtgtggaaattttgggatgttatttgggaaatgttttttttggggaattgtttttttggggagttggatttttttttttgttaaagttttggtttgttattgttttggtttgattttgtttattagaggggattttatttttgtagttttgttgtagtgggagtttgtttttgtttggtttttggagaggttggtttgttgtttttttttttggtgttagagttatttgtgaatgtttttgttgttttttttttttgtgtggttgggttttgttttgttttttttttgtatattgttttttaaatttttttgaatgatttttaagttgtttttttgtttttttttttttttttagattttgtataaagagtgtttttataatttttagtttttagataagtttttttaaaaaatgagttttattaaatgtttgttttattttagtagttttttttaggtgatagagttttttttttttattttgagggttattttttttttttttttttttttttttttttttttttaattgagtgataaatatagggtgtttttttttgttatttttgtttagatttgggagtttagatgttgatgttttttagatttttatttttttttttatttgagtattagagaaagagttaataagttgtttattaatgagaaagtagttgattaagggaaaatattgggtattatatgtttgtaaaagatgagagtaaagtagattgtttagttaagttatgttgagtagtaatgttattttttatttttagataaatatttgataatgtaggtatgattttttttagatttttatggtgtatatggggatttaagttattttgttgggttttttattatttgggagtgttttagagatgtttgttttttgatttaaaagttattttgttttattttaatatagttattttttagttatttaaagattgtagatgggaattaggagaaaaaaatagtatgtttgtatttttttttgtgtgttggatagttaattttttttaaaaaaaagattaaattaagaaattttgaagagttgatgttaaaattaagtattgtaattgtatttaaattttttgtttaaatatattttttaagaaatttttttataagtttggttttttgtgtagttagatgtaagtttgaaaattttggtataatggttgatattttttttataaaaatagagattttaataatgtatattaatgtagtgttgtatatttagaattttttggtaa

SEQ ID NO: 729 - DNA, 2463 bp, Artificial Sequence
  chemically treated genomic DNA (Homo sapiens)
ttattaaaggattttaaatgtgtaatattgtattgatatatattgttaaagtttttatttttgtggaggaaatattaattattatattaaagtttttaagtttatgtttgattgtataagaaattaaatttataaagagattttttaaaaagtatatttaaataagaaatttagatgtagttgtaatatttaattttgatattaattttttagaattttttgatttagttttttttttaaaaaaaattaattgtttaatatataaaaagaaatgtaggtatgttattttttttttttaatttttatttataatttttgagtagttaaaagataattatattaaaataaagtaaaataatttttaagttaaaaaataaatatttttggaatatttttaagtaatgaaaaatttgatagggtagtttaagtttttatgtatattatagagatttaaagaaaattgtgtttatattattaaatatttatttggaaatgggaaataatattgttatttgatatgatttaattaagtgatttattttgtttttattttttgtagatatgtggtgtttaatgtttttttttagttgattgtttttttattagtaaataatttattagttttttttttggtgtttaaatgagagggaaaatgaaagtttgaaaagtattagtatttgagtttttggatttgggtaggggtagtagagaaaggtattttgtatttattatttggttaaaaaaaaaaaaagaaaggaaaagaaaagaaaaagataatttttaaaatagaggaaagaaattttgttatttgaagagggttgttgaagtgaagtaaatatttggtgagatttgttttttaaaaaaatttgtttaggggttggaagttatgggggtgttttttgtgtggagtttgaggggagggggagggataagaaaatagtttgggagttatttaaaggagtttaaggagtggtgtatggaggaaaggtggggtggggtttggttgtgtgaagggagggggtaataggggtgtttgtgggtagttttgatattgagggagggggtgatgggttggtttttttggggattaggtgagagtaggtttttgttgtagtagggttgtagagatggggttttttttggtaggtagaattaaattaaagtggtggtaggttagggttttggtgggggagagggtttggttttttagggaagtggttttttgagggaagtattttttgagtgatattttggagtttttgtatttagtgggttaggggtgtggtggttgtagggttttttttggtttttgatgttgtgtggggttttttttttgttttttttgttagtgttttttattagggttgtggtttttatttgtagttttgtgagtagaatttttttttgtttggggttggatgttattgtgttttggtatggattttgtatttggatgtggttgtttttggtgaagggagaaggtgggatggggtttggggtgggggtgaggagaggggagagaaagaaaaaaaaaaaaataattagggatttatggaggtgtagtttttgttggaggtgtggtttattttgtttggtttattgagagtggtggggagttagggtatttgtagtgggtttttttttgttgtttttattggattgtttgtttagttgttttttttgggtgatgttaggagttgttttaagtttttttgtgtgggtgttgtggttgtggttgtagttttttttgttgtattatttggttgttattgtgttgtaaaagtggttttatttggtggttgttagtatatgtgatggtggtagttattgttttttattgggtagggaaggtggggtggaggggttttttagggtgaatgtggtgagggggtggggtgttttttgatttgattttgtggtgagggtagttattggatttggttggggtgaaaatgaggggaaaggattgggtttgagtttttggggaggtgggaagaggaagaaaatatatgtttatttttttgttgtgtttaatggttttattgtgaatgttagaatttgggagtttgtttgttgttgtttttttgggttttgttttttttttttttttttttttttttttttagttttattttgttgaaatttgggtttaattttaataggtttttttttaatttttataatttaaagagttttgggatttagattttatagattatttttttgttttttttttgatttttatgttaatttaaattaataattttgttttttgtttatttttaaatttagtttttagtgtgtttttttgattagttaaggtgtatagttagttaaatgggtatggtttgtattttttatgaaatgtaagtggttggatttttggtaatttttaatgtatggtttttaagatgttttttttttgaggttgaattattgttgtttgtattggagaattgtata

SEQ ID NO: 730 - DNA, 2297 bp, Artificial Sequence
  chemically treated genomic DNA (Homo sapiens)
agaaaaatattattgtgtttttttgtttgtatttaatatatttaaggttttttatttatttttttggaataaatttttagtaaatatttatttattgatttgggagtgatggatttttataaaggtttgattgttttttaagtggttgaagtgatttgtttttgtggtttttttagtattgaagggggtgggggaagtggatttgagggggtgtatgtttttgttgttggtgggtttattttttaaaaattattgagatgtgttagggtggttgtgattaagtgggtttagggttaattgtgtgagggggaagtgttttttagagtgtgtgtagtgttgggggtttagtttatgttgttgtgtgtttttgtgtgtattgggtgaggatgttgagttttgtgggtattttggaagttgtggtggaggtaggggttttgtttggtgtagtgggtttgttggggaggtgtaggggaggttttgatttttggtttatttttttttagatttttttgtttgtttttggatttttagggtttttttttaaatttttttttgttttttttatgggaggtttttgtagtttttgggttttagggttttgtaagttttgggattgatttgtgtttggggtgggtgtggtggaagtttgaattggattatttaggtatgttatttgtagatgtagtgggtgagggggattttgttatttttttagttttttttttggattttgtagtgaggggaattaaattttttttatgatagtttttttggtgttagtttggattgagtggttataggttggattagggtaggtagaagatgtatttggtattttattgaatggtatttgaatttgtttttattatttattaatggtgtgattttaggtaatttatttaaattttttgaattttagtggtttttatttataatatgggggttaatgataatgttttttttgtatgtaggtggattaaatggatataaagtgtttatttttgtttggtatgtttaaaatttttattaataggttagttaattttattatgagaggaatttttttttttttgttttttagagtgtgggtggtatgaggttatggaagtagttgttgtaattagtattttaaaatttagagattttttaatggtggtagggggtgaaagggtaggggggaggtagggttgggataggtagaggtaggtttttggggatttttagttttggggattaagtgtttggaattagttgggtttgggtagaaataagaaggtaaatgatgggattgttgttggagtttggatttttatttttggagtttattgttttttttagggaatagaggagtgttttggttttttagtaatgaattaggagagtgtgagaaagagtatttgtttttttttttgtggtttgataagttattttttggtagttttgtgagtagattaattgaaatgggtttggaattttattttttttttttgatggagttgttggaggtttgtggatattgtttggttagtttttgggattatagtgttgtgggtttttttttgtggtgtttgttttaaatttgggtgttattaatttatttaataatgatggatgattttgttataatgatgttagttaaaatatttttggtttaatttttttttaattaatattgaagtattttgaatgagatttggatgaagtttgaatagtatgttttttaggtttagaaaatttgagtggtgggaagagaaaaagaaataagtagaaattaggaaagaatggttattaattgtttagattggtaagtgttaaataagttaggttgtttggaaaaagataaatgttgttttttttttttatggtatggttagaattttggtgatgggaaagtattttttgagttggttaattttatatattttgtttgtgttttttattatttattattgaaaatgttaggaagagttggggggtaagtgttttttttgtgggtgtgagattgtattgaagggttgttttggtataaagtttggggagaggatatggtggaggtggggttgtatttttattttgtttttttaatattaggttttgggtagagaaatttatgtgtgattttttgtggtagttgtaggtagttgattgtaaatagttttgtttgtgttttggagtagttgtgttattagatgtaatattggatatttgtttttgggttttaagaaggagagggaaagagttttttagaagataatttgagaaggggttagtagagtgttgggtggagtgtagatttt

SEQ ID NO: 731 - DNA, 2297 bp, Artificial Sequence
  chemically treated genomic DNA (Homo sapiens)
ggagtttgtattttatttagtgttttgttgatttttttttgggttgttttttggagggtttttttttttttttttttggggtttggagataagtatttagtgttatgtttggtggtataattgttttgggatatgggtgaggttgtttgtggttagttgtttgtggttgttgtaggaggttatgtataggtttttttatttaaaatttggtgttagaggggtagggtgggagtgtagttttatttttattatgttttttttttagattttgtgttagggtagttttttgatgtagttttgtatttatgaaggaggtatttgttttttagttttttttggtatttttggtagtagatggtagagggtataggtagggtgtgtgaaattgattgatttaggaggtatttttttattgttggggttttggttatattgtaaagagaagaaatggtatttatttttttttaaataatttaatttatttagtatttgttaatttgagtaattaatagttatttttttttgatttttgtttgtttttttttttttttttattatttaagttttttgaatttgggaaatgtgttgtttagattttatttgggttttatttaggatgttttgatgttggttggaagagagttagattgaaaatgttttgattggtgttgttatgataaggttatttgttattgttggatagattgatagtatttaagtttaaggtagatattatgagggaaagtttatggtgttgtggttttggaggttaattaggtagtgtttgtagatttttagtaattttattgggaggagaggatgaagttttaggtttgttttaattaatttgtttgtagaattgttgaagagtggtttgttgggttatgggagaagaaataaatgtttttttttatatttttttggtttattgttgagaaattaggatatttttttgttttttgggagagatagtgaattttagggatggaagtttggattttggtggtggttttgttatttgtttttttgtttttgtttaaatttagttagttttaagtgtttggtttttaagattggaagtttttaagaatttatttttatttgttttaattttgttttttttttatttttttattttttgttattattagaaagtttttggattttgaaatgttagttgtagtagttgtttttgtggttttatgttgtttatattttgggaagtggaggagggagggttttttttgtaataagattagttgatttgttaatgagagttttggatgtgttgggtgggggtaggtgttttatgtttatttaatttatttatatgtggagaaggtattattattaatttttatattgtagatggggattgttgaggtttggaaagtttagatgggttgtttaaggttatgttattaatgagtaatggagatggatttaaatattgtttggtaaggtgttaagtgtattttttgtttattttagtttaatttgtagttatttggtttagattgatgttagaggggttattatgggagagatttggttttttttgttgtggggtttagggaagaagttgagaaggtagtaaagttttttttgtttattatgtttataggtggtgtatttgggtaatttgatttaagtttttgttatatttattttgggtataagttgattttgaggtttatgggattttaaggtttagaggttataggaattttttgtgaagggggtaggagaaagtttgagggagagttttgaaggtttgggagtgaatgaaaaagtttggaagggaatagattaggagttaggattttttttgtatttttttagtaggtttattgtgttgagtggggtttttgtttttattgtggtttttgggatgtttgtagagtttggtatttttatttggtgtgtataagggtgtgtagtggtgtaagttggatttttgatgttgtgtgtgttttgaggggtgttttttttttatatagttgattttgggtttgtttggttatggttattttggtgtattttaatagtttttagaaagtgagtttattgatggtaaggatatgtatttttttaaatttgttttttttattttttttaatattgagaagattatggaaataaattattttgattatttagaaagtgattaaatttttataaaaatttattgtttttaaattgatgggtgaatatttgttgggaatttgttttagaggaataaatgaggagttttgagtgtattaaatgtaaatggggggatatggtggtgttttttt

SEQ ID NO: 732 - DNA, 2372 bp, Artificial Sequence
  chemically treated genomic DNA (Homo sapiens)
gtattgttttttatatttttatttgttatttatatagtgttgagatttaggatttttattttttttttttgtttttatattgtgtgagaagtaagatagtttagatagattgttagtaaagtttagggttttttgtttttttgtttttgtatggtattttaataagtttaaagtataatggataagttagaatttggtgatgtttggagtttgttttgggtttttgtgaaattatagtgttggaatattaggggttttgtaaatttttgttgataatagggaaggttaatggtatgtttgatgttaattgtaggtaggtggtggttttagttatttagggagggtttagtgtagagttttttggtggataggtttagatttagattttttggtaaggaggtaaaatgaggtgggagtagggattattgtgtgttgtttttaggttattttgtatttgttgttggttttttttaggttttgtgtgggatttgaggtttttggttagtgtttttttatgtttttttagattttgttgtttttagtttggtgttttttagagttttgtgttgttagggtgtatttattttttttattgtgttgtgtaatttgtgttgtgtgttttttattagttttttaattttgtggaatattttattgagggtggtttttttttgtgggtagttgagagttgggttgggtttgattggagttgaggttgttgttggagtgggtgtgggggttgtggggattgttgttgttagtagtaggtatagtagggtggttttaagttgttgtatttttgttttgtgtttgtagttgttgtttgtgtgttttggaatgtgattagaggtgtgtggattattttttttgttgggtttgttgttttgttttgttttgttttgttgtttgtttttggtgttttttttttttgtatttgtttggagatgggaggaaattgaggtttttgaaaatgtagtttttttatatttgaaaagatgtgattttatttgttttagtttgagttttgattgttttaggattttgtatttttatttttgagtataagttgagttttgttttttatttgtgatgttggagtttttgttagagtaattgaatttggattttttatgttaatagtttttaagttttagtttatttagattttgtttttggtttaaattttagtttttttttgattaggttagagtgtttgatttttatttttattttaagttttttttagtttttatttggggtggattaagtataggttagttttttttttttggtgttgggttttatttgagtgttttgttttatatttattaagagaggttgagtttagtagagttgtttttttttttgttgttgttttttatttattttgattggattgagttgtgttgtgggttggattggatttgtttgtttttgttgggaggttgttgggttgtgggtgtagatgtgggagtggtgtggtgggtgggttgtgggtgtgggagtgtggtggggtgtggtagtgttggtatttgagggagtttgtaagatgtgttttgtttgtttattaggttttttttttgtttttgttttgagttttgtttgtttattaggtttattttgttttgtggaggggttgtagtttggttattggttagttggggtgttggttattttatgttttatgttttatgttttttttttttgttttagtgattagttttattgaaggtagttattttttttattgtttgtttttgtgtttgtggtattttaggtttgttttttttggtttttaggtttgtaatagtttattgaggttgggggtagggggaatgttttttagttttattttggtttttttaagttaatttttgttttgtgaaatttttaggaaaaattttagtttttagtttggtatttaagttattattgttggttttagtttgttgtgattgatattgtgttttagttaggataatgtatttgtagtttttggaatgggagaatgttatgagaaagttagtaagttttttaagggtggtatagaggagtggttaggattagatatttgtagttagttttgtttttttttaattttttgttttggtgaagttattagatttgtatgtgttttagttagttttaatataaaattttgataagttttaaaaatgtaataaggagtgggtagtggagaattagagaagttagatgattaggttaaatagtaggtgaaggtagggatggttagaggttttgagtgtagttgattgttttttagtttgaaattttaagattgtttttttttgtagtattttttatattattgtttattgttaaaatagttgtttttttttttatttttgggt

SEQ ID NO: 733 - DNA, 2372 bp, Artificial Sequence
  chemically treated genomic DNA (Homo sapiens)
gtttagaagtagaagggaaagtggttgttttggtggtaaatagtaatgtggggagtgttgtagagaaaggtagttttggggttttaagttggagagtagttagttatatttaggatttttggttatttttgtttttatttgttgtttggtttgattgtttaatttttttgattttttattatttattttttattatgtttttgagatttgttaaagttttatattagggttaattgggatgtatataaatttggtaattttgttagggtgggaagttaggaaggagtagagttggttgtaggtgtttggttttgattatttttttatgttatttttgaggagtttgttgatttttttatgatgtttttttattttaggagttgtaagtgtgttattttggttggagtatggtgttaattatggtagattaaggttagtggtgatggtttgaatgttaggttgggggttgggattttttttgaggattttataggatagaggttggtttggaaagattaaggtgggattgaggaatattttttttatttttaattttggtgggttgttgtaagtttggaggttagagaagatgggtttgggatgttgtgggtgtaggggtaggtagtgaaggagatggttgtttttggtagagttggttgttgaggtagaagaggagggtgtggggtgtggggtgtgaggtggttggtgttttggttggttaatggttgggttgtggtttttttgtggggtggggtgggtttggtgggtgggtggggtttggggtgggggtggagagggagtttggtgggtgggtggggtgtgttttgtgggtttttttgggtattggtgttgttgtattttgttgtgtttttgtatttgtggtttgtttattgtgttgtttttgtatttgtatttgtagtttggtggttttttggtgggagtgagtagatttagtttggtttgtagtgtaatttggtttagttggggtgggtgaggggtggtggtgggggaggggatgattttgttgagtttagttttttttggtggatgtggggtggggtgtttgagtaggatttgatgttaaggggagggggttgatttgtgtttggtttattttaggtaggggttgagagaggtttgaggtggaagtgggggttgggtattttgatttggttgaggaggggttagggtttgaattggggatagagtttaggtgagttggggtttgggagttattagtgtagaggatttgggtttggttgttttggtgagggttttagtattataggtgaggagtagagtttagtttgtgtttgaggatgggggtgtggggttttggggtgattggggtttgggttggagtgggtggggttgtgtttttttgggtgtaggggagttgtgtttttaggggttttggtttttttttgtttttgggtgggtgtgggaaagaggggtgttaggggtgggtggtggggtggaatggggtggggtggtgggtttagtgaggggggtggtttgtgtgtttttgattgtgttttgggatatataggtggtggttgtgggtgtagagtggagatgtagtggtttggggttattttgttgtgtttgttgttggtggtggtggtttttatggtttttgtgtttgttttgatggtgattttggttttagttaagtttggtttggtttttagttatttgtaggaggaggttatttttaatgagatgttttgtgaggttgaggaattgatggaggatatgtagtataaattgtgtagtgtggtggaagaggtgggtgtgttttggtggtgtggggttttgagaagtgttagattgggggtagtgaagtttgggaaggtatggaagagtgttggttagggattttgggttttgtgtagggtttgggaagggttgatagtagatgtggagtgatttggaggtagtgtatggtgatttttatttttgttttgttttgtttttttgttaaaaagtttggatttgagtttgtttattgagaggttttgtattggattttttttaggtagttggggttattatttgtttgtagttggtgttaggtatgttgttggttttttttattgttagtagaggtttgtagggtttttggtattttagtattgtggttttatagaaatttgggataagttttaggtattgttaagttttagtttgtttgttatgttttgagtttgttaggatgttatgtagggataaagaggtaaagagttttgagttttgttggtagtttgtttgggttgttttgttttttatgtaatgtgggggtagagagggaagatggaaattttaaattttagtattgtatgagtggtggatgaggatgtgagaggtaatat

SEQ ID NO: 734 - DNA, 2284 bp, Artificial Sequence
  chemically treated genomic DNA (Homo sapiens)
tgtggtattgttttttgtattgtagggttttttgggattgatagattttggataatagtagttgggaaatattttaaatatataatatatttttaatttttaaatattggagttgtggggtttttttttttttttttttttttttttgggggttggaggtggaattttttggaaaattttggtattttgtttttttattaattttattttttgtggttgtttttattaagatatattttttttttgataatttttttatattgtatttagtataatagatgtatttgtggatttattgggtttttattgggttttgggaatattgatgttattttatttaaaaattaatttaagtttaatgttttgatgaaaatgaaaatatatttatagggaagtaaatatttatagttatttagttttttaaatgttatatatattttattttatttaaagtgttttttttttttttttaattataaaataatttagtttatttttaggaagatttttttatttattgtttttagttatgttagtatatttttggttttaaggatagagaatagttaggagttatagtattttgttttttattttttgtatgtttttttttaatttttatttttttttttttttgtgttgtttttttttttttttatgtaaagtagaataagaagattgttttttataaagataataggttttttttaattgtaaatgattatattataagttgtatttgttagttaattagtgtatttaagtttttgttagtggatgttgaaatgatgtttgtaataattgattgggtttttgtgagtttagggatgtagattttttttttttttgttttttgtgtgagttttagttgttaatgaaaattgtatgaaatagattttttttttgttatgtaattggttttttttttgttttttggttgatttgggtataatgttttttatgagagtggagatgtttgtggtgatggtggagttggggaaggggatgtggggatttgagagtatggaatgttttgtttaggtggatgttagttttttgtttgtgagtagtttagtgtattgtttatttggttgtggatggggtggttttatttaattatgatttttttttttgaaatggagtaagattgaataatttattatatgatggatggtgagggaaggaaatgtaaaaaagaaaaggaaaagaaaaaaattggaattagatggttaaattttatattagtattgagaggttgttaggagattttattttgtttgtggttgttttggttttaggtttggttttttggtgtttgtgggtttttatttttttgtttgtttagtttttttagttaggtgtggttgtttttggattggttttttttggttgagtgtggagagtagggttgggtgttggggttaagggaggggtggaggggtgtgtgtttgggtagggatgggggagggagattgggtggaatgaagtggggaaagataagagtggtagaagaaaaaaaaaatttttggttaggagaaaagtggtggattatgtagagagatgttatgaaatttgtagatttaatgaatgttatttaattttagttgattggttgagttttgttggtagtgtatgaagtgatgtggttttgagataaaagtgagtgtagtgttgtgtgttggggaaaaagttgtatagtgttggtgtggtttgggaggaaggggtgggggtgagtaggatagagttatagatttagagatgtttattttgttgtttatgttagttagtgtgttagtgtgttgaggattgggtttggtgggggtgggttgggtataaattaatgtgtattttttgttattggaaatgtgggtgttttatgttgggggaattttttgggttttggtttttgattttttagttttaattttttttttagtgttattaagtaagttatttttggagaaatgtttggaaagtaggaaagagttgaagtttggggagtagttttgtttgttggttgtaggggtttggtttttagggttttgtgagataaggaaaaagaggttttgggtattgttttttattgggttgaaatttgtgagaggtagttttggtgtgggagttggagtttgtattgtttagagggggtgtagtgagtggttgggatggaggggaggggttttatttttgagttttgtttgtatttggtggtgttttagtttgttgttttatttagttttttttgttttgtttattgtaattgggatttggttttggttgttgt

SEQ ID NO: 735 - DNA, 2284 bp, Artificial Sequence
  chemically treated genomic DNA (Homo sapiens)
gtagtagttgggattaggttttagttgtagtggataggatagaagggattgaatggggtagtaggttggggtgttattaggtgtaagtaaagtttagggatagggttttttttttttgttttggttgtttgttgtgttttttttgggtggtgtaggttttggtttttgtgttggggttgttttttatggattttagtttggtgggaggtagtgtttagagtttttttttttttattttataaaattttaaaagttgaatttttataattagtagataaaattgttttttgagttttggtttttttttgttttttaggtgtttttttgggaataatttatttagtggtattgggagaaaggttgggattggggggttggggattgaaatttaaaagatttttttagtatggagtatttatgtttttagtggtgggggatgtatgttggtttgtgtttagtttgtttttattaagtttggtttttgatgtgttgatatgttagttggtatgggtggtggggtgggtgtttttgggtttgtggttttgttttgtttgtttttgttttttttttttggattgtgttggtgttgtgtggttttttttttagtatgtggtgttgtatttgtttttattttggagttgtgttgttttgtgtgttgttagtggggtttagttagttggttggaattgagtagtatttattgaatttgtggattttatgatgtttttttgtgtggtttattattttttttttaattggggatttttttttttttttgttatttttatttttttttattttattttatttagttttttttttttgtttttgtttaaatgtgtgtttttttgttttttttttggttttagtgtttagttttgttttttgtgtttggttagagggagttagtttggagatggttgtatttggttggagaggttgggtgggtggaggggtggagatttgtggatgttgggaagttggatttggagttggagtagttgtgagtagaatggagttttttaatagttttttggtgttgatgtgaaatttgattatttgattttagtttttttttttttttttttttttttgtattttttttttttgttatttgttgtgtagtgaattgtttagttttgttttgttttaagagaggagattatgattgagtgaagttattttgtttgtagttaggtaagtggtgtgttgagttgtttgtaggtgaggagttggtgtttatttgggtgaggtgttttgtgtttttgggtttttgtgtttttttttttagttttgttgttgttgtaggtatttttatttttatgagaaatattgtgtttaagttagttgaaaggtgagggagaagttggttatataatagaaggggaatttgttttatatggtttttattagtgattgaaatttgtatggggggtgggggaaggaggggtttgtatttttgggtttgtagaaatttagttagttattgtagatattattttaatatttgttggtaaagatttaaatgtattgattaattgataggtgtggtttgtgatgtagttatttatagttgggaaaagtttattgtttttgtggaaggtagtttttttgttttgttttgtatggagaggagaggagataatatgaaagggaggaaaagtgagggttggggagaaatatgtggagaatgggaaatagaatattgtaatttttaattgttttttatttttaaaattgaagatgtgttagtatgattaaaaatagtgaataggaagatttttttaggagtaaattgaattattttgtaattggaagggaagaaaaaatattttagataaaatgagatgtgtgtggtatttagaggattgggtggttgtggatatttgtttttttgtggatatatttttatttttattaaaatattaagtttggattagtttttaagtgaaataatattagtatttttaaaatttaataaaagtttagtggatttataggtatatttgttgtattaggtgtaatatggagagattgttagggggaaaatatattttaatagaaatagttatagagggtgaggttagtggagaaataaaatattagaattttttaaagaattttgtttttaatttttaaaaaaaggaagagaaaaaaaaaaaaattttataattttagtgtttgggagttggagatgtattatatgtttagagtgttttttaattgttgttatttaaagtttgttggttttggggagttttatggtatagggagtaatgttata

SEQ ID NO: 736 - DNA, 2498 bp, Artificial Sequence
  chemically treated genomic DNA (Homo sapiens)
taagggttaagtaatgatgtataaatggggtttattgtttaaatttatagaaagtaaaatgtggaaaattagtaattttaattgatagtgtatatttaaagaatttatattggttgggtgtggtggtttatgtttgtaattttagtattttgggaggttgaggtgggaggattatttgaggttaagagattgagattagtttgattaatatggtgaaattttgtttttattgaaaatataaaaaaattagttaggtgtggtggtatatgtttgtagttttagttatttgggagggtgaggtaggagaattgtttgaatttaggagatagaggttgtagtgagttgagattgtgttattgtatttgtttgggagatagagtgagattttgttttaaaataaaaaataaataaaaagaatttatttaatagaattaagtattaatataataaatatgaagaattttagatttttggtttttaaaaaatatataaagatgatatttttttaaaatatttttataaaatatattgagattgtgatgttttatattgattgtatgaaaataatgaaaaagaattagtattgttttattataaaagttttattaatgtaaatttataaatttttttttaaatattttgagttaattttaattttatgatagaaatttattatttttagtaaaaatagttggtatttgggaaattaaaggtttaaaaattaagaatagtaattaaagaaatttgataaaatagtttttttaaaatttttatttatattataaggggaaattttgattatgtttttttttttttattaattgtagaatttaatattaaggattatataattttatatttttttttgagaaaaagtaaaggttttgtgttgtagtaataatgtaagatatggagggaagttttatttaagatttttttgtttgttttttttttaaagttattttagaatattagggagggttgagaggtaaggtatgaagggtgtaatatttaatatgagtaatgtgtgtgatgtatttggttaaaatgtatatagaggatttgtttttgtttttagatagaagttttttgttttgtagttatgagggttaattgttgaggttttatagttttttttttttttatatttggattgttatgttttttatttattattttgatgtagaggtagatttaggatttttgtatttgttaaggattttttggtaagtttatggggtgggagtggttataagatggagtttgtttggttttggtttttttggtttatataagtttgttttttttttaatttttaatttttatagttttttatttttttatttttgatttattttgtgttattgatgtttttggtttttgtttgtagtaagtttatttttattattattttttgtataaaagtttgtatttattaggttaaagaggggaattaatgtttgtaggaattgttttattgaattgtttggttgtgttttttgttagattttatttgttgttgtggattgtatataattatttttggtatgttttgtgtatgtattattttttttattttgttttttttttgtttaaatatgtgatttttttttgtttttgtttatgtttatttttgtttttttatttttttttaggaaggaggagggagttgggggtgttaaaagtgtagtgattttttttttttttttgtttttgtttttgtattttttgttataatgttttttgggttgttagtgttttgatgttttttgggaaaatagtttatttttttttttttttttttttttgtttttaattaattagttatttgttagagagggatatgtgtagtgagtgttttttgttttttttatttgaatttttttttttttttaagtagagagattttagtagtagtagtagttgatgatgaagagagaggtagtggtagagggggggtattttttatttttatttttaaagggataggatattaattttattttattttaattttgaatttaggggggtggggggaaggtggttgagtttttttttttattttttagttttgagttttgagagggggattgagtttgagagaggagaaggagtttttttttttttgaaaatttttatttatgatttttatttttttatttttttaatttgtttttttttttttattttttttttttttggttgtgagaggaggagagaaagaaattaaaagttttttagtaatatagattttttgttgttgttgttgttgttgttgttgttgttgttgttgttgttgttattgttgttgttgttattgttgttgtttggttttggttggagatattttattatatttaggagtagttatttttttagttttttttttttttttttgttttttttttttttattttttttttttattattttttgtgttattttttatagttttagggaaggtatttaaaagtggggggtaggaaaggtaagtgtgt

SEQ ID NO: 737 - DNA, 2498 bp, Artificial Sequence
  chemically treated genomic DNA (Homo sapiens)
atatatttattttttttgttttttatttttgagtgttttttttggagttgtggaggatgatataaagggtaataaagggggggagtggaggaggaggaggtgaaggaggaggaggagagttggggaagtggttgtttttgggtgtagtgagatgtttttagttagggttaagtagtagtagtagtagtagtagtagtagtagtagtagtagtaatagtagtagtagtagtaatagtagtagtaaagggtttgtgttgttaagaggtttttggttttttttttttttttttttatggttaaagaggaggagggtggagggagggaggtgagttggaggggtgagggggtaggagttgtggatgggggtttttgaagaagaagaaattttttttttttttttaggtttaattttttttttagggtttagggttggagggtgggggaaggaatttagttgttttttttttatttttttgaatttaaggttgaagtggggtagaattagtgttttgtttttttaaaaatagaaataaaaggtgttttttttttgttattgtttttttttttattattagttgttgttgttgttggggtttttttgtttgggggggagggggggtttgggtagaagagatgggaggtatttattgtgtatgtttttttttgatgggtggttggttggttgaaggtaggaggagggggaggggaggaaatgagttatttttttagaaggtgttgaggtgttagtgatttggaagatattgtagtgggaggtataggagtgggggtggggaggaggaggaagttgttatgtttttaatatttttagttttttttttttttttaagggaaagtggaggaatggaagtgggtgtggatggagatgaaaggaggttatgtgtttgggtgggagaggggtggggtgggagaggtagtgtgtgtgtggggtatgttgggagtggttgtgtatggtttgtagtggtaggtgaagtttagtagaggatgtggttaggtgatttggtgaagtgatttttgtaggtgttggtttttttttttgatttggtaaatgtaggtttttatgtgagaggtaatggtgggggtaaatttgttgtaaatgaaggttaggggtgttggtggtgtaaggtgaattgaaagtgggaggatggaaggttgtggagattgggaattgggaagggggtaggtttgtataggttgggaaggttaggattaggtgagttttgttttgtggttatttttgttttgtgagtttgttgaggaatttttgataagtgtagggattttgagtttatttttgtattggggtagtaggtgaggagtgtgatggtttgagtgtaagagagaagggaattgtgaagttttagtaattgatttttatgattgtaggatggaggatttttatttagggatagagataagttttttgtatgtattttgattagatgtattatatgtgttgtttatattggatattgtgttttttatgttttattttttaattttttttggtattttggagtggttttggggaaggagtaggtagggaagttttgagtggagtttttttttatgttttgtgttgttgttataatataaagtttttgtttttttttggagagggatgtgggattgtgtagtttttaatgttgagttttatgattgatgaaggagaagggatgtgattaaagtttttttttatagtgtagatgagagttttaaaaggattgttttgttaagtttttttggttattatttttagtttttgagtttttggttttttaaatgttagttgtttttgttgaaaataatgaatttttattataaaattagaattaatttaaaatatttaagaaaggatttataaatttatattagtaaagtttttatagtgaaatagtgttggtttttttttattgtttttatataattaatataaagtattatagttttaatatgttttgtaaagatattttgaaggaatattatttttgtatgttttttaaaaattaagaatttaaaattttttgtatttattatgttggtatttaattttgttgggtgggttttttttgtttgttttttgttttgagatggagttttgttttgttttttagatgagtgtagtggtgtgattttggtttattgtaatttttgttttttgggtttaagtagtttttttgttttatttttttgagtagttgaaattataggtatgtgttattatgtttggttaatttttttgtgtttttagtagggatggggttttattatgttggttaggttggttttgattttttgattttaaatgatttttttgttttggttttttaaagtgttgggattataggtgtgagttattgtgtttggttggtgtaggttttttaggtgtatattattagttaaagttattaattttttatgttttgttttttgtaagtttgggtagtggattttgtttatgtattattgtttagttttta

SEQ ID NO: 738 - DNA, 2357 bp, Artificial Sequence
  chemically treated genomic DNA (Homo sapiens)
ttttatgtttttgttgtggttgatgttttagtttttgtttttgtttttatagggtttgttttgtgtatttgtttttattttgttttgttttttatggaggaatattagtgattgatttgggatttagttttaatttagggtgattttgtttttagatttttaattatatttgtaaagttttattattagggaaggttgtattttgaggttttgggtggatatgaattttgggggtaggatattgtttagtttagtgttgggtgttgttgtgggttaggttttttgatttttgtaagtttatgatggttatagagttttaaggaggaggttttttggaggaggtggtttagtttattagagaattagtatgttttttttttgggttttgggattagtatttttaatgataagtttttttggattatgttgatttgggttgagatttgttgtttgttgtgtgttttgggtggaggttagataggttgtgtatttttaagttttgatatgttttttttttaaagggtggaggttttatagggtgagtgtaggttggggatgggttgtggggttgttgggaggggattagtgggggtttgtagtgtttttgggagggtttggggttgggggtaattgagatttgttttggtgggtgagtggagaagtatttggggggttttttttagtgttggagagaaatgggtgatgaagtttgggaaaggtgtggggggtttgaagtgtgtattatggtgagaaggttgtgtgtggttggattttagtttttttgtgtttgtgaaaggttgagttgtgttggttgggggagggttggaggttgttgggggttgggggatgaagagttgggggtagtttagggtagtgtattttttgtggaggtaggaatggtaggtggtgtgatttttattaggatttttgttattggaattgtgggtttttgttgggttggaggtgtttgagagatttttgtggaatggtgtgtgaatttgtggttgtggtggtgggtttggatggagatggatgttggatgggttgttttttgagtttggtttttgtggtggggttggttttttgtttttgtatttggtagatttgatgtggagtttgagggtggttgttggtttggggtggggaaggggttttttagattgggggttttatttgttgggtttggggagtttatttggttttttttgattggtttggagttgtaggtgaggttattttaggaagttgttgtatttgagggagtttgggttgttttgggggatgttggggtttgatttttggggttgggggttgtatgggtgggttggggtttgtttgggttggggtttgtggttgtgtggggtttggattggtgtttgtttggtttgggggtttttagttgtatgtagtttgggttgaggttgggggtttgtggttgtgtggggtttgggttggggtttgtttggtttgggggtttttagttgtatgtagtttgggttgaggtttgtagttgtgtggggtttggtttttatggtttttgtgtttggattttgttttttaattattttttttgtatgtttttttggaaaaggatatggggtttagggtggtggatgtggatattttttgaaatttattagttttggtttgtgatgtttggatggaggggttatagttatgttggtttttagtttttttttagatattttagtttttggaggtagggtttttttgtgaggtgtattatttttgagtgttttatatgtttgtttttgggtatttttttgggtggtggtgtggtgtggttttgtgtttttatttaaattttatatggaaatggagtttgtagtgtgatggtggggtttggtggggagtgattgggtagtaggggtggattttttgtgaatggtttggttttgttttttttggtgttgtttttgagattgtgagtggttatttaattgtgttttgtatttgttttgttttttttgtttttgtttatgttatgtgagatatttgtttttgttttgttttttattatggttggaagttttttggggtttttttagaagtagaaatatttgtgttttttatatagtttataaagtgtgagttaattaaatttttttttttataaattatttagttttagggttttttttgtttgtttgtttgtttgttttggtggaggtgggggtggatagtgtttttttttgttgtttaggagggagtgtagtggggtgattttagtttaatgtattttttgtttttgggttgaagtgatttttttgttttagttttttgagtagttgggattatagttatgtgttattatgtttggttaatttttatatttt

SEQ ID NO: 739 - DNA, 2357 bp, Artificial Sequence
  chemically treated genomic DNA (Homo sapiens)
aaagtataaaaattagttaggtatggtggtatataattgtaattttagttatttaggaggttgaggtaggagaattattttaatttaggagtagagggtgtattgagttgagattgttttattgtatttttttttgggtgatagagagagatgttgtttatttttgtttttattaaaataaataaataaataaataaaaaaaattttgagattgggtaatttatagagaaaagagtttgattggtttatgttttgtaggttatatggaaagtataggtgtttttgtttttggagaggttttaggaagtttttaattgtggtggaaggtgaagtgggagtaggtgttttatatggtgtgagtgggaatgagaaagatagagtaggtgtgggatatagttaaatggttatttataattttgaggatagtattaggagggatggggttaagttatttatgagaaatttgtttttgttatttagttattttttattaggttttattgttatattgtagattttatttttatgtgaggtttgggtggggatgtagagttgtattatattattatttaggaggatgtttaggagtaggtgtgtggggtgtttagggatgatatgttttatggggggattttgtttttaggggttagggtgtttgggaagaggttgggagttggtgtggttgtggtttttttatttaggtattatagattagggttggtgggttttagggggtgtttatatttattattttgaattttatgtttttttttagggaaatgtgtagaggaaatggttggagagtgaagtttaggtataggggttatgagagttggattttatgtagttgtagattttgatttgaattgtatgtggttgaggatttttaagttaggtagattttgatttagattttatgtggttgtggatttttgattttgatttaaattgtatgtggttgaggatttttaagttaggtagatgttaatttagattttatgtggttgtggattttaatttagatagattttgatttatttgtgtagtttttagttttagaagttaaattttagtgttttttagggtggtttgggtttttttagatatagtagttttttgaggtggttttatttgtaattttagattaattagagaaggttaaatgggttttttaagtttagtaggtgggatttttgatttagagagttttttttttgttttaggttaatagttatttttgggttttgtattaggtttgttaaatgtaggggtgaggggttgattttgttatgggaattaaatttaggaaatagtttatttagtgtttatttttatttggatttgttgttgtggttgtaggtttatgtgttgttttgtggagattttttaggtgtttttggtttggtagaaatttgtggttttgatggtagaggttttggtgggaattgtattgtttgttgtttttgtttttgtggaggatgtgttgttttaaattgtttttggttttttattttttaatttttggtagtttttgatttttttttggttggtgtagtttagttttttgtagatgtgggggagttggaatttgattatgtgtagtttttttattgtggtgtatgttttgggttttttatgttttttttaggttttattatttatttttttttagtgttgaaggaaattttttagatgtttttttatttatttattgaagtaggttttggttgtttttagttttgggtttttttgagaatattgtaagtttttattggtttttttttggtaattttatggtttatttttaatttgtatttattttgtggggtttttattttttggaggaaggatgtgttaaagtttggaggtgtgtggtttgtttaatttttgtttaaggtgtgtggtaggtgataggttttagtttggattagtgtggtttaaaaggatttattgttaaaagtgttggttttagaatttaaggggaagatatgttggttttttgatgagttgggttgttttttttaggaagttttttttttggagttttgtagttattgtgggtttgtaagagttaaagggtttggtttatagtggtgtttggtattgagttggatagtgttttgtttttaaaatttatgtttgtttagaattttagaatgtaattttttttggtagtagggttttgtagatgtaattaaggatttggggatgaggttattttggattgaggttgagttttaagttagttattggtgtttttttatgaagagtagagtagaatagagatagatgtatagagtaggttttgtgaggatagaggtagggattggagtgttggttgtagtaggggtgtggag

SEQ ID NO: 740 - DNA, 2460 bp, Artificial Sequence
  chemically treated genomic DNA (Homo sapiens)
ttggaaaggttttgtattagaggttaaagtatttggttttagtaaatgattaagtgtttgaaatagttagttttgtgttttagagaaatattttatatattttaaggttagtggggatttaatttgagtataaattagtaggattaaattatgatatatatatagagaatatttttttttttaaattagattttttgattttatagaattatttaattttttttgtttttattatgatttgtgggtatttgattttattgtttatggaattttagatttttttgtttgaaagggaagggatggttaggtgtagtggtttatgattataattttagtattttgggaggttgaggtaggtagtttatttaaggttaggagttttagattagtttggttaatatagtgaaattttatttttattaataatataaaaaattagttaggtatggtggtaggtatttgaaattttagttatttgggaggttgaggtaggggaattgtttgaatttgggaggtggaggttgtagtgagttgagattgtgttattgtattttagtttgggtaataaaagtgaaattttgttttaaaaaaaaaaagaagaaagaaaagaaaagaaaagaaaaaaagaaagggaagggattttttttgtttaaatgttatttttgggttaggttgttgtgttttttttttttaatgttggtgattagaaattttttgtttttttgttatggtggtgggtatggtgatgtggggtatagttgggagttttaggtttatatgggagatttaagattgtatttttttaggaataaagttagagtttttgtttaaatttttatatttagtttaggttttgatttgtagaaggttttttataaatgtttgttgaattgttttgtgttgttgggttatgtgaggaaaatggaattaagagtttgttgatttggagggttggttttggtgtattattgattggttttagggttttgagttggggatttaattttttggttttttgatttttttgttggtaaaatgaatttgatattgttttgattgtttttgtttagtaggggtgagttttattagaggttgaaggtgtgagaaaggtatagagtgttgtttaggtagggagttatttgggttgttattttttgtgtttgttggagattgtaagttaggagagttggtttagttgttagtaattatttgtgttttgaatataatatttgtgttttatttttgtataggtagatggtgtaatttggttgtgttgtatttttttgtattttatttgtggtggttttgttgtgatagtgtttgtgttaggtgttggtgtgtaggttggtttgggatgttgtgattgtagttggtaggaatttgtgtgaggggaaaggggtgttgggattaggttatgggatgtttaaggtattttttttaagtttaagggaataaggttagttttttttggatttttaaaatttttttgaaaggagagtagggagtaggtattagttttttgtgttttatgtggagagattggggtttagagagatgaggtggtttgaggatggatatatatatattaagtgatgggggtggagggaagtttaagtttttaattttgggtttattatttttttttgggttggtattgttttgattgtatagattagttgatttgttttgggtaagggtggaatttttttttttgtttagggttggttttgtttttttttattttgtggttttgttatttttgtgttatttagtttttttttaaatattatgtttattttatatattttaaggttagtggggatttgagttaagtataaatttgtaggattaaattatgatatatatataaagaatatttttttttttttttttttttttttttttgagatggagttttgttttgttgtttaggttggagtgtagtggtgtgattttggtttattgtaggttatgttttttggatttatgttatttttttgttttagttttttgagtagttgggattgtaggtgtttgttattatgtttggttaattttttgtatttttagtagagatggtgttttattgtgttagttaggatggtttttattttttgatttagtgatttgttttttttggttttttaaagtgttgggattataggtatgagttattgtgtttggtaaaagaatatttttttttaaaagtagattttttagttttattgaattatttaattttttttgttttttaagaattgtggggagttgattttattgtttatggaattttaggtttttttgtttgaaagggaagggatttttgttgtttaaatgttatttgagttaagttgttatgttttttttgtagtttgtaattatttatgttggtaattagaaattttttgttttttttttattgaaatttattagttttttgaaggatttagttgtttttat

SEQ ID NO: 741 - DNA, 2460 bp, Artificial Sequence
  chemically treated genomic DNA (Homo sapiens)
atagggatgattgggttttttaggagattgatggattttagtgaaagagaagtaaggagtttttaattgttagtataggtgattataggttgtaaagaggatatagtagtttgatttgggtgatatttagatagtagaagtttttttttttttaagtaggagaatttaaaattttatgagtagtagggttagttttttatgatttttggggaataagaagagttgggtagtttaatggaattgaagaatttatttttaaaaaaaggtgtttttttgttgggtgtgatggtttatgtttgtaattttagtattttgggaggttgaggggggtagattattaggttaggagatggggattattttggttaatatagtgaaatgttgtttttattaaaaatataaaaaattagttgggtgtggtggtaggtgtttgtagttttagttatttgggaggttgaggtaggagaatggtgtgaatttgggaggtgtagtttgtagtgagttgagattgtgttattgtattttagtttgggtgatagagtgagattttgttttaaaaaaaaaaaaaaaaaaggaaaaaaaagtgttttttgtgtgtatgttatgatttaattttataggtttatgtttggtttagatttttattaattttagggtatgtgagatgggtgtggtgtttgggaggaggttgggtggtataggagtggtaaggttatggggtggaaggaggtaaagttagttttgggtaaaaggaagaattttatttttgtttaagatgagttagttggtttgtgtagttagagtagtgttagtttggggaggaatggtggatttggagttagagatttgggtttttttttgtttttattatttaatatgtgtgtgtttatttttaggttattttgtttttttgagttttagtttttttatgtggaatgtagggagttgatatttgttttttgttttttttttagaggggttttaagaatttaggagaagttggttttatttttttggatttgagaggggtgttttgggtattttatggtttggttttagtgtttttttttttttgtgtgggtttttgttggttgtagttgtagtgttttggattagtttgtatattgatatttggtgtgagtgttgttatggtaaggttgttgtgggtggggtgtgggagggtgtggtgtggttagattgtattatttgtttgtgtggaagtggagtgtaggtgttgtgtttggggtgtaggtaattgttgatggttgagttagtttttttggtttatggtttttagtgggtgtgggaggtggtagtttgagtggttttttgtttggatagtgttttgtgttttttttatgtttttagtttttagtgagatttatttttgttaagtaagggtggttagggtggtattagatttattttgttagtgaggaaattgagaagttgagaggttaaatttttggtttaaggttttggagttagttaatagtgtgttggaattagttttttgggttagtggatttttaattttattttttttgtgtgatttagtaatgtagggtagtttagtagatatttatggagaattttttatgggttagggtttgagttaggtgtaggggtttggatgggggttttggttttgtttttgagagggtgtaattttaaattttttgtgtggatttgaggtttttagttgtattttatattattatgtttattattatggtagagaagtaagaagtttttaattattagtgttgggaaaagaggatatagtagtttgatttaggagtgatatttagatagagaaagttttttttttttttttttttttttttttttttttttttttttttttttttttttgagatggagttttgtttttgttgtttaggttggagtgtagtggtgtaattttggtttattgtaatttttgttttttgggtttaagtgatttttttgttttagttttttaagtagttgggattttgggtgtttgttattatgtttgattaattttttgtattattagtagagatggggttttattatgttggttaggttggtttggaatttttgattttaggtgaattatttgttttggttttttaaagtgttgggattatagttatgagttattgtgtttggttgtttttttttttttaagtaggaaaatttaaaattttatgaatagtagggttagatatttataagttatggtagggataagaagagttgggtagttttatgggattaaagaatttagtttaaaaaaaaaggtgttttttgtgtgtatgttatgatttaattttattggtttatgtttgggttaaatttttattaattttagggtatgtgaggtgtttttttggagtataagattggttgttttaaatatttggttatttgttggggttagatgttttggtttttggtgtaaggtttttttga

SEQ ID NO: 742 - DNA, 2301 bp, Artificial Sequence
  chemically treated genomic DNA (Homo sapiens)
tataataaagaaattagaatatttgggagtaaaatttagatttgggaattatttagggaaagtttgttttgatttgtagtagagttttgggattgattttttaaattgtagttattttttatttttggttttgtgaaaaatttgagattttggttttattagttttttttttgaaaaatagggtgtgttttagttttaggtatgtaaagttaaatgttttaaattgttttgtatttgaattagttaatttaagaataagtttaatagtattgttaagtaagagtttaataatttagtgttttgtgatattttttggtggtgttgattgtttgtttgggatattggtttagaagtatggtatagggtgtttttatattttagaaattaagatagtttttaggttagaataaagtttattttggattgggtataattttattttatttttgtgatttttttttttgttttttgttttttgtttttttttttttttttttttaatttttagtgtgttattttaatgttttagttttgtttgttaagtttatgtgtttgggatttgttttttgaattttaagtttgaaaagttaggaatttttgattatggatttttttttgttaaattagagggagtgaaattttgtttttttttttattttatttttttattttaaatttgttagattaagtttgttgattaggtgtgtatttaatggtagtattttttttaatattttttttattagagaggtaagtgttttatatttgtatgtaaaggtttttgagtggttaggtggagaggtttggatgtttttttttggagtgggttttggggagttgtagtagttttagttttaggtattatagttaagtgagtgtgttttgggtttgttgttttgtatgtagttggaggtttgggttgttgattttttggttatgtagttaatttgaggatgtgtgttttggggtttggttttgttttgggtgagaaggttagttattatttagggtgtaggtgttatggtttggaaatggtaatatttgagtaaataggtgggtgttgttttttggtggtgtggtggttgttggtttgtagtgtgttttagtttttggtgttgttgttgtttttttgttttgtggatttagttagtttttgggtggtttagttgggtggttttgaggtttgtttttttgggttgtggtgggaggtggggattgtagtgttgagtgtagggtgttttagttgggttggtggtttatgttgtgtttgggtttttgttgggagggtgttttggtgttaaatttgggtgggtaggggggtggagagttgattgagtttatttttatttagaatttagaggttggtggagatagagagttttttaaatggatgtaagttttttgaaagtttgggttggaagttttgaaattttttgttatgtaaagttttagttagtttttagggtttggttttggttttttttgtgtaggtttggaagtgtttgtttggtttttttattgtttggaggggtttagggttgtggatagatttggataaggttttgtttatttttagtttgttttagttgattaatggtgggattggttgtaatgtgtgttttgagattttttttaggatttgttattttaattttgtaatatgaggtaaggttatgttttttaaagtggagatattttttttgttttttttgtttttttaaaggaagtatatttttttgatgtgtttgatgggatttgtagattttagattttattgtttttttttaaaattatatatttgaaaagaatatattttgattgttgttaaaatttgttagatttttatgttttaattgttggtaatgttttaataatggaattttattatttttgtatgtgttgttgaaaagagagttttttagtaaaagtgttgtgtttatgagttttttgaggttgtgtaaggttatttattaaggattttaaaatgataggtaggttatttttggatttttaattatatgtttaaaatttaaagatttttagtttggagaggtttggttttgttttggtttggttttaaaagtttattttttttttttttttatttttaataatatagtatttaattgttttattaaattgttttaggttttggaattttggggaggtattttttaaatggtattgttttttttgtatttatgttaatataggaagttgtattagaaatttaagttgataatttaataaggtttgattaagtatatgaggtttttttaaaaaaattgatgtagtatatat

SEQ ID NO: 743 - DNA, 2301 bp, Artificial Sequence
  chemically treated genomic DNA (Homo sapiens)
atatgtgttatgttaatttttttaaaaaaattttatatatttgattaggttttattaaattgttaatttaagtttttaatgtaattttttgtgttgatataaatatagaaaaaataatattatttgaagagtgtttttttagggttttagagtttggaataatttaataaaataattaagtattgtgttattgggggtgggggggggggaggaatgagtttttaaaattaaattaaaataaaattaaatttttttagattgagaatttttgagttttgaatatgtgattggaaatttagaggtagtttgtttgttattttgagatttttgataagtaattttgtatagttttaagagatttatgggtatggtatttttattggagagttttttttttagtaatatgtgtaaaagtggtaaggttttattattaagatattgttagtgattaaaatatggaaatttgataagttttaatagtaattgaagtgtattttttttaagtgtgtggttttgagaaaaagtagtggagtttggagtttgtaggttttgttgggtatattaagaggatgtgttttttttaggaaggtaggaaaggtaaagagagtgtttttattttaaaaaatatggttttattttatattgtaaaattaaagtgataaattttggagaaaattttagagtatgtattataattagttttgttattagttaattaagataaattgaaagtaaatggagttttgtttgagtttatttgtgattttgggtttttttaggtagtgggaaaattgggtggatatttttgggtttgtataaagggaattaggattgagttttggagattagttggggttttgtgtggtagaaagttttgaggtttttggtttagatttttaggagatttgtatttatttaggagattttttgtttttattagtttttaaattttgaatgggaataaatttaattggttttttatttttttgtttgtttgggtttggtgttagggtgtttttttggtagaggtttgagtgtagtgtgaattgttagtttggttggggtgttttatatttggtattgtagtttttgttttttgttgtagtttaagggggtaggttttggagttatttagttgggttatttgggaattggttgagtttgtagagtaaaggggtggtggtggtgttgaaagttggagtgtgttgtgagttagtggttattgtattgttgggaagtgatgtttatttgtttgtttagatattgttatttttaggttatgatatttgtattttgaatggtgattagtttttttatttgaggtaaggttgagttttggggtatatatttttgggttgattatgtggttagagggttagtggtttagatttttagttgtgtgtagagtagtgagtttaaggtgtgtttgtttggttgtggtgtttgaggttggggttgttgtagttttttgaggtttgttttaggaaaagatatttgagtttttttatttagttatttagggatttttatgtataaatgtaggatatttgtttttttggtggggaaaatgttggagagggtgttgttattgggtgtgtgtttggttagtgaatttaatttagtgagtttgggatggggaagtaggatggagaggagagtgaaattttattttttttaatttagtaggaggaagtttatgattgaggatttttggttttttggatttgagatttaaagaataagttttaggtgtatgggtttagtgaatgagattgagatgttaaagtagtgtgttaggagttgggaagggaggaaagaaaagatagaagatgggaaatgagaagaagaattgtagaggtggagtggagttatgtttagtttagagtaaattttattttaatttagaggttgttttgatttttaagatgtagagatattttatgttgtgtttttaaattagtgttttgggtaaatggttaatgttgttaagagatgttgtgaaatgttgagttattaggtttttgtttagtagtgttgttggatttgtttttaagttggttaatttgaatgtagagtggtttgagatgtttagttttgtatatttagggttgagatatgttttgttttttaaaagggggattgataaagttggggttttaagttttttataaggttaaagatgaggagtggttgtagtttagaaagttaattttaaaattttgttatagattgaggtagattttttttaaatggtttttaaatttgggttttatttttagatattttgatttttttgttgtg

SEQ ID NO: 744 - DNA, 2362 bp, Artificial Sequence
  chemically treated genomic DNA (Homo sapiens)
ttagtttttggagaaagaattttataaaggatgggaaattttaaataagtgtaatttattttgggttgatttagtgttttggataatgtgttttgtttggtttgtgttttagatattttttgtaggatattgtagtttggagattttttttttttgtaattgattttatatatttaggattattattttatggtagttgtgaatatattaagaggaagaaaataagtggtttattgaattgtagtttttttatttatatgtgtgtgattttttttttttgtaagaaggaaaaaaataaaatggtttttttggagagggttagggttttttaagtatgttagggattaaaagtgggaaattgggaaaatgtaattttaatgtgttttgttttttaatggaatttatgtttgtaaaatatattagaagtatagtgtttggttttgtaagttatttttgttgttgttttttttttgttatgtggaggttggggggattgggggttggaggaggtgttttttttaatatgattgggtgtgtaatatgtttgtattaattttttatagttagatatgtgtttttgaataaaggagtagtggagataggtagagatgggggtttgatatagtttatagattttgtgttttaatagtattttataaatgatttgtttaattttaatgtttattattataagagatattggagtaaaatgagaaaattggagttatttgaattaattttttttggggagtgggggggaggggaattattaatttgaatatttgtattataaattaaatttagtaagtttgttttttataaatggatttgaagtatttattttttttaaagatgaaggttggagataaagtaatggattgaaatggaaagaaggatgttaagggtttgaaaatatatgggttttttatattgatttttgttatgttatagtaatatatttttttttttgagaaaattgtgtatgttaaattttaaaaattaaatattgaaaggatgtgtaagtttaaaagggtttaatagggttagaattttgatttgaatatattaatttatttttaagtattattttggtttaaaggtgaggaggaaggtaggtagtaaagggagaaaaagagggagattattgaattatttaataaaagaggttatttattattttaatttattgtaagatatatatttttgatataagagaattttttagaggttgaataaagtgtgtaagtatttttgagtaatgtatttgtttttggagagggggtttggaagtttaatgagggtttagtgaatagatttttgttaatttgtttatttttttgaattggagttgggttgtgatgggttgtgatttttaggatgatatatttaattagaataaaatagaaaaaaaaaatgttgtaaaagtttattaaattgttgtatttgtgtttttgaatgtgggtggtattttttttaaaaggtaaagtatggtttgtgaaggagaaaggggaaaggggaggtgggagtggggagaaggggttgtatgtatagtttggtaagggaagttttggttgagattttttggttaaggaagggtttttagtggttttttagttagggttgtgatggagtagttatttgtttagagtgttttttttttttttttatttttattttttttaagatttgtttttttgttggttgaaatttattgtttgtgtttaaatttattttttagttgtttttttttttgttttattaggaaatagtgggtgaattttgtattttaattttttttgtttgagtaggggaaggaaatggggttttaattttgttttgaaatgtgttgggttgattttattattatttgttagttagagaagggtgtggggggtttgtgttttggatttaataaagagaagggggtgttttttttaatgttttgttaaagtataaggaaattttttttttttttttggaagagatggtgttttattttattttgatagaggggggaattttaggagaaagtgtgggattaattttttttttttataaggtagggaaattaaattttatttttgtaaaataaggttgagaatttttttttatgttatttatttatgaaaagtgagaggatttttgttttttagtaaaaatatggggaagagttttttttaaaaaaataggttggggtttttattaaaagggttggagatgtattttttttttttttaatttggttttttaggggatagttaaaaaatattttttgttaaaaaatataagtgttatagagtatttatttaaatgatttttaattataaggatggagaagggatttgaatgaatttttattttt

SEQ ID NO: 745 - DNA, 2362 bp, Artificial Sequence
  chemically treated genomic DNA (Homo sapiens)
gaaggtgggggtttatttaggttttttttttatttttgtaattgggggttatttgggtgggtgttttatagtatttgtattttttggtggggggtgttttttagttattttttagaaggttgaattggggaggggggagatgtatttttagtttttttgatgaaaattttagtttatttttttagagaagatttttttttgtgtttttgttaaagggtaggggtttttttgttttttgtaggtaggtgatgtgagggaggatttttagttttgttttgtgggggtaaggtttggtttttttgttttgtagggagaggaagttggttttgtgtttttttttggggtttttttttttgttggggtaaaatggggtattgttttttttgggagagaaaaggagatttttttgtgttttggtagggtgttaaaggaagtgtttttttttttttattaagtttgaaatgtgggttttttatgtttttttttggttggtgggtgataatggggttagtttggtgtgttttagggtgaggttggggttttgttttttttttttgtttgagtagaaggagttggggtgtagggtttgtttattgttttttggtggggtgagagaagaggtggttggagagtaggtttggatatggatggtgggttttagttggtaggaaagtgagttttggagggaatgggggtggagaggggaagagaatgttttggatagatggttattttgttgtagttttggttggggagttgttgaggatttttttttagttggggggttttagttagggttttttttgttaggttgtatgtatgattttttttttttatttttattttttttttttttttttttttttatagattatattttgttttttaaaagaaatgttatttatatttagagatataagtgtagtagtttggtgagtttttataatattttttttttttgttttgttttaattaaatgtattgttttgggaattgtagtttattgtagtttgattttagtttaaggaaataaatagattagtaaaggtttgtttgttaagtttttgttgggtttttgggttttttttttgggggtaggtgtattatttaaaggtgtttatatgttttatttgatttttaaggagtttttttatgttagaagtgtatgttttataatgggttgggatggtaagtagttttttttattgagtaatttaatgatttttttttttttttttttttattgtttgtttttttttttgtttttagattaaagtgatgtttgagagtgaattgatatgtttgaattaggattttaattttgttgagtttttttagatttgtatatttttttaatgtttaatttttaaaatttgatgtatatagtttttttagaaaaaaaagtgtgttattgtaatatgataaaaattgatgtaaaaggtttgtatgtttttagatttttggtatttttttttttattttaatttattgttttgtttttagtttttatttttgaagaaagtggatattttaagtttatttgtaggagataagtttattggatttgatttatgatgtaggtatttaaattaatggttttttttttttttattttttaaaaaagattggtttaagtagttttaatttttttattttattttaatgttttttgtggtgatggatgttaaaattgagtaagttatttgtaaagtattgttgaagtataaaatttgtaaattgtgttaagtttttatttttgtttgtttttattgtttttttgtttgaaagtatatgtttgattgtgaaaagttgatgtaaatgtgttatatgtttagttatgttggagggaatattttttttagtttttagtttttttggtttttatgtaataaggaaaaaataataatagaaatgatttgtagaattaaatattgtatttttgatgtgttttataagtataagttttgttaaaagataaaatatgttgaagttgtatttttttagttttttatttttgatttttgatatatttagagaattttggttttttttaaaagaattgttttgttttttttttttttataaggaaaaaaggttatgtatatgtagatgaggaaattgtaatttaataggttatttgtttttttttttttaatatgtttataattgttgtagagtggtgattttaggtatgtaaaattagttatgggaggaagaaatttttaaattatgatattttgtaagaaatgtttgaagtatgaattgaataaaatatattatttagggtattgggttagtttaaaatgaattgtatttatttgaagttttttattttttgtaaaattttttttttaggagttga

SEQ ID NO: 746 - DNA, 2568 bp, Artificial Sequence
  chemically treated genomic DNA (Homo sapiens)
gttttttaggggttgattgttgtgtatttagtagggaagttgaggtgggtggtgttatgttttaggtttagggtttatatatttgttgggttagttttttggtgggtagtataattagggtatggatgtggtagattatttttgaaagtagggtttgagggggaaggagtgtttgtgttagtaaggttgttatttgttttttgtatatttgttgtagagaaaggggatttttatatagatttgtattatagggatgatgaaggttagtgtttttttattgtttgttggggtagaaatatagaggttgttaggttggtagttatttttgtttattagaaatttataggttgtgttttttaggagggtaggaattatagttgtttggattggatgaggaaaggtgagagagaagttgtgtttatgtttaggtttaggtttgttgtttttttgtttgtgatttttgggttgggttgttttgttggaggtttgggaattgttttttagagggatggtattaaggtttagaggaatgttagttttaggagatttaagtgggaattatgagtttgagagtgttgagattatatttggtattgatgtggtagggatgtttgatttatggttatttatagttttgtgtgtgggtgtttagggaggtgtttttttagttgtttgtttggggttggggtatttggaaagtaggatgagatgttgtgtgtttgtagttgtttttgtaggttaggatggatgttagggatgtttttgataggaattaggtttttggtgatattttttttgatatagttaggtttagttagttattttggtaggaaaggttggatttgttattaaaaagaaagagaggttaggtgagtgttttttaggtttttgtgtagaagtttatggtggaaaaagttaggggagggaggttggggaaatttttgttgtttttagtttttttttagttttaggatgtgttttttatatagtttttagaagttaaatagtaaaagtagatgttattttttgagtaaatttattttgtagttttttattaatttatagtggtatttatttttttgtagttaggaggttttgtgatttggtgtttgtttgttttagttatgttggtgtttttgttttgaggtttttgtttggtatttttaatttttaattttgatttggttttaagtttttgtattttaatttaaagagaattttttttatttgttttatttaaggtgtttgagtattttgttaaattttttgttttttttatttgttttgttggaaatttttttattgaaaattatatgtgttaagtaaaaatattaatggttaggagtttgtagaatggtttttgatttatttttgaggtggtgagtgtatagtaggaaattttgtatgtttatgtaaatatattttgtagaattggtgtggtgtggtgggaggataggggtaagtttagtagaggaaatgggagttttgtatgtgtaggatttagatttttaggtgatgaaattgtagatttggtagtgaggtgtggttgtgatttgggaatatttgttgaatgaaattttttggggtgattgttgtatttaagaatttgtgtagtttatttttttatgttgattatttttttgtttgttgaggtttatttttggtgtttttttttttttgaatttttttagtattaggttggggattaggggtttggttgttttttttagggttggtttatttggggttgttttggtgttggtgttggtgttgtgtttttttggtgtttttttgttgttttttgtgttgggtttttttggtgtttttttgttgttttttgtgttgggtttttttggtgtttttttgttgttttttgtgaggtagatatttatttggtagtgtgttagtattgagttgttggtgttttagagggagtttgtttgttttgtggtttatttgtgtttgtgtttttgttgtttgttttttgttgttttttttgtggtgtttttgggttttttggttttgtgttgtttatttgttgttgttgttggggttgttgttgttttttggttgttggtttggttgatgtagttgttttggtttgtgtgggtttttgttgttgttgttgtttgtgggtttggttttgtagttgtttgagtagtgtgtgggttttgttgtgtgttttggtttttgtgttttttggttttgttgtagttgttgtattggggtttgggtattgtgtgatgtagaatagtgttatggttagttgtatgtttgggatttgggtgtggtgtgttgtgatgatgttggtggtatgtttgtgatttgggttttgtgtaaaagatggggttggggtatggtgtgtagagatgatgttgggttttatgtgtagtggtgatgttatgggagtgttggtggttgagaatttgtgttgttttgtgttgggggtggtatggagtgggagttgggtgttgtgggagtttgttgggttttgggttgttggttggaggtggtgttggtgagttgtagtgaggttaatgttgtgtttgatattttggttgtgttgta

SEQ ID NO: 747 - DNA, 2568 bp, Artificial Sequence
  chemically treated genomic DNA (Homo sapiens)
tgtagtatggttaggatgttgaatatggtgttggttttattgtggtttgttagtattgtttttagttggtggtttagagtttggtgaatttttgtggtgtttggtttttgttttatgttgtttttaatatggaataatgtggatttttagttgttggtgtttttgtgatgttattattgtgtgtagaatttgatgttatttttatgtgttgtattttaattttattttttgtgtggagtttgagttgtaggtgtgttgttgatgttattgtagtgtgttatgtttgagttttaggtgtgtggttggttatggtgttgttttatgttgtgtggtatttgggttttgatgtggtagttgtggtggggttggagggtgtggaggttggggtgtatggtagggtttgtgtgttgtttgagtggttgtagagttgggtttgtgaatggtagtagtagtgggagtttgtgtagattgaggtggttgtattgattgagttggtgattaggaggtgatggtggttttggtggtggtggtgggtgaatgatgtggagttggggagtttggaggtgttgtagggaaagtgatggaaggtggatggtgaggatgtgggtgtaggtgggttgtggggtgagtgggttttttttggggtgttggtgatttggtgttgatgtgttgttgggtgggtgtttgttttgtagaaagtaatgaggaggtgttaggggagtttagtgtagggagtagtgaggaggtgttaggggagtttagtgtagggagtagtgaggaggtgttgggggagtgtagtattagtgttagtgttgaggtggttttagatggattggttttggaggaggtggttggatttttggtttttggtttggtgttgggggggtttgggaagaggaaggtgttgaaggtgagttttggtgggtgggagggtggttggtgtgagagggtaggttgtgtggatttttaagtgtggtggttgttttggaagattttgtttagtgaatgtttttgggttatagttgtgttttgttgttaggtttgtagttttattgtttaggggtttggattttgtatgtgtagagtttttgttttttttgttaggtttgtttttgtttttttgttgtgttgtgttagttttgtaagatgtgtttgtgtgaatgtgtggggttttttgttgtgtgtttattgttttaggagtaagttagaggttgttttgtaagtttttgattgttggtgtttttgtttagtatgtgtggtttttggtaaagagatttttggtgagataggtgaagaaagtgagaagtttgatagagtgtttgggtattttaggtagggtaggtggaggaggttttttttgagttgggatgtaaagatttgaagttaggttaaggttgggggttgggggtgttaggtagaggttttgaggtagggatgttggtgtggttggggtaggtgagtgttaggttataggattttttggttgtgggagggtgggtgttattgtgggttgatgggaggttatagagtgagtttgtttagggagtggtatttgtttttattgtttaatttttgaaggttgtatggaaagtgtattttggggttgagaaggagttgaagatgatagaggtttttttagttttttttttttagttttttttattgtgggtttttgtgtgagagtttggaaagtgtttatttggtttttttttttttttgatggtaggtttagttttttttgttaaggtggttggttgagtttaattgtgttagaaggaatgttattgaagatttggtttttattgaggatatttttgatgtttattttgatttgtagaagtagttgtgggtatatggtattttgttttattttttaggtgttttagttttgggtaggtagttgagggaatatttttttgggtatttatatataaggttgtgagtggttgtgggttaggtgtttttgttatattggtgttaagtgtggttttagtatttttaagtttatggtttttatttgggttttttgaggttggtgtttttttgggttttggtgttatttttttggggagtggtttttaggtttttagtagagtagtttagtttagaggttataggtagggaagtggtaggtttaggtttaggtgtaaatatgattttttttttgtttttttttatttagtttaggtagttgtgatttttgtttttttggagagtgtagtttgtgggtttttggtgggtagaggtggttattggtttagtgatttttgtgtttttgttttaataggtagtgggaagatattggtttttgttatttttgtggtgtaggtttgtgtgagggttttttttttttatagtgggtgtgtagaggataggtaatagttttgttgatgtaggtgtttttttttttttaggttttgtttttgagagtggtttgttatatttgtgttttggttgtgttgtttattaaggagttggtttagtaggtatgtggattttagatttggagtgtggtattgtttgttttagtttttttgttgagtgtatagtgattagtttttgggggat

SEQ ID NO: 748 - DNA, 934 bp, Artificial Sequence
  chemically treated genomic DNA (Homo sapiens)
tgttgttgttattgtaaagatgttgttaaggataaaagtttatgtagatgttttgggtttgggtaattttatttttgtgtattgtttttttagatttttaagtttttttttttattttttataattttatttagggtttagagtaggtgattgtagtgatttggttttaataaaattgaaagtaaatgttttttgtgaaaagttttgggttgtaaattagaaatgtttatgttgattttttattgtatggaaaaagtttttgggtgaaatagttttgagtttgagaatgatttaaaaagttggagttgtgtatatagttttgagtgtttgaagttgtttaattattgtgtgattagaaagaagagtgatgtggtaggaagaagaagttgggttttggggagagtggaggtgggttagggtgggtaaaggtagttgatgttaggaatataattgttttttgtgttgttttaaattaagagatggtagtggttttttagtgtattgttggaagtgtgttttagtagatagggtgtgggtaagatgtgtgggtagatagtttgtatttgttatatgtgttggggtgtgagatttagatttgtgttattttggtttttattttttattttttgtttttgtttgtaatgtttagagattgtttttttttttttatatttatggttttgttatttgaaggaaagggttggttggttagtatttattgaataaagattgggtgttgtaggtagtattaaaattaagattatttgagaaatttagagaaaattgagggatagtgatgggtttagggttggataaggaataatgagttttttttttttttttttatagatgttttttttatgtgggaatttggtttttttttttttgatgtagagagagaagtgattttataggtggaaaatttgagattggt

SEQ ID NO: 749 - DNA, 934 bp, Artificial Sequence
  chemically treated genomic DNA (Homo sapiens)
gttggttttagattttttatttgtggaattgtttttttttttgtgttggaagaaggaggattgggtttttgtgtgaaggaggtgtttgtggggagggaggagaagggtttattattttttatttagttttagatttattgttgttttttggttttttttaagttttttaaatagttttaattttggtgttgtttatgatgtttagtttttgtttggtagatgttggttaattagtttttttttttaaatgatagggttgtggatgtaaaagaggaaaaatagtttttgagtgttatgaatagagatagggaatggggaatgaaagttgagatggtgtagatttagattttgtattttagtatatgtggtgagtgtggattgtttgtttgtgtattttgtttatattttgtttattggagtatatttttagtagtgtgttgggaaattgttgttattttttagtttggaatggtgtgaagggtggttgtatttttggtattggttgtttttgtttattttgatttgtttttgttttttttaagatttggttttttttttttgttgtgttatttttttttttggttatataatggttaaataattttaaatgtttagagttgtgtatatagttttagttttttaaattgtttttgggtttaaagttgttttgtttaggagttttttttatataatgggaaattagtataaatatttttaatttatagtttgggattttttataggagatgtttatttttgattttattggaattaaattgttgtagttatttgttttgagttttgaatggaattgtgagaaatggagggggaagtttaggggtttggggaagtagtgtgtaggaataagattgtttaaatttgaagtatttgtatgggtttttatttttggtaatatttttgtaataataatagta

SEQ ID NO: 750 - DNA, 2359 bp, Artificial Sequence
  chemically treated genomic DNA (Homo sapiens)
taagtttatatatgaaatgaggttaataattgttttgttaatttgttgagaatattaaatgagataatgtatataaagtgtttttgtataaaatttggtatataaatatgtaaattaattttttaataagataatgtataattttggtataatggtagtttaattaatagttgttatttttttttagggttaagattgtaatttttttttattgtttaaagaataagatgagtgggtgaaaatatgtatataaattaataaaatggttgttttattaggtttgtagaaatattgaaagatatatgtttttagatatattttttttaattaaattttaattagaagtttaggattattgaggtataaaagaaggatgggatttaaatgagtgaagtaattttttgggttatagttgtaaagttaatataggaatagagtggagttagtatagtaaaggttttaagaaaatggagtttggagttaaattgtttgtatttgaattttgtttatattttttatttgttttatgattttgggtaagttattaattttattttttttttgtatgttaattttaaaaaggggtgggatagagaggtggggtgtagtttatataataatagtgtttattttatagagttatgagaagtagataatatttgtaaagtgtttagaatagtgttgggttggtatatagtagatgttatttatttttttaaaaaatttgatagtagtaagagtttttatattatgtgagttagattaagaaaggttgtggtatagtttaaaattatttttgtttattttttaaaataagtttatagtagagaataagatattggaaaatataaatatttttttatatttgaatttatttgaattttaagatgtagatatggagagtttagagtgttattagtatagggtagagaggttgaagagtttaggaatagatatagggtgggggaaaggggtaggggtaatgatgttgatttttggttaataaagtttttttaggttgtggagtaattttttttgttttttatttgtttggtttatttttggttaagaagattttgttgttaaatttttatatttagtttaggttgtagtgtatagattggtttttttgaagttttttagtggtagtttgattttgaagtttattgaggtatttgtgagaggagatgttatttagtgtagattatatttgttttgaatttttgataattgtagtttaaagaatgataaattataaaggttggaaatgtgttattgtggtttgttttttgtgaaatagtggttttggttgtgttttttttaggaaggttggaggtttttatatttttgtggttgttattttgaattttgtttgtagttttaagtgagatattaggtgatatattgttttttatgtggtaatataataatggttaatatagtgttttaatatgtattaatttattattttgtataataattttgtgagttaggtataattatttttatttaataggtgaggaaattgaagtatatttttatatttattagttgttattttttgtaaagaatatttttttttttttttgttgttttattttattatgatgaatttatggatttttttataaataattattgttattattatgttgatgtttaaattatttaaaatttggttagttggagtttttttatattgtttttttttttttttttttttgataaagtttttaggttggagtgtagtggatgtgattttagtttattgtaatttttgtattttgggtttaagtgatttttttgttttggttttttgagtatttgggattataagaatatattattatgttttagtgaggttggttttgaatttttgttttttaagtgatttgtttttttggtttttgaaagggttgggattatagaagtgagttattgtatttggttataaataggtttttatgttttttgataagtttttaatagtttttgtgtattttatttttttataaaagatattttagttttattttatattatttttattttaaatttagaattattattgttttatgaagttatagtatattagtgaaaaatggtatatagaaattaagatttggattttgggtaatgaataattttattgttattgtgtttggtattggtttttgttagtttattgtgtttagaattggttttttttagtgggtttttgttttgattttaagaatgaagttgtggatatttatggtgagtattatagtttttaaagatggtgtgtttggattttgttttttttgttgtttagatgtgtttagagttttttttttttggtgggtttgtggttttattt

SEQ ID NO: 751 - DNA, 2359 bp, Artificial Sequence
  chemically treated genomic DNA (Homo sapiens)
aagtgagattatgaatttattggaaggaagaaattttggatgtatttgaatagtagaaggaataaagtttagatatattatttttaagaattgtaatgtttattgtgagtatttgtggttttatttttgaagttagagtaggaatttattggaaggagttaattttggatatagtagattggtaggaattaatgttagatatagtagtaatgaggttatttattgtttgaaatttagattttggtttttatatattattttttattgatgtattgtagttttatgaagtaatggtgattttaggtttagggtaggaatagtataaaatgggattgaaatattttttgtgagaaagtgaagtgtataaaaattgttgggaatttattaaaggatatagaaatttgtttgtggttgggtgtggtggtttatttttgtaattttagtttttttggaggttgagggagtggattatttgagggataggagtttaagattagttttattaaggtatagtggtgtgtttttgtaattttagatatttaggaggttgagataggaggattatttgaatttggaatgtggaggttgtagtgagttgagattgtatttattgtattttagtttggagattttgttaaaaaaagaaaagagagggagtagtgtgaaagggttttaattgattaaattttaaataatttgagtattaatataataataatagtaattatttgtaaaggaatttatgagtttattgtgataaaatgagatggtagggaaaagaaagggtattttttgtaggaaatggtaattaataaatgtagaaatgtgttttagtttttttatttgttaaatggagataattgtatttaatttatagggttgttatgtggggtaatgaattaatatgtgttaaaatattatgttggttgttattatattgttgtgtggaagataatgtgttatttagtattttatttaagattatagatgggatttagagtgatgattatagaggtgtggaaatttttggtttttttagaaggaatatagttggaattgttgttttgtggagagtgggttgtggtgatgtatttttggtttttgtagtttattattttttgggttgtggttgttaaggatttagagtagatgtgatttgtgttaggtggtatttttttttatggatgttttggtgagttttggagttgggttattgttgaggggttttggaagggttagtttgtgtattgtgatttggattgggtgtggggatttggtggtagggtttttttggttagagatgggttgggtaggtgaagggtagaggaggttgttttgtagtttggaagggttttgttaattaaaagttagtgttgttgtttttattttttttttttattttatgtttgtttttgagttttttaatttttttgttttgtattgatggtattttgaattttttgtatttgtattttaggatttaaatagatttggatatgaagaaatgtttgtattttttgatgttttattttttattgtggatttattttaaagaatgagtagggatagttttaaattatgttatagttttttttagtttaatttatatagtataaaggtttttgttgttattgaattttttaaaagaataaatagtatttattatgtgttagtttagtattgttttaagtattttataaatattatttgttttttataattttatgagatagatattattattatgtagattatattttatttttttgttttgtttttttttaaaattaatatataagaagaaaatgaagttagtaatttgtttaaggttgtagagtgagtaaggggtgtaggtaggatttaaatataggtaatttggttttagattttatttttttaaaatttttgttatgttaattttattttgtttttatattagttttatagttataatttgggaagttattttgtttatttgaattttgttttttttttgtattttagtagttttgggtttttagttaggatttgattggagagaatatatttgaagatgtatattttttagtgtttttgtaaatttgatgaaatagttgttttattggtttgtgtgtatgtttttatttatttattttgttttttgagtaatagaaaaagattatagttttggttttaagggaaagtagtaattattaattaaattattattgtattaaaattgtatattattttattaaaagattaatttgtatgtttatatgttaggttttgtgtaaaaatattttgtatgtattattttatttaatatttttaataagttggtaaggtagttgttgattttattttatatatgagtttg

SEQ ID NO: 752 - DNA, 2823 bp, Artificial Sequence
  chemically treated genomic DNA (Homo sapiens)
tgagtatgttatagagtttaatgggttaaaagggggtgatagttttatattaatttttttttgttttattagtatttttttgtttatttaggttgttttgagtttttttggttgtttttgtatttgtgttttatttggtttttagatttatgtgatgttgggtaatttgggttgggtgtgtttaggattgtaaagtgggaagtgtaggttttgtggattgtgagtggtttttgtggtttgttgtttttttttataatgtgtgttttgttttttgtgttttgggtgttttgttttggtttatttatttgttgttgagaattagatattgtgtagtagaaagttagttgttgggttgtgaggtttggttgttggagtgggtggggttggggtgttgttgagatagatttgatttttatttttttttaaatgtgttgttgaaagttgagaaggttttggttggggagtttgtgttgttttttttttttttagttttttttgtattttgagttttttagttttattttgggaggggttgtgaaattgtatttgtaagggttttatatatattttaaggagtaggttaggtaggtaattggagttggatttggatggtgagggggtggtttttggggatttgatattttggattttttatggtttagggtttaggtgggggaagaggtggtttaggatgatttggggtttttattttgttggtttgtttagtgtattttaagtttgtgtgtattttattttttttttttgtagatttaatgtttgtttggtaattgttttatttttttttgttggagagattttttttgttttgttataggtgttttatgttgtttggagttgtgtgttttgggatgggtagttttgggttttttgatgtttggttaggtttaggaaagatttgttgttttttttgttgtttttatttaggagatttggtgttttgtgttttgttttttttaatggtgttgtggtttgtttttttggtttgtttttttttagtttttattttatatggttttttttgttagttttatgataattttatttgtgttgaagattttgggtaaagaagtaattattggtttttttttttttttttatttttttggtggtaggattagggggaaaggtgtttgggatataagttttttatgtagatttattgatgtggttgtggttttgttattggtttttttttgaatggtgaggtttttttgttaattttggttttatggtataattagtataattttagtgagaggaatttagagttttagtttttttttgttttagtttttttgtgattttgattttgagggatttattttatttttttaagttttagttttttatttgtaaaatgggtagaatgatttgtatttttggggatgaagaaaatgtatatgtgagtatgtgggtatttggtgatttggagatttttgtaaattgtaggtttagtgagatggttttagtatgttttgtatttttgtttgtgtgattgttgttgggtgtttgttttagttgttgtgtttttggtgttttttttgttagggttatgtgttggggaagttaaagtgggagttttttgattttggtttagtttttagtttttggttttttgttttagtatttagatttttgtgggttaataaagttattggaaatttaatgaattttttgatattttttgaaaattgtatgtgtgtgtttttgtgtgttttttttttgattgaggtagggttttgtagggttttgtttggatgggaggttggagtggtttttttttggttgtggggttggaggatgtagagatttgaaagaaggagaaatatagagattgttaaatgaaaggagattttgtttttggaattgatttagttttttaaaagaatgaggaaaatatggggtttttatatattttggaaagttgtttaggtgtttagtgaaaaatgtaaaaggtatgtggatttttatttgtgtaaaaatataaatggggtagggggttaaatattaggttttttttgtatgaaaggttttagtgtagagggttggagatttttttttttattgtatgttttttgggattgtttgaagttaatgtgtgttgtttattatatttttgtattgaatttttaattaaaaaaagaaattgtaggaattgttttttgtttgtttgtttgttttgagatggagttttgttttgtagtttagattggagtgtagtggtgttatttaggtttattgtaatttttgttttttgggtttaagtgatttttttgttttagttttttgagtagttgggattataggtgtgtgttattatgtttggttaattttttttttttttttttttttttttttttttttagtagaggtggggttttattgtgttagttaggatggttttgattttttgattttgtgatttgtttattttggttttttaaagtgttgggattataggtgtgagttattgtgtttggttaataaattgattttttaaaaagtaatttgggttgggtgtagtggtttatgtttgtaattttagttttttgggaggttgaggtgggtggattatttgagattagaagtttgagattaattagtgtgattaatatggagaaagtttatttttattaaaaatataaaattagttgggtgtggtggtatttgtttgtaatgttagttattttggaggttgaggtaggagaattgtttgaatttggaaagaggaggttgtggtgagttgagattgtgttattgtattttagtttgggtaataagaatgaaattttgttttaataa

SEQ ID NO: 753 - DNA, 2823 bp, Artificial Sequence
  chemically treated genomic DNA (Homo sapiens)
ttattgagatggagttttgtttttgttgtttaggttggagtgtaatggtgtgattttggtttattgtaattttttttttttgggtttaagtgatttttttgttttagtttttggagtagttggtattataggtgagtgttgttatatttggttaattttgtatttttagtagagatgggttttttttatgttagttatgttggttggttttgaatttttgattttaggtgatttatttgttttggttttttaaagagttgggattgtaggtgtgagttattgtgtttggtttaggttgttttttaaaaaattaatttattggttgggtgtggtggtttatgtttgtgattttaatattttgggagattgaggtgggtggattatgaggttaggagattgagattattttgattaatatggtgaaattttgtttttattaaaaaaaaaaaaaaaaagaaaaaaggaaaaaaaattagttgggtgtggtggtatgtgtttgtaattttagttatttgggagattgaggtaggagaattgtttgagtttaggaggtggaggttgtagtgagtttaaatagtgttattgtattttagtttgggttatagagtgagattttgttttaaaataaataaataaataaaaaataatttttgtagtttttttttttaattgaaaatttaatgtaagaatatggtaagtaatatatattggttttgaatagttttgaaagatatataatgaaaagaaaaatttttaattttttgtgttgagattttttgtgtagaaaaaatttgatgtttaattttttgttttatttatatttttatataaataggaatttatgtgttttttgtgttttttattgaatgtttaggtgattttttaggatatataaagattttatgttttttttatttttttaaagagttgggttgattttgaagatagaatttttttttatttgatagtttttgtgttttttttttttttgaatttttgtattttttgattttgtagttgggaaggaattattttagttttttgtttaaatagaattttatagggttttattttgattagaggaaaaatgtatagaagtatatgtatatggtttttgaaaaatgttgggaagtttgttgggtttttagtgattttgttgatttatgagaatttagatgttagagtaaaggattgagggttaagggttgggttaagattgaaagatttttgttttggtttttttggtatgtggttttggtggaggaagtattagggatatagtggttggggtgggtatttggtggtagttgtgtggatgagggtgtagggtgtgttgaggttattttgttgggtttgtagtttgtagagatttttgggttgttaagtatttatgtgtttatatgtgtattttttttatttttagaggtgtgagttattttgtttattttgtaaatgggaaattgaggtttagagaggtgaagtgaattttttgagattgagattatagagggattggagtaggggaggattggaattttgggttttttttattggggttatattagttatgttatggggttagggttagtaggagaattttattatttggagaggggttaatggtagaattatggttgtattagtgggtttgtgtgaggggtttgtattttgggtatttttttttttagttttgttgttggaggaatgggaagggaggggaagattgatggttatttttttgtttaaggtttttagtatgagtgggattgttatggagttggtgaagggagttgtgtggggtagggattaggagggagtaagttagagggataagttgtgatattattaaaaaggatggagtgtaaggtgttgagttttttaggtgggggtagtaaggaagatagtgggttttttttaaatttggttaagtgttgaggaatttaaaattatttgttttggggtgtatgattttgggtagtgtgggatgtttgtggtgaggtggaagggatttttttagtgagagggaatggggtaattgttagatggatattggatttgtagaaggagggggtaggatatatgtgggtttaggatgtgttggataggttagtaaagtgaggattttaggttgttttgagttatttttttttttgtttgagttttgagttgtaagggatttagggtattaggtttttgggggttgtttttttattgtttgagtttagttttggttatttgtttggtttgttttttaaaatatgtatgaggtttttgtgggtgtagttttgtggttttttttggagtggggttgggggatttagggtgtgaggggagttgaggggggaggaagtgatgtgagttttttggttggggtttttttgatttttagtagtgtatttaagaaaaggtggaaattggatttgttttggtggtgttttagttttgtttgttttgatggttggattttgtggtttagtggttagttttttgttgtgtggtgtttggtttttgatagtaggtgaatgggttagggtggggtgtttggagtgtggggggtggggtgtgtgttataaaggggagtagtaggttgtgggggttatttgtagtttgtaaggtttgtgttttttgttttgtggttttgggtatatttggtttgggttgtttagtattgtatgggtttgaggattaggtagggtgtgggtgtagagatagttagggaggtttgaggtgatttagatgggtgggggaatgttagtaggatggggaggggttaatgtggagttattatttttttttggtttgttgggttttgtgatgtgttta

SEQ ID NO: 754 - DNA, 3120 bp, Artificial Sequence
  chemically treated genomic DNA (Homo sapiens)
aattttaagtttaggttgggtatagtggtttatgtatgtaattttagtatttggagggattgaggtgggtggattataaggttaggagattgagattattttggttagtatggtgaaattttgtttttattaaaaatataaaatttagttgggtatgatggtatgtgtttgtagttttagttatttgggaggttgaggtaggagaattgtttgaatttgggaggtggaggttgtagtgagtggagattgtattattgtatttgtttggtgatagagtaagattttattttaaaaaataaataaagaaaatttgaagtatagtatttttttaaattttaaatagataatagaaattggtttttttttatttaaattagaatttaagtttaattttatatatttttgatagtttggattttgttttttaattttataaaattgggaatttaagtattatttggtttgatttaaatgtaatgtagaatttgtattaaaatattatattaaagttttagatttgtagtagttaatagtatttttatgtatgtgttagggattgttttaaatattttatatatattaatttttttattttgtatttttgtttttgttttatatagtaggaaattgaaatattgagaggttaagtaattaaagttatagagttagagtgataggagtaaagttttaatttaggtaatttagatttttagagttttgatttttattattaagttgttagtatagtttttttggtaattatttttaatttaaatataatttgagtgatttatttaataagttattattttgataatttagtgatttgtaatgtaaaattatttattgtaatttatttaatattattgtttttttgtgttgtaaaaattatagtaattgagatgtaatttattatttttttttttatttttggtattttgtgttaatttttttgttttgtggattttttttgattttttattatgtgtgttaattgttattaatttttttgtttgttggggattggggttgtgagggtatatttttgaggggtatggggttagggttaggtaggttgtgtggttgggtggggttttgtgttttattgtggagtgtgggttgggaagtggagagagaagtagttgtgtaatttgttggatgtggattagggtgttttttatttttgttgggagtttgttgattggttgggtgtgggtgtatgtgattgatatgtggttgtattggtgtagtttgttagggtgttattggagatagaatggaggtgttgttggatttggaaatggggtaggtgttggagttattatggttaggtttgttgtggggggaggggggaaggtggtttttttttgtattgttttaaattgatggtttttttttggtatagggtttattgtagtatgttaaatgaggaggtaggggtgttgtttttttgttttttattgtagtattggagatggattttttgtattttggatttagggtttttgatagaagaggaagaagggggaggggtagaagtgttaaggggagtttgttgagaaaagttgtttttgaagttagaaggggtttttgtttttataatgttatttgatagagtggaataatagtatttaaggaaatgggtagaggataataaagaatggagtatatttatggtgaggagtaaaagttttattttattgaaaggtttttttttttttttggtgataaggatatatgtattggtggttaaaagagagaggagataaaattgttgtagatggttgatgtgaatttagtggaaagagttattggggatgagagaaagaggaggaggtaggtattgtagagtgtgagtggtggtgttggttggtgaaatattggttattagtagtgtgtttgtttttgtaaaatatttaagtaaattttttgtgaatagggtggtaaatagatattagtgtttttgttagttataaaatgtagtggtagtggttttttgtggatgattgtagtagtgttttttttttttttgttaggttgaaaagataattgtagaggaataagaaattttgtagtaaatgttggggtagaagtttatttataagaagttatagtttataaatgtagtttgaatagtagaaaaaaaattattgttttttaaagtaggaataatgttaggttatgaatgttttgttattggaatgtattggatattttgattttatattatgaaagtgatgtttaaattttttgatttaatataaattttatatgaaattttaataaattatgtatgaaatagtggatttttttttttgttagtgaagtttttatgttattaattaggttatttaagagtaaattattttataatgtaaattattttgttaaaaattatggtgaataaatttttgtaggtttaatatttaagatttatagttaagtaattttatatttttttttggttgtttttagataatattgaataaatatttaagatattaatttagtgtgtaaatattttaaattaaagtaatatggttttttttttagatgtatttttgtttagtgagtatttatgagatatatttttgatataaagtgttttttattgagttttttttttttttatttaaatgtaaaagtttatttttatgtatatttatagtagttagtttgttatatttttttattttttgaataaggatggtagtggttttgtaaagttttttagggttagtgatagtgttttttaaataatgtttatgtaatagaaagttttaagatgatttattatattgttttagtaatatttttaagataatgtggaattgggttggtttagataaataagattatataagttttttattgataaatttaaatagttttttaaaaaattatttttgttttaagaattatttgattatggatattagggttaatagtatttaggagttgggtgtggtggtttatgtttgtaatataagttaaataggaggttgagggaagttgaggtaggaggattatttgagttttggtgtttaagattagtttgggtaattaagtaagattttattttaaaaaaaagtatttagagttttttttttaaaatttgat

SEQ ID NO: 755 - DNA, 3120 bp, Artificial Sequence
  chemically treated genomic DNA (Homo sapiens)
attagattttaaaaaagagattttaagtatttttttttgagatagggttttgtttggttgtttaggttggttttgaatgttaaggtttaagtgatttttttgttttagttttttttagttttttgtttagtttgtattataggtatgggttattatgtttggtttttaagtattattaattttgatatttatgattaagtaatttttaaagtagaaataattttttaaagaattatttaaatttattagtgaaaaatttatgtagttttatttatttaagttagtttaattttgtattattttgaaaatattattgaaataatataataggttattttaagattttttattatataaatattatttaagagatattgttattgattttggagggttttataaagttattgttatttttgtttagggagtggggaggtgtggtaggttggttattataagtatgtataaagataggtttttatatttaggtaaaggaaaaaaaagtttaatgaaaaatattttatattaagagtatattttatgagtatttattaaatagaaatatatttagaagaaaagttatgttgttttaatttaaaatatttgtatattgaattaatattttaaatatttatttagtgttatttaaaagtaattaaagagaaatataaaattatttaattataggttttaaatattaggtttataaaaatttgtttattataatttttgataaagtaatttatgttgtaaagtggtttgtttttgaatgatttaattaatggtataaaagttttattaataaaagaaaagatttattgttttatatataatttattaagattttgtataggatttatgttaaattaaagaatttgagtattatttttgtgatgtagaattaaagtgtttaatatattttaatgataaaatatttatagtttgatattatttttattttaaaaaatagtaattttttttttgttgtttaggttgtatttataaattatggttttttgtaaatgggtttttattttagtatttgttgtaaggttttttatttttttgtagttgtttttttggtttaatagagggagaaaaagtattgttgtagttgtttgtaaaaagttattattattgtattttgtaattaataaagatattggtatttgtttgttattttgtttatagggagtttatttagatgttttataaaagtaggtatattattggtgattagtattttattaattaatattattatttatgttttgtagtatttgttttttttttttttttttatttttagtagttttttttattagatttatattagttatttgtagtggttttgtttttttttttttttggttattaatgtatgtgtttttgttgttagggaggaaaagaagttttttaatggggtagagtttttgttttttgttatgaatatgttttattttttgttgttttttatttgtttttttagatattgttattttattttgttaaatggtattataaaaataaaaattttttttggttttaaaaatagttttttttagtagattttttttaatatttttatttttttttttttttttttttttgttaaaaattttggatttgaagtataggaaatttatttttagtgttgtagtggggggtggggggatgatgtttttgtttttttgtttggtatgttgtagtggattttgtgttaaggaaaggttattggtttaagatagtgtgagggaaaattatttttttttttttttttgtagtaagtttggttatggtggttttagtatttattttatttttgagtttggtagtatttttattttgtttttagtgatattttggtgggttgtattaatatagttatatgttggttatgtgtgtttatatttagttaattggtgggtttttgatgggaatggggagtgttttggtttgtatttagtggattatatagttgtttttttttttgttttttgatttgtattttgtagtggggtatagggttttgtttaattgtatagtttgtttagttttagttttgtattttttgggggtatgtttttgtggttttagtttttagtaagtaaggaagttgatggtagttgatatgtatagtaaagagttgggggaggtttgtagggtagaaggattagtataagatgttggaggtgggagggagagtaataaattatattttgattgttatgatttttgtagtatagagaaataataatattaaatgaattataatgaataattttatattataagttattgagttgttagagtgatgatttgttagatagattatttgaattatatttgaattaaaaatagttattagaaaagttatgttagtagtttagtagtggagattagaattttggaagtttgggttgtttgagttgaagttttatttttgttattttagttttgtaattttagttatttaattttttagtgttttaattttttgttgtataaaatgggaatagaagtatagaatagaggagttaatatatatgaagtatttagagtagtttttgatatatatatagaagtgttgttagttattataaatttgaggttttaatgtagtattttaatgtaaattttatattgtatttaaattgaattaggtgatgtttaaatttttaattttatgaggttgaaggataaaatttaaattgttaagaatatataaagttaaatttaaattttggtttaaatggggggaaattagtttttattatttatttaaaatttaaaaggatattatattttaagttttttttgtttgttttttgagatagagttttgttttgttattaggtgagtgtagtggtgtaatttttgtttattgtaatttttattttttgggtttaagtgatttttttgttttagttttttaagtagttgggattataggtatgtgttattatgtttagttaagttttgtatttttagtagagatggggttttattatgttggttaggatggttttaattttttgattttgtgatttgtttattttggtttttttaagtattgggattatatgtgtgagttattgtgtttggtttaaatttaaagtt

SEQ ID NO: 756 - DNA, 2256 bp, Artificial Sequence
  chemically treated genomic DNA (Homo sapiens)
aaatttttattataaataaattatattaagtaagttaaagatagtaaaagagtaaaaatgttagtagatatttttaaaatggtaattatatattatttttggaatgattatatgaatgtggtttattattttttaagtttttatagtaaatatatatttatttgttttatttagttaaaaataaatataatatgtagttgtttttgaataattttttttttttttttttttttttttttttttttgataaagttttattttgttatttaggttggagtgaagtggttttattttgttgtttattataattttagttttttgggtttaagtgatttttttgttttaattttttgagtagttgggattataggtgtttgttattatttttggttattttttgtatttttagtagaggtgaggttttatttgttggttaggttggttttgaatttttgattttaggtgattttttttgttttgattttttaaagtgaagggattataaggtgtgaggtattgtgtttggttgtttttgaataattttgattaaaatttatatttgatatttattttaatatatattatagatttttattgataattttttttagtaagaaagataagttttatttaggtatttgtgaattggaggttaagtagttttagtatattttatatttttttaagattttttttttattttaaatgtttgtaaattttgtatttgataaagagtatatttttatttaatataaatatgtttttttttttagatttttttagtatttgagagatttgtatgtgtgtggttttttattttttttttttggttttttaagtttttagggtgttgttaggaggaggtttgtgattataaattttttttgaaaattttttaggaagttttttttttttttggagaattgaagtgttatttgattttaatttttttgtaaattttgttttttagagttgtttgttattttttgtttttgttgtagattttttatttatttggattggtttttgattgtaattatttggtgtgttgggtagtgtttttgtttttagtagtgtttgtattttttttatttgattttgggttgtggttgtggttagttagttagttgaaggttttatgttgttttttgttgttggttttatgttgttttttgttgtttgttgtttgttttttttttttttgtagttgttgagtgtatgtggtttgttttattttttggtgattagttagttttttttttttttttttttggtgttggtggaagagttttttttgattttgttttttaaattttttggagggattgtggtatttttttaggtaaggggatgttgtgagtgagtgtttggaggaggtgttattaattttgagtatttagtgaatgtggtatttttgaagttgttttaggttgggttttttttgggggtattagttggaagtagtttttgttagagttagtgttggtaaggaaggaggattgggtttttttttatttgttttttatattgttttttggtttttttgtttttagttgtgtttttttgtttgttagtaaaggtgtgtttgagtgtgtttattttgttaaaaagaaatttgtttttgttttgttttttttttttgtgatataatttttttaattgttaaattgaattggggtgtttggtgttatagggaaagtatggtttttttttttaattataagaaaaagtaaaattatttttttttagttgtgagagttttattgagaattgaaattatttgtatgattagaaagtgtttttttatttttttaatttttgatttttaggagtgtggggtttattaagttagaaattttagtttaaaggattttttttggagagttggattgtttttttttttttttttttttttttttttgtgtgtaaaatggttgtttggggtaagggttttttagatgtgtatattgtttggtataagagtagattttgaaaagatgaggtttatttaatatggatgggggagaattttgtttgtaggtagataggaaaatggggagggagttattggaaggatggattttatttttaaagttataatttttagattagaaaaagtgtttagtgttttagaagtagagttgtatagtgatttaaagattagttttaaatattgttttgttttttttatattttttatattttttttttttattgaaaatattttgtattttttgtaattataaagggggaagg

SEQ ID NO: 757 - DNA, 2256 bp, Artificial Sequence
  chemically treated genomic DNA (Homo sapiens)
ttttttttttttataattatgaaaaatgtaaggtatttttagtaggaaagagaaatgtgagaagtgtgaaggagataggatagtatttgaagttggtttttggattattgtgtaattttgtttttagaatattgagtattttttttggtttaggaattatgattttgagaatggagtttgtttttttaatgattttttttttatttttttatttgtttataggtagaatttttttttgtttgtattaaataaattttatttttttagagtttgtttttatattaggtaatgtatatgtttgagaaatttttgttttagatagttgttttatatgtaggaggggaaggggaggggaaggagagagtagtttgattttttaaaaggaattttttgaattagggtttttgatttagtgaattttgtgtttttgaaaattaagggttgagggggtagggggatattttttagttgtataggtgattttgatttttggtggggtttttataattaggaaagaatagttttgtttttttttatgattaaaagaagaagttatattttttttatgatattaaatattttgatttaatttggtagttaggaaggttgtattgtggaggaaggaaatggggtgggggtggatttttttttaatagagtgaatgtatttaaatatgtttttgttggtaggtgggggagtgtggttgggagtagggaggttggagggtggtgtggggggtaggtggggaggagtttagttttttttttttgttaatgttggttttggtgagggttgtttttggttggtgtttttgggggagatttaatttggggtgattttaggggtgttatatttgttaagtgtttggagttaatagtattttttttgagtatttgtttatggtgtttttttgtttggaaagatattgtggtttttttagaggatttgagggatagggttggagggggtttttttgttagtattggaggaagaaagaggaggggttggttggttattagagggtggggtggattgtgtgtgtttggtggttgtggagagggggagagtaggtagtgggtggtggggagtagtatggagttggtggtggggagtagtatggagtttttggttgattggttggttatggttgtggtttggggttgggtagaggaggtgtgggtgttgttggaggtgggggtgttgtttaatgtattgaatagttatggttggaggttgatttaggtgggtagagggtttgtagtgggagtaggggatggtgggtgattttggaggatgaagtttgtaggggaattggaattaggtagtgttttgattttttggaaaaaggggaggttttttggggagtttttagaaggggtttgtaattatagatttttttttggtgatgttttgggggtttgggaagttaaggaagaggaatgaggagttatgtgtgtatagattttttgaatgttgagaagatttgaaggggggaatatatttgtattagatggaagtatgttttttattagatataaaatttatgaatgtttgggataaaaagggagttttaaagaaatgtaagatgtgttgggattatttagtttttaatttatagatatttggatggagtttattttttttattaggagggattattagtggaaatttgtggtgtatgttggaataaatattgaatataaattttgattgaaattatttagaagtggttgggtgtggtgttttatgttttgtaatttttttattttgggagattaaggtggggggaattatttgaggttgggagtttgagattagtttggttaataggtgaaattttgtttttattaaaaatataaaaagtagttgggggtggtggtaggtgtttgtaattttagttatttgggaggttgaggtaggagaattgtttgaatttgggaggttgaggttgtagtgaatagtgagatggagttattttattttagtttgggtgatagagtgagattttgttgaaagaaagaaagagagaaagagagagagaaaaattatttagaagtaattatatattgtgtttatttttaattgagtagggtaaataaatatatgtttgttgtaggaatttaggaaataatgagttatatttatgtgattattttagaggtaatatgtagttattattttgggaatatttgttaatatttttgtttttttattatttttagtttatttgatatagtttatttgtgataagagttt

SEQ ID NO: 758 - DNA, 2501 bp, Artificial Sequence
  chemically treated genomic DNA (Homo sapiens)
tgttattatattgtattgtttgtggatgatttatttgtttttgtagttttatttgaagaatttttttttttttttttttgaggtttgttttaaatattattttttttgtgaagattgtttggtgttttttaggagagagtgtgatttttttttttaggaatggtagtattttaaatatatatattttgtagtatattttattttgtatggtaatggtttgtttgtgagttttattttgtattagagggtgagggttttgaagatagtgttaggttttatttattttgatattttataatatttattatatgtttgatgaatgaatgtatagggggatggttgggtgtattttttttaattttttaattttttgaaataaataataaaattttatttttttttagaagttttggtatggttttttttattttgttatagttattgataattatttttattttttgtgtaatttattaggtaagaagtttatgtagatttatttttagtagtttatatgataaataaatattgtgtttgatttttaaatattaaattatagtatattatagatagatatagagttattatttaaagtatgatattttaattttaaaaggttttttttgaagaatattataaattttttttttttttaagatttgttgggtaggaaagatgggagaaaatgaattaatgtttatatagaaaggaggataatgggggtaaaaataatagatgaatgtatgggtggatgagagaatggataaaatgataggtggatatgttgattttggatagatgggaaatgagtggatatattaataaatagatatgtgggtggatgggtggagaagaggatggtggatggttgtggttttatgaagagatgtgaaaaaggaagtgtggaatgatggatgagaagttgtatgggaagatgaatagaagaataggtggttgaataaattaaaaggtgtgtggttggatgaatgaatgagtgggatgatagatggatttaagtggttagtggatggataggaggatggatggatgtgagagttttagaaggatataaggaaagatgggtggatagatggatgggtggatggaaggatatttaggaggatgaatgagtatgtgtgtggagagaggtgtttatttatattggtttgaatatatgggttagttgagttaaatgttagttttatgataggttattagtagttttttttgagttgttttgttaagaagttaaaatttatttaagttatgtggatttgttattgaggggaaaaagaatgagttttttttttttttatttggaagatttattaattttttattttttattttttattgtgggtatggaggtattgtgttatttagggtaagattttgttttttttttagttttttttttaggatatttaatattttgtgaaatttagagattttgttttagttggatttagagaaatttagtgggaaaggagaggttaaaggttgaatttaatggtgtaaggttttatggtttggttattttttgttttgatgttgtggggttagtgggagaagaaagttagtgtgtttttgggtgtaggggttagtggggtttggaggtataggtattttgtgatattttaggttttttgatttatgtttttggtagttttgattatttatagttttagtagagtatggggtgggggtagaggggtttgtttgggagggttgttattttttaaaatttttgtgggttgtttagttatagttttttttgtttgggtgtgttttttgtttgttttttttttttgttttaggttattgtttttaattttgaataaaaattgtagttaatttttgaggtagttttattgtttagtggattttagtttttgttaggtttggtttgttatttttgttttgttttttgttggtttttgttttgtgtttagggattttttagttttttttgtttgtgttttttgtttgttttggatattatggataagttttggtggtatgtagtttggggattttgttttgtgttgttgagtttggtgtagattggtgagtgtttgttgtagtttgggtagtaagatgggtgtggggtgtttagtgtggatttggtggtagtttttttggttgagttggttttgggggattggagttaagtgagttgtttgtgaagtgtattgggttttggaaagtagggttgggatttgtgttaaattgttggagaatgtgtttgtggaagtattatttggttgaaagaaaaagagaaagagaagaaagtttgttgggtaggttgttggtgtgtagttttgggtgaggttgttagagttgtagtatatggtagaaagtaattgtttttttggatgtgtatagttgttgtttggattaataggtttttgtgtttaagggtttgttaagttttattgggttgtgtttaggtagggtagagttgggtggggtagagattggggttggaatagggtgagtgg

SEQ ID NO: 759 - DNA, 2501 bp, Artificial Sequence
  chemically treated genomic DNA (Homo sapiens)
ttatttgttttgttttagttttagtttttgttttgtttagttttgttttgtttagatatagtttggtggggtttggtgagtttttgggtataggagtttgttagtttagataatgattgtgtgtatttgggagaatggttattttttgttatgtgttgtagttttagtgattttgtttaaaattgtgtgttggtagtttgtttaataaattttttttttttttttttttttttttaattaaatggtgtttttatagatatattttttaatggtttagtgtaaattttagttttgttttttggagtttaatgtattttgtagatagtttatttgattttagttttttagggttgatttagttggaggggttgttgttgggtttgtgttgagtattttgtatttattttgttgtttaggttgtggtgggtatttattgatttgtgttaggtttagtggtatgaggtagagtttttaggttgtgtgttattaaaatttgtttatggtgtttggagtgaatggagggtgtgggtgaaaggagttggaggatttttgggtgtggggtaggggttggtggaggatgggatgaggatggtggattgaatttggtagaggttggggtttgttgggtaatgaggttgttttggaagttggttgtagtttttatttgaggttgaaaatagtgatttaagatggagggagggagtgagtgaaggatatatttaagtaaggggggttgtgattaagtagtttgtagaggttttaagaagtagtagtttttttgggtgggtttttttgtttttgttttgtgttttgttgaggttgtaaataattggggttgttagggatgtgggttggggaatttggagtgttgtggggtgtttgtgtttttgagttttattggtttttgtgtttagagatgtattggttttttttttttgttggttttgtggtgttaggatagaggatgattgaattgtaaaattttgtattattgggtttagtttttggtttttttttttttgttaaatttttttgaatttggttggagtaagatttttgggttttataggatgttggatattttgggagaggagttggagagagggtgaggttttgttttgggtggtgtagtgtttttgtgtttatagtggggagtgaggggtggggagttggtgaattttttaagtggaaagagggagagtttattttttttttttttaataataagtttatatggtttgaatgaattttagttttttggtagaatagtttagggaaagttattgatggtttgttatagggttggtatttggtttagttaatttatgtgtttaagttagtgtgaatgggtatttttttttatatatatgtttatttatttttttaaatatttttttatttgtttatttatttatttatttatttttttttatgtttttttggggtttttatatttatttatttttttgtttatttattaattatttaggtttatttattattttatttatttatttatttaattatatattttttaatttatttaattatttatttttttatttatttttttatataattttttatttattattttatatttttttttttatatttttttataaaattataattatttattatttttttttttatttatttatttatatatttgtttattgatatatttatttattttttatttgtttaagattaatatatttatttattattttatttatttttttatttatttatatgtttatttattatttttgtttttattatttttttttttgtgtaaatattaatttatttttttttattttttttatttagtagattttaaagagaggaagagtttgtaatattttttaggggaagttttttgagattgaaatattatattttgaatgataattttatatttatttataatatattatggtttaatgtttggaaattaaatgtagtatttatttgttatgtgaattattaaaagtaaatttgtatggattttttgtttggtgagttatatagaaaatgaaagtgattattagtggttgtggtaagatgaaaggaattatgttaggatttttgagggaaggtaagattttgttatttattttaagaaattgaaaagttgagagaaatgtatttagttatttttttatgtatttatttattagatatgtaatgagtgttgtggggtattgaggtaaataagatttggtgttatttttagagtttttattttttggtatggaataaaatttataagtaggttattattatgtaaggtgaaatatgttgtaaaatgtgtgtgtttggggtgttattatttttagagaagggagttatatttttttttggagaatattaggtagtttttataggggaagtgatatttgaggtaggttttaaaggaaaaggaggaggaattttttagatgaaattatagggataagtaagttatttataggtagtatagtgtagtgatg

SEQ ID NO: 760 - DNA, 2407 bp, Artificial Sequence
  chemically treated genomic DNA (Homo sapiens)
gggtgagtgggtgtgtgtggggtgtgtgtggtagagtgtgttagtgagtttggagtgtggagttgggaggagtagtgagtgttgtgtagaatttgtagtgttggtttggtagggtagtttggaggtgggtgggttgtgttgttagtttgtttgtagggtttttattggttgtttgttggttgttttttgtttaaaaggtggtaaggagttgagaggttgttttggagtgtgaggaggatagttggattgagttaatgttggggattttgttttttttgtggaggggatttggtaatttgtagtggtagggtttggggttggtgtttgggagggatttgtgttttttatttattttttagttgtgtttttgttgttgttttggttagtttttggtgttggtgtttatggttggtttttgatagtgttttggagggattgggggagtttttaggtgtttgggtgagtagttaggtgtggttttttggtttttttgatttttggtgttagtttttgtttttttagttagggtgtggtggggtttgtttgggtagtgttttgagtaattgggaaggttaaggtggagggaaatttggttttggggagaagtgtgattgtagttgggaggtttttttagttttgtgggttgggtgagaataggtggtgttggtttgattaggtgttttgtgttggggtgtgaggatttggagtgaattgttgtgttttggtgggttgttttttttttttttttgtttttttgggtggttgtatgttgggttggttgggtaatggagagggagttgttaggaatgtggttttggggattgttttgtttggggaaggggagagggtggttatggtgttaggagaggtgtgggagttgagaggtggtgtgggggtgttattgttgttgtaggttggagagagattgtttttagtgaggtgtgtattgtttgggtgagggttttatttttttgtggtgtttttggaggtgggaaagttgggtgggtatgtgtgtagagaaaggggaggtggggaggttagttatttttggagttggttttgattttaatagattgtttagtgtttggggatgttgattttggggtgttgtggtgtttggttttatgtgtgtgtggggttgaggggttgggggtgtttttggttgtttagttttaataaagggtgtttttttttattttgtgaggaggggtagttttggagatttggtttttagtgagtggggttttagtgttggggaggtttatttttttttggggttgttattttattattattattgttttttttttttttttaaaaggattggagattgatgtatgagggggttatggaggtgtaggagtggtggtgatggtttgggaagtggagttgaagtgttttgggttttggtgaggtgtgatagtttattatgattgtgtttaggtaggaaaatgtggatgattattatgatattggtgaggaatttggtaggtaaagggggtattagaagtgtatttttttggattgtggaaatgtataatgatggggttattgggtggtaaataaatgtagtttgaattaggtgttttttttgttttttttggagatgtgtaaattatagagaaaagagttattaatttagtggtaaattgtttgatttaagggtttgggggtggaggagaggtagtagtttagggttagattatgatgtatagtatattgatttagttttttggataaaattagatttaattgtttgtgttaatttttgttagtttttgtttttttgtgataataggataaatattaagattataattgtaattggagttagtttttatgtgtgatttaaatggagggtataaattaattaataggttttaaaaattttagtattttattttttatttaaatttttagtgtaatttgagtaagtattggtaggtggtaaatggagatttgttagatgttgatattgggtttggattttgaaattttttttaattaggaatttaattatttggttggtgttggtggttgttttggttttatttataatgttaaatttttaataaattaatgagagtttaatatggttatttggatttagagtatatttttattgttgtagtagttgtgatttttagtgtaaaattttttagtttttaggtaaataaagaatagttttttttggggtatttaagggttgattgttgttttttttgattgtgtattagatagagtgttttgggttttggttaattttagtagaaaatttagtttttatatatatatttaaaattgaatttatggaatttgattgtggtgtatttatattgtgagtggagtaggtaaaaggatttttaaataaataaaatatgtatttatttatatgtgtattgaaata

SEQ ID NO: 761 - DNA, 2407 bp, Artificial Sequence
  chemically treated genomic DNA (Homo sapiens)
tattttaatgtatatataagtaaatatatattttgtttgtttaaagatttttttgtttattttatttataatgtaaatatattatagttaaattttataaatttagttttaaatgtatgtatgaaaattaggttttttattaaagttgattagagtttaaaatattttgtttaatatatagttaaaggaaatagtaattagtttttagatgttttgaaagaaattattttttgtttatttagaaattgaaagattttatattgagaattatagttgttatagtaatggaggtatgttttgaatttagatagttatattagatttttattgatttgttaaaaatttaatattgtaaatgaaattaaagtaattattaatattaattaggtaattaaatttttggttggaagaagttttaaaatttaagtttaatgttaatatttggtaagtttttatttattatttattaatatttgtttaaattatattgaaaatttagatagagggtaaagtattaagatttttaaaatttattaattagtttgtattttttgtttaaattatatataaaagttaattttaattgtaattataattttagtgtttgttttgttgttatagaagggtaagggttgataagagttagtatggataattaaatttgattttgtttaggggattggattaatatattgtgtattataatttagttttgaattgttgttttttttttatttttaggtttttggattaggtggtttattgttgggttagtaatttttttttttatgatttgtgtatttttagaaagggtgagggagatgtttgatttaaattgtatttgtttattatttaatggttttattgttatgtatttttataatttaggagggtatgtttttggtattttttttatttgttaagttttttgttggtgttgtagtaattatttatgtttttttgtttgaatatggttatgataaattgttatgttttattaaagtttagggtattttagttttgttttttagattattattattgtttttgtgtttttgtagtttttttatgtattagtttttagtttttttgaagaaaaaaaaaaggtaataataatagtaaaatggtaattttaaaaggaagtagatttttttggtgttaagattttgtttgttgaagattgggtttttggagttgtttttttttgtggggtggagaggagtattttttgttaaagttgggtggttagggatgtttttgattttttagttttgtgtgtgtgtggggttgggtattatggtattttgaggttggtgtttttaaatgttgggtggtttgttgggattagaattggttttggaagtgattggtttttttgttttttttttttttgtatatatgtttatttagtttttttatttttagggatgttgtggaagaatgaagtttttgtttagatggtatgtgttttattgggagtaatttttttttagtttgtggtaatggtggtatttttgtgttattttttggtttttgtgttttttttaatattgtggttattttttttttttttttgagtgaggtagtttttagagttatatttttggtgattttttttttgttatttggttgatttggtgtgtggttgtttgggggagtaagggagggaagggagtggtttattgaggtgtagtagtttgttttagatttttgtgttttgatataaagtgtttggttgggttggtgttatttgtttttatttggtttgtggggttggggaagttttttggttgtgattgtatttttttttgaagttaagtttttttttgttttggtttttttagttgtttgaggtattgtttggataaattttattgtgttttggttgggaaagtaaaagttggtgttgggggttggggggattggggagttgtgtttggttatttatttgggtgtttgggagtttttttggtttttttggagtgttgttggaggttgattataggtgttagtgttggagattagttggggtggtggtgggaatatagttagggagtgagtggggggtgtagattttttttaggtgttggttttagattttgttgttgtgagttgttgagttttttttgtggagggaataaagtttttggtgttggtttggtttggttgttttttttatattttgaagtagttttttggttttttgttgttttttgggtggagggtggttggtaggtggttaatggggattttgtaagtgggttggtggtgtggtttatttatttttgagttgttttgttaggttggtgttgtgggttttgtgtggtgtttgttgttttttttagttttgtgttttgggtttgttggtgtgttttattgtgtatattttgtatatatttatttgttt

SEQ ID NO: 762 - DNA, 3000 bp, Artificial Sequence
  chemically treated genomic DNA (Homo sapiens)
atatttaaattgtatatttggtttgtaatatattatatatttaaaagaattattatttttttgaatattattaatattaataatagtattatagtgattaagagtggatttaaataaaggttggtttgaaatttaggtttgttatttattagtaagtttttaaaaattttgagtttttagtttttttatatgtgaaatggagaaaataaatttgtaaaattaattaaatttgtttatttatatttttttttttagtgtatattaattggtattttttgttaggttagaatgtgtttttaattatgttttaaatttgttttgtgttaattttattgttagaattttttttattttgagaattagaaaaggaaatattatgtttggtaatgtttatattttttaaaataaatttgtaggaaagaatatttagtaagtgatgagagtagtaatgattgtttttattattttaaatttataatattattttttttagagttttttaagtattgtagataattttttatttattaaaaaataaattgtaattataagtatttagggttgatattgtttttgaattagatagtgtttatattagttgtataagattaatttaaagtagaggatgaaattttttttttgaattttttttagaatgtaatttagtgaatatattaaaattaaattttttttgaatgggagtaatttttatggattaatttgtaattttttagattatatttaaggtaatgtagaggttgttgtattataggttttgtgattagagattattggatttgtttttggaaaagttatttatgattttttgggttttggtttttttattttttatattggtttaataatgattattgtagagttgttatggaagttaaatgaatttatgtattataagtgattaatataatgattgatatttagtgatttattaataaattaaaatatttattattaatatgatagagaaggtgttgttaaaatagataataggtttttggaagaggtgattaaatggatgtaaaatttatggattgtttattttgtttatttttgttgtgttttttggttgtggtatatatatgtgtgggtataaaattgtaaattttatgtagttgtgtagtgtatgtgtagaaggtttagatatgaaatgttattttagtaatgtgtttagagaagttttgatgttgttttggaagtaagttgttgttgtttgatttttgggtgtttgggatggatgtttatatttgtatttagtagtattggaaggggtttaggttttttgtagtatagtttatttttagattgtttagttttttataatatatatttttatggaaaagggtatttttttttgttagaaaaagtgttttagtttggtttgggttggtttttattttatgttgttgtaagtaggtgaagttttttttgtttttttttttggggtaagtggaaaggagtttggtagggggtttgtagtggtttgtataggggaattgggtagtgagagagttttaggtaattttgggggttgttttatagaagtaggtggggattgatagtggttttttggtttagggaggagagtgtggttgtgggtttttttttttagtttggaggttgtagttgtttgagttggtttgggtgggggtggggtgggggtggtgtggagggtatggagattatggtggtgttatttgggatatttagggttttgaggttttgggtggtttttatgtgagattgtaaattatgataataggtagttatttgaggttaaataaaaatggagtgggttttttgtgtgttgttgttttttgtgtttttggtggttttttttgaggtttttggtggttttatgagtttgtagtagttggtggtgatgttgtttttgttttatttttttgtgtaagtgtgaggttgttggtagtgtggtgtatgttttggttgtttttggtttttgtgtaaaatttttattttgtttatgtgaagttgttgttgttttagagagggggaaagagttgtgggaaaagttggggagtgatgattgtggtggttgggtgtgtttttttattttttttttttttttttttttttttgttgtagtttggagttttggtttttttttttttttttttttttttggagttggtttttttttttgttttgttttttttttgtttgtgtatgttatttgttgtggggtggttgaaggggatgttttgtttttattagaggtatagtgtgaaggggaaattttgatattggaaggaatgagaataaatatttaattatggatgtattgaattgtggttgggatagatattttgggaatttgaggtggattgggtgatgaggtgagtgatttttttttttaatttttgttttagggtttttgggggagtttgagttgagagaatttttaaattttttgggaaagtgtgtgaggttttgttggggatgttgagtgttgggtattgaggatgtgtagttggatggtgtgtgggtgtttgtgtttttggggggtgtttggaggttgggtgttttatgtttgagggtttgggttgtttggattgtagtggtgttttttgttttagaagatgtttttaagttttaagggttttttttgagtttgtttgttttttttggggttggtgtggagtttgtgtgtaatggagtttatttagtagtttagtgtgtggtttttatttgtattttgtttttatttggtagaggtgtgagtattggggttttttttatattttttttatgatgtgtattattttttgatgattttttagatggtttaggtgtgaggatgttgatttagagttttttggagggttataggtgtttgggtttttttggtgttgggtgtgtgtgtattttaaaggtttgtgttttaatttttaggtattgattgggttttttaattgtggtgattttattttaatagtttttatgtggtgtggattgaatgtt

SEQ ID NO: 763 - DNA, 3000 bp, Artificial Sequence
  chemically treated genomic DNA (Homo sapiens)
gatatttagtttatgttatataaaaattattaaagtgggattgttgtagttgaaaagtttgattagtgtttggagattagaatgtgagtttttaaagtatatatgtatttggtattgggaaagtttaggtgtttgtgattttttgaaggattttgggttagtatttttgtgtttggattatttagggggttattagaaagtaatatatgttataagaaagatgtgggggagattttgatgtttgtgtttttgttaggtggaggtggggtgtaggtagaagttgtgtgttggattgttggatgaattttgttatgtgtaggttttgtgttgattttggaagggataggtaggtttggaagggatttttggggtttggggatgttttttagggtagagagtattgttgtggtttgagtggtttgggtttttaggtgtggggtatttggtttttaagtgttttttggggatgtaggtgtttatgtattgtttagttgtgtgtttttagtatttagtgtttggtgtttttggtggagttttgtgtatttttttggaaagtttgggggtttttttaatttaggtttttttgggagttttggggtgggggttggaagaaggggttatttattttgttgtttggtttgttttgggtttttgaagtgtttgttttagttgtggtttagtgtgtttgtaattaagtatttatttttgttttttttagtgttgaagttttttttttgtgttgtgtttttggtgaaaataggatattttttttggttattttataataaatagtgtatataagtgggggagaagtggggtggagggagaagttggttttgagggggaggaggaaaggagaggagttaaaattttggattgtgataggggggaaaggagaagaaaagaaaatgagagagtgtgtttagttgttgtagttgttattttttggttttttttgtagttttttttttttttttaaggtagtgataattttatgtggataggatggaagttttgtgtggaagttgggaatggttggagtgtgtgttgtgttgttggtagttttgtatttgtgtagggaggtggggtgggggtgatgttgttattggttattgtgggtttgtgaggttgttgggggttttgggggaggttgttagggatgtggggggtggtggtgtgtgggggatttattttgtttttatttgattttgggtgattgtttattgttatggtttgtgattttgtgtggggattgtttagggttttggggttttggatgttttgggtggtgttgttgtaatttttgtgttttttgtgttgtttttattttgtttttatttgggttgatttgagtggttgtagtttttaggttgaggggagggatttgtgattgtgtttttttttttgggttggagagttattgttgatttttatttgtttttgtggggtagtttttggaattgtttggaatttttttgttatttagtttttttgtgtaggttattgtgggttttttgttggatttttttttatttattttaagggaggagatagaagggattttgtttatttgtaataatgtgaaataaaaattaatttagattagattggggtgttttttttgatgggaggaaatatttttttttgtggagatatatgttatgaaggattaagtggtttggggataggttgtgttgtgaagggtttgggttttttttagtgttgttgggtgtaggtataggtatttgttttagatgtttaaaggttaggtagtaatgatttatttttaaggtggtgttagagtttttttaggtatattgttgaaatgatattttgtgtttaagttttttgtgtatgtattatgtgattatataggatttatgattttatatttatatgtgtgtatgttataattaggggatatagtaaaggtagatggaataaataatttataaattttgtatttatttaattattttttttaaaaatttattgtttattttagtggtattttttttgttatattgataataaatgttttaatttattgataaattattgagtgttaattattgtattggttatttatggtatatgagtttatttaatttttatgataattttatggtggttattattaagttggtataaaagatgaggaaattaaagtttaaagaattatgagtgatttttttaaagataaatttagtggtttttaattataaagtttatgatataataatttttatattattttaggtgtggtttaagagattatagattaatttgtagaaattatttttatttaaagaaagtttagttttaatatatttattaagttatgttttgaaaaaggtttagaaaaaagattttattttttattttaggttggttttatgtaattgatatgagtattgtttaatttaaaagtagtattaattttgaatatttatggttataatttattttttaatgagtggggaattatttataatgtttaagaggttttagaaaaggtggtgttgtaaatttaaaatgataaaggtagttgttgttgtttttattatttattgggtgtttttttttgtagatttattttggagggtgtaggtattgttaggtataatgtttttttttttggtttttaaggtagaaagggttttggtagtggggttggtataaagtggatttggagtatggttgagagtatattttggtttaatgaggaatgttagttaatatatattggagagaaaaatatgaatggatagatttaattaattttgtagatttattttttttattttatatgtgagaaaattaagggtttagaatttttagaagtttgttaataaatggtagatttgagttttaagttagtttttatttaagtttatttttagttattgtgatgttattattagtattaatggtatttagaaaaatagtaatttttttaaatatgtaatatattataagttaaatatgtaatttaaatgt

SEQ ID NO: 764 - DNA, 469 bp, Artificial Sequence
  chemically treated genomic DNA (Homo sapiens)
ttttttttttgttttgtgaagtgggtgtgtaagttttgggattgtagtggttttagggaatttttttttgtgatgttttggtgtgttagtttgttgtgtatattttgttgtggttttttttttgttgtttgtttattttttaggttttgttggggatttgggaaagagggaaaggtttttttggttagttgtgtggtgattttggggattttagggtgtttttttgtggttgatgtttggggtgtagtggttgttggggttggggttggtgggagtttgtgggattttttagaagagtggttggtgttgtgatttagtattggggtggagtggggtgggattatttttataaggtttggaggttgtgaggtttttgttggagttttgttgttgtagtttttgttattagtgagtatgtgtggtttgtgtttttggggatggggtttagagtttttagtatggggttaat

SEQ ID NO: 765 - DNA, 469 bp, Artificial Sequence
  chemically treated genomic DNA (Homo sapiens)
gttggttttatgttgggagttttgagttttatttttggggatgtgggttgtgtgtatttattggtggtgaagattgtggtggtgaaattttagtgaaggttttgtggtttttgagttttataagggtggttttgttttgttttgttttagtgttgagttatggtgttggttgtttttttggagggttttgtggatttttgttggttttagttttggtggttgttgtattttgggtgttggttgtagaggggtgttttggagtttttggagttgttgtgtagttggttggggaagttttttttttttttttaggtttttagtggggtttagggagtaaatagatagtaggaagaggattgtagtgaagtgtgtgtagtgaattggtgtgttgggatattgtggggggaaattttttaagattgttgtgattttggagtttgtatatttgttttatagggtaggggagagg

SEQ ID NO: 766 - DNA, 2442 bp, Artificial Sequence
  chemically treated genomic DNA (Homo sapiens)
tttttaatatgtttttgaaataaatttagtttaattttgaaagtataaatatggttaaaggtagtagtagtaaagattttattaatttgtaattttttattgagtttttgaaggtgttttataatgtttattaagaagttaaagttataaagttattgtttgtttgagaagtggattgttgttgtttttattgaaattaagaatgtttttatttttttttttagagagaatattagttttaaagtttttttttttttaagttaattgtttagatattgtttattaatttttttattatgttttgatttagattttgttagtaaagtttgaaatttaggttgtttaatgtttttggttttaattaaaattatttatttggatatggtatttatgatttgattaatatttatattataggagtttaatagttttaagtgaagaaattttgaataatgaatgatattttaatagttggggtttatggtttttttttttatgtatgagatgagttttgagtttttattaattatttttaaagtatgggttgtggttagtttaattattttttgtaagttaagttttgttgtttgtagggattttaggattgttgatatgagtgtattaatattgaaatgatgagttaggttgattatggttagaagatttttttgtatttttaatttagggtttatattgtggataaagattaggaggtagtttttataggttataaaagtttggttgtttaaggtaagagaataggttttaaagtttttggtttggttaaaaagttggttgtgtagatttttgttaatgtttaggattttttgttttgtgatatttggagataagttaatgttttgtaggatgtttatatgtttgggtagtattttttttagtaatatttttatgtattggtatataaagttttttttattttagttgtgattttttaaggttaagaggtggtagagtttgaggtttgtatgagtagttttttttttaggagtgaaggaggttatgggtaagttgttttgatgtagatgttttattagggttgtgtgtttgttgtttgttatatattgtttgtagtatttgtgtttagttttgtagtggtgtttgatgttgtgtttgtgggtagttatgatgaggtggtgatagattaggtatagggttttattgttttttggaggttttattattaaataatgttgggtttatttgggttggaaaattagagttttgttgatttttattttgttttttttgggtgttatttatattttgtgggaggttataagagtagggttaatgttagaaaggttgtaaggggagaggaggagtttgagaagtgttaagtattttttttgttttgtgttagattattttagtagaggtatataagtttggttttggtatttttgtttttattggttggatattttgtattttttgagtttttaaaaatgaattaataggaagagtggatagtgatttttaatgtgtaagtgtatatttttttaggtagtgggtagtagttgttttagggagggatgaagagatttagtaatttatagagttgagaaatttgattggtatttaagttgtttaattaatagttgttgttgaagggtggggttggatggtgtaagttatagttgaaggaagaatgtgagtatgaggtattgaggtgattggttgaaggtatttttgttgagtatttagatgtttttttggtttttttggtgttaaaatgttgtttgtggtaggggttatttggtggttggatgagatagtggtgaattgtattgtggtgggggaagttatttagtggttagttaatgttattaaagagatgattgagaattggtatggagggagttgagttgggtttatttaagggttatgatttaatgggttgtgttatttaatggtgtggatatgtttttttgtttgggtagaggtatgtatagtgtatgtttataatggtggaggttgttgggttttttgatgtgttagttaggttttttttttttttgtagattgtgtgtttttttattgtttttttttgagattttttaagggttgtttggagtgtaagtggaggaatatatgtagtgttgttttaatggtattgttaattaagtaaggaagttatttaatttaaaattatgtatgtagaatatgtgaagttaaaagatgtataaaagtttaagatggggagaaaaatttttttttagagggtattgtgttattgtttttttgttttttatttattttagaaattatttgtttatatttaaaggtataatttattttgagttttttttaaaataaattgtttgtagttttaggataggttgatgtattttgggtttgatttttgattattttattgttaaattagtgattttttttagtgtttttttgttttttattttg

SEQ ID NO: 767 - DNA, 2442 bp, Artificial Sequence
  chemically treated genomic DNA (Homo sapiens)
tgaaataaaggataggaaaatattaagaggggttattaatttaataatagggtaattagaagttaagtttaaagtgtattagtttgttttaaaattataaatgatttgttttgaaagaaatttaaaatgaattgtgtttttggatgtgaatagatgatttttggaatgaatgaaaagtaagaaaatagtaatatagtattttttgaaaaaaggtttttttttttattttaagtttttatatattttttaattttgtatgttttgtatatataattttaaattaagtggtttttttatttagttaatggtattattaagataatattatgtatatttttttatttatattttaaataatttttaaaaggttttgggggagagtggtaaagaaatatatggtttgtggaaaaggagaaggtttgattggtatgttagggaatttggtggtttttgttgttgtgggtatgtgttgtatatgtttttgtttgggtaaagaggtgtgtttgtgttattgagtgatgtggtttgttaagttgtagtttttaagtgagtttggtttgattttttttgtattagtttttaattatttttttgatagtattagttggttgttggataattttttttgttgtgatgtggtttattattgttttgtttagttgttgaataatttttgttatgaatgatattttggtgttagaagagttaaggaaatgtttagatgtttaatggaagtgtttttagttaattattttagtgttttgtgtttatgttttttttttagttgtagtttatgttatttagttttattttttagtggtagttattgattggatagtttgaatgttagttaaattttttaattttgtgggttgttgggtttttttgtttttttttgaagtggttattgtttgttatttagaaggatatgtgtttgtgtgttagagattgttgtttgttttttttattggtttgtttttaggagtttggggaatatgaaatatttagttaataggagtagagatgttggaattgggtttgtgtgtttttgttgaggtgatttggtgtagagtggaggaggtgtttggtgttttttaggttttttttttttttttgtggtttttttaatgttggttttgtttttgtggttttttgtagaatgtggatgatgtttaaaagaagtaagatggaagttgatgaggttttagttttttggtttgagtggatttagtgttatttggtggtggagtttttggagggtgatggggttttgtgtttggtttgttgttgttttattgtagttatttgtgaatgtgatgttaggtgttattatgaggttgagtatgaatattatgagtggtatgtggtggatggtgagtgtgtggttttggtggagtgtttgtgttagggtgatttgtttgtggttttttttatttttgaagagagagttgtttgtgtaggttttgggttttgttgttttttggttttgaagggttgtggttggggtgagggggattttgtatattagtgtatggaggtgttgttgagagaggtattgtttgagtatgtaagtgttttgtaaggtgttgatttatttttagatattataaggtagaggattttgagtattgataggaatttatgtaattagttttttaattgagttagggattttaaagtttatttttttgttttggatgattaggtttttgtggtttatgagaattattttttggtttttatttgtggtgtaggttttgagttggaggtgtaagaagattttttgattataattaatttgatttattattttagtgttggtgtgtttatgttggtaattttagagtttttgtagatagtagggtttagtttgtagagaatggttggattgattatgatttatattttgaggatgattggtgagaatttaggatttgttttatatatgagagaaaaggttgtaagttttaattgttggaatgttatttattatttaggatttttttatttggaattgttgagtttttatgatgtagatgttaattagattataaatattatatttgaatggatagttttgattaagattagaggtgttaggtgatttgaattttagattttattaatggaatttgaattagagtatggtgaaagggttaatggatgatgtttgaataattggtttaggagagggaaaattttaaaattaatattttttttaagaaaagaaatggaagtgtttttggttttagtaggggtaataatagtttattttttagataaataatggttttgtgattttggttttttggtggatattatggaatatttttgagaatttagtgaagaattatgagttagtaaagtttttgttgttgttgtttttgattatatttgtatttttgaagttaagttgaatttattttaaagatatattgagga

SEQ ID NO: 768 - DNA, 2347 bp, Artificial Sequence
  chemically treated genomic DNA (Homo sapiens)
tgagattgaggtattggtgggtgtggttgttattgttgtttttttgggtttggatggggttgtttgtggtggtagtgggggtggtggttttaatgggaaatttgggaaggttgtggggttggtattggttataaggtaggaatgtggggagtgtgtggaggtttttgtgttttttttttttttttttatttttagagtgggtggttggaagttgttatagagagggtatgtgttgtttttgggtttggtgttgggtgggtatgtgtagttggggaagttgtttatagtgattggggtggatgaggtatagggtgaattttgtggtggggtaaaggtgttggtagttttggttttgttgttgtaatttttgttttttagtagttgttgagtgtgggttgttaataaggtgtgattgagaggtaggataggtatgtggatgaaatttattattgtggtggttagtggggagtgtttgggtgttattggtgtgttttgttttattagggtgattttgggtgttgagaagtgggaattttttttggggattagggtgatgttttttgttgttgtttttggtgggatagttgtggttttttttttagttgttgtgttatttagagtttgaggtttgttttttagaagtggatttgtagattttttggatttagagttatttttttttttaatttttattgtagtggtttgtggagatggttttattggggttttggattagtgagggtttttagaggttgggagtagtagttgttgggttggtgataggttttggggtagtattttatgggtagttgttgttttggagttgtttttaattttgtatttggattggtttatgagtggggataatatttgttgggtggtgggggtagttggtggatttttgggaagtttggggttaaataggtattaagagttggtgattttgtaggtgggagggttgggttggttttgtttgggatttgagggtgttaatagagtgtttaagatattgtttagtagtttgttgtttttttttgggggattagaattgttgtttttagtattttttgtagttttagttttggaatatgtgttttttatgtttgatagtgattgttggttttgtgtttttttgttggaggggttttgtttttggtagggttgagggaagagtagtttgtttagggagataggtatggttgaaattttaggtaaggtgtttgaggtttggttttttgggaatggatttgtggttgggtgatatagtagtggggatttgattttgggggagggtgggttgtttgttatgtggggagtttggggattttttgtttttagtttagttatgatgattggattttttttttttttttttttgtttttaggaggagggaaaagggaaggaggagggggttttgggaatataggggtagagggaggagaaagtgggtgttgaatgtggttggattggagggatttttattttttgggttgggggtgggggagggtggtgttggttagtttttgtttttggtttttattttgttgttaggggaattgtggttgttgtttgttttagtgagtggtaagtggggagtgtaagaaaaagtagtaattgttaggagattttgttttttaatttggggagttttttaagagagttttttaatttttgtttgaggattggagatgtagagtatttataagtttggtatttgagtggttgtggttgtgatggtaatttagtgatatgtggtttttttattttttgattttttttttggtattaaatttgtgtatgttgtgaagtttttagttttttgttgagttttattgtttttttattaaaattttggggttagttggattttttggtatagtttatttttaggaagggttggatttttgttggttttgtattgtgggtgatagttatttttgaagattttagattttagtagtgtgggagtattagttgttttgggttgtagattttatttaaatgataagtgaagttagtttttattgagaatgttatttatatgtataaatataataaggtttattttgattagtgatagttgtggattggttagatagttttttaataatgtttttttttttagggaggttttgtttaaagtttttttttattttaattattggtaggatttgaaattttggagttggtatttttatttgttattttgaatgttatttttaatagtaggttttttgggatggaattttataagtatattatgttttgttttgtaaattaagaattatgttttatttaattggaaaaatgaatagattttattagaagtagaatttttgttattat

SEQ ID NO: 769 - DNA, 2347 bp, Artificial Sequence
  chemically treated genomic DNA (Homo sapiens)
atggtgataaaaattttatttttgatagaatttatttatttttttaattagatagggtataatttttaatttgtaaaataaaatgtaatatgtttatgaggttttattttaaagaatttgttattgagagtagtatttagaataatgggtggaaatgttaattttagagttttagattttattggtaattggggtagggaggggttttgggtggggtttttttagaggaggaggtgttgttagaaagttgtttggttagtttatagttgttattaattggggtaagttttgttgtatttgtgtgtgtgggtggtatttttaatgagaattagttttatttgttatttgagtgaaatttataatttgaggtggttagtgtttttgtattattgggatttgagatttttggagatgattgttgtttgtagtatggagttagtagaagtttgattttttttgggaatgggttgtattgagaggtttgattagttttagggttttagtgagggggtagtggaatttagtgagggattgagagttttatagtatgtatgagtttgatgttagagaaaaagttgggagataaaggagttgtgtgttattaaattgttgttgtagttgtagttatttaagtgttggatttgtgagtattttgtgtttttagtttttggatagaagttggagaatttttttggagaattttttgagttaggagatgagattttttaataattattatttttttttgtgttttttatttgttgtttgttgggataaatgatagttatagtttttttgatgataggatggaggttaagggtaggagttgattagtgttgtttttttttgtttttgatttaggaggtggagatttttttggtttagttatatttaatatttatttttttttttttttgtttttatatttttgaaattttttttttttttttttttttttttttttggagatgggggaggagaaaaggggagtttagttgttatgattgagttgaaggtaaagggtttttgggttttttatgtggtgggtggtttgtttttttttgaggttggatttttattgttgtgttgtttagttgtaggtttgtttttggggagttagattttggatattttgtttgaagttttggttatatttatttttttggatgggttattttttttttggttttgttagggataggatttttttgatgaaaagatgtaggattagtagttgttgttggatgtggagggtgtatattttagagttgaagttataaggggtgttggaggtagtagttttagttttttagaaaaggatagtggattgttggatagtgttttggatattttgttggtgtttttaggttttgggtagagttaatttagtttttttgtttgtgaggttattagtttttggtgtttgtttggttttgaattttttgaagatttattggttgtttttgttatttagtgggtgttgtttttgtttatgagttggtttgggtgtaaggttggagatagttttgggatggtagttgtttataaagtgttgttttggggtttgttattagtttggtagttgttgtttttggtttttgagagtttttattggtttggggttttagtgaagttgtttttgtaggttgttgtggtggaggttgaggaggaggatggttttgagtttgaggagtttgtgggtttgtttttgaagggtaaattttgggttttgggtggtgtggtggttggaggaggagttgtggttgttttgttgggggtggtagtaggaggtgttgttttggtttttaaggaagatttttgttttttagtgtttagggttgttttggtggagtaggatgtgttgatggtgtttgggtgttttttgttggttattatggtgatggattttatttatgtgtttattttgttttttaattatgttttattggtagtttgtatttggtagttgttggaagatgaaagttatgatggtggggttggggttgttagtgtttttgttttgttgtggagtttattttgtgttttgtttattttggttgttgtaggtgatttttttgattgtgtgtatttgtttgatgttgagtttaaggatgatgtgtattttttttatagtgatttttagttgtttgttttaaagataaaggaggaggaggaaggtgtggaggtttttgtgtgttttttgtgtttttattttgtggttggtgttaattttgtagtttttttggattttttgttggggttattgtttttgttgttgttgtgagtgattttatttagatttggggaagtggtggtgatggttgtatttgttagtgttttagttttg

SEQ ID NO: 770 - DNA, 2353 bp, Artificial Sequence
  chemically treated genomic DNA (Homo sapiens)
tatagttggataatagaatttttaagaagtatttttttatatttttttatttatgattttttttttatttgttttattgatgtttaaaattttgtttttggagtttatttagtttatgattttgattttggttaatattaaaatatttaggatatgggggaggggaagttgttattaattttagtttagttagttaatatagtgagttgtttttatttattatttaataagtatttattgattgtatattgtatattaggtttgtattaagttttggtgttataaaaatgaatgaagtttggtatttatttttaatattgttgtagttatatataggagaatgtaagagattattatgaaataatgtagtaaatgtataatagggaattttagataagtatagtagagaagtaattagttttgttttaggtttttttttgagattgatttggttggaagggagtaggttttgttaaatgaagaagttgtgggaagataggaggataagaataggttttatgaagagattttagagtagagttgtgtatttttttttttttttgttttttttgttttgttatttaggttgaagtatagtggttagtttatggtttattgtagttttgattttttaggtttaagtgatttttttgttttagttttttaagtaattgggattataggtatgtattattatattaggttattgttttatattttttgtagagatggggttttattatgttgtttaggttggttttaaatttttgggtttaagtaatttgtttatgttaatttttttaaatgttgggattataggtgtgagttattgtgttaggtttgagtaattttaattataggattttaaaaagaaattttttgtgttatttattaaataatattttttattaatttggtagtaaatattttgttaatagtatttaatttttaggtaggtattgtgtttatatatatatttatttttttttttttgattgtttttttgtttaatgggtagttattttttttggtatttagtagaatgagttgttgtagtttatataaaaagaatggagattagagtattttttgtgttattaatgtgtttgagaaatttgtagtgttattattattatatattatttttattttattgaatattttattttttggttttgtgtgggttgagaggattgttgtatgtatgtttgtatgtatgtatgtaatttatagtttttttttgtttgaatatgttggaggttttttggaagttgtgtagataatagtaattttagtttgaattattttttttaattgtggataagttgttaagaggtttgagtaggagaggagtgttgttgaggtggggtggggtggggtgtggagttgggttggtagtgggtgtggtggtgttgtttaggtgagttattgttgtttttgtttagatatggttgtttttatatttaggtttttgtgttttttgtttgtttgttttttttttatgtattttttaggataattgtgattttaggtaagtaaggtggggtagtagggttggtgattttttttttttagggaaatttataaatattgttatttgagttgatttgagatggtgaataaaatggatttaggtttattttggggttgtttttaaagatgggttgttgggttgagtattgttgttttttattttttatgttggtagtatttttagtttttaattttttgagtattaggaatattgtagagggagtaaaattatttaattatataaggtaagaatatgaagaagttatgtggtttggaggttttggtggtagaggggtgtaattgtgatttatggaggagaaaatatttttgaggatatttttaggtttattttggaatttagaatgaattttgtaatgttagttttagaaagggtgtggtatttgtaaattggggaaagttgagaagtattggtgggtttggttggtttttttttttggttgatgttgtaaggttgagatttaggtatatggattgtttttttttttggtatttttaagtattagattgttgtttatttatttgtaattgtatttttttaagtggaaattattttttttttagttttttgggttttagtataattttaaataagttatatattttagatgtatatttttggatttataaattgtaatagttgtttgtagttttttatttatatgttgtatatttttttttatggttttatttaagtatattatattaaaaattaatatgttaggttattttagagatttgtaattagatttttagagttgggggtttttagatatattttagtttagtttttttattttgt

SEQ ID NO: 771 - DNA, 2353 bp, Artificial Sequence
  chemically treated genomic DNA (Homo sapiens)
atagaatgagggggttgggttgaaatatgtttaagagtttttagttttgaggatttggttataagtttttggaatagtttggtatgttggtttttagtatgatatgtttaaatgaagttataagaaaaagtgtatagtatatgagtaagaaattataagtagttattataatttataagtttaagaatatgtatttgaaatgtgtaatttgtttaaagttatgttgaaatttagaaaattgaagggagaataatttttgtttagaagaatgtagttgtaagtagatgaatagtgatttgatgtttaaaaatgttaaaaagaagggtagtttatatgtttaaattttagttttataatgttagttagggagaagagttagttagatttattaatattttttaattttttttagtttgtgggtattatattttttttgaaattagtattgtaaaatttattttgagttttaaagtaggtttgaaaatgtttttagaagtatttttttttttgtgaattatggttgtatttttttattattaaaatttttgagttatgtgatttttttatatttttattttgtatggttaagtgattttattttttttgtagtgtttttggtgtttaaagggttgggagttggaaatattgttaatatgggggatgagaggtgatagtatttaatttaatagtttgtttttgaaaatagttttaaaatggatttaagtttattttgtttattattttaaattagtttaaataatgatatttatgaatttttttgaaaaaaggaagttattagttttgttattttattttgtttatttggagttatagttattttggaaaatgtgtggaaaaggaataggtaagtgaggagtataaagatttggatgtggaggtgattgtgtttgggtagaagtagtggtggtttatttgggtagtattgttatgtttattgttagtttagttttatgttttgttttgttttgttttggtggtattttttttttatttaagttttttggtagtttgtttataattgaaagaaatgatttaggttgaagttattgttgtttgtatagtttttaaaaggtttttaatatgtttgggtaggaaggggttgtgagttatatgtatatgtatagatatgtgtatggtaatttttttggtttatgtaggattggaaggtgaaatatttgatgaaataaaagtaatgtgtgatgatagtaatattataaattttttagatatgttggtggtataaaaagtattttgatttttattttttttgtgtaaattgtagtagtttattttgttagatgttaagagaggtagttgtttattaaatagaaagataattaaaaaagaaggaatggatatatgtataaatatagtgtttatttaaaaattaggtattattagtaaaatatttattattaaattggtaggagatattgtttaatgggtggtgtaggaagtttttttttaaaattttgtgattaggattatttaggtttggtgtggtggtttatgtttgtaattttagtatttggggaggttgatgtgagtggattgtttgagtttaggagtttgagattaatttgggtaatatggtgagattttatttttataaaaaatgtaaaataatagtttagtgtggtgatgtatgtttgtggttttagttatttggaaagttgagatgagaggattatttgagtttgggaggttaaagttgtagtgagttgtgagttaattattgtattttagtttgggtgatagagtaaaagaaataaaaagaaaaaggagtatgtagttttgttttgaaatttttttgtggagtttgtttttgtttttttgtttttttatagtttttttatttggtgggatttatttttttttagttgaattagttttaggaaaggatttgaaatggagttggttgtttttttgttgtgtttatttagaattttttattgtatatttattatattgttttataataattttttatatttttttatatgtgattataataatgttaaaggtaagtgttaaattttatttatttttataatattaaagtttggtatagatttgatgtatagtatgtagttaataagtgtttgttgagtaatgaataagagtaatttgttatattaattgattaaattaagattgataatagtttttttttttttatgttttgggtattttaatgttaattagaattaaagttataaattaagtgaattttaaaaatagaattttaggtattagtggagtaagtggagggaaggttataggtgaggaggtgtggaaggatgttttttaaaaattttattatttagttgta

SEQ ID NO: 772 - DNA, 2415 bp, Artificial Sequence
  chemically treated genomic DNA (Homo sapiens)
taaggatgtgggaataggtaagtaatttttatattggatttttattttagggagttgggttttagttatagttttgagttgtgtgattttgggtaggttttatttttttggggttttgttttattagttgaatagtatgaggatgagttatagttaatatttgttttatgatatttatttagtattatataagtgttatttttgtttttttagttaatattgatgtgggtagtattatatgtttattttatagatgaggaaattgaagtttgaagaagttaaatatttattttagaatatatagttggtaagtggtagatttggaattggaatttagtttagtttgattttttaatttatgtttttgattattatattgtttttttaagtttagatttgaaattttattttttgtgtggttgtgtgtttgggataggggtaattaatttttgattattttatatgttgtatagaatttggagaggattttttaaagtaaatgaattttgaaagttggattgtagagtaaatgagtgtagttaatttagttaggggtttgtaagagggagaaagagaaaaagattgtggaatggaaagttttttaatttaagttttttttaaggggtagttattttttgttttatagtttagggtttgtatgtgttttttttggagtggaaaaatatataagttataaggaatttaatagatagaaaggtgtatagaggaatttaaagtgtgggttggggggtgaggtggtgggtgggaggtgagtgggtgtaggtggaatattgttttttaagttaagttgttgtaaataaaaaggtgtaaagggagagaagttggtgtttaatgtgagttaggagtagtgttttggttttttttttgtttattttaaaagtattttttgtattgtttttaaggtgagaaataggaaagaaaatgttggtttgtgtgtttgttgtttgtttttttggttgtttgtttttgtagggttgttgggagtttttaagttttgtgagaattttgggagttggtgatgttagattagttgggttatttgaaggttagtagtttgggtagggtttattgaaagtttatttgtatatattaggtaatttaattttttattttgtgtgatagaagtagtaggaagtgagttgtttagaggtaggagggtttattttttgttaaaggggggattagaatttttttatgtgagttgtttgaggattgggatgttgagaatgtgagtgatttgagtagggtttgtttgggtattgttggggtaggatttggaatgtatttggaaggttttttgtaagtatttatttggaaggagaatttgggatttttttgggaattttttgttttggttggattggttgagtaagtttggaaaatggtaaatgattatttggattaattataggtttttagttggtttgtttgttataatttatgatttggggttgggaaaaagattaatagtttatgtgttaaaaaaggggtagagtttgatggagttgggtggatttttttatgttatttgtttttatatttagaggataagtatttttgtagatatttagtgtaagggagattatgtttgattgtatggatgttttgttagtgagttttgggtaaattttggatttttatattgtgagtttgtttttttgtatgttttaggagaaagtttttaaagtatgttttagtggattgatttaaattgaatggtagtattggtatattgtttaatgtaggtttatttttttttttttttttattaagaaaaaaaaaattgttttttttgtatgtaataaagatgttggaaataaattgtattggtagtaagataaaggatttaatgatttaatgttgaaggggtgtgatatgttggtatgtatattgattttttttgttgaaaattttttgttagatgttttttttttaaataattttttttgtttttatgtttttttttttattaattttatagttttttgaaaatagtttttaaaatatgtataaaaatgtggggggtggggagtagagggtgattataagattttaaaatattttttaagtagggtaatttgatatattttgtagtttttattaaaatgtatgtagagtggaatttaattttgttgttttttggattagttattagttgtataggtttttttattttttgtgtattttaatagtttaaagtaattaaaatatgatattttttttgaaaggaatttagtttaattaaggtggttgttgtttttgaagtttataaattattagtttaagttgttgtttttaatgttttttttgttaaggaaaggtaatattttttagtattgattttgttgttatttttttaagttattttgttggtttaagaagttgttgttttgt

SEQ ID NO: 773 - DNA, 2415 bp, Artificial Sequence
  chemically treated genomic DNA (Homo sapiens)
gtaaaatagtaattttttagattaataaagtgatttggaaaggtggtagtagggttaatgttaagaaatattgtttttttttagtaaggaaaatattggaagtggtagtttgaattggtggtttatgaattttgggagtagtagttattttaattaaattaaattttttttaaggaaaatgttatattttaattattttggattgttggaatatataaggggtggggggatttatataattagtagttaatttaaagaatagtaaagttaaattttattttgtatatattttagtaaaaattgtaaaatgtgttaaattgttttatttgaagaatgttttaaagttttgtggttattttttattttttattttttatatttttatgtatattttaaaaattgtttttaagagattataaggttggtaaggagaggagtatgggggtgggaggggttatttgggaagaaaatatttaataggaaatttttagtaaagggaattaatatgtatgttagtatattatatttttttagtattaaattattaaattttttgttttgttattaatgtagtttatttttaatgtttttattgtatgtaagagagataatttttttttttttggtagaagaagggaaaaaaataaatttatattgagtagtgtgttgatgttgttatttggtttgggttaatttattgaagtatgttttgagagtttttttttggagtatgtaggaagatggatttgtagtgtagaaatttaggatttgtttaggatttattgatagaatatttatatagttaaatatgattttttttgtattgaatgtttgtaaaagtgtttattttttaggtgtggaggtaaatggtatagaaaagtttatttaattttattaaattttgttttttttttggtatgtaggttgttggttttttttttagttttgaattatgaattatgatagataagttagttaaaagtttgtaattgatttaaatgattatttattattttttaggtttgtttggttaatttagttggggtggggggtttttagaaagattttaagttttttttttaagtaaatgtttgtaaaaagttttttgaatgtgttttggattttattttgatggtgtttagataaattttgtttggattgtttgtgtttttggtattttagtttttaaatagtttgtatgggggaattttggttttttttttggtaaagaatagatttttttgtttttgaatagtttattttttattatttttgttatatagaatgaaagattgaattgtttaatatatgtgagtgaatttttggtgaattttatttgggttgttaatttttaaatgatttaattagtttgatattattaatttttaggatttttatagagtttaaaaatttttagtagttttgtaaaagtagatagttagagaggtaggtagtgagtgtataagttggtgtttttttttttattttttattttaaaaataatataagaagtgtttttaaaatgagtaggggaggagttgggatgttgtttttggtttatgttgagtattaatttttttttttttatgtttttttatttgtggtggtttagtttggaaaatggtgttttgtttgtgtttgtttgttttttgtttattgttttgttttttagtttatattttaaatttttttgtgtgtttttttgtttgttaaattttttataatttatgtatttttttattttagaaaaagtatatgtaagttttaaattgtagaatagagaatggttattttttgggaaaggtttgggttgggaaattttttattttatagttttttttttttttttttttttgtaagtttttggttgaattgattgtatttgtttgttttgtaatttagtttttgagatttatttattttgaaaaattttttttaggttttatgtagtatatagagtagttaggaattggttatttttgttttaaatatatagttatatagaaaatgagattttagatttggatttgaaaaaatagtatagtggttaagagtatgggttggggaattaaattgaattagattttaattttaggtttgttatttattagttgtgtgttttgggataagtatttaatttttttaggttttagtttttttatttgtaaaatgggtatataatattatttatgttagtgttaattgggaggatagaaataatatttgtatggtgttgggtaaatattatggaataaatgttagttgtgatttatttttatattgtttaattggtgaaataaaattttggggagatgagatttatttaaggttatatagtttagagttgtgattagaatttagttttttaggatgaaagtttaatgtgaaaattatttgtttgtttttatatttttg

SEQ ID NO: 774 - DNA, 5001 bp, Artificial Sequence
  chemically treated genomic DNA (Homo sapiens)
ttaggaagtttatttatgggaaatttatatttatggtgttttgatgttgtagaggatattttgagttggttggagtaatttgggatataggttaattgattgtaatttaatttttgaggttatttagtattttttatagtggttatttaaaaaaaaggtagttaggtgtggtggtttaagtttatatagattttagaattttggaaggttgaggtgggaggattatttgagttaaggagtttgaggttagtttgggtaatatgaagaaattttgtttttataaaaaataaaaaaaattagttaggtatggtggtatgtatttgtagttttagttttttgggaggttgaggtggaagaatgatatgagtttagtaagttgttgtaattagttgtgattatgttgttgtattttagtttgggtgataaaaagaaaaagaaaatggagtttgtttattgggtgtggtagataaggtaaatttttttttattttttatattttataattttggatgtgtttatagttatggtagtgttttgtaatgatgtagttgatgataggtgtgatgttggagatttttttatttgattgttgttattagttttattagtttttaatgtttggtgtttgttttaaagggtatgttttaggagttgttttaaatttttaaagtattattttttatataaataagaagtgtaagtaagtagtttgagtttagttttttaataggaatattttattattattagattaagtttttttattataatgattgatttgtttttgaattttgtggatttattttttaaaatgttttttttttttagtttttatagttagtgttttaaaagtgatttgtagtattttttgttgagatgaatgtattagttttttaattagtttgtattttttttatttttttaagttagtgttagattattttgtttgaaaaattatttttagtgtgttttattttagtagaaatgttttttagtttttaattaataattatattaaatttttgtttttgtttgtgttttaagggtatttataggttgggtgttgtggtttttatttgtaattttagtattttggaaggttgaggtgggtagattatttgaggttaggtgtttgagattattttgattaatatagtgaaattttgtttttattaaaaatataaaaaaaaaaaaaatagtggggtgtggaggtgtatgtttgtaattttagttatttgggaggttgaggtaggagaattgtttgaatttgggaggtagaggttttagtgagttgatattgtgatatagtattttagtttgagtgatagagtgaggttgtgttttaaaaataaataaataataaattaaaaaaataagagtatttataatttggttttagtttgaatttttttttttattttaatatgtagttttagttatatttttttgatgtttgtaaataagtttagttttttttgttgtgaagttaagtttaggtggtttttttttgtttgattgtttttttattttatttattggaagtttagttattttttggagggttgtatgggggttgtaagaagtaatggaaatggtttagtatttgttattttttattatattttttttaataaaggggtaatttttgttaatggtagtgtagattttttaatttttatatatggaagatttatattatttaggattgttgtttaattgttgagagagtatttgatatttaatagtttattaggttataagatagtgtaggaaagaattttttgttgtttttttatgttattttgaatagttggtttatagagttattgtaaatatataaaatatgattgttagggtttagtagtgaggaaggtgggaattagttttgatttagttaattgtgtttaggagaagttgtttaattttaaaggattttattattattagaattaataatattaattttaggggtaaaaataaagataaatgtgtgtaaattttgtttgtagttttgggtatgttgtgggtgtttaagaattgtttttaggtagttggtggggataaagtttgtgtgttttttgttttggaataggttttaaggttggtttatttgtaaagtaagggtatggtgtaagagtattgaatatgggttggaagggtgttggttttatttttagtttataggttggttgggtggtgttgattagtagttaggttttgttttttttaggaatggttatgggggttttgggagggtatgaatgtttttttgtagtgaggtttttggattttgtggttttttggtagtgtaattaaaatttaggggtaggtgttgtagttgtttagtgtagttagatttttgttggtatttttaggggtggagttggaggtagggtttttgggttgtattaattttatgggggtaggggttgtttttttttggttgtgtgttatttaagtatggtagataggtagtgaggttgttgaggttgaggttagtttgtagtttttttttttttgtgttttgggtgtggggtgtatggtaagtgtgggtgggtgggataggtatgtagggtatttttggggttgggtgtggtgggtgtggggtggggtttgtggggggggggggtggggtggtggtgtttttgtggtgtagttggggttgtggttttgttttttgtgtttttttaaggtttgtgggtggtgtaggagtggtatttgtggttgtggtggttttggtagtggttttagtagattggtggtattagtggtagtattagtattagtagtatgttgagttgggtagtgtgtgggtgagaagaaaggggatttggttatggttttaagggtgaaggggtttgtggtgggtagggtttttgtggtaatggtgatagtggttgtattgggtttggtgggattggggtatttgtaggtggtttttttgggagtgtttggtgtggtggttggagtggggatttgtagggaggggatgtggggatttgggggatgttgtgtgttgttgttttttggtagtttagtttgtgtagatggttttgtggtgttgattgattgggttgtgtttttttgtttttagtattagtaggtagttggttttggttttggggtatttgggttttaggtagaagtatagtttttttgatttgttttatgattatggtgttttggaattttatattaatgtgtagattatgtagttgtattatagtaagtattatgtggtttatgtgaataatttgaatgttattgaggagaagtattaggaggtgttggttaagggtaggttttaggttgagtggtgggaggtagtttttggtagaggtgattttagggagttaggttttatatggatgggtttttttgtggaggagaatttgttttgtatttgtattggttttgagttttttaggtatgatagttttttttttaaatatatggtttattttattgtagaaggagtgttttgatgggtttgaatatatttttgttattttagggaatttggggttttgtgaaggagtttgttttattgttgtgagttatattttgttatatatattgttagtattggtgaattgtagggtttgaaaagaaagttttattgtgttatttgttttttttgtaaattgaaattgtttttgttgtataatgtgttttggggaaatgtttggttttttaggtaggtgtgttagttgtttgtaggagggttgagagtgtttgtttattggtggttagatattattgggtttgtaggtgtttttgagtgttagggttattttttgatagaagtgggagtggtgttttattgttaggttatattgaaggtgggagataggaggatattattttgtgttaggaattatggtttttgttatttttttgagagtaaatggggttgggattttagtttaggatttggagattttttgtatttttagttattttgtaggtgaaattttattgagtttatttgattttaggtgggagaggaggaggtatattgttgtggtgtgtgttattaaaaaagtagtaatttaattgtggaatagtttaggatttttagatttgatattttttttgattttttttaggggttaaagtttataaggaaaatagttttttagtgggaaattgaaataggtttgtttttatttattatttatttatatttgtaatgtaattaaaatatatgttgttaatttttttttttttttttaagagtttggttgataaaattaggggtatgtggattttttgagtttgtgttttttgggggtgtgtatgggaatgttatgttttaatgttttttataaaatagtattgtttttttaatttatttgttagtggtttgtataaggaagataattgatagttatgttttttagattttttgtattgtttggtaagttatgtagtaaaaaatgtttatttttttttaaatgttttgaattttggggttatgaaatttgttgagtaatttttagatagttatattttgttgattggaggtatttagtggaaaaatgtagtattttagtttgattgtgtttgaagtaaatgattaaaagaggaggaagttattatattttggaagatttatttgagatagatgaattttgaattatgggaaaaggttttgtgatttaggaaataataaatttgggaaatatgtaatggggagagattggggaatattttagttgtgaaagtattttttgtaaggtaatatttgatattaggaatttttttttttagtattttaaaaataatttaattttagttttttatttgtggaattagagttttatttatgtaatataatttattggaaaaaagttttttattgtattgtattatattgtttataagtgattgagtatttgtagagtttttttttatttaaatatattttaaaaattattaaaaagatttttatgtttgaaaatttggggaaaaaagataaaataatgttataattttatt

SEQ ID NO: 775 - DNA, 5001 bp, Artificial Sequence
  chemically treated genomic DNA (Homo sapiens)
gatgagattatgatattgttttattttttttttttaagtttttaaatatgaaaatttttttaataatttttaaaatatgtttaagtaaaagaaagttttgtaggtatttaattatttataaataatatagtataatataataaaaagtttttttttagtgggttgtattatataagtaaggttttgattttataagtaaaggattgaaattaagttgtttttaaaatattgaagagaaaggtttttggtgttagatgttgttttataggaagtatttttataattggggtattttttagtttttttttattatatgttttttaaatttgttattttttaaattatggggtttttttttgtaatttaaggtttgtttgttttaagtaaattttttagaatgtggtaattttttttttttttaattatttattttaaatataattaggttgaaatattgtatttttttattagatgtttttagttaataagatgtgattgtttaaaaattatttaataaattttataattttgaaatttaaaatatttaaggaaaagtaaatattttttattatgtagtttattaagtaatatagagagtttaaaaaatatgattattgattattttttttgtgtaaattattaatgaataaattaaaaagataatattattttgtaaaaaatgttaaaatataatatttttatatatatttttaaaaggtatagatttaaaaagtttatatatttttggttttattaattgagtttttgagaaaaaaaaaaaaagttaataatatatattttaattgtattataaatatgagtaaatagtaaataaaaataagtttgttttagttttttattaaagggttattttttttgtgaattttgatttttaagggaaattaagaaaagtattaagtttaaagattttgaattgttttatagttaggttattgtttttttggtaatgtatattataatggtgtgttttttttttttttatttgaagttaagtgggtttagtgaagttttatttgtagggtagttggggatgtagggagtttttaagttttaggttggagttttgattttgtttgtttttaggaagatgataaggattatggtttttagtatggagtagtgtttttttgttttttatttttagtgtgatttggtagtaagatattatttttatttttattaggaggtgattttgatatttagagatatttgtggatttgatgatgtttggttattagtggataggtgtttttagtttttttgtaaatggttggtatatttatttgagagattaaatatttttttaaagtatattatataataagaataattttaatttgtaaaaaaaatgagtgatatagtagagttttttttttaggttttataatttattagtgttggtaatatgtgtaatggaatgtggtttataatagtaaggtaagtttttttgtaggattttaagttttttgagatgatagaagtgtgtttaaatttattgaggtattttttttataatgaggtagattatgtgtttaaaagagagattattgtgtttggaaaatttggaattggtataaatatgaagtgagtttttttttatggagaggtttgtttgtatggggtttggttttttggggttgtttttgttggggattgttttttgttgtttagtttggaatttatttttggttaatgttttttggtatttttttttggtgatgtttaggttgtttatgtaggttgtgtggtgtttgttgtggtgtagttgtatgatttgtgtgttgatgtgaggttttagggtgttgtagttgtagggtaggttggggaggttgtgtttttgtttggagtttagatattttaaaattggagttagttgtttgttggtgttgaagatgagaaagtatagtttggttagttagtgttgtgggattgtttatgtaggttgggttgttgaggaatggtagtgtgtggtgttttttgagtttttgtgttttttttttgtggatttttgttttagttgttgtgttgggtatttttgggagaattgtttgtaggtgttttggttttgttaggtttggtgtggttattgttgttattgttgtggaggttttgtttgttgtgagtttttttgtttttggggttgtgattgggttttttttttttttatttgtatattgtttggtttaatatgttgttagtgttggtgttattgttgatgttgttgatttgttgaagttgttgttgaagttattatagttatgagtgttgtttttgtgttgtttgtgggttttaagaaagtgtggggagtagggttgtgattttagttgtgttgtaagggtattgttgttttgttttttttttttgtgggttttgttttgtgtttgttgtgtttaattttgggggtgttttgtgtgtttgttttgtttgtttgtgtttgttgtatattttgtgtttagggtatgggagaaaggaggttgtaggttagttttggttttggtaattttgttgtttgtttgttgtatttgagtggtgtgtggttgaagggaggtggtttttgtttttgtggagttggtatggtttgaaggttttgtttttggttttgtttttgagggtgttggtggggatttggttgtattaggtggttgtggtgtttgtttttgagttttggttgtgttgttggggggttgtggggtttagaggttttattgtaaaaagatatttatatttttttagggtttttgtggttgtttttagggaagatggggtttagttgttggttagtgttgtttagttggtttatgagttgagggtagagttagtgtttttttaatttgtatttagtatttttgtgttgtatttttgttttgtaagtaagttgattttgggatttattttaggataggaggtatatagattttgtttttattggttgtttaagaatagtttttggatatttatgatgtgtttgagattgtaggtaggatttgtatatatttatttttatttttatttttagggttggtattattgattttagtaatagtgaaattttttgaggttaagtagttttttttgggtatagttaattgagttaggattagtttttattttttttattattaagttttggtagttatgttttgtgtgtttatagtaattttgtgaattaattgtttaggataatataaaaggataatagaggatttttttttgtgttgttttgtagtttagtaagttgttaagtattaagtgtttttttaatagttaaataataattttgaatggtgtgaattttttatgtgtagaggttaggaaatttatattgttattggtgggagttgtttttttattgaaaagaatatgatggaaggtagtaggtgttgaattgtttttgttgttttttgtaatttttgtatagttttttgaaggatgattaggtttttggtaagtggaatgggaaaatagttaggtgaagaggaattatttgaatttggttttataataggaagggttgggtttgtttatagatgttagaagaatgtaattagggttatgtgttggggtgaaaaaggaaatttaggttgggattaggttatagatatttttatttttttaatttattatttatttatttttgagatatagttttgttttgttgtttaggttggagtattgtgttgtgatgttggtttattggaatttttgttttttgggtttaagtgatttttttgttttagttttttgagtagttggaattataggtgtgtatttttatgttttattattttttttttttttgtatttttggtagagatggggttttattatgttggttaggatggttttgaatgtttgattttaagtgatttgtttgttttggttttttaaagtgttgggattataggtaggagttatggtgtttggtttatagatatttttaaaatgtagataagagtaggggtttgatgtgattgttaattggaagttgagaaatatttttgttgaggtgagatatattgaaagtggttttttaggtaaggtggtttggtattgatttggggggatgaagggagtgtaggttagttaggaagttggtatatttgttttagtaggaggtattgtaggttatttttagggtattagttatgagaattggaagaaaagggtattttgaaggatgaatttataggatttagagatagattagttattgtaatggaaagatttgatttagtgataatgaaatatttttattgggaggttgagtttaggttatttatttgtattttttgtttgtatagagagtgatattttgagagtttaaagtgatttttaggatatgttttttagaataagtattaaatgttgggggttggtaggattgatagtagtagttaggtagaagaatttttaatattatatttgttattagttatattattataaaatattattatgattgtgagtatatttaaggttgtgggatatgggaggtaaagaaaagtttattttgtttattatatttagtgaataggttttgttttttttttttttttgttgtttaggttggagtgtagtggtgtgattatggttgattgtagtgatttgttgggtttatgttatttttttattttagttttttaagaagttggaattataggtgtatattattatgtttggttaattttttttattttttgtagaaatagagtttttttatgttgtttaggttggttttaaattttttggtttaagtgatttttttattttagttttttaaagttttgggatttatataggtttgagttattatatttggttgttttttttttaggtggttattgtagagggtattgaatggttttagaagttagattatagttgattgatttgtgttttaagttattttagttagtttaggatgttttttgtaatattaggatattatgaatatggattttttatagataaattttttaa

SEQ ID NO: 776 - DNA, 2483 bp, Artificial Sequence
  chemically treated genomic DNA (Homo sapiens)
atattaaatttagaaaaatagggtggggatatggtagggtttagtagtattattttttgaatatttataaatattgttttttttttagtaggtggagttatttgttgttttttgtttttatgtggttttttttatatttaaagatgggattaggatttgtgttggagaatagttttatttttttttttttattttgttttggtataattaatgaatattttttttttttaaagatagagttttatttttgttgtttaggttggagtataatggtataattttagtttattgtagtttttgttttttgggtttaagtgatttttttgttttagttttttaagtagttgggattataggtatatattattatgtttagttaatttttgtatttttagtatagatagggttttattatgttggttaggttggttttaaatttttgattttaggtgatttatttgttttagttttttaaagtgttgggattattggtgtgagttattgtatttggttgttaatatataattaaattttaaatataaatttgtatattggttgattatgtgtatttgtaaaatttttattttttatttttaggaagagggggtttttgtttttattttttatttttatttttgaaattgtgaagaggattataggtaatttgtaggtatttttgttagagtgtttgtgtttttagatatttttttttattgttggtaatttggttttattgttgtgtttagttttttttgtttattgttttggttttggtgtttggaaattgtgtgtttattaaaatgtgaaggtgaattttgtaagtttatgtaaattggataggagggagagtagaggtagagattattgtgtttatttgatgttttgagtgaaaagttatgtgtgtttatgtgatgatggagataggaggattagggttttgtttgtttttttttttgagtttttattgtatttagttttggggtttgggtttttgatggttattatttttttatttgggtttttgtgtagttaagtgtagttttgtatgtttattttttatgttagtttttgtagtgagagtttggtatgtttttttagggagatgaattttttggtgtttttgaggaagtggtgtttgttgtgtttggagttttagaggtttgggggtattagttggtgtaggtaggtttgtatgaagttgtatatttgttaggggttgttgtgttggtggagtagttgtattaggtgatgggggtttgtgtttttttttttgggggttgttatagagttttggggttttttttgggtatagatattggttgttggggtgattgtagtttgtagtgggtagtgtgttttgaggagtattttgtaggggtattgtgtgtggtttttaagtagttttagaaataggggttgtatttgttagtagtgttggggtaggtggggtaatttgtggggagtttttggtatttagggtttggaatttagaaagatggtttttatgagtttttgagtgttagttaggttgggttttagagagttgagtaggaaggagggttgtagttgttttttgttgtttgaggagtagaggaagtgtttggttttggtgtatattgggggataaggtgtgttttagggatgtggtggttgtgatgtggatggggggtttgtgtggtgttggtggtttatggatgggtgggagtggtgtgtgttagagagtgtattttttaaagaggtggtttttttggtgggtttggtaggtgatattatatagaaattatggttatttggtttatgtgttttgtttgggtgggtttaggatttttgtttaatgggtgtttgttttggtttaggggtagtgttatgtttgggttttttgggtaatggtagattttggttggtattgtttttgtgtttttttgtatttggggttggtaggtttagggggattttggtttttttgatgttatggttttaggtttgtttgtattttagatgtttttggggtttattagtgtgtggtgggggttgggtttgagtggtagtgttgagttggtatagtggtggtttgtatatttggtaggtgtagttgggagttattagtataaagagtgtgtagtgtgttagtaggtgaattagtatgttgttgtttatgtggtgtagtagtagtttttatgttttgtttttttgtagtgtgttggttattgtgttgggtaggtagttgtgtatgttggtggtgaaggttttgggggggtttttgtgggttttgtttagtagtgtgaagttgaaggttagtatgttttttgtgttgtgtttgtatagtttttgtagtatttgggttattagtttttttaggtaggatatttgtgggggaagtgttttgagttgtttgtgttgttttttgtatgttgttggttttttttggttgtttttaattttagttggatgttgattttggggaggtttatttggtggaagga

SEQ ID NO: 777 - DNA, 2483 bp, Artificial Sequence
  chemically treated genomic DNA (Homo sapiens)
tttttttgttaggtgggtttttttggggttggtgtttggttggggttgagggtggttggggggaattagtgatatgtggagagtagtgtaggtgatttagggtgttttttttgtaggtgttttgtttgaaggagttggtggtttgagtgttgtagaggttgtgtgagtgtggtgtgaagaatgtgttggtttttggttttgtgttgttggatggggtttgtgggggtttttttgaggtttttattattagtgtgtgtagttatttgtttaatatggtgattgatgtattgtgggggagtggggtgtgggggttgttgttgtgttgtgtgggtgatgatgtgttggtttatttgttggtatgttgtgtgttttttgtgttggtggtttttagttgtgtttattaggtgtgtgggttgttgttgtattagtttggtgttgttatttaggtttggtttttgttatatgttagtggattttgaaggtgtttgggatgtgaatgggtttggaattatagtgttagggaggttggggtttttttgggtttgttagttttgggtgtgaggaggtgtgggggtagtgttagttgaagtttgttgttgtttaagaggtttaggtgtggtgttgtttttgagttggagtggatgtttgttgggtaggggttttgggtttatttgggtaggatgtgtggattgagtgattgtggtttttgtgtggtgttatttgttagatttgttgaagaagttatttttttggagggtgtgttttttggtatgtgttatttttatttatttgtgggttgttagtattatgtgggttttttatttatattgtggttattatgtttttgggatatgttttgttttttggtgtatgttgagattaagtattttttttattttttaggtgataaggagtagttgtggtttttttttttatttagttttttgaggtttagtttgattggtgtttggaggtttgtggagattatttttttgggttttaggttttggatgttagggattttttgtaggttgttttgtttgttttagtgttattggtaaatgtggtttttgtttttggagttgtttgggaattatgtgtagtgtttttatggggtgttttttaagatgtattgtttgttgtgagttgtggttattttagtagttggtgtttgtgtttgggagaagttttagggttttgtggtggtttttgaggaggaggatatagatttttgttgtttggtgtagttgttttgttagtatagtagtttttggtaggtgtatggttttgtgtgggtttgtttgtgttggttggtgtttttaggtttttggggttttaggtataatgaatgttgtttttttaggaatattaagaagtttatttttttggggaagtatgttaagtttttgttgtaggagttgatgtggaagatgagtgtgtgggattgtgtttggttgtgtaggagtttaggtgaggaggtggtggttgttgagggtttaggttttagagttgaatgtagtaggggtttagaaaagggggtaggtagagttttggtttttttgtttttattgttatgtgggtatatgtggttttttgtttaggatgttgagtggatatggtgatttttgtttttgtttttttttttgtttagtttgtataaatttatgaggtttatttttatgttttgatggatatgtggtttttaggtgttgaggttagagtagtgaatagaggaggttgggtgtggtagtggagttgggttgttggtaatggggagaagtgtttggaagtatagatgttttggtgagggtgtttgtaggttatttataattttttttgtaattttaagggtgggaatgagaggtggggatgagaattttttttttttgggggtgggaggtaagggttttgtaggtgtatgtggttagttaatatgtaggtttgtgtttaagatttaattgtgtgttgatggttaggtgtggtggtttatgttggtaattttagtattttgggaagttgaggtaggtggattatttgaggttaggagtttgagattagtttgattaatatggtgaaattttatttgtattaaaaatataaaaattagttgggtatggtggtgtgtgtttgtaattttagttatttgggaggttgaggtaggagaattatttgaatttaggaggtggaggttgtagtgagttgagattgtgttattgtattttagtttgggtgataagagtgaaattttgtttttaaaaaaaaaaagtgtttgttgattgtgttaggatagggtagagggagggagataagattgttttttagtatagattttggttttatttttaggtatgaagagggttatatgggagtagaggatagtagatggttttatttgttgaggaagggatagtgtttgtgggtgtttaggggatggtgttgttgggttttgttgtgtttttattttgtttttttggatttgatgt

SEQ ID NO: 778 - DNA, 2374 bp, Artificial Sequence
  chemically treated genomic DNA (Homo sapiens)
tgaaatttagagaggttaaaggatttttttaaggttatagagttagtaataaatatagtttttattataattttgtttattatagttttgtgtgtttgttttttttatagttatttttattatattagagtttgttttagtatatgattttatttaatagatttttttttttttttttttttttaagtgttaaatatatgttattaaaaaaagtgatatattgggtagtattttaaatttaagtgttttgttaattaaaattatatttaaattttataagtatataggtttagtttgtaaaatagaaaggtataattatttatagttttttaagttttttttgaaattggtgtgtatgttttggaagttttaagaataattattgaaaatttatttattaattttgaatggtttgtaaagtattagttttatttttattttttttagagtttatagttattttttttttggatatattttattttgtagattatgtaaggtaatgtaattaattttaaagtttttttagttttttttaaagtataagaaaattttttaaaatattgaatataaaattaatttttgggaagttttagattttgagaataggaattattttttaattattttttttgattgtgattatttaggttttttatttaaaatgtattaattggaaatatttaaaagaaatgtgggagggggttggggggttggaagaaagtggagaatagatatttatatatataaaaaaagggatttgatatatgaataatatttttgtttaatgttaattttttgttttgatttaaggtttgatataatttttgttgtttttttgattattttttttgaagagaggggttaaagttggtatgttttgtggagattgtttttagatttaggaaggggtatattagggtagtggatgatttgttttgtgttttttaaaattattgttagtttaattagtaaattgagagggtagttttgagatgtaggatggttagagagttgaaatgagtttgggagttaagagtgggatggggtggatgaataggtgtggggagggtaaataatgtattaggagtgggagtgagaatagggttgaggtggggttagtgaaaggtaaaaggtgaagagaagaaggggatggggttttgggtgggatgggtggtagtaaagggggaggggatgtgagaaggttgggggagggggagaagggtttggggtggggtggaagggagtaaagaggtgggatgaagatggttaggttgggagggtttttatttgtagttttgtttgttttattttttattgggttttttttattttgaagtgggtttatttgtgttgtaggaagtgtaggatttttgggagattgtattgggtttgggttgtttttgttgtagttgttttgttgttggttgtggtagtttttgttagaggtttgagttttttggtattgttggtgtttgggtggttgttgttgaagaagatgttgggatttgtttgtttgtttatggtggttgtagatatttggggagttgttttggtgtttagtagtggaggtaatagtggtggtaagtagtgtttttttttttttttgttgtttttgtttatattttagttagtagggagtagttttttgggtgtgggggttggttgagtttgtgatgggttgggaaatgggttaattgtggtgtgttggtggtttggggtttgttgggaaatgtagttgtggggtggggtgtgggttagtgtggtttgggtggtttgtagggttgtgttttagtttgggtgtggttttgggtttgttttgttttggtttgttgtgtagggggttggttgggtggggagagtgggttttttttggggttggttgggtgtgggtgggtgggtttttagttttttttgtatgtggaagtttgtgggtggtgtattttgttgtatttaaaaatatatatatatatatatatatatatatatggaagttgttatgttaagatatttgtttgagttgtatattttttaaggttttttggttgttttgtgaaggaataggtttaaagtgagttatttggtgtggttgtgggattggggtttttttgttagttgttttgtgtgtttttgttttggttttgtgtttggagttttttttattttagatgtttttttattttgttaatttgtgggttgttgttgtttttgttttttttttttgatttgaggggtttaaatttgttatttgattagtttttatttttaaggaatgttgattatttttttaagataatgttgtagttttttgttgttgtttttaaattgtggtttgttgatagtttatttgaaaaattgttttgttgaagttttt

SEQ ID NO: 779 - DNA, 2374 bp, Artificial Sequence
  chemically treated genomic DNA (Homo sapiens)
agaaattttaatggagtagttttttagatgggttgttaataaattataatttggaagtagtagtagaaagttgtggtgttgttttagaaaggtgattggtgttttttagaaatgaaaattggttaggtaataggtttgagttttttgagttaaaagagaaaggtaagagtgatagtgatttgtagattggtagaatggaggagtgtttagggtgagagaaattttgaatatgaagttgaagtgagagtatgtagggtagttggtgggagaattttggttttgtggttgtattgggtagtttgttttgagtttgtttttttatagaatggttaggaagttttaaaagatgtgtagtttgggtaggtattttggtgtgataatttttgtgtgtgtgtgtgtgtgtgtgtgtgtgtgtttttgaatgtaatagggtgtgttgtttgtgaatttttgtgtgtgaggaagattggagatttgtttgtttgtgtttagttggttttagaggaaatttgttttttttgtttagttggttttttatgtggtgagttggggtggggtgggtttgaggttatgtttaagttgaggtatagttttataggttgtttgggttgtgttagtttgtgttttgttttgtgattatattttttggtaagttttgggttgttagtgtgttgtagttgatttattttttggtttgttatgggtttggttggtttttgtgtttaggaggttgttttttgttgattggggtgtgggtgggagtggtggagggaggaggaggtgttgtttgttgttgttgttgtttttgttgttgggtgttggggtagttttttgggtatttgtggttgttatggatgagtaggtgggttttggtgttttttttagtaataattatttgggtgttggtggtgttaaggggtttgggtttttggtggaggttgttgtggttggtgatggggtggttgtggtgggggtggtttgagtttagtatagttttttggggattttgtattttttgtagtatgagtgggtttgttttgaggtggagagagtttagtgggaggtggagtgggtggagttgtaggtaaagatttttttggtttggttgtttttattttgtttttttgtttttttttgttttgttttggattttttttttttttttttagtttttttgtgttttttttttttttgttgttgtttattttatttggagttttgttttttttttttttttgttttttgttttttgttgattttattttgattttgtttttatttttgtttttggtgtgttgtttattttttttatgtttgtttgtttgttttattttatttttaatttttagatttattttaattttttggttattttgtattttagggttgtttttttggtttattaattgggttggtagtagttttgagagatgtggagtaaattgtttgttgttttggtgtgtttttttttaggtttagagatagtttttgtagaatgtgttggttttggtttttttttttaaggaaggtgattaagaagataatagaagttgtgttaggttttgagttgaggtgagaagttgatgttgggtaaaagtgttatttatatattagatttttttttttatatatgtaaatgtttgttttttatttttttttgattttttggtttttttttatgttttttttaggtatttttaattaatgtattttgaatgaaggatttagatgattgtagttagagagaatggttaagaggtggtttttgtttttagaatttgaaattttttaagggttaattttatgtttagtgttttgggagatttttttgtgttttaaaaggaattaaagggattttgaagttagttatattgttttgtataatttgtaagataaagtatatttagggaggagataattgtgggttttgaaaagaatgaaagtgaggttgatattttataagttatttagaattggtgaataggtttttagtggttgtttttaaaatttttagggtatatatattaattttaaaaggaatttaaagaattatgaatagttgtgtttttttgttttatgggttaagtttgtatatttatgaaatttgagtatagttttagttggtaaaatatttgagtttaaaatgttatttagtgtgttattttttttggtaatatgtatttggtgtttaagaaaaaaaagaagaggagaaatttgttaaatagaattatgtgttggaataggttttggtgtagtggaagtggttgtggaaagagtgaatatataaggttgtagtagataaggttatagtaagggttgtgtttgttgttagttttgtgattttgaggaaattttttaatttttttgggtttta

SEQ ID NO: 780 - DNA, 2322 bp, Artificial Sequence
  chemically treated genomic DNA (Homo sapiens)
taggtttggtgtgtgtagagaataattttaagtgtattgatgtttgtgagttttttttaaatattgaatgggatttagagtttgagtttataggtggtggttgggggagggagtagggtgttggttgttgtttgggagtgtttgtgttttgggtgatttttggaaggatgtggggtttaaattttggttggggttgggagagtagtttttagaggttttttgtgggattttttgttgggtgggattgtggttttataggagaagtgggtggtaagttttgtttggtggaaagtagttgtttttttttttttgggtttggggtggtgttttttatttttgttttttgttttttatttttgttttttgttggttatattttttgttttttggattttaagtgttttgtgtgttgaggagtttagtgttagtggtggtggttaggagagatttgggtgttaggaaagatgggttgtttgggggatagtagggagtttgggggaaatgtaggtgttgggtatagagttggtattggtgtttttagttttgttgaagattgtggttgggtttggtttgtgggaggggttttggtgttggatttgttttggttttgtgtgggtggttttgttgggttttgtaggagtgatgtgtgttaaaaggtggtgggaaggaggtggggtagagtgtgtttgggattttgatttggatgtggttagttggagaggtggagtgttgggaggagattttggttttgttgtgatttggtggtttgtgttgtttttttgtgtgttgggttaaaaaggtgttaatgtttgtggttgtttattttttgtggtgttttttttttttgtgtttatataatttgtttaggggttgggtagtttgttttgtttttttgtttgtgtatttgtttggaggtttgtgtgtttgtgaaggggatgtagtgaaattggggtttgtgttaggttagttgggatggatgttgatgtttggggttgtgatggttgtaggtaggaggtttagggttggggggtggtttggttttgtgggtgggggttggagtgtagtgttgggtaggtatttgggtttgtagttttgaagttgggaggtgaggggagagtgattggggatgagttgggataaggtgatataggggtttttttggagttggattggtttttgggatttggtgtttgtgagaggttggagtggttagagtttagtttgtgaggagatgtgggttttgtttttagtgttggttgtttttggtgttaaagatagttttgtaggggttttgggagggttttttttttgttgttttttttttattttgggttttgagggttgttgggagggtaattttgggaagaggttggggtgtggggtgtgggtgtaggtggaaattgttagtaagtttttttttgtttgtgtgttttttttgatttgtagggttgtgttaattttgaggttttagtttttttgaggagttagggttaggtttttttttggatagggagaaggatttgggtgggggttttgatttatggagttggttattaagtggttttgatggttttttgagggatagttttttgtggttttgagtttgtttgttgagggtttttggtttgtttttggagtggttttaggtagagaaagtttgtgaagaaatggtttgggttggtttggagggagatattttatgtttttttagtttttgggttgtttttttttgtagtttttgttttttttggggtttggatttggggagtgatgattatttttgtttagtttgtattttggtttggatgttaggagataagtttatgtagtatgtatatgtttgttatataaataggggatagatagatgatttttaattagtaagggtgtagggaaaagtaatgtattttaaatttttgattagaggttatttgtttttaaagatgttgttatttgtttatttattgtttggatatttggaaatggtttaggtttattaatataatgttttggtttttgttgttttgttttttgttgttgttattgttgtttatttgtttagttttagttttgggggaggagtaaataaagtgtgtggtttttggtatttattgagtgttgagttatttttttttggatttatttggggaaagattaaaaagtattttattaagaataggatatggtgtttgaaatgttgttatatatgaatgtatgtattatgtatgtagtttttaaaataagataaaaagttggttgggtatggtagtttatgtttgttattttttatagtttttgggaggttaaggtgggtggattatt

SEQ ID NO: 781 - DNA, 2322 bp, Artificial Sequence
  chemically treated genomic DNA (Homo sapiens)
ggtgatttatttattttggttttttaaaggttgtgagggatgataggtgtgagttattgtgtttagttaattttttattttattttaaaaattatatatgtaatgtatatatttatatatggtaatattttaaatattgtgttttgtttttaatgaaatgttttttaatttttttttgaataaatttaaagaggggtggtttagtgtttagtaagtgttagaggttatgtgttttgtttattttttttttagagttaaggttgaataaataaatagtaatgatagtaataaaaaataaaataataaaaattaaagtattgtgttaatgagtttgagttatttttaaatgtttagatagtgaataaatagatggtagtatttttggaagtaaatgatttttggttagaagtttggggtgtattgtttttttttgtatttttgttggttgaagattgtttatttgttttttgtttatgtagtagatgtgtgtatattatatgggtttattttttagtgtttaggttaaaatataagttgagtaaaggtaattattgttttttaagtttaagttttgggaaaggtaggggttgtaggaggaggtggtttaggagttaagggggtgtgaggtgtttttttttaggttggtttgggttatttttttatgggttttttttatttgggattgttttggagataggttaggagtttttgatagataaatttagagttatagggagttgttttttgggaaattattgaaattgtttagtaattaattttatgggttaaggtttttgtttagatttttttttttgtttagaggggggtttggttttggttttttagggaagttgaggttttgggattggtatagttttgtaggttggagggagtgtgtgggtggggaggagtttgttggtgatttttatttgtatttgtgttttgtattttggtttttttttggggttatttttttaatggtttttggagtttggggtggagaggggatagtaggaggagggtttttttggaatttttgtggggttgtttttggtgttaaaggtggttggtgttgagggtaggatttgtgtttttttgtaggttagattttggttgttttagttttttgtgagtgttaagttttaggggttgatttaattttgagggagtttttgtgttgttttgttttagtttgtttttgattgttttttttttattttttagttttggagttgtgagtttaggtgtttgtttagtgttgtgttttagtttttgtttgtggagttgaattgttttttggttttgggttttttatttgtagttgttgtagttttgggtattggtgtttgttttggttggtttggtgtgggttttggttttgttgtgttttttttgtgggtgtgtgagtttttgggtgggtgtgtgggtggggaggtagggtgggttgtttggtttttaggtgggttatatgggtgtggggaggggaggtgttgtggggagtaggtggttgtgggtgttagtgtttttttagtttggtgtgtgggaaggtagtgtgggttattgagttgtggtggggttaaggtttttttttggtgttttgtttttttagttggttgtgtttaagttggggttttgggtgtgttttgttttgttttttttttgttgttttttggtgtgtgttgtttttgtagagtttggtgaggttgtttatgtagggttgaagtaggtttggtgttagggttttttttgtgggttagatttgattgtgatttttggtagagttggggatgttggtgttgattttgtgtttgatgtttgtgttttttttggattttttgttgttttttagatggtttattttttttgatatttgggttttttttggttgttgttattagtgttgggttttttggtgtgtggggtgtttggaatttaaggggtaggggatgtggttggtggggaataggggtgaggggtggggaataggggtgaggggtgttgttttaggtttaggaggaggggaatggttgttttttgttaagtagggtttgttatttattttttttgtggagttatggttttgtttggtagaggattttgtggagagtttttgggggttgtttttttaattttagttggagtttgggttttatgtttttttaggggttatttaggatgtgaatatttttgggtggtggttagtattttgtttttttttttggttgttgtttgtgggtttgggttttggattttgtttggtgtttggaaggagtttgtgggtgttggtgtgtttggagttgttttttgtgtgtattagatttg

SEQ ID NO: 782 - DNA, 1100 bp, Artificial Sequence
  chemically treated genomic DNA (Homo sapiens)
agattgtattttaataaataaataaataaataaataaataaaggttgagtatggtggtttatgtttgtaatttttgtattttggtaggttgaggtagatggaatatttgaggttaggagtttgatattagtttggttagtatagtgaaaatttgtttttattaaaaatataaaaattagggttaggtgtggtggtttatgtttgtaattttagtattttgggaggttgaggtgggtggattatgaggttaagagtttgagattaatttggttaatatggtgaaattttgttttttttaaaaatataaaaagtagttgggtgtggtggtgggtatttgtaattttagttgtttgggaggttggggtaggagatttgtttgaatttgggaggtggaggttgtagtgagttgagattgtattattgtattttattttgggtgatttggtaaggttttgttttaaaaaaaaaaaaaaaaaaagaaaaagaaaatattgggtgtggtggtagatgtttgtagttttagttatgtgggaagttgagttatgagaattgtttgaatttggatggtggagtttgtaatgaattgatattgtgtaattgtgttttggtttgggtgttaaagtgatatttggttttaaaaagaaaaaaaagaaaataggagaataatgaaattttatttatttattttatttattttttatttttttgagattgagttttgttttgttatttaggttggagtgttttggtgtaattttggtttattgtaatttttgttttttgggtttaagtgatttttttgttttagttttttgagtagttgggattataggtgtttgtaattatgtttggtttatttttgtatgtttagtagagatggggttttattatgttgtttgggttggttttgaatttttgagtttaagtgatttttttgttgttgttttttagtgtgttgggattataggtgtgagttattgtgtttggttaaaagttttaaattttagtaagttttaatttattaattttttttttgtatagattggttttttggtgttgtttaaaaattatttgtttggttttaggttttgaggattttt

SEQ ID NO: 783 - DNA, 1100 bp, Artificial Sequence
  chemically treated genomic DNA (Homo sapiens)
aaaaatttttaggatttagggttaggtaaatagtttttagatgatattaaaagattaatttatatagggaaaaagttgataaattggaatttattgaaatttaaaatttttggttgagtgtggtggtttatgtttgtaattttagtatgttggaaagtagtggtgggaggattatttgagtttaggaatttgagattagtttgggtaatatagtgaaattttgtttttattaaatatataaaaatgagttgggtgtggttgtaggtgtttgtagttttagttatttgggaggttgaggtaggagaattgtttgaatttgggaggtagaggttgtagtgagttgagattgtgttagggtattttagtttgggtgatagagtgagatttggttttaaaaaaataaaaaataaataaaataaataagtaaaattttattatttttttgtttttttttttttttttttgagattgagtattgttttggtgtttaggttggagtgtagttgtatgatgttggtttattgtaaattttgttatttgggtttaagtgatttttgtgatttagttttttgtgtagttgggattataggtgtttgttattatgtttggtattttttttttttttttttttttttttttttgagatggagttttgttaggttgtttagggtggagtgtagtggtgtgattttggtttattgtaatttttgttttttgggtttaagtgaattttttgttttagttttttgagtagttgggattataggtgtttattattatatttggttattttttgtatttttaggagagatggggttttattatgttggttaggttggttttaaatttttgattttgtgatttgtttgttttagttttttaaagtgttgagattataggtatgagttattgtgtttggttttaatttttgtatttttagtagagatgggtttttattatgttggttaggttggtattgaatttttgattttaagtgttttatttgttttggtttattaaagtgtagggattataggtatgagttattgtgtttggtttttatttatttatttgtttatttatttattgagatgtagttt

SEQ ID NO: 784 - DNA, 286 bp, Artificial Sequence
  chemically treated genomic DNA (Homo sapiens)
tttgtattaggttggaagtggttgttagttttttgtgtaattttattttttggaaaagtggaattagttggtattgtttagtgtgatttgtgaggttgagttttaatagtttaaagaagtaaatgggatgttatttttgtggggtttgttttttgtgaggtgtttattttgtatttgttatgtaaaatgagggagtgttaggaaggaatttgttttgtaaagttattggttttggttattagtttttatttaatgtttttgtgatgttgttgttgatttatttggg

SEQ ID NO: 785 - DNA, 286 bp, Artificial Sequence
  chemically treated genomic DNA (Homo sapiens)
tttaaatagattagtagtagtattatgaaagtattgggtagaggttgatgattaggattaatggttttataagatggatttttttttaatgtttttttgttttgtatggtagatatggggtgagtattttgtgaggagtgagttttgtggaggtggtattttatttgtttttttggattgttggggtttagttttataaattatgttgggtaatgttagttgattttatttttttagagaatggaattgtatgggggattggtggttatttttagtttagtgtaaa

SEQ ID NO: 786 - DNA, 2197 bp, Artificial Sequence
  chemically treated genomic DNA (Homo sapiens)
ttatatttagttttttgaagttttggttgtataattaatttgtggaaggtatgaatatttatgtgtgttttaattaaaggtttttttgaattattttttatatgagaatttttaatgggattaagtatagtattgtggtttaatataaatatataagttaggttgagagaattttagaaggttgtggaagggtttatttattttgggagtattttgtagaggaagaaattgaggttttggtaggttgtatttttttgatggtaaaatgtagttttttttatatgtatattttgaatttttgtttttttttttttagatgttttttgttagtttttttagttgttaaatatagttgtttgtggttggttgtgtatgtaattgtatattttattttatttgttttattttggttatagtgtagttttttttagggttattttatgtatatattatgtatttttagttaatgaggagggggaattaaatagaaagagagataaatagagatatattggagtttggtatggggtatataaggtagtatattagagaaagttggtttttggatttgttttttgtgtttattttaagtttagttttttttgggttatttttagtagatttttgtgtgtttttgttttttggttgtgaaatttagtttttatttagtagtgatgataagtaaagtaaagtttagggaagttgttttttgggattgttttaaattgagttgtgtttggagtgatgtttaagttaatgttagggtaaggtaatagtttttggttgttttttagtatttttgtaatgtatatgagtttgggagattagtatttaaagttggaggtttgggagtttaggagttggtggagggtgtttgttttgggattgtatttgtttttgttgggttgtttggttttattggatttgtaggtttttggggtagggttggggttagagtttgtgtgttggtgggatatgtgttgtgttgtttttaattttgggttgtgttttttttttaggtggtttgttggtttttgagttttttgttttgtggggatatggtttgtattttgtttgtggttatggattatgattatgattttttatattaaagtatttgggatggttttattgtattagatttaagggaatgagttggagtttttgaattgtttgtagtttaagatttttttggagtggtttttgggtgaggtgtatttggatagtagtaagtttgttgtgtataattattttgagggtgttgtttatgagtttaatgttgtggttgttgttaatgtgtaggtttatggttagattggttttttttatggttttgggtttgaggttgtggtgtttggttttaatggtttggggggtttttttttatttaatagtgtgtttttgagtttgttgatgttattgtatttgttgttgtagttgttgttttttttgtagttttatggttagtaggtgttttattatttggagaatgagtttagtggttatatggtgtgtgaggttggtttgttggtattttataggtatttgtgtttgtgttgtttgttggggtggttgttgtgtttggtaggagggagggagggagggagggagaagggagagtttagggagttgtgggagttgtgggatgtgtgatttgagggtgtgtgtagggagtttggggtgtgtggtttagtttgggggttttgtgtgtagtttgtgttgtgtttagagttaagtttttttgttgggtagttgaaaaaaatgtattttttatttatttattgtttgtgtgagaggtagatttgaaagtttgggttttttaataaaatatatgttggaaaattagataaagtagtagttatttgtgggggaaaatatttttaggtaaataaatatggggtgttttgagttatttgggaaggttttgtttttggtatttaaagttgggggtgtttggagttagtagagtttagtagagttttatttatttttttaatgtttttgtttaatgtgttttttaaatttttttttatttagattatttgattggaaatatgttagttatgatgatgattttttgggaagtgatttttgttatttgttttttttttttttttattttatgttttggggttttagagagtgattgggagttgaatgggtttgattttggagttagttggttgagtttgtgttg

SEQ ID NO: 787 - DNA, 2197 bp, Artificial Sequence
  chemically treated genomic DNA (Homo sapiens)
tagtgtggatttagttagttaattttgaaattagatttatttaatttttaattgttttttaaagttttaggatgtggggtggggaggaggggaaagtgggtgataggaattgttttttagaaagttattattatagttgatatatttttaattaaatagtttagatgaaaggaaatttggggagtatattaaataaaaatattaaaaggataaataaaattttgttgagttttgttaattttaaatatttttaattttaaatgttaagagtgagatttttttaagtgatttaaagtgttttgtgtttatttgtttggaggtgtttttttttataaataattgttgttttgtttggttttttaatgtgtgttttgttaggaagtttgggtttttgggtttgttttttgtatggatggtaagtgggtggagagtatgttttttttagttgtttggtgagagaatttgattttgaatgtagtgtgggttgtatgtagaatttttgggttgggttgtgtgttttgggttttttgtgtgtatttttgggttgtgtgttttgtggtttttgtagttttttaggttttttttttttttttttttttttttttttttttgttgggtgtggtggttattttgatgggtggtgtgggtgtgggtatttgtagaatgttggtgggttggttttgtgtattgtgtagttgttgggtttgttttttaggtagtagggtatttgttggttgtggggttgtaggaaaggtgatagttgtggtggtgggtgtagtagtattagtgggtttggagatatgttgttgagtggggggaaattttttaggttgttggagttgaatgttgtagttttagatttggggttgtaggggaggttggtttgattgtagatttgtgtgttggtggtggttgtggtgttgaatttgtaggtggtgtttttggggtagttgtatatggtgggtttgttgttgtttaggtatattttgtttaggggttgttttagggggattttgagttgtggatggtttaggggttttagtttgtttttttggatttgatgtagtagggttattttagatgttttggtgtggagggttatggttatggtttgtggttgtgggtagggtgtagattgtgtttttgtagggtagaaggtttagaaattggtgggttatttggaaaaagagtatagtttgaggttagaggtgatgtagtgtatgttttgttgatatgtgagttttggttttggttttgttttgggagtttgtgggtttggtgaagttgggtgatttgatgggagtaagtgtagttttaggatgaatgttttttgttagtttttgggtttttgggtttttaattttaagtattggttttttgagtttatatgtattataaaggtgttggaggatggttagggattgttgttttgttttgatattggtttaaatattattttaggtataatttgatttggagtgattttaaagagtagtttttttgaattttattttatttgttgttgttgttggatagaggttgagttttatggttagggggtgggggtgtatgaggatttgttaaaggtggtttagggaagattgggtttaaaataaatgtgaaagatggatttaggggttggttttttttaatgtgttgttttatgtgttttgtgttagattttgatatatttttgtttgtttttttttttgtttgattttttttttttgttggttagaaatatgtagtgtgtatataggatgattttggggaggattatattgtaattgagatagggtagatagaatggggtgtgtggttgtatatgtagttagttatagatagttatatttagtagttgggggaattgatagggggtatttgaggggaagggggtggagatttagggtatatatataggaagagttgtattttgttattaggagaatgtaatttgttaggattttagtttttttttttgtaaaatgtttttaaagtagatagatttttttataattttttgagatttttttagtttgatttgtgtgtttatgttggattatagtattgtatttggttttattaggaatttttatgtgaaggatgatttagaaaaatttttggttagggtgtatatgggtgtttatgttttttataggttggttatgtaattaaaattttagaaaattgaatataa

SEQ ID NO: 788 - DNA, 2436 bp, Artificial Sequence
  chemically treated genomic DNA (Homo sapiens)
gtgaatttttatttttattaaaaatataaaaattagttgggggtggtggtgggtgtttgtagttttagttatttgggaggttgaggtaggagaattatttgaatttaggaggtggaggttgtagtgagttaagattgtattattgtattgttgtttgggtaatgtattgagattttgttttaaaaaaaaaaaaaaaatgagagaataggggagggtttagggtttagagttttggagaatagattttagtagtattaatattttaggattaatgttataaagatatgggttataattaaattggagaatatggttaaggatgggaatttagtttgagtagggttgagttgagtagggttaagttaagtagggttgagttagaatattttttttttttttttgaataatttatttatattttagttatagggttggttttatttagtttggtgggagggaggagagggttggtttgtgattttagtgttgaggtttgattaaggtaaagggaaattttttatttttagattttttgtaagaaagaatggtatattatttgttattgataggggttattattattaaatggagttagtataaatgttttttaataaagtatgtttagtgtttgggttttagtttgtatgtttatgaattgtttgttatattttttttttgaatggttggaaattgggtatttgtttttttaaataggaaatattttttgtttgagtgagttatttttgttttgttttaggagtaaagtttattttgtagttttttttgtggtgaagtttttttttttttttggagattagattttgtttttttgttggagggaagtgtttttataggtttttttttttttattttttgtgtttttttttaagttttgttgaatttgttagttaatttaataggaagtgaggttatggagggaggtagaagagttagggtggttattgaaagtaaaagaaatttttttttgggagttttttttatttttttttttgttgagtatgtggagttaggtaggttaggggatttggagattgtgatggtgttaggaaagggtggagtgggtgagtgtttgttgttaaggtggtttttttaataggaaattataatatttttgttttttgatttgttttagaaatagggttgtgggggtggggaagtaatttggatttgtttttttgaggatatttttgggtgttgtttggtttaggttttttgtgtggtttttttttgagttgttgtttttgattttgttatttttttattttgagtagtttttagtttttttgttatttttttgttttttaagtttttttgttgttttgaatgtagatatatggttttttttttgtggatttgtttggagagtttagaagattttattaatttattttttttttttttttatttggttttggggttgatggttaagtattttattttgttattttgttgaattatgatgttttgaggtgtatagtttttttttttttttttgtgtttgaagggtttttttttatttttttatttttatttttgtttttttgtttttttttttgttttttaaagatagttttttaatgttttgatgtggatttgtgaatttatttgtatttttgtaaaatgtattttttttttgtatgtgtatattgttttttaattatgtgattttaggtaagtaatttttttgtgtttttgttattttattattaaatgattaataatgtttttagaggtgattgtgaggtttgaaggagataatatgtatatattatttattatatgagttagtaattattattgtatattaatattattggtattttattttgtttattttgtttttattttttttttatttatttattttttgagataaagttttgttttgttatttaggttgtagtgtagtggtgtaattatggtttattgtagttttaatattttgggattaagtaatttttttattttagtttttagattagttgggattataggtgtgtgttattatatttggttaattaaaaaatttttttttatagagatggtgttttattttgttgtttaggttggttttaaatttttatgtttaagggatttttttattttggttttttaaagtgttaggattatatgtatgagttatggtggttatttaggtattgatattatgaggttattttgatttagttttttttggtgaagagttttttttagatattttgtttagtttttttagttatgagtttttattttttgaaagtttatattttatttggggaaagataaaaggtagttttaaagaagagaggtgtttgattttttttttttatttttaatattagaaaatattttatttaatttttagtatgaaggtaatattttgtttattggtatatttttagagtttaatatggt

SEQ ID NO: 789 - DNA, 2436 bp, Artificial Sequence
  chemically treated genomic DNA (Homo sapiens)
attatgttgggttttagggatatattagtaaataaaatattgtttttatattgagagttagatgaaatgttttttgatattaaaagtaggaaaagaaaattaaatattttttttttttgaaattgttttttgtttttttttaaatagaatataagtttttagagggtagggatttatagttgagaagattgaatgaagtatttgaaaaggattttttattagagagggttaggttaagatggttttataatattaatgtttggatggttattgtggtttatgtatgtaattttagtattttgagaggttaaggtgggaggattttttgagtataggagtttgagattagtttgggtaataaaatgagatattatttttatgaagaaaaattttttaattagttaggtgtggtagtatgtgtttgtggttttagttaatttgaaggttgagatgggaaaattgtttgattttaggatgttgaggttgtagtgagttgtgattgtattattgtattgtagtttgggtgatagagtaagattttgttttaaaaaataaataaataaaaaagaaatagaaatagaatgagtaaaataaaatattaatagtattaatatgtaataataattgttaatttgtgtagtaagtgatgtatgtgtattattttttttaagttttatagttatttttggaggtattattaattatttaatgatgagataatagaggtatagaggaattatttgtttgagattgtatagttaaaaaatagtgtatatatataaaagaaaaatatattttgtaaagatatagataaatttatgaatttatattaaaatattagagaattgtttttggggaataagagagagggtaggagggtaagggtgggggtggagagataaaaggaaattttttagatatggaagagggggaaggggttgtgtattttagggtattgtgatttgatagaatgatagaataaagtatttaattgttggttttagggttaaatgaaaaagaaaaaaaagtggattgataaagttttttggattttttaaatgggtttataggagggagattgtgtatttgtatttgaggtggtagggaagtttggaggataaaaaggtagtagaggaattggagattgtttagagtgaaaaagtagtaaagttagaggtaatggtttagagagaaattatataggagatttgggttaggtagtatttagaggtgtttttagaagggtagatttaagttgtttttttatttttatagttttgtttttagagtaagttaagaaataaaaatattgtggttttttgttgaagaggttattttggtaataggtatttatttgttttatttttttttggtattattgtagtttttgagttttttaatttgtttaattttatgtgtttagtagggaagggggtgggaaaggtttttaggaagaagttttttttatttttaataattattttggtttttttgtttttttttatggttttattttttgttgagttgattagtaaatttagtagggtttgaaaaaaaatataaaagataaaaggaggagaatttgtgaaaatatttttttttagtagaaaggtagaatttggtttttgagagaaagagaaaattttattatagaaggaattgtagggtaaattttatttttaaagtagaatagagatgatttatttgaataagaaatgttttttgtttaaaggaatagatgtttaatttttaattatttagaagagggatgtggtagataatttatggatgtgtaaattaaagtttgagtgttggatatgttttattggaaagtatttatattgattttatttagtaataataatttttgttggtggtaagtaatatgttatttttttttgtaaagggtttgggaataggaagtttttttttgttttgattaaattttagtattgaagttatagattagttttttttttttttttgttggattgggtaaagttagttttgtagttgaaatgtaggtagattgtttagaaaaaaggaggaagtgttttggtttagttttatttggtttagttttgtttggtttagttttgtttaggttgagtttttatttttggttatgttttttagtttagttgtaatttgtgtttttgtagtattgattttggagtgttggtgttattgaggtttgttttttaaagttttgagttttagatttttttttgtttttttattttttttttttttttgagatggagttttggtgtgttgtttaggtaatagtatagtggtgtgattttgatttattgtaatttttattttttgagtttaggtgatttttttgttttagttttttgagtagttgggattataggtatttattattatttttggttaatttttgtatttttaatagagatggggatttat

SEQ ID NO: 790 - DNA, 2488 bp, Artificial Sequence
  chemically treated genomic DNA (Homo sapiens)
tttttatttaagtttaaagtagtagaagaagggttgaggttaattattagttaagtagtttttatttttttttttatttgtagggtttgtagggtagtgggaagagttttgggttatagatttagaaattttagatttttatattggttttgttgtggaattgttataatatatttttatttttttggttttagtttttttgttgaattagatggtatgggaatttttaagttttttatttgtgagattttttgaattttgatttttttttattttaatattatagtagttttttatatttttttaaattagtgatttttttttttaggttttgattttgttttgggattttttattgtatattagaagtttaatggttttttttgtttattttttgtatagataggtgagttttgggttgtaggaaaggtttagttgattatgggttttttgttttattttattatgaggtttatagatagtgatgaaggtttggatatatagattgtaggataaggttagattggttggtgagaaagggtattttttagtaagaatttttttttttaattaagtagagatggggattgttgtttattgtaggtttttgttttatgttttttttatatttgatttattgatttatagttttttttttattaatttttttttttttaggtattttttatttgtttatattattgtatattttttggttgttttattttttttttgggtttagttttttttaatttttaaattatttatgtttttgtttttttttttttttggttatatttttttttttgtgattagtgttttttatttaaattttttttttatttttaaattatatatttttttttttggaaagagttttttatatagttgtttttttttattatttttttattgtggtttttaattagatttggattattaaagttttttttgaataggttttatttgttttaggttaggttgttatttttgtgtttttttattttttagttttaattaggagggatgtggtaggagtgttgtgtggggttaggtatgttattagttagtttttaagttaatattttgagttttgtggtttgtttattgagtgattttatgtagttattgaaatttttgttgtttattagtttttaggtgtttaggaaagtgtttattatagtgatgttgggttaggttgagagaagttataagagagtaggtgtgtaagggttttgatggtggttttttgtttgggttgttgttttaaatagtttttgtattatatgaggagatgtggtttatgtttttggtttttgaaataggaagttttaggttagggtttatttaggaggggttggtgtgtttattttttaatttattgaggtgggtggggattagttagtggtgttttgttagtttgtgttagtgttagtgtttggtttttgagtttttattttaggttggtaggatttttttttttttttggtttttaggtattttggaatttgagaaggaagtagttaatattagtttgagagttagggtgtatgttatggtggatatttttttgttttttagtttttttttgagtttagtgttagagtagagatgagattagaaaagtaaaatgtttttgggttggtgtttatgttggggaaagttttggttgatttttggtatgggtatttgtttttgttttataagtgaggagtttgaggtttataggggaattgataaggttttaagaaataggagggggtgaatggagtttagattgtaagtttagtttagtgggttttagagtttgtgttttttttttatttttattgtttggtggtggagatagttattagtggtttggtttgtggttgagttgattttgttttttgtttgttttgagtaaaagtttgattttttgtgttttgtttgttttatatgtgtttgtttttttttgtggaatgttttttgttggtttttttttgtttttattttattttattatttagttttttatttgtttttgtaagtgttttgggtttttttggtttttttgtatagttttgagttttagtttaggttgtttttagttttttttttgtagaaattttgttaatttggttagttttttaaggtttatggttgttttttttatttgttgttttttttttggtttgtgtatattagtaagttgtttgtatttttgggtaatttgttgtttttttttgagagtttgttgtgtggtggtttgttattgtatagtttattaagtatttttagtaaaaataagatttgttttgttttgttatttattgtatgttgagggttttgggtgtattgttttattgaattttttattttattattattttttagagataaagttttttgttgtgttttttaggttggagtattgtgatgttattatagtttattgtagttttaaattttggggtttaggggatttttttattttagtttttttagt

SEQ ID NO: 791 - DNA, 2488 bp, Artificial Sequence
  chemically treated genomic DNA (Homo sapiens)
gttggggaggttaaggtaggaggattttttgagttttggagtttgaggttgtagtgagttatgatggtgttatagtattttagtttgggagatatagtgagagattttgtttttaaaaaataataataaaataaaaagtttaatgaaataatatatttaaagtttttagtatgtaataaatagtaagataaggtaggttttatttttattgaaagtgtttagtaaattatatagtgataaattattgtataataggtttttgaaaggaggtagtaaattatttaaaagtgtaggtggtttgttagtgtgtataggttaaagaaagggtggtaggtggggaaggtagttatgggttttgaagagttgattgaattggtagaatttttgtaggaggggagttgggaatgatttgagttaaagtttggagttgtgtgaagaaattggaaaagtttagagtatttgtaggggtgggtggggagttagatggtggggtggggtggggatggaggagggttagtaggagatattttgtagggaggggtaagtatgtgtgaggtgggtggggtgtgaagggttaggtttttgtttaaaataggtagaggataaggttagtttagttgtagattgagttgttggtgattgtttttgttattaggtagtgagagtgaagggagagtgtgagttttgaagtttgttagattaagtttgtaatttgagttttatttatttttttttattttttgagattttgttagtttttttgtgagttttggattttttatttgtaaaatgaggatagatgtttgtgttagaagttaattagagttttttttggtgtgggtattagtttaagggtgttttgtttttttagttttatttttgttttgatgttaagtttaaagagggattgggggatgggaagatatttattatggtatgtgttttagtttttgggttggtgttggttgttttttttttagattttagagtgtttagaggttaggaaagggagaaggttttattagtttggggtagggatttgggggttaggtattggtgttgatgtaggttagtagggtgttattggttggtttttatttattttggtgggttgggggatgggtgtattagttttttttgggtgagttttagtttggggttttttattttgggagttgggggtgtgggttatgtttttttatgtgatgtgagggttatttaaagtggtagtttgggtagggagttgttgttggagtttttgtatgtttgtttttttgtagttttttttagtttagtttagtattattatggtggatgtttttttgggtatttggaagttagtggatagtaagaattttgatgattatatgaagttatttggtgagtaagttgtggggtttaggatgttggtttggggattggttggtggtgtgtttagttttatgtagtatttttgttgtattttttttggttaagattggggaataggggagtgtggagatggtagtttggtttagagtaggtggggtttgtttagagggggttttggtggtttaaatttggttagagattatggtagggaggtggtggaaggaggtagttgtgtgggaggttttttttaggaagagggatatgtgatttggaggtaggaggagggtttggataaagaatattgattataggaaagggagtgtagttaggggagaaaaagaataggggtatgggtagtttagaaattggaggagattgaatttagaaagggaatggggtagttagggagtgtataatgatgtaaataagtaggaaatatttaggaggaaaaagattagtggggaaaaaattgtggattagtgaattagatatgagaaggatgtaagataggaatttgtagtaagtagtaatttttatttttgtttggttagggaagagaatttttgttggagaatgtttttttttattagttagtttgattttgttttgtagtttatgtatttaggtttttattattgtttgtgagttttgtggtagggtggggtaagaggtttatgattagttgggttttttttgtaatttaaggtttatttatttgtgtgaggggtaggtagagaaagttattggatttttgatgtgtagtagagggttttaaggtaaggttaagatttgggagggaggattattggtttaggaggatgtggagaattgttgtggtgttgggatggagaagaattaggatttaaagaattttataggtgaggaatttggagatttttatattatttagtttaatagggaaattgaaattaggagagtagaaatgtattataataattttatagtagagttaatatgaaaatttaaggtttttagatttgtaatttagagttttttttattattttataggttttgtgagtgggaagaaaagtagaaattgtttagttaatgattgattttagttttttttttattgttttgggtttagatggaga

SEQ ID NO: 792 - DNA, 2250 bp, Artificial Sequence
  chemically treated genomic DNA (Homo sapiens)
ttagggtgtttatatagaaggtgtttagaaaaatattttgaattggtttagtttggtaagaatatgggttttggtagtaggaagtttaaatatttgttttattttttattattagtaatgtgattttggataatttatatagttttgttgagatttgttttatttgtaaaatattttttggagttgttgtgaggataaaatgataatatatataaagagttaggttttttttagaagaatgtttttgggtagtatgtatatttttatttttttttttagagagtgggggtaataggatatttttttttttaggggtattttttttttttagggatttatttaagttaggttttttttttagtgaaatgtgtattttgagggtttttaggatgaagtagtttattggaaggtattagtttttttttttatttttttagagttggatagtgtattaggggttggtattggttttttagttaggagatattttgggtggggttttgtttgttggaagtatgtagagtgtggggaggagggttttttttgtttgtgtttgtgttaatagtatttgtgttgttgtgttgggttttggtggttggagttatatatgatgttatagataatgatataagttggtgttttattttgatatagtgtttgagttgtataatgttatatttgggtgttaaatatttggttttgtgtgatttggttttatgttttttgttgttgttttttgtgtttttgggggaggtggtttggtttggttgggtagggggttggtgggtgagttttgtgggtgggttggtgagtgggtgatgttatgggtagtggtgggtgggttatttggaggtgaggtgttgttaggtgagtttagtgagagtttagttgtattgtattaggtaaatgaggtttggtttgggtgggggtgtgtgttaaggggaggatattgggattattttttttttttttgttttattattttttttattatggttttgtttggttagggattgattaaattttgggggagtttgggagttggaattggtataagggaggatgtttgttttttttttgtttttgtttttttgtagtttttttttttttttgtatttggtgtttttttgtattttgtgtattttttatttggagtttttttttttttttgtttttttttttttttttttttttttaggttgtttttatttgtttgtttatatgttgttttttttttttggttttttgtgttttttttgttgtagttggatgtgttgggaatgggttaagttaggggtggtgtttggatggggtggggtggtggaaagggggtggtgtttggaggggagggggtgtgtagagttggggtgggggggttgtggtgtgtattattagagattgagtgagttgttagttgtttttggtttggtgggggtggaattgtgtgggatttttatttttatttggaatttttgttatggagaatttttggagaagttttggatttttggttgggaggaggaagtgtttgttgatttttagttttgtgttgattttgtttttggtttgtggatttggggagttgttgtattttgttttggatgttatgagattttagatgggagtttttttgaggtgaagttgttgagtttttgggttttgttaggtttttttgggagagttgatggatttttttttttagtatatataatttttttgttttttattgggattggtggagtggttggtggatttagatgtggggattttagggtagggggtgttttttgtttgggttattagttggggtgaggggatgtttttttttttttagttgttttgtttggatggtgttgttggttgagtgatgggggtggtgtgtaggattttttagtttggattttttgtttttgaggggaaagatgtatgagagtgtagaagtggggggttttatttttaatttttttttagtggtggatttttataattagaattgggtttgtttgtttttagagaaggggttttttgttttgggtttgtattttattttgttttggattttgttttggaatggtttaaattattgtatgtattggttttttagtttgttgttgtagggggtgggagtgggtggtagggtttttattattatttgggggtgagagttttggggtgtagtggaggttttgtttttattttttatttaatttgtgttgtttttgttggataattgaatttttttggttgtat

SEQ ID NO: 793 - DNA, 2250 bp, Artificial Sequence
  chemically treated genomic DNA (Homo sapiens)
gtgtggttgggagggtttaattgtttagtaagggtaatatgggttaagtgaaaggtagagataggatttttattatattttgggatttttatttttgagtagtagtggaagttttattgtttatttttattttttataatagtagattgagaggttggtatgtatagtggtttgagttattttaaagtggagtttggagtggggtggagtatggatttggggtggggagttttttttttgggagtaaataggtttggttttggttataaaaatttattattaggaagggattaggggtgggattttttatttttatatttttgtatatttttttttttgaaggtaagaggtttgagttgggaagttttgtgtgttgtttttgttatttagttggtggtgttatttgagtagagtagttgggggagaggagatgtttttttgttttgattggtgatttgggtagggggtgttttttgttttgaagtttttgtgtttaagtttgttggttgttttgttagttttggtgaaaagtagggaagttgtgtgtgttgggagggggggtttgttggtttttttagggaagtttggtggggtttgggaatttagtggttttattttgaggggatttttgtttagagttttgtggtgtttgaggtagagtatagtggttttttaagtttgtaggttgggggtgggattagtgtggggttgggggttaatgagtattttttttttttagttggggatttggggtttttttagggattttttgtggtgaggattttgggtgggggtggggattttgtgtggttttgtttttgttaggttaggggtagttggtgatttgtttggtttttggtggtatgtgttatggtttttttattttagttttgtgtgtttttttttttttgggtattattttttttttattgttttgttttgtttaggtattgtttttggtttaatttatttttggtgtgtttggttgtagtgggagaaatgtagggaattgagagggagaggtggtatgtggataggtaagtgggggtagtttgggaagggggaggagaggagagaagtaggaagggggaaaggttttagatgaggagtatatagagtatagagggatgttgagtatagggagaggagggggttgtgaggggataaggatggaagaggggtgggtgtttttttttgtattagttttggtttttaggtttttttaaggtttggttagtttttggttgagtgaagttgtggtggaggaggtggtggggtggggaagaggggggtggttttggtgttttttttttaatatatatttttatttaggttgggttttatttgtttaatgtaatgtggttgaatttttgttgaatttgtttggtggtgttttatttttgagtgatttatttattgttgtttgtgatattatttgtttgttagtttgtttgtggggtttgtttgttagttttttgtttggttgaattgggttattttttttggagatgtggagagtggtggtaggaggtgtagggttgggttgtgtggggttaagtgtttggtatttgggtgtgatattgtgtagtttggatgttgtgttggaatgagatattggtttgtgttattgtttgtgatattatgtgtgattttggttgttggaatttgatgtggtagtgtgggtgttgttggtataaatataggtagagggggtttttttttttatgttttgtgtgtttttggtgagtaaagttttgtttaaggtgttttttagttggggaattagtattggtttttggtgtattgtttagttttggagagataaaaggaagagttggtgttttttagtggattattttattttagaagtttttgggatgtatgttttattggaagaaaggtttagtttgggtaggtttttagaaagaggggatatttttggaggagggggtattttattatttttattttttaaaaggaaggatggaaatgtatatgttatttaaggatatttttttagaagaagtttggttttttatatatgttgttattttatttttatagtaattttaagagatgttttataaataaaataggttttagtaaggttatgtgggttgtttaagattatattattaataataaagagtagagtaggtatttgaattttttgttgttaaagtttatgtttttattaagttaggttaatttaaggtatttttttgagtattttttatgtggatattttgg

SEQ ID NO: 794 - DNA, 2441 bp, Artificial Sequence
  chemically treated genomic DNA (Homo sapiens)
ttgttttttaaaatgttgtttattatattaaaatataattttgttttttaaatagtgagtaaaattaaattaattttatttttttaaatagaagtttatttaaagtttttttataaaaatgatatttatttgatttaatattgtttttttaataagaataatatgtagggtgttagagggtagttgttggatttttttttagtaaataaaggagattagttagagtttagtttggtttgtttaggaaaggaggaatgtagtttgttgatatggttaaggaatgttaattaatatattttaaaatttttattattttgtttgagatgtgtatatttttttaggtttttaaagtttaattagaaagtgtatttaattttattgttattttatttatagtggggaagtttattgaggaaaattatagggaaataaaatgttttttagttatttatattagtataattaatttagagtttatggtataaattaaataagttaatttgttagtgttttgaatgaagatatttaattaaagtatgtattttttaattttttagtagtttttaggatagttggttttggtgattgttttttggttttttattgtttttaatatgattggttttttattgtaggattttaaataaaatgagataattaaattatattttgagtgaaggggtgtttattttgtagataaatatattggttttgttttttttaaaatgtggatatgtgttttttttgtattagggggggttttttggtgtgtgttttgttgttatttgttgaggaaagtgagtgtattttttgtagtttaggttttgggtgttagttttgttttgtagttttagagtttgttgtagtttgggtggtttttttttggtttagtgtttgttgtttgttttttgttttgtaagttttaagaggtagttattttttgtagtttttgtgtttgtaattgttttttggtgggggagtgggtgtttaaaaagttagtagttggagaaattgaaaagattataagtgatttaatgataagtttttttttttttttaaagattgagaggagggtagaggggagtagtgtttgagtttatgtgattgagttagggagtttgatggttttaggaatgtttgatgttgtgtgtgatttttaagtgggagtatttttgaattgatttttggtttatttataaggatagtggtgtatagatggtgttttttgtagttttagttttagatttaagaggtttggagtagggtttgagaatatgtatttttaattaggttttgggggatgttgatattgatatagttagtttggggattatattttgaggattatgtttttagtttttgatttatataagtgttatttagaatagatgtttgattttaaggagttagtggtgaaattagagaggttttgggtttgttaaatttttagtagtaaatgtaattttgggttttggagtggtaaagttgtggattagaggtggagggagtgggtttttagtttttaagaggttattgggaaggttttttgtgttagattaaagattttaggtatttttttgaatttatttgaagtggtattggggagatttgtgtttttggttatggtgtttttttttgttggaggtatttgtttatttttttttttgggtgaaggttttttgtgttttttggtggtagttttagtttttttagtttaatggggtgttttttttatttattttagtaggagttttagggtgtgagattaggattatagttttaattggttttaaggtagttgttgttgatgaaaatgaaaaggaaagtagtatgtgatttataggttattgtgagaattttttagtgttatatttgtgtttaattaattattaaattatttatttaggtggtataagggatatggtttttgagggttgtgatttagatttttaatagaggaagatgagggggggtatttggagggaaagttttatagtattagttttagttgtttggtgtttagttaaaatagagagatgtaagtgtgttttgggttgataaagatgaggtttataggtaatgaagataggttttaaagatggagaagtatttgttttattagttaaataatagttgtgaaaagtttttattgttttattttaagtttaatttttattaaagttgagagttttggttttttttaggttgaaaggtagagtttttttgtttttgaggtagagaagttagtttggatgggaagagtgtgttgttggtaaataattgtagtagataatatgttaattttagtttttttgttttttgttttggggttttttaaagtatttagtttttatatgttttttttttttgttattttatggagaaaatgttaaatgatggtttaaaaaaattagttttatggttaggtatggtggtttata

SEQ ID NO: 795 - DNA, 2441 bp, Artificial Sequence
  chemically treated genomic DNA (Homo sapiens)
tgtgagttattatgtttggttatgaagttgatttttttaaattattatttaatattttttttataaggtggtaaggaggaagagtatatggggattgggtattttgagagattttaggataggagatagggaggttgagattggtatgttgtttgttgtagttatttgttagtgatatattttttttgtttaaattaatttttttgttttaaggatagggagattttgttttttaatttgagagaaattaggatttttagttttaatgaaaattggatttagggtggggtagtggagattttttatagttattgtttagttgatgaagtagatgtttttttatttttggagtttgtttttattatttgtggattttatttttattaatttagagtatatttgtgtttttttattttggttaaatattaaatagttgaggttggtattgtaaaattttttttttaaatgtttttttttgtttttttttattagagatttggattataatttttaaaaattatgttttttatgttatttgagtagatggtttgatgattaattaggtatagatgtgatattggggggtttttataatggtttgtgggttatatgttatttttttttttatttttattagtaatagttgttttaaagttagttaagattgtggttttagttttgtattttggggtttttgttggggtgggtgaggggaatattttattaagttgggggaattggggttgttattagggggtgtgaggggtttttgtttgagaagaggggtgggtaggtgtttttagtggagaagggtgttgtggttggaggtataggtttttttggtgttattttaagtgagtttgaggaagtatttgggatttttgatttaatgtgaaaggtttttttagtgattttttgagagttgagaatttattttttttatttttagtttatggttttgttattttagggtttgaggttatgtttgttgttggggatttgataaatttaaagtttttttggttttattattggttttttagaattagatatttgttttgaatgatatttatgtgagttaggggttgaggatgtgatttttgaagtgtggtttttagattggttgtattagtgttggtattttttaggatttggttggaaatgtatatttttaggttttattttagattttttaaatttgagattggggttgtggggagtgttatttgtgtgttattatttttgtgggtggattaggagttggtttgagggtgtttttatttagaggttatgtgtggtgttgggtgtttttgagattgttgggttttttggtttggttatgtgggtttaggtattatttttttttattttttttttggtttttaaaaggaagaaggggtttattgttaagttgtttgtgatttttttagtttttttagttgttggttttttggatatttatttttttgttaggaggtagttgtaagtgtggaggttgtgagaaataattgttttttgaaatttgtagggtgaagagtaggtggtgagtgttgggttggggagggattatttgagttgtgatgggttttggggttgtggggtagggttggtgtttggagtttgagttgtaggaggtgtgtttgttttttttaataggtggtggtggggtgtgtgttgggagattttttttaatgtgggaaaagtatgtgtttgtattttagagaaggtaaggttggtgtgtttatttgtaaggtaagtgtttttttgtttgaggtgtggtttaattgttttattttgtttgaaattttgtggtgagaaattagttgtgttgagaataataaaagattaaaaaatgattattaaaattaattgttttgaaagttattggaaagttggaaaatgtatgttttgattaaatgtttttatttaagatattggtaagttaatttatttagtttgtgttgtgagttttgggttgattgtgttaatatgaataattgaaaaatattttatttttttatggttttttttgatggatttttttattatgggtgaaatgataatggagttgaatatattttttgattgaattttgagggtttgggaagatgtatatgttttaggtaagatgataggggttttaaaatgtattaattggtattttttagttatgttagtaagttgtgtttttttttttttgggtagattaagttaagttttaattggttttttttatttgttgaagaggagtttaataattgttttttaatattttgtgtgttatttttattggaaggataatattaagttaagtgaatgttatttttgtgaaaaaattttgagtggatttttatttaggaagataaggttgatttaattttatttgttgtttaaaaagtaggattgtgttttggtgtggtaggtaatattttggaggatag

SEQ ID NO: 796 - DNA, 2378 bp, Artificial Sequence
  chemically treated genomic DNA (Homo sapiens)
attttgagattttagttgattttttttgttttgtaattagaggggattgtgatttgggttaattttttttttatgggttttagtggagttagttgtggaatggaatattaatttttattttataggtatgttgtgaggttttgttaagaaatagttataaaagggttttaagagttatgatgattgttttaattatttagtagggagggggtatttagtggtgttgtttttatgtattgatgttatgtggggtggggaggtggggtggagaatggagagtgtttttttattttttattttttttttttaagtttagtgtagggggaggtggttgtgattgattgaggggttagggaaggttggttaggggtgtgggtgtggttggggatggtttgggggtggggttgtgtaggaggttggaggagttttgtgggatttagaggtggggtgttggtttggggattattgtttttttggggtgtggttgtaggaggttggaggagttttgtgggatttagaggtggggtgttggttggggattgttgtttttttggggtgtggttgttgttgagtattttttagtttagttgagtttgtgtttaggttatgttttgttttagttgttgttttttttattttatggtgtttggagttattttttgtttgtttgttttttttttttgtttattttttgtatttgggtttgtattatttttgttaattgtttttttgattttgttgatattttttttttaaatttttgattggtatttttgtttggtatttttttttttatttttttttttttattttttttttttgattttttttgggtttttttttttttaaaatttgggtttttttgtgtggttttgtttttaggttggggatgttttttgtggttttgtgtttatggttttgatgttgtttttttttgtttataagttgtgttgtttttttgttatgttgggtttatggtggggtgttgagtggttggtggtgtttgggttagatgggggtggtggtatgggtttatggtgggttgtgggtggtttgggtttgtgaaagtgttgttgggggtaggtattgaggtgtaggatgttttggagtgtgtgttgttggagttgtagtaggttttgtttgtgttgaagtaggtgggtggtgtgtgggttgtgggtgttggtttggttgaggttttttaattggtggaggaggtttggttgttgtggttgtgggttgtgaggtagtttagggtttgtgtgatgttatttgttttgatggtggttttgatttgttgttgtggttgttgtaggtgttggagttggagatgtgtgtgtaggttgtgtgtttgttggagtagattttggtggttgagaattggtgagtgtgttaggttggggttgggagagtgttgtgtggtgtggatagttaagtgtttgtgtttttgtgtgttttgtgttgtgtttttgttttttttatttttttgattgtttgtattatatttttgttaggggttagtttgtttgttttatagataaggaaattgagttttgggaaagtttagtgatttgtttagtggattatagtgaattaagatttgtttttagggttagtggggtgaggaatggagttataggataggagtttgtttttggttttatggatggagatggtattttattgttaatttttttttttttttgttttttaagtttatagtttttttttttattggtttgggtttttgtttatgatatttttttttgttattattttattttttttttaatgagagaagaagggaaatataatgtttagaaaagagggagggagatttttttttttttttttttttaggttgtaaggtgtgttggtttgaggttgtttattttttttttgttgttttaatttaatttttgttttattttttattttggtttttgtaataggttagatatgattttattttgtagttgttgatgggaaatagttttttgttgggaggtatgggtgggggaagaggatattggggtgtagagtttggtggggattaggtagagtgtgtgttttttttttttattttatttagtattaagatgttgtaagagggttaaatagaggtttggttgttatttttgtatgttttttgggattttttttggagtatgaagatttttaaggatttatttttttttttttttgatgttagagtagattaagttgttatattttagttttatgttgaagtttttagttttttaagtttagaagagtttttggaagagttatttttagtttatgtagtttttataagtgtgaagggagtgggttgggggtgttttttttgttatttttgaaaagaaaaaaattatttggtg

SEQ ID NO: 797 - DNA, 2378 bp, Artificial Sequence
  chemically treated genomic DNA (Homo sapiens)
tattaggtaatttttttttttttgaaaatggtaaggaaaatatttttaatttattttttttatatttgtgagagttgtatgagttgaaagtgatttttttaaaaatttttttaagtttgagaagttggagattttagtatgagattggagtgtgatagtttggtttgttttggtattagaagggagggaaagtgagtttttggaggtttttatattttaggagagattttaagagatatgtaagagtggtaattaggtttttgtttgatttttttgtggtattttggtgttaagtggggtgaagggagagaatatatattttgtttggtttttgttgggttttgtattttggtgttttttttttttatttatgttttttagtagaaaattgttttttattagtagttgtagaatgagattatgtttggtttgttgtaagaattagaatgaaggatggagtagaagttggattggggtggtaagaagggagtaagtagttttaggttagtatgttttatagtttggggaggagggaaaggagaggttttttttttttttttttgagtgttgtgttttttttttttttttattgggagagggatgggatgatggtgagagaaggtgttatagatgggaatttaagttggtgggaaggagagttgtgggtttggggggtgggggagagggagaattggtaataggatgttatttttatttatagagttagggatggatttttgttttgtaattttattttttattttattagttttgggagtaaattttagtttattgtgatttattgagtaagttattaaatttttttaaggtttagtttttttatttgtgaaatagataggttgatttttaatagagatgtagtgtaggtagttagagaggtgagggaggtaaaggtatggtgtaaggtatatgggaatgtaggtgtttaattgtttatattatgtggtgtttttttaattttggtttggtgtgtttattggtttttagttattaggatttgttttagtaggtgtgtggtttgtatatgtgtttttaattttggtgtttgtagtagttgtaatagtaggttgaggttgttattgaggtggatggtgttgtatagattttgggttattttgtggtttatggttgtagtagttaggttttttttattagttggaagattttggttaggttggtgtttatggtttgtgtgttgtttgtttgttttagtgtggataaggtttgttgtagttttggtagtgtgtgttttagggtgttttgtattttggtgtttgtttttggtgatatttttgtgggtttgggttatttgtagtttattatgggtttgtgttattgtttttatttggtttaggtattgttagttgtttggtgttttgttgtgggtttgatatggtgaagaagtgatatagtttgtaggtggagagaagtagtgttaggattatgggtgtggggttgtgggggatatttttggtttggaggtggggttatgtggagagatttgggttttgggaaaagagggatttgagaggggttggggaaagaagatggagggggaggaatggagagaagggtattaggtaagggtgttggttagaagtttgggggaggagtgttggtaggattgggggagtggttggtaaaggtgatgtaggtttagatgtagggagtgggtgaaaggagagagtgagtaggtgagggatggttttggatgttgtagggtagaggaggtggtggttggaataaagtgtggtttgggtatgggtttggttgagttgggagatgtttggtagtagttatgttttggaggagtagtggtttttggttgatgttttgtttttgggttttgtggggtttttttagttttttgtagttatgttttggaggagtagtggtttttgggttgatgttttgtttttgggttttgtggggtttttttagttttttgtgtagttttatttttaagttgtttttagttatgtttatgtttttggttagttttttttagttttttagttagttgtagttatttttttttgtgttggatttggaggaagggggtggagaatgagaggatgttttttgttttttgttttgtttttttgttttatgtgatattggtatgtgggagtaatattgttggatgttttttttttattaaatggttaaaataattattataatttttaaggtttttttatggttgttttttagtgaaattttataatatgtttatggggtgggaattgatgttttattttatagttgattttattgaagtttatgaggaagaaattggtttaaattatagttttttttgattatagaatagaaaaagttagttaaaattttaggat

SEQ ID NO: 798 - DNA, 2444 bp, Artificial Sequence
  chemically treated genomic DNA (Homo sapiens)
tagattttaggtgttttggagttttgtagattagagaggttagtattggaagtttgggtttatgtttttagtagtttttagtttagggggtttttaaggttgaatagtaagtttaggattattttggtggtggggtaggtttagtttatatttagttttggtaagtagttttagaaattgttagtgatgttgtttttaagttaaattttaggaggaaaagaaaatatgaggataataaagagaggaagtggtttgggttggtttatttggtgggttttgttttgttttttaattattttggttggttttataggggttgttaattatataagttagtttttgtttttgaggatttggtttagggattttgggaatgtggtagatatggggtggttttattaaatgtatttttatgggaatttgttttttgggagttatgaaaagagtgtggattttgaggtggggttataggaagtggttaggtttattttaggggatttgttgtttatttatattgttggttaggaaatggggggtaatttatgtttttttagtatttttagtattgggtggtttaaagaagggaagggattattttggggttatatagtatgtagttagaggttaaggtatgaggaagttttttatttttttatttttatttattttagattttttaattggttttatggtagtttagggtttagtggtatttaggatgttggtgggtagttgtatagtttaggttgtgggaggttggttgtttttatttaataggtttatgtggttttgatttttatttaggaagttggggataatggttaaggtgttttttttttttgtgtttgtttgtttaggtgtagtatagatatagtatttttggggttaagagtatttagttagggttgtttttatgggtgggtagggtagtaaatgaatgagggataggttgggaggtggttagttttttttagtttatggagggtatggggtaggagagttgggttgagttagtaggagtttagggagtttggtttttgtttttttattttggaggaaggtgaggttgaatttttttttttttttttttttttttttgtttttattgtatgtagggttggttgggttttagttggtttttgtattaatattttattggtgttaataggaggtattggggatagttgttgtggtagtatttgagttagtttaagtttgtagtttgtagggagatttagttttgttttgtttgtagtagtataattttgtatatttattatggatgtttttaagaagggtttttttattgttaaggagggtgtggtgggtgtggtggaaaagattaagtagggggtgatggaagtagttgagaagattaaggagggggttatgtatgtgggtaagtggggtatggtagggtgggatagtgtggtggttaaagggtgagtgtttagttatttttgttagattttattttttagttttagggaggtattttgggagggggtgaggttttggttattaaggtggggtttttagattttggagtatttataatgttttgtgtatatttatgtgtgtttgtttttggtttttttggggtttttgggtgttagagattgtagatagggttggttatttgtttgtgtatgtatatatatatttttaagtatattagttttttttgagtttggagtttttgaagttatgagtagtttgtgtttaggtggtttttattttttttatatgggagtggttatagttaggttatggattttttttttttttagagagaaggggtaggttgggggatgaaatttaggtttagtgtttttttttttgtatttttttttggtattttttagaggaggaaggggaggttaagttaatgatttagttttggtttattttgttttgttgttgtttttgaggtttggttatatttgggtaggggttggattttgggtttagttagtgtttttattttaggtttgtttttttttgttttttatattttgttttgttttttttttatttatttattttttttagatatagtaggaagaggttttttgaaggggttgttggtttttagatattatttttatttttttattgattttatagtttgtttagttgttttgttgtgtttgttttgattgtttttaatattttgagggaggtttgggttgatagttttattttttttttaggagttaagattaaggagaatgttgtatagagtgtgattttaggtgagaagttttagggttaggggatatatgggggataggatttttggggtttttgtattttagtgttggggtttaaatttagagttttgttttatttttaattggggttttaagttttatagatttttgtagattatgaggttaaattagggtgggtgtttttttatttttattagtattagaggtgtt

SEQ ID NO: 799 - DNA, 2444 bp, Artificial Sequence
  chemically treated genomic DNA (Homo sapiens)
ggtatttttgatgttggtgggggtaaggagatgtttattttagtttagttttatggtttgtaggggtttgtagggtttgggattttagttgggggtaaggtaggattttaggtttgagttttagtattaggatgtaggagttttaggggttttattttttatgtgttttttggttttggggttttttatttgaggttatgttttgtataatattttttttggttttggtttttggggaggaaatggagttgttagtttagattttttttgaggtgttgggggtggttaggataaatataatagaatagttggataaattgtggggttggtgggggggtaaggatggtgtttgggggttggtggtttttttagagggtttttttttgttgtgtttggaagaagtggatggatgggaaggggataggatagaatgtgggggataagagagagtaggtttgaggtagggatattggttagatttagggtttagtttttgtttgggtgtggttgggttttagaagtagtaataggataggatgggttagagttgagttattggtttgatttttttttttttttttggagagtgttaggagaggatgtgggggagggaatattgagtttaggttttattttttagtttgttttttttttttggggagggaggggatttgtgatttggttgtagttgtttttgtgtggagagggtgggggttatttgagtataggttgtttatggttttaggggttttaggtttaggggaggttggtatgtttgggaatgtgtgtgtgtgtgtatagataggtagttagttttgtttgtggtttttgatatttagaggttttgaggaggttaaagataaatatatataggtgtgtatagggtattgtgggtgttttagggtttggagattttattttgatagttagggttttgtttttttttaaaatgtttttttggggttggggagtaaggtttggtgaaggtaattgggtatttattttttggttattatattgttttattttgttatgttttatttatttatatatatgattttttttttggtttttttagttgtttttgttattttttgtttggttttttttattgtatttattatgttttttttggtgatggagaagttttttttgaagatatttatggtgggtgtgtagggttgtgttgttgtaggtaggatggagttggatttttttgtgagttgtgggtttgagttggtttgagtgttgttgtagtggttgtttttgatgttttttattgatgttgatgaaatattgatgtggaggttagttggagtttagttagttttgtgtgtagtgggggtggggagggagggagggagggaaggaggtttagttttatttttttttaggataggaaggtagagattaggttttttgggtttttgttggtttagtttagtttttttgttttgtgttttttatgggttggagggggttggttattttttaatttgttttttatttatttattgttttgtttatttatgggggtagttttggttgggtgtttttggttttaggggtgttgtgtttatgttgtatttggatagataggtatagagaggggaggtgttttggttattgtttttagttttttaggtaggggttagggttatataggtttgttaggtgagagtagttaattttttgtggtttgggttgtgtagttatttattagtattttggatgttgttggattttgggttgttatgaaattggttggaggatttgaggtgggtgggggtggggaaatgaaggatttttttatgttttggtttttggttgtatgttgtgtgattttagaatagtttttttttttttttgagttgtttagtgttgaaggtgttgaggaggtatgaattgttttttattttttggttagtagtgtggatgggtagtaggttttttgagatggatttgattattttttgtggttttattttgaagtttatgttttttttatggtttttagggagtaggtttttataaggatgtatttggtggggttattttatgtttattatatttttagagtttttgagttaagtttttagggataggaattggtttgtgtggttggtggtttttgtggggttagttagggtagttggggggtaggataagatttattgggtaggttggtttaggttattttttttttttgttgtttttgtatttttttttttttttgagatttaatttgaagataatgttattagtagtttttggagttatttgttaaggttgagtgtgagttgagtttgttttattattaagatgattttgagtttgttgtttagttttgggggttttttgggttgggggttgttgggggtatgggtttaggtttttagtattagtttttttgatttgtagagttttaggatatttggggtttg

SEQ ID NO: 800 - DNA, 2001 bp, Artificial Sequence
  chemically treated genomic DNA (Homo sapiens)
gtattatggtggttgtttttttttgttttgtgtagtggattttttggtttttttttagttttggggtttttatagtttttggtttggtttttttttttatagttaggttttgggtaattttaggggaaagtgattttgaggttttttatttttttttgtgttttgtataggttttgggtttttggtggtgttgtttgttgtagttttatgtttttttgggagagtggtttaggtttttttttttgagtgtgattgtgttgttgtttgtgaggtttgtgtgggttttttttgggttgtttttgttgggatggggattggtggttttgggttatgttttggatttggtttgttttttggtataagtttgtatgggttatggttaggtaggagggtgggtggtggggttttgggggtgttgagtttggggttgtgtggtttttaagagtaggttgtgtgtgtttttgttggagttttatgaaggtggtttagggttatttttgagggtgtgtgggtttgatttgtgttttggatttagtttgtggttaggaatgtaggtgttttagggtgttaaaaggaaaatgtataaggttttgttgaggagggggggttaggaggggattgggggtgggaagaatgtgggggagagggatggtagggtgtttgtttgagggattgatatttttgtgagtggtattttaggatgttgatgttggtgggggtgggggtttgaggggtggttggggttagggggtggttttaggggtagggttgtagtatgaggggttgtgtgattttggtggtgattgggtggggagaggttggtgttggggttgggagatggttgtgggtgggagggtgttttgtggggatgtttttgttgtagtgtttggttatgtgtgaggttttgtttttaggatgtgtttggtgggatggatttgtttattttgtagttgtgtgtttgttgtgttgttttgtgggtgttgtagttttggagtttgtgtgtgtggggttgggtttgggagttttagggtagttgttttgttgagttgtaggtattggtggggaatggggttatggggttgtgtgttgggggttgtggggtgttttggggttttggggtgagtgtggggtgtgggttgaggtttgtagggttttgtgaggtgagtgtgggggttggtgttggggtttgtggggttttggggagggtgtggggtgtgggttggggtttgtggtttgtagtttggggtttgtggggttttggggagggtgtggggtgtgggttggggtttgtggtttgtagtttggggtttggggggttttggggagggtgtggggtgtggttggggtttgtggtttgtagtttggggtttggggggttttggggagggtgtggggtgtgggttggggtttttgtgggggttgtggtggtttgggtgtttggtagaattgttgttgtgtagtgggttttttgttgtttgttttttgttgtagtttgtgaatggggtggggagttttggtttttagtttgttttttgtgttattttggggtgttaagttttatttttgggtttggaggaaagtgtggatttggtgtttgtgtttaggtatgtgttgttttgggatgggttagttggtgggtgaattttgttagttatgtgtggggtgggtttttggtatatttttagattattgttttttgtgttagaagttttgtaggtgtaatttttttttggagtagttgtgggtgtggatttagtggagtaattttgaggtgttttagagagagtttggatagttgttggagttttttttgagtgggtttttttaatattgttatagtaggaaagttatttttttagggttttgtttattggaaatttttgttttggggagtttggtttgtttggttttaggatataggttaattaagttggttttgaaatttagaatgtatttagagggaaggtgggataaagtttttggaggtgtttgttggttgtt

SEQ ID NO: 801 - DNA, 2001 bp, Artificial Sequence
  chemically treated genomic DNA (Homo sapiens)
ggtggttaataggtgtttttaaggattttattttattttttttttggatgtattttggattttggggttagtttagttggtttgtgttttgaggttaggtaggttagattttttaggataggagtttttgatggataggattttagggggatggtttttttgttgtagtggtgttggaaggatttatttgggaaaggttttagtggttgtttaggttttttttgagatgttttgggattgttttgttggatttgtatttatagttgttttaaggggaagttgtatttataaagtttttggtataggagataatggtttggagatgtgttaggggtttgttttatgtgtggttggtagggtttatttattggttggtttgttttgaagtaatatgtgtttgggtgtgaatgttggatttatgtttttttttagatttgggggtgggatttggtgttttaggatgatgtggagggtaggttgggggttgggattttttattttatttgtaggttgtggtggaaagtgagtggtgggaaatttgttgtatagtaatggttttgttaggtgtttgggttattgtgatttttgtggagattttggtttatgttttgtattttttttagggttttttagattttaggttgtagattgtagattttggttatgttttgtattttttttagggttttttagattttaggttgtagattgtagattttggtttatgttttgtattttttttagggttttgtggattttaggttgtagattgtagattttggtttatgttttgtattttttttagggttttgtggattttagtgttagtttttatatttattttatagggttttgtaaattttggtttgtgttttgtatttattttagggttttgagatattttgtagtttttgatatgtggttttgtggttttgttttttattggtatttgtgatttggtggggtggttgttttggggtttttggatttggttttgtgtatgtggattttgggattatagtgtttataaggtggtgtggtgggtgtgtggttgtggggtgggtgggtttgttttgttgaatgtgttttgagggtggggttttgtgtgtggttgggtgttgtggtaggagtgtttttatggggtatttttttatttatggttgttttttagttttggtgttggtttttttttatttggttattgttggggttatgtggttttttgtgttgtggttttatttttggggttgttttttgattttgattgttttttgggtttttatttttgttggtgttagtattttggggtgttatttgtggaggtgttggttttttgggtgggtattttgttattttttttttttgtgttttttttatttttggtttttttttgattttttttttttgatgaggttttgtgtgttttttttttggtattttggaatatttgtatttttggttgtaagttggatttgggatgtgggttgggtttatgtgtttttaggggtggttttgggttgtttttgtggggttttaatagggatatgtatagtttgtttttggggattgtatggttttgaatttggtgtttttgggattttgttgtttgtttttttgtttgattgtgatttgtatgggtttgtattaaggagtaagttggatttaggatgtggtttggggttattagtttttattttagtagggatagtttgggggagatttgtgtaggttttgtagatggtagtgtagttatatttaggaaggggggtttgggttatttttttaggaaggtgtggggttgtggtagatagtattgttgaaagtttaaggtttgtgtaggatatggggagaagtggggggttttagggttatttttttttggagttatttagggtttggttatggggagggaagttaagttgagggttgtgggggttttaaggttaaggaggagttaggaagtttattgtatagaatagaaggggatggttattgtggtat

SEQ ID NO: 802 - DNA, 2002 bp, Artificial Sequence
  chemically treated genomic DNA (Homo sapiens)
tttttattttgaaaggagttatttttttgtagttttttagttgtgaaaagaggaggaagttggttgggttgggggttgtggggggtattttttgtagatggtgggatttttttgttggttatggtaaaaatgaggtttgttttttttattgtttttaattttagtttttggtatattgttgaaagtaattgaataaaattggaaatttgagaaggtgtttgtttggattggtgagattttgaggggagaaagaagtggggattttgttggtattagtggtgttttttttttggttattgttaatttttattttagagggtattgttttgttatttagtttaggtttttttgtgagagttttgtgggtttgtgtagtttttgtgatttgaatagatttttagtttttggaggaatgtttgtttttttaataataaaaaattaaagaagtgtttataaatgttaagtttttttgtattatgtggagtatagaggataatgattatagttatttttgaattttgtttatggtatagtgttggagttggggtttggggtgttgttttttggggggttttgatttttagttgtttttgttttatttgggttgttaaggggttgggggaggtggtgtttggggtaattgggggagatttagggtgttgggggtatttggggaatttatgggggtttaaaggaattaggagattgggattttgaaggggatttggggggtttggggtttttgggggtggttgggggtttgtggatttgggaagttttgaggatttagaggttgggtgtgttttgtttgtggtgttgttttttttgtaatttttttagtttttgagggaagaggtggggtgtggggtgtggttaaaaggtgttatggtgggagataggtgttgtggttttgtagtgtttgtgtgtttttttttttgatttggagttttttggtggtgtttggtttaggatttgtttaggagtgtaggagttttagtgtagagattttaatgttgagatttttgttttggttttgttgtgtttttttttgatgtaggtgagtttgttggttttggattgtttggttaggaatttggtggtggggagggattgtgagatttagagtggttgtttggttgtgtgggttttggggaattggggggttggattaatatatgtttttgggttggggggtgggggttgttttttggagtgggtgtttttgtggttgagttttggagttggaatggggtggttggggaagtggatgtgatggtattgtttggggtgtgagtggggttgggtgtgtgtgggaggggaaaaaggtgtgggtgagttgttagtgtgaggtttgtggtgttgttgatgtttttttggggtattttagtgtagttgtttggttatttgatttattgttattaaatgttttaaatttattgaaagtttagttttgaagtaaagttttgttttgttggtgaagtaggaagtttttgttgtaggaattgatttttattttttggagtggtttttgtagaaaaatttttgggtagagatttgggtggagtttgtttagaattaatgtggagttagttgattttggtttattttggggttaagattttagtggttttttttttttttaaatattttatgagggtttgtttttgggttgtgttttttgtttagaaggaaaatttttaggatttttgtttgtgaagaggtggtgtgtggttgagatttgtgtttttaggatggttttattagtgttttgattttgttttattggaggaggaaggtagtttgaatagtgtttatttaattaatagttgttgagagttgggttttgtggttatgtatttgggattgttttgagaagtgtggtatggttgtgtttttatgtgattttagagttttttttgaaattgttgtgtatagttggttataattttagatattggtgagaagggtggaggaattttttggggatagttaggtaaggttg

SEQ ID NO: 803 - DNA, 2002 bp, Artificial Sequence
  chemically treated genomic DNA (Homo sapiens)
tgattttgtttggttgtttttagagggtttttttattttttttattagtgtttgaaattgtgattgattgtgtatagtagttttgaaagggattttaaggttatatggggatatggttgtattatgttttttaaggtagttttaggtgtatggttatggaatttagtttttagtagttgttagttaggtgagtgttgtttgggttgttttttttttttagtggggtaggattgaggtattgatggaattgttttgaggatgtgggttttagttgtatattatttttttgtgaataagggttttaaaaattttttttttaggtggggagtatagtttggaaatagatttttgtgaagtgtttaggaaaaagggaagttattgaaattttggttttggggtaggttgggattggttggttttgtgttagttttaggtaaattttgtttaaatttttgtttggggatttttttgtagaagttgttttaagaggtaaaggttagtttttgtagtgaaggttttttgttttattggtgaaatggagttttgttttgaagttaagtttttggtgaatttaaaatgtttggtggtagtgggttaagtagttaggtggttgtgttagagtattttgaagggatattggtgatattataaattttgtgttggtggtttgtttgtgtttttttttttttttgtgtgtgtttggttttatttgtattttgggtggtgttattgtgtttatttttttggttgttttattttagttttggagtttggttgtagaaatgtttgttttagaaggtggtttttgttttttggtttaaggatgtgtgttggtttagttttttggttttttgagatttatgtggttgggtaattgttttgggttttgtggtttttttttgttgttaggtttttggttgggtagtttggggttggtgggtttatttgtgttgggaggaagtgtggtggggttggggtgggggttttggtgttggggtttttgtgttggggtttttgtgtttttaggtgggttttgggttgggtgttgttgaggggttttgagttggggagaggagtgtgtgggtgttgtggggttgtaatatttgttttttgttgtggtgttttttaattgtattttatattttgtttttttttttggagattgggaaagttatggagggggtggtgttgtgggtggagtgtgtttggtttttgggtttttagagttttttgggtttgtgaatttttgattgtttttgaaagttttgaattttttaagttttttttgaggttttgattttttagtttttttgagtttttatgagttttttaagtgtttttagtgttttgagttttttttggttattttgagtgttgttttttttagttttttggtggtttgggtgaagtgggggtggttgagagttgggattttttaggaagtggtgttttagattttggttttggtgttgtgttgtgggtggggtttagggatggttgtggttgttgttttttgtattttgtatagtgtgagaggatttggtatttatgagtgtttttttaattttttattgttagagaaataggtatttttttaaggattgaagatttgtttgagttgtggaggttgtgtgggtttgtgaggtttttgtagggggatttaggttgggtggtggggtagtgttttttggaatgggggttaatggtggttgaggagggggtgttgttggtgttggtgaagtttttgtttttttttttttttaaaattttattaatttgaatgaatgtttttttgaatttttgattttatttaattatttttaataatgtgttaaggattaaggttgggggtggtgggagagataagttttgtttttgttatggttggtaggggggttttgttatttgtggagggtgttttttgtggtttttggtttagttaatttttttttttttttgtaattggggaattgtaaggaggtgattttttttggggtgagga

SEQ ID NO: 804 - DNA, 2430 bp, Artificial Sequence
  chemically treated genomic DNA (Homo sapiens)
agttgtaattttaatgaattgtgattatgttattgtattttagtttaggtgatagagtgagatgttgtttttaaaataaaaaataaagtgaaatttttgattggtataattttgtttttttattagttttatttttaaaaaaattatataagtaaaatatgtttttttagttattattttttaaattagattattttttgtaataattttatgggaattattttatgggagtatagttatttatgtttgtaattttagtattttgggatgttaaggtgggaggattgtttgagtttaggattttgtaattagtttgagtaatatagattttgtttttataataataataataataataaaaataaaaaaattaattgggtatgatggtgtgtgtttgtagtttatgttatttgggaggttgaagtgggaagattttttgagttaaggaggtagaggttgtaagtgagttatgatagtattattgtatttaagtttgggtaagagtgaggttttgttttaataaaaatttgtaaaaaattttgggagtattgtatggttgttagtgaataaggttataagataaaaaataggatgtttaattaaatttagttaaataagtgttgtatatttttagtgtaagtatatttaaaatattaatgaggtatatttatattaaaataaatatttattgtttatttgaaatgtaaatttaaataggtattttgtatttttatttgttaaatttggtaattttattagtattttaatatgaagttatgagggttgtttggatttatgttggtaggtaagtattaatttatttggttgttttagataggatagaaattattttttttaaaaaaattgtttattttgatgataggtagtaatgaagtatggaagaattttgattttttgaggaatttgtaattgatgtaagtgttataaatgttattttgattgattttttgttttttttatttttttttttttgtaattgttttattatttttttttttttaagttttgtttttttagttatttttaattgttgaggaattggttgtttaaaaggagttggtaaaagtgtttatgtggagtttagaggagtggaagtagttagatttgattgagagttgtaaagtgtggttggtttttgttttttggataatgattatagttttgattgttagtgttggttttttttgtgtgaggggatttgttggatttttgtaaatttaattttttttttattttgggtttttttttattgttgttttttttattttggattatgtttaagaagtaaggatatgttgtggtttttattggttgtttataaaggtggtggggtgggggtggggaagagggtgagagttaagatttttttttttttttttttgtttttgttattttgattttttaaggttttttatagtattatgtttttatttttaatttgaatatttttttaagttttttatttgtagtttttaattgggttttagtttttttatttttattgttttttttttttattttttttttttttttgtttttttttttaattttgtttttatttttagggttttattaattatatttgtgtattgtgatttagaggtatattttttgtagttgagaggggagttttgtgtttattgttatatgtttattagttatgaattgaataaaggaaggtttgattttttgggttatgggagtgaaggagtttgggtgataggaagtaagtggtttgttatgtttattgtttagttgttagattaattttgttttgaaaataatgattgttttataggttatttagtgtaaggaagataaaaattttttgggaatttattagtgggtttgttttttagatttggtagatgtaaaaagtaaagggggaatatgggtaaaggaaggtgggttttgtgtatgaaattttgagtaaaaatgaatagggattttagaaattattattattattatttaaaaaaaattttagtagattatatagtttagtaggggttgattttttatgttatgtttgggttggttttttgtattttaagaattgagggttttgttttttgattttaggttttattattggtgggagtttgtgtttttttttgggtagaattgaataagattttttaggaaaggtatttgtgtagttaattatagattatggtgtaaagtatgttttatatttttttttttaattttagttaattgttgtatatttgatagtttattttaatattgtattaagatattggttttgtgttggatagagtaaaagggagatggtatttttttttaaaagaataatttattttataattaagtatttaaatatttggttgggaataaatgattaattagaatagtatttttaggtattttgatatttttatttagaaa

SEQ ID NO: 805 - DNA, 2430 bp, Artificial Sequence
  chemically treated genomic DNA (Homo sapiens)
tttttaagtagaggtattagaatatttaaaggtattgttttaattagttatttatttttaattaagtatttagatatttaattatgaaataaattgtttttttaaaaaaaaatattattttttttttattttgtttagtataaaattaatgttttaatataatattgaaataaattgttaagtatatagtaattagttggggttagggggaggaatatgagatatattttgtattataatttgtaattagttatataaatgttttttttggaaaattttatttaattttatttaggaagaaatataggtttttattaataataaaatttgagattagaaaataaaatttttaatttttgagatataaaagattaatttaagtataatatagaaaattggtttttgttaggttatgtaatttgttgagattttttttaagtgatgataataatgatttttaagatttttatttgtttttgtttaaaattttatgtataaaatttatttttttttgtttatgttttttttttgttttttgtgtttattaaatttggaaggtaaatttattagtaggtttttaaggaatttttgttttttttatattgaatagtttatggggtaattgttatttttaaggtaaggttaatttggtagttaggtaataggtatgataggttgtttgttttttgttatttagatttttttatttttatgatttaggaagttaagtttttttttatttagtttataattaataaatatatggtagtgagtgtagggttttttttttagttatagagaatatgtttttaaattatagtgtatggatgtgattggtagaattttaggaatggagatagaattgggggagggggtaaaagagaaagaggggtaaggagaaaaaataatgggagtggagggattgaaatttaattaaggattatggatggaaagtttaaagaagtgtttaagttgggagtgagagtatagtattatagaaaattttagggagttaggatggtaggggtgggggagagagaaagaggattttagtttttgtttttttttttatttttattttattgtttttgtgagtagttgatggaggttatagtatgtttttattttttgaatatgatttaaggtgaagggggtgatgatagggaagggtttggaatgggaaagaaattgaatttgtaggggtttggtagatttttttatatgaggaaggttggtattgatagttggagttgtagttgttatttggaaaatgagagttagttgtgttttatggtttttagttaaatttgattatttttgtttttttggattttatgtaggtgtttttgttggttttttttaggtaattggttttttagtagttggaggtagttgaaagggtgggatttgagagggaagaagtgatagagtaattgtaggaagagaagaatggagggggtggagaattaattaaagtagtatttatggtatttgtgttagttatgggttttttaaagggttaagatttttttgtgttttgttgttatttattgttaaagtaaatgatttttttagagggaatggtttttgttttgtttgaggtaattgaatggattggtgtttatttattagtatgaatttaggtaatttttatggttttatgttaaagtgttggtaggattgttaggtttagtaaatgaaaatataggatgtttatttaaatttgtattttaggtaaataatgaatatttgttttagtgtaagtatattttattaatattttggatatatttatattaaaaatatatagtgtttgtttagttgaatttaattgagtattttgttttttattttataattttatttattggtaattgtatgatgtttttaaagttttttgtgggtttttattgagatagggttttatttttgtttaggtttgaatgtggtggtgttattatggtttatttgtagtttttatttttttggtttaagggatttttttattttagttttttaagtagtatggattataggtatatattattatgtttggttaatttttttatttttattattattattattattgtagagatggggtttatgttgtttaggttggttgtaaagttttgggtttaagtagtttttttattttggtattttaaagtgttggggttataagtgtgaatgattgtgtttttgtagaataatttttatagaattattatagaaggtaatttgatttaagagataatagttaaagagatatgttttatttatgtaatttttttaaaaataaagttgatagagaaataaaattatgttaattaagagttttattttgttttttgttttagagatagtattttattttgttatttaggttggagtgtagtggtatgattatggtttattggagttgtaatt

SEQ ID NO: 806 - DNA, 29 bp, Artificial Sequence
  chemically treated genomic DNA (Homo sapiens)
ctacaacaaaatactccaattattaaaac

SEQ ID NO: 807 - DNA, 25 bp, Artificial Sequence
  chemically treated genomic DNA (Homo sapiens)
gggttaattttgtagaattgtaggt

SEQ ID NO: 808 - DNA, 25 bp, Artificial Sequence
  chemically treated genomic DNA (Homo sapiens)
cgtaaaccgtactccaaaatcccga

SEQ ID NO: 809 - DNA, 29 bp, Artificial Sequence
  chemically treated genomic DNA (Homo sapiens)
cataaaccatactccaaaatcccaacctc

SEQ ID NO: 810 - DNA, 100 bp, Artificial Sequence
  chemically treated genomic DNA (Homo sapiens)
ctacaacaaaatactccaattattaaaactcatcacgtaaaccgtactccaaaatcccgacctcttcgtaaacatacctacaattctacaaaattaaccc

SEQ ID NO: 811 - DNA, 100 bp, Artificial Sequence
  chemically treated genomic DNA (Homo sapiens)
ctgcagcaaggtgctccaattgttgaaactcatcacgtgggccgtgctccagagtcccggcctcttcgtggacatgcctgcaattctgcaggattgaccc

SEQ ID NO: 812 - DNA, 27 bp, Artificial Sequence
  chemically treated genomic DNA (Homo sapiens)
aaaccaacctaaccaatataataaaac

SEQ ID NO: 813 - DNA, 27 bp, Artificial Sequence
  chemically treated genomic DNA (Homo sapiens)
ggatttaagtgatttttttgttttagt

SEQ ID NO: 814 - DNA, 30 bp, Artificial Sequence
  chemically treated genomic DNA (Homo sapiens)
caaccgaatataataacgaacgcctataat

SEQ ID NO: 815 - DNA, 33 bp, Artificial Sequence
  chemically treated genomic DNA (Homo sapiens)
caaccaaatataataacaaacacctataatcca

SEQ ID NO: 816 - DNA, 126 bp, Artificial Sequence
  chemically treated genomic DNA (Homo sapiens)
aaaccaacctaaccaatataataaaaccccgtctctactaaaaatacaaaaatcaaccgaatataataacgaacgcctataatcccaattactcgaaaaactaaaacaaaaaaatcacttaaatcc

SEQ ID NO: 817 - DNA, 126 bp, Artificial Sequence
  chemically treated genomic DNA (Homo sapiens)
agaccagcctggccaatgtagtgaaaccccgtctctactaaaaatacaaaaatcagccgggtatggtggcgggcgcctgtaatcccagttactcgggaggctgaggcaggagaatcacttgaatcc

SEQ ID NO: 818 - DNA, 31 bp, Artificial Sequence
  chemically treated genomic DNA (Homo sapiens)
cacaatatttcactttaataatattaaaaac

SEQ ID NO: 819 - DNA, 32 bp, Artificial Sequence
  chemically treated genomic DNA (Homo sapiens)
aataataaaacgaaaacctcgataacgattaa

SEQ ID NO: 820 - DNA, 42 bp, Artificial Sequence
  chemically treated genomic DNA (Homo sapiens)
aataataaaacaaaaacctcaataacaattaaaaaaactata

SEQ ID NO: 821 - DNA, 30 bp, Artificial Sequence
  chemically treated genomic DNA (Homo sapiens)
tttaaattattgtttaagatttggataaag

SEQ ID NO: 822 - DNA, 133 bp, Artificial Sequence
  chemically treated genomic DNA (Homo sapiens)
cacaatatttcactttaataatattaaaaaccgatacaatcaaaaccaccacaataataaaacgaaaacctcgataacgattaaaaaaactataaatctttcgctttatccaaatcttaaacaataatttaaa

SEQ ID NO: 823 - DNA, 133 bp, Artificial Sequence
  chemically treated genomic DNA (Homo sapiens)
cacagtatttcactttaataatattggaaaccggtacagtcagggccaccacagtggtggggcgggagcctcgatggcgattaggggagctgtaagtctttcgctttatccaaatcttgggcagtaatttaga

SEQ ID NO: 824 - DNA, 28 bp, Artificial Sequence
  chemically treated genomic DNA (Homo sapiens)
cgtaaccatattaaacgcaaataaacgc

SEQ ID NO: 825 - DNA, 27 bp, Artificial Sequence
  chemically treated genomic DNA (Homo sapiens)
aaatcaaaataaacacaattaaaaaca

SEQ ID NO: 826 - DNA, 38 bp, Artificial Sequence
  chemically treated genomic DNA (Homo sapiens)
cataaccatattaaacacaaataaacacaataacaaaa

SEQ ID NO: 827 - DNA, 33 bp, Artificial Sequence
  chemically treated genomic DNA (Homo sapiens)
aattgagaagtaaaatagtttagtttattagag

SEQ ID NO: 828 - DNA, 113 bp, Artificial Sequence
  chemically treated genomic DNA (Homo sapiens)
aaatcaaaataaacacaattaaaaacattaaaccgtaaccatattaaacgcaaataaacgcaataacaaaattctttaaactctaataaactaaactattttacttctcaatt

SEQ ID NO: 829 - DNA, 113 bp, Artificial Sequence
  chemically treated genomic DNA (Homo sapiens)
aaatcaaaataggcacagttgggaacattaagccgtggccatattagacgcaagtaggcgcaatagcaaaattctttaggctctaatggactgggctattttgcttctcagtt

SEQ ID NO: 830 - DNA, 27 bp, Artificial Sequence
  chemically treated genomic DNA (Homo sapiens)
ctataaaaccaacaaaaaatatttcaa

SEQ ID NO: 831 - DNA, 32 bp, Artificial Sequence
  chemically treated genomic DNA (Homo sapiens)
aattttattacgccaacgcgactataaattaa

SEQ ID NO: 832 - DNA, 42 bp, Artificial Sequence
  chemically treated genomic DNA (Homo sapiens)
aattttattacaccaacacaactataaattaaaaaaacatct

SEQ ID NO: 833 - DNA, 28 bp, Artificial Sequence
  chemically treated genomic DNA (Homo sapiens)
aaaattggtatttattttggtttatatg

SEQ ID NO: 834 - DNA, 106 bp, Artificial Sequence
  chemically treated genomic DNA (Homo sapiens)
ctataaaaccaacaaaaaatatttcaaaccatcgaaattttattacgccaacgcgactataaattaaaaaaacatctccatataaaccaaaataaataccaatttt

SEQ ID NO: 835 - DNA, 107 bp, Artificial Sequence
  chemically treated genomic DNA (Homo sapiens)
gctgtgaagccagcaaaaggtatttcaggccatcgaagttttgttgcgccagcgcggctgtagattagaaggacatctccatgtgaaccaagatggatgccaatttt

SEQ ID NO: 836 - DNA, 22 bp, Artificial Sequence
  chemically treated genomic DNA (Homo sapiens)
tagggtaggttggtttgtgttg

SEQ ID NO: 837 - DNA, 27 bp, Artificial Sequence
  chemically treated genomic DNA (Homo sapiens)
ctttccctacctccttaaataactacc

SEQ ID NO: 838 - DNA, 22 bp, Artificial Sequence
  chemically treated genomic DNA (Homo sapiens)
cgcgtgtttttttgcggagtta

SEQ ID NO: 839 - DNA, 26 bp, Artificial Sequence
  chemically treated genomic DNA (Homo sapiens)
atgtgtgtttttttgtggagttaaag

SEQ ID NO: 840 - DNA, 26 bp, Artificial Sequence
  chemically treated genomic DNA (Homo sapiens)
aacaaccaaaactaaaaaccaaaact

SEQ ID NO: 841 - DNA, 24 bp, Artificial Sequence
  chemically treated genomic DNA (Homo sapiens)
tagtgaagaatggtgttggatttt

SEQ ID NO: 842 - DNA, 26 bp, Artificial Sequence
  chemically treated genomic DNA (Homo sapiens)
cacaccacctacacacacaacctcac

SEQ ID NO: 843 - DNA, 14 bp, Artificial Sequence
  chemically treated genomic DNA (Homo sapiens)
cgcgccacctacgc

SEQ ID NO: 844 - DNA, 2844 bp, Homo Sapiens
ttgtattagagaaaagccagagtagtggagaactgcagaggaacgcggggcacctacataaatgtcttgaatgaatgagtgcacagagtgatagacaaaaagaatcagagggccgggctccgtggctcacgcctgtaatcccagcactttgggaggccgagctgggcggatcacaaggttaagagatcgagaccatcctggacaatatggtgaaaccccgtctctactaaacatacaaaaattagccaggagtggtggcgcctgcctgtagtcccagctactcaggaggctgaggcaggagaatcgcttgaacccgggagacggaggttgcagtgagccgagatcgcgccactgcactccagcttggcgacagagcaagactccgtctcaaaaaaaaaaaaaaaaaaaaaaaaaagagagccagggctcctcttgaagcgaagagggcaaagggcaaaggggaagcacaggggaacttcgcggcgccctctgaagctccctctcgaatataatcgcaacgaaaaggccaacgactagaggctttgcgaggctgaggctgggcttcgggaggggattgccctgagaggtccgggaggacttgctgtggaattcaagcgaccgtgggccttgagggaaccggggggcaagacacccacccagcattcgcggaatatttcctcgaattatttcggggaggggtgaggccggggcagggtggggccttcttcggagggggcgcggcctccgagtaattaatcccgtctttgttgcgttttgctcctctcctgtccacccagcagggccagcccagggcgcgctaagagtccagagagttcgtttccatggtgacgggttccgcgaaggttttcctggggtgaagaggcagggcgttgaataatcgccatggcgacagcagcagatgacggtgtcccttctgagtgctcctacctagagttaagggatacctgagggtaagcaaccgagtgacgaaacaaagaaggcggggcctgaggacagaacgccaaggttaggggaatggagccaggcaaacgaggggcggggctgtagatgacccggtcgggagagggccacggtttgttgggggagcggctcgagattgcgttctagagaggaaccagagagagggtctttaacctaaatataaatgaatgactggattcctgaagaatccggaatggcttgttgattggatagatggatggatggatggacggacggacggaccgatggatggaaatctggctatcactgacgcctgagctccccaccctcttgggccctccacctccggagccctcactcgcttgtgacagctgtacgagaaatacatgcctctcctaggagcaaaccctcaacccaaacaggcagcacagagccagtccagcacctcacactggaggcactcagggtggagcccaggtcgatgagacggcgtaggatgaggctttttggcccagctgggaaccacttctttccagatttcccgtccagagtctaactttcctttctcccagcgccatcttttctgctagtttgcccagctcctcagggtgcctggactttcaggcctcaccttgtgtccagtatagcagggtccagcgccccagcaactgggaaggtctgcatctctgctgatcatcccctggaactgctggaactttgctatatagggtgaggagtggacaggggcctgcttccacccctgggtggggattagttctgaaaacaaacacagctgctctgaaccttattgcatagggagtaatctgaagtaggctgaggcccctggatgggggggttcagaattcacatgttgagcctacctttctttccctacccaatttcaggtatctaagggcccctcaggtcatccactgttgtctacaattacatgcagtaagatgggggaaagtggcagtaggggcagttcagcagagtccctaatggccatgtccagggaggggtgtcctttgtccccagggtatgggaggtgagactgggcacccctatttgctttttttttttttttttgagacagagtctcactctgtcacccaagctggagtccggtggcacgatcacagctcactgcagcctcaacctaccgtgatcctcagccaagcgatcctcttacctcagcctccagagtagcttggaacacgggtgcatgccaccatgcctgggtaatttttaaattttttgtactgatggagtctccctatgttgccctgtccagtcttgaacttctaggctcaagtgatcctcctgccccagcctcccaaagtgctgggattacagatgtgagccaccatgcccagctcctctttgcatttaaggagcttcccttagctgaacaaaaatttagttttcaggggattaactcttctgttggatctgggaggatgggattcagaactgtgcagctggctccagagcttcatgttccacacttcccatcgtttgcccccctggaatgggatagaggagagggcaccagtatcagctatccacctgtttgctaacggtggagcattatggagctgtggtcacctgcctcttctaactccaaatttcaggcatcacatcacctgattaagtctcagatctccacttccagtggagactcagtatatcttcccttaaggagttgcagcgctaatgggggcacacacagcctctgccctggggtttcaagaagagcttcatgcactgggtttggagaagacacagaaatttagccagagactccatctaggacattagaacattgtcgcccacgttaagtatcttgctcaaaagaatggagttggccgggcgcggtgg

SEQ ID NO: 845 - DNA, 2457 bp, Homo Sapiens
cgttatcacaatcccctacaaaacaggagtttttgttgttgttgtttttgagacagggtctggctggctctgtcgcccaggctggagtgcaatggcctgatcacagttcactgcaacctcgacctcctgagctcaagcgatcctccctcctcagcctcctaagtagctgggattacaggcgcacctgaaaagttaagcaggccaaagcatttgtgtaaatggcccgagcacacattttaagtgagaaccatttgaagactccgagtttgcctgcgaggattcccaaagggatctgggcagctggtggccccgccccctctcttatcggagccccccagcccctccgttctccccacgcctaacttccctccggtccccccccaaccggccccacgccgctgattcgctcgcagcttctcctcaccacatcctaaccatggctgtgtttctgcagctgctaccgctgctgctctcgagggcccaagggaaccctgggggtaagcgatccctgggagagttgtgatagacgcagaggggctgaagcaagataagggccgcctagtagggtgggttgtgtgtgggaagatccaggatggctggagtgcagaacagagaagagaaagaggagacgggatggagggtcgtcttgccctgtggacgtgccctaaccacagcctccggcctctcctagcttctctggacggccgccctggggaccgggtgaatctctcctgcggaggagtctctcatcccatccgctgggtctgggcacccagcttcccggcctgcaagggcctgtccaaaggacgccgaccgatcctgtgggcctcttcgagcgggacccccaccgtgcctcccctccagcctttcgtcggccgcctacgctccctggactctggtatccggcggctggagctcctcttgagcgcgggagactcgggcacttttttctgcaagggccgccacgaggacgagagccgtacagtgcttcacgtgctgggggacaggacctattgcaaggcccccgggcctacccatggtaggtgcaggcctgtgcgcacaagggtacttaactccgacacatacccggaggagggaagagggccttggctgggggttcttgagcgggactgctggctgtccctcgtcaaacccctgacctcagcatccctccccgccacgcctttcccccagggtccgtgtatccccagctcctgatcccgctgctgggcgctgggttggtgctcggactgggagctttgggcctggtctggtggctgcacaggtgagcaggagggacccggcctcgttaaatggggagtgaccagaggtggaaggggcaggaccagaaccttcgcaaaagaaagagctagacctagagctctggtcctggcttggcgaagaatgggagaggtcaaaggtgggagcgaggccgctggctggtgagtagagccccaccagagcagatgagctggaagtgcagcagagttagagcctgggctggactgtcggtggggtagagtctaagttgtttccggtctgagccttcaagttgctgggctgtccttggcgtggcgagtcccaggagaaccagtgagacaagactggtggttctcaaagactcatatgtcccttacaggcgcctgcccccgcaaccgattcgaccactccctagatttggtgagactaattccaccccattttctttctcctacatgcccactccccacccctcaattcctgagtctgagcccttgctgggagcagacacgttggtcaccttctctccatccttcagctctgtcccccccacatagctccacttgtgaaaaccgagccccagaggccagtaaaggaggaagagcccaagattccaggggacctggaccaggaaccggtaagggcatggggatgggaaggggatagccagaatctctgaggaaaatggaccaaaaaaaaaaaggcctgaaccccaaggaagactgtggagaccatcttgtcttcctccccttcctcctccagagcctgctctatgcggatctggaccatctagccctcagcaggccccgccggctgtccacagcggaccctgctgatgcctccaccatctatgcagttgtagtttgaagggaagcccttactccaaacctcccaagctaggggatcccagctccccataatccctctcccctccttggttcctcacctggaagaggaaggcaccatggtatagaaataagtgctagactgggagttgggagacctgggttccaggctgtctctgccactggtcttacttctaaacttactcccatctctcctataacctccatgtctccctcaccaccagtgtcctctctatacccaatcaagccctagctccttttttttttttttttgagacggagtctcgctctgttgcccaggctggagtgcagtgacaccatctccctcact

SEQ ID NO: 846 - DNA, 2898 bp, Homo Sapiens
cattcagtgtccccacctaagcaggagagcacagtctcccaggccggtcacttcatttgtcagatgatgatgatgatattgcccccctcccagggctcttgggagaaccaagtgagattaaccacgtccactcaaggctctctagctcttggcctccatgactggttttctctgtgtctgtgcagtttactccactgcttctctctggcggaacccaggaggcaggggacaaacaagactggccttccagggtcagcccagtaggcttgaaagtaagtggtgggaggcccagggctccccgactacatgtggaccccaagcccagccccaggcatgcaggtttccacattttgggcagctgggtggggtacgaagggtctggctgggagataggatgcctggttctaggtcagcctccgtctcccacctgttgtgtgaccctgggttgtgcccagcccccagctgctccccatgtgtaaggggagggccttctatggtccctgctcaaagcgcctgggctccatgctccccagtggattccccagggttgggtacagagtccagcttccagaccaggattggtttttgttttgttttgttttttttccagacagggtcttctctctgttgcccaggctcaagtgcagtggcatgatctcggctcactgcagtcttgacctcccaggctcaagcaatccgcccacctcagccccccgagtagctgggaccccaagtgtgtgccactatggccagctaatttttgtatttttgttgtagagatgggatttcaccatgttggctggtctcaaacccctgggctcaagtgatccacccaccttggcctcccaaatttctgggattacaggtgtgagccactgagccaggctgttttgttttttaaggctagtgggagtggagaaggaacaaagaaatctgtaactggttacgatcaattagttgtcaacaccactgcactcggaccagcccagaccagggttttgatggaggaaggggatggtgtgggaaatgcccacccaggccacacaccttggcttcatctgcctcctggacttcgagcggcaccttgacaggatagcccgaggcagcacggcgttcccgcagacgctgggcctgccgctgggcctcaactcgcttggcttgcagcttgcccagctcccgtgcagggtccaccagcccctgaagctgcaggtggatggagcagcgatcagaagccagagccacagcgcaaccctggggggcgggagcccccagggccagaacagccaccacacctgcgctggccagggcctgcacgtagcccgacaccgccgatgccagggcgcccgtggcctcatccgccacttccaggaaacctgccagggagggagaaaggtgaggcctagctccatggagacaggaaaccaagcagtcactgccggacactgggtcccagagtaggctgaggggacagtgggatggggcggacatgggggcctgaggctcacagtcaggccggatccgggtgaggttgtagtcggcccgcagggagcgcacggctcgcgtgatgcttagcgccagctcaagggcggcttctgcctcggggtccttccaggagcactgtggggtggaggagggggtgagggggcctggagggcaggtcagactcccctctccaggccatgccatacctctgagggctccgggtagggggtaacacagaggctagggggagcttgcggcatcctccggggcagcctctggaacagctcctccgtcacgaagggcatgaagggtgagagcagccgcaggccaacgtccaggcaagtgtacagggtctggcgggcacactcagctgccacctggtccaccccattcagtacaggtttcaggcactcctaggggacgagaggtacagggctcacggctggaggtctagccttgagccctcgctgtgcctgtgaggactgggaaggggatgggttggcttaggtctcaaggccaactctggcaaaactgagcccagggctctgctgcccacctgcccccaccatcccctgccccgctgtgctccttctcaccaagtagacatcacagagctcatagagccagaagctgtactgggcagtggtgacggccgggaagtcgtaggcctggaagccttgattgctgagcctcacagcctctgtcaggcggctgcggatccagcggtccaccaggctctcatggcctccgggcttggggagagagggtgtatcagccggcgggccaggggagggtgccagaaccccatgggggcaggagtcatgggcaaatcttcatccagagtctgatgagtccaaagcaaccacctatgtgccaggatctgggaagaagtgacaggccccagcccccaatgcgctgggctttccctttaactgtctgtctctgtgtctatctgtccccccagctacatggaggctgctccggacaggggtacagcctgtgtgagtgctgccagctttgctgcccaccaggcccttacctgggaggtgggtgagggcacaaaacccttcccaaggccacgaagggcaaacttggtggcattccagagcttgttgcagaagtggcggtaacccagtatccggttcacatccaggttgatgtcacgacctgggtcgggggtgagatgtgagtcctcatcaccctcttcccagcccatgcccaccagaggctcagggtggagaagagggatgggcctcacagaaggaggaaggagtggctgggagggacgctttgggggccataccctgggacatgtaggcacataatccaaaccggagagcatcggtgccacattcaggaatccccgctgggaagtcagctttctacagggaagaggcagggggaggagcgtcctca

SEQ ID NO: 847 - DNA, 3108 bp, Homo Sapiens
tagacacacacctgccagacactgctcatggcactccctaggaagaacagcatgtgggaaaggctgccaaaattgttcatgtaaaaattacatcaatgctgtcttcctcggtgctgcctatgcagctggcagccatctcttcctccacatcatggcctccctcagactcctcatgaaggataagatcctcaaaaagaggaccaacaagttcatgaggcaccaatcagactgaaatgtcaaaattaagcataactggcggaaacccagaggtcttaacagtagggttcgtagaaggtccaagggccagatcttgatgcccaacattgcttatgggagcaacaacaacaacaaaaaaaacatgctgcccagtggcttccagaagtttctggtccacagcctcaaggagctgaaagtgctgctgatgtgcaacaaatcttactgtgctgagatcgctcacaaaatttcctccagaactgcaaagtcatcatggaaagagtcacccagccggccatcagagtcaccaaccccagtaccagggtgcacagctaagaaaatgagtagaaagttcatgtccacgttttgtgtgtaaataaaaccataaaaactgccaaaaaaaattacatcaatgcctctaaacccaaaggactctacccccacaggtccctggttgttgtggtgattttcattgtgtaaaatactttccacatcttttgacaccaagtctttctgcagccatgtttgaaaattaactttcaggctacagagtctttcttataccaaagttgaagaaagttttaagaaatatatttctacatctcctacatgcaaaacaacaggagcaagttgaggaattctcaagaaactggtcgagaagagagagcgcttagctatggaaaagagaaagaaggaagggagggcttcctggaggaggtggcatttgaaccaggactgacatcaggatggaaatgtcagtcagggagttaagtagggggagcagctccgccctccacgtccccagctcctcccgcccctgttttttctcccagtgaccccacgtgaaacgtctccgcctcctccagccaccagcagaagggactgccttcccctcagtgctcgcccctccctagtgatcactcagtgcccctgagctcattcttttcagtaaattctctctctgcgtggtgagaaaacaggcctggagaggctctgcgacccgcttaggaccacagaactcggtactaggaaaactcctattttaaaatccagccctgggtgggaagatttgggaagaatcgttaatattgagagagagagggagaaagaggattagatgagagtggcgcctccgctcatgtccgccccctccccgcagagaattaccttttccagggacggcaggaatgctacgcgtttaatgggacacagcgcttcctggagagatacatctacaaccgggaggagttcgcgcgcttcgacagcgacgtgggggagttccgggcggtgacggagctggggcggcctgctgcggagtactggaacagccagaaggacatcctggaggagaagcgggcagtgccggacaggatgtgcagacacaactacgagctgggcgggcccatgaccctgcagcgccgaggtgagtgagggctttgggccggcggtcccagggcagccccgcgggcccgtgcccagggcgcaggagcagccgggttggcctaagggaccttagtgccgggcggaaaggggactttgggttggggattcatggggggagcccatctggagcttgtcaggggagcgagcgcggggacctggactgggctgagcatggagtgaggaggacgagagcagagagacccccgggacttcatcaggcctggcagctgactgcatgtggggtgaaaaaaggaagccacaggacagcgcacaagggtatggtgtggagatggaggtggagatggcacagcaggccacacagagaagaaacctacagggaggtagctgggtttgaggtgcttgaggggcagatgggtggtctgatgggcaggtagacagaagggtctgcagccggggaggagactgagatacatgagaccatccagggagaggggacccagggggaagagcaaaggaccggatcctgggaactggacagttgtgatttggccaagacagaaaagcctgtgaaagagaccaaaaaaacccaagtgcagtgtgaggagaggcccgcagagaagagtcttggaagctgaggggaggtgacctcagcagcacagtggacagcggtgccagtgacttgggaaggtcagaaaacagaagatggaaagtgggtttggaaaccagggagacctggggagagcaggttggccgcagcggcaggagctggaatgggagggggtgcatgaggctgagtgtggcgcatcctcctcggggctgagatggattttacttgtcttgggttccccacggctgtcacagggcagtgtctcagttcattcgtctttttccttcaggaagtctgggtgtaaagggatggagagaggtgaggtgtgtgcagtaagaggatttctcaaggatgggacaggaaggccttggagctttggcttcctcctgtgaacttgtggggtggggagcctggtgcaccaacctgagggacttgagggagtagtatcaggatgtgggattgagccctggaccttttttctagaaagaggaaaaaaatgaagggaggaggaggaggaagctggggagatcacacctttgattttcttgttcctggaaagtgaaaggaagttcacctgctatgagtgagaaggtggacacactgggtggggatgaggtgagtgacatgagcttaggaaagttgctgaggtaattggttgagagaggtgttcaaataaaaataacgcaattggcaaaaactgttactaagactttgtagaggcaccaatcagtgacatggcagcattttctttcacagtaatcaactgccagattgcagacagccctgatgccagcctaaggagtgtgggtttctcctccaggcccgcaggtccccaacctcactcctctgaagactcttctggagatcctctgtgatgcacagat

SEQ ID NO: 848 - DNA, 2897 bp, Homo Sapiens
gattgcttgagtgtgggaggcagaggttgcagtgagcctcgatcgcaccactgagctacagcctgggtgacagaggcaggccctatctcaaagagaaaaatattatctctttcagtggatctcatagtgctaaggatctgtgcaagctttagagatttctggaaatgatgacaacatagttggggaaaaatagagagaaatgggaggaagaggtaagcagacatggctaattaaggaaagctgagggcatgatgggtgaacctatgaaactgaggacaagaccgcagtaagacaatgagtttccaggacttgcccattgactttcagccctatgagatgtgaacaatgtccacattgtctcggtaaccccacacagtatatagtttgaacattattaaatttctgatatttgattatttttgacttacaaaaatagaatttcatataatttatactacattagttaaatctcttctgtcatgtctagttagagcatgtaggagatgtaggagaaacaagtatagaaaggttaaaaagattcataataaacactaacctgggccagtttttcagaggatgccttaagttctttaggcaccaaagaatacctcataagtgctctgtatctgtaaggtgattccaagtactaatgatctcagcttcagttccagggatttttccccataagaaagaaagagcactaagtataacttctgtcagacaacctacatacactacagggatacaggctttataaacattggagttcagaaagaaaagaaaggagatactagggaggccactgggtccatcctcacatatgaggaagaggggccaacaccacaggtcctgtggaggacataacccaggatcgtctaggagagaccctttgaattcccttgactcccacaaaattttcagtaaaaacctccttttgtctgacataagtcaacataataaagggaattgctgtatggggaatttattttagcatccttatttccaaatcctctaaagaccctgagtacatgtgatgcaaaggttttattggtggagatttgagaagaaatggcctgtacaaaggccccttacacaagtctcatggagagggcaagtagccaagttccttttgtggaggaaataatttgcgatcccttgataaagatgagcaatctctgaagaaaacctcacaatttcttaagggacatggcctgggcacaatgttaacacaactccctatattcccccaccccatagtagctcagcaccctcaatgtgctcttacgtcgggtgtccccagcgaaagccagtcgggagctcagcaccatcagtgtcactgtcaacgctgccaagctggagcctccagggagcttcagacacaccatgctggagaagaggacaggaccaggggccagaggagcaggcaagtctcactcagggagaactatgacccccctccacccacattccaaattatagggaggaagttactgatttccttgctcctggattgggtaatctcgtgtcggagaaccaatcagcatctgagttcaacagcatcatcagttgctgctcagagatgctgtatgaaggtcctcttctgaaataatttcattctttaaaggattgttttaatttagtacttgaaaggtttgaaccagttgcatgtaaaacactttaattggggagctattgtgagccagctctgtgctggtcagtgatgtgttcacaagtttgagccttgtaagagcattcatttcccacttgacaagacaactgtttgcagaagtgagtgtgtgagtgtgtttaagagtaaaggagacggagggaacatggttgtaaatccggagtcctttaatcttgtctttattgtaccatatcttaatgtcacagatttgggaaaattacttcatgtctcacagttgaaatgaaggcactgcgatctttcaggtctttcaatactggaaaattctgtgattctctagatgcctcaaggagcggcagccccaggtatctgataatatgacagaatgacagctattgactagagagtgtaatatgtacctatttccaggtagtgatgtctttaataagttaaaggaaattgaaagtctgttaataatttaatctgagtaaaaatatctttttcaagcgtgtctcctgatgctgcccccaggtttagcggcacctccagaacacacacaggaatgggctaacaggggccacctatgtgcaatggagggtctgaaggtgcctttgtacggcacttaccctaacaatgtgataaggtcaagtgtgcaatccaggtattcgtgggtctgagagatcgatcaaagactctcaaagtcagccgttcacagaacaactcttttttttcttcttcttttttgagacagagccttgctctgttgccctggctggagtgcagtggcatgatcttggctcactgcaacctccgcctcctcggttcaaacaattctcctgccacagcctcccgagtaactctgactacaggcacgtgcctccacgcttggctaattttttgtatttttagtggagatggggtttcaccgtgttagccaggatggtctcgatctcctgacttcgtgttctacaccagcagtgtaaccccaaactgctggggttactggcgtgagccatcatgcctggtcacaattctgttttaaaataatgaatattttatatgaagagtgttcagtccctcattcctggttcccattatgatttcctcatttgattgaggctatagcactttactattatgtttctcttgttttatcataagggaggatataagacgactttgctaactaatacatttttgaatgttcaggaaagagaacactagggaaaactatgaattacatcagttgatg

SEQ ID NO: 849 - DNA, 2884 bp, Homo Sapiens
ccacagccctttgtctcccagcctggtggtcagttaccttgacccctcgaggtcctgggtatcctagaggtccctgaggtccagagggaccctggaagataaaagagaggcatttataaaggggcctcagagtgtcactgtgggggcctccaggggtggaagaaatggaagtaacaacattgctgtctgggtagggttacggggcacaggaattgagaatgtggcagagccatatgaataatgagacaagggaatcccaaggactttgaggctctagagtctgagtggagactccctcaggggataaagacatggaagatctcacctggtttcctttggttccagggggaccttccttccctgggtgaccctgggagtaagggatagaaaatgtgaccagtggcccctgtcaccctctctgcacccctccctacacttcttccaacccaaatttcctgtgacctagtgaagccaactgtccatggacaagcaccaccagtgacctttcagtgcaagggtcactaaaggagctctgaggtcatgcactggggtggaaggccaaggggaactggattcggaagtggggtcccactcaccgggggtccgtctgagccaggcatgccggggagccctggcttcccttgaggaccctgcaggaagacaaagaggctcagggtcactagaggggtcatgtctggacacagacaaaatcccagcagacatttagggttctccctacatccccactctaaaccccctgtcctccaaatcacttagtcacttaccttctctccatgagggccgatggcaccctggggcccgggaagaccctacatacagggaaagagaagtcacaggggcctcccagggtctcttctatccagcctcccggattcaaagcatgagcaacaagggcctgaaacccttaatttcctgtatccttccagggtctcacccattgtggaagcccaagggaagtcatgaaaattggggaacggagtaggggcaccgctcacctgggtcccaggggtgccctgttgtccaggaggtcctggctctccctggggtccctagaaacaggtgaccaggcacaggtcagaaggagatggagatagaacacatttagagcatggagctgagtcccagcagcgatagccaagaaggcaagagcaggaagcaggcaggggtcaaaatggcggccaacaggatgctggcagggacctcgggggataagaatgggggtgggatctcctatccatcactcaccaagctccctttggggccctggggaccatccatgcctcggacgccctgaaacacaagatgggtgtgagcagcctgaaggtggcccggagggacctgtggttttcagaggcccggccattcccgagggtgtgacggtcagacctccaatccatcccaaacccaagcaaacacagctggcccaggcctgcagtgtgtgggactgtggatctgtgggcttgtgggctttggttttgtttttcttgaagatttatttcctatgcccagagccctcagggcaccacgccacatggccctccctgtgcacggggagcgaatgctgaggcagggcagtgtggggccagagcagggggagctcacagggaatgggaagcatgccgagagaggagagggagcaggaaggcagctagaaaggtggagagttggagaggtcaaggggtcacctcagggtcagaagtcagggagtcacttacagggggtccaggaataccaggtgggcctttggggccaaggagacctcgaggtccctgcattcacggtgaggggaggagacggcatgaatggataaaactgtgtccctttagtgctcatgtccccctcctggcttccccagagccccctcccccagcaccagcccttggacactcaccgactctccaggcagccctcgaggcccaatctccccgtcatctccctggaggaggaggacacggtaaagctgctgtgccttctagacctcccctgcacccagcccctacatttgccactacacttaccctctctccatcctcaccagggggaccaggaaggccctgggcaccagtatcaccctgcaaaatgggggaactcataagaggggcttcagagcccccaacacaggcagacaccgaacctctgcacttagcccatccattactttcactgagctcctgccaagcctccagcctcccttccctacctatcctcactcccatagaagatctatccccaattacaacacacacccactaatgtactcaccctatggcccttctctccagggagccctgggagtccatcaaaacctcggtcaccctaggaggaggaaggatagccagagtgaggacacgaccctgtccaagcccacccctccctactgcaccctgagctgggggggtgctgatcctggggaagcctggagaactaggtcatccccaagaaacaactgagcccagcgtgggctgaaggctacaggcttcagggaggggcccaagcctgttaccttcactccaggatctccaggcatccctcgggctccatcagcacctgcccggccctgggagaacaagggaagtgtcagaacaagcagggccgcagtcccctaccctgcaggccctgtctccccacaacacccatccacccctggggcactcacccttcgcccagccttgccaggagggcctgtgaggccctgaggtcctctggggccctggtgagaggagagatggggtggggttaggaggcatagggaggggagtgagggagactgagctggtgaacagatatgggggtgcagtggaggaaagtggtcacctgaggtcctaagtctccagactctcctttcaggccagggctcccaggt

SEQ ID NO: 850 - DNA, 2476 bp, Homo Sapiens
tggagagcagaggaggctgggggtggggagcagatgggggtggggaaggaggggagatgggggtggggaaggggggcgggaggagggttaggaatgggggaaggaagacagggtgggggaggggtgggcatgggggaaggaagacagggtgggggaggggtgggcatggggaaagggagacagggtgggggaggggtgggcatgggggaagggagacagggtgggggaggggtgggcatgcgggaagggagacagggtggggaaccgagaagaaagacagtggggggggatggaggaaggaacacagggtggggtggggggtcgggatgggggaagggaaacaaagagtggtggaggcgtggggattaggaacggagacagagggtgggggaggggtggggtgggggaagggagacagggtgggggaggggtgaggatggcggaaggtagacaaggcgggggaggggtggggatgggggaagggagacagaagggggggaggggtggggatgggggaagggagacagaaggcgggccagggcgggaatgggggaagggaaacagggtgggggtggggatgagagaagacagaggttgggggaggggtggggatgtgtaagaaaaacaaagggttggggagggggagggaaaagaggcagagagtgggggagggggtggggatgtggaaagaaagtcagaaggtggggggtgaggggtggggatgggtgaatacgtgatggctgcggcctttcccaccagacagtagggtgggggcagggtggaaaaagggggtgcggtgggcgaatggggaggcggggggctgactgggagtgtgggacggggtgttctgggatcacggagacgtccaagtctggactctgtcctgggtctgtgcttctggcgacctcccttttcttcagtgggatgcggggtgcaggggccggttccaggtcccctgagctcaagtctcgccccaccccgccccgcaagtctagaaaagatgcccctgcccttggctgggtaatctctggatttacctactgtctgtaaccccccgggctgaagagaccaccccccgggagtcaattaacttactctctggagcgcgcgttcctccctgctcccaggagtcggtttcccaaaactttctgaggcccgcgcatgctcccctcgactccccgtgtttccactctccacagaaatccacgcattcacgcccctcccctcccccgagcctgcagaggactccgccctgctttccctacattcagggctgctccttttgtcgccaatacaaacctgttgacaggtcacgcctgggaagcgggtggggtgtcccggagcggtgctgaggcgctgcaggcccggcttctggctgcgggggagctgtaccctgaagcctcgccggaactcgcgtctggggccagcagggggcactagagtcaacagggactgtatgcaaaacccacttcctcccaggccctctagggggatggtcaggcttctgcagagatggggaggatcctttcctggtaaggggagagggacgggctaggagccaagcggaaggaccccgtgttcaaggcccttcaagggacgggacaggcgaggaatctctttgagtcttttgaattgttttatcagtcaggcctgggaagtactccgcctccacaaactctgttttcctgaaaggggtcgggggggggaccccaacatctcctgccacaggctatgatgggcatggtggctaagagcaacaggccgcgtggtgaggctggctttttgtggctctgccctgccattccccgaggcatccccatgccagtgaacagagctgcgggttcccagctgcacagatgaatgcacgaacaaaacataggtccatacaaaggaagtcattgcattgatccagattcgacctgggattgtcgcataaaacagggctgataaaaaccgtcgtgttttcaccctggaaacagagactcagcctccccctctttgcttgaggcattcagcaaaggtttgtccttgagtggctgtggatgctcaaggacttacgatttctgactttataaagtttagggtgaaaacaaaaaacaaaataaggagaccattgttttaaagtggccgttgtagctaattatctcaagaaagcaaacaggctggtactgaaagttacacaggcgggcggctccctgggagggttgcccagctctccttttctgagacctgagcagggagcagccagaggagcttgaagggatggtgttcagggcatgggaacaggctgcacacatcttcacggagtacggtgcttgtccagtttgagaagggaaagaaacgggagcagagggctgatgagaaggcagcagatggatagtgcgggattgaaaaggggatccatttgaagactggccaccattatttattttcatcatctgattgctgttgctccattgagatcgatgcgtggaga

SEQ ID NO: 851 - DNA, 2391 bp, Homo Sapiens
ggacgattctgcccagtgtcctcagtctgtcccctcaggtcatggtcccaagtgaaatgacagagttcacagccctggtcttggctgaggtccaggtcatagtaagggcatgttcttggggccctcgacctgaactctgaccctccgggcagggaagaggaggttgtcccctttggttgtcctggctttggagtcctttgcaaaaatattttgggccccctgccactggctgcagaaatggctcgacggggtgtgtggggacagacacccagaaggaatgtacttttgtggccttggtgtccgatggggctgggggagagtgctctccactgacccagcagcacacccatgtgcagtgcgcctgcatctgtgtgggggcagccacaccccttggctgctgcttccttgggctgcctttctgggggcatgtgactggacctacgaggtctgcactgagctccatttgaatgatacctttcctatcccatttcccccacggaagcaccgcttcagggttattcagtcctctgcctcatggctgaaattgctcatctcgtctgcagatgtctactatcctgtctacctaatgcactattatgtattgattctccatgagacagagagagagagagactatcagatagtttacacccaaagggtaggtttttgtatatttttccagccttttttattaaggggaaggggagagtttaaaaacccaaaccgttgtggttttaaggtgtttcatttttaaaagggagagagaatctatttaaagctatttcagatcagggattgtcatccttttttgtccaatgtattccttgttctttaaaaaaattttttttagaggaaactaatattagtctttgtgttcactaactcttctggtcacttgtatttatttattcattcattcatcagatatttgttgccatctgaaagaactggcccagtgggtctgaaagctcgcttgagaataggaaacttgagacctggccccctgtgggtaggagaacaaggaccacctgggttctccagtcttgaacgagaatctcactcttatcagaatgtttttcttaacctcagcgtatgatgaggaaatttacttatctctagctaggatttgacaaattccaacatcaaatgatcaaaacatttgccactgaggcttcactggtgagatccgttctccgtcctcgggtgcagtcccttgggggctgctcctcggactgcgccccgcacacctgttatcgagggtgtgagaagcgcctaagctggtgacatgtgatctgggacgccttcatttctcgggccaggagtagcagctgctaaggacagcagcttgcattgcgtggttttagggaagcagggtctggcttttaatatgaactgcaaaaagcagcttctcactgatatttttttgttgttgtttctggggggtttttttgttttgtttttaatgcctttgagtgcatattttcttcctcgtctgaaaccgaactcccaaagtggctttctttagccctggctggaaaaccacctctcaatagccttaagcaataaatagatgagtagagaatgtggcttcaactgggcttattaaagtaagtgtgtctagttttcacttgaacaagtgatagctgcagatggcgaaagaaacccatttaatttttgtagcttacaggtggtagaaacaaaaatgcaattttaaaaccttaaataccaaataccaaccattgccttttttttttttgagatggaattttgctcttgtcacccaggctggagtgcaatggcgcgatctcacctcactgcaacctctgcctcccgggtccaagtgattctcctgcctcagcctcccaagtagctgggattacaggcatgcgccaccacacccagctaattttgtatttttggtagagacagggtatctccatgttggtcaggctggtcttggattcccgacctcaggtgatccgcccacctcggcctcccaaagtgctgggattacaggcgtgagccaccatgcctgcccagcaataccaaccattgtcttttaaattcgtgttggcttctcagacagggagatcactggaataaaataaccgatggtcttattttgtcacacgtaaatcaaaagaaatgtcctctttgaagttgtaagactccaccaatgacagacacccttttcggtggactctgagtggtgtgtagtggttttatagccatggaaactaggagtatctcactttccactgagaacccctgcccccaatccctctaagttggggtgtggcagttgggcagggtcaagtgacccagccctggctgtaggacagccatatacagtgaagagttctagaaccagctaaaaatggaagtttgggt

SEQ ID NO: 852 - DNA, 2483 bp, Homo Sapiens
aaaagagaaatcttgatagttttttaattatgtgggacacggcattattttatcagaaaactgtatgttgaaaatattgcattgttgtgtatagatagagtggcatggattcaattttgtatgcataaattaaatttgtaatgtttaagcagtggattagaattttaacatgctttcacttcatttggtcctgttaggtaagcaagggatcttgtgtgttggaaaaagaattactttggtgcagccgcccaagaggagcttggggaggacgctggcccgcgaggctcgtcgcagacaaggtggcggcgatgtccgggagccaggccagtgccgcggcggcagcgtcggggcctttcgcgcggcagggcggcctgggcttcggcctcccgccggttccctggaagcgggcccgcggctagcgcgggagcagcagcagagatggaggctccagcgcctctctctcttccccgtccgcctgagccaggggaggccaggcggcccgggtgtctggagccgggggtctgctgtccgagaatgagaattttcttcccccagaacgtggagactgttcgatcaccaggagcacaaagttatcattgttgggctggataatgcagggaaaactaccattctttaccagttttctatgaatgaggttgtacatacatctcctataataggaagtaatgtagaagagatagtgattaataatacgcgtttcctaatgtgggatattggtggccaagaatcttttcgttcttcctggaacacttactatactaacacagagttgataatagttgtggacagtacagacacatgatttctgtaactagagaagaactctataaaacgttagcgcatgaggacctaaggaaagctggattgctgagttttgttaataaacgagacgttaaagaatgcctgactgtagcggaaatctcccagtttttgaagctaccttctattaaagataacagttagtggcatatccaggcatgctgtgctctaactggcaagggattgtgccaaagacttgaatggacgatgtcacgactttagattacatgatctcttctaacctcatagactttgtataaatgaagtgctggactttacctgaaagctgcaaaaattaatggtttagatatatttataataaactgatttaaactttttctataagaagaaaaattaagaccacttatttgaaaagaaagatggagagggaggaggaagaagagaaaacggccgggcggcggcggctgtaggttgtgcagcggtagcggctctcccccgcggcggacgatggacagccaggacaggaaggtggtggtgtacaacaacagcaccgggcttgtgaagtgtggttatatgcaggctctaactttccagaagacatcttcccagctttggttggaagacctattatcagatcaaccaccaaagtgggaaacattgaacaaggatcttatggttggtgatgaggcaggtgaattacgatcaatgttggaagttaattaccctatggaaaatggcatagtaagaaattaggatgacgtgaaaaacctgtgggactacacgtttggaccagagaaacttaatatagataccagaaattgtaaaatcttactcacagaacctcctatgaacccaaccaaaaacacagagaagactgtagaggtaatgtttgaaacttagcagttttccggtgtatatgtagccatccagacggttctgactttgtacgctcaaggtttattgactggtgtagcggtagactctggagatagtgtgagtcatatttgcccagtatatgaaggcttttctctccctcatcttaccaggagactggatattgctgagagggatgtaactagataccaggttgcttctattgcgaggatatgccttcaaccaccctgctgattttgaaacggtttgcatgattaaagaaaaactgttacgtgggatataatattgagcaagagcagaaactggccttagaaaccaaagtattagttgaatcttatacattcccagatggacatatcatcaaagttggaggggagagatttgaagcaccagaaattttatttcagcctcacttgatcagtgttgaaggagttggtgttgctgaattgcttttgaacacaattcaggcagctgacattgatacctgatctgaatcctacaaacacattgtgctttctggagggtctactatgtatcctggcctgtcatcaaggttggaacgagaacttaaacagctttacttagaacgagttttaaagggtgatgtggaaaaactttttaaatttaagatccgcatcgaagacctacccctcagaaagcacatgggtggtgcagttctagcagataccatgaaagacaaagacaacttttggatgacccgacaagagtaccaagaaaggggtgtccgtgtgctagagaaacttggtgtgactgttcgataaactcca

SEQ ID NO: 853 - DNA, 2431 bp, Homo Sapiens
ctcctacctttctctccgagtccccaaagtccattatatcattcttaaatgcatttgcatcctcatagcttagcttccacttacaagtgagaacatatgatacttggttttccactcctgagttacttagaataatggcctctggctgcctccaggttgctgcaaaggccattatttcatcccattttatggctgagtagtataccactgtgtatatataccatattttcttcatccattcgttggctgatgggcatttagttgatgggtatggttgatgggcttcctatttttgcaattgcgaattgtgctactatgaaaacatgcatatgcatctgtcttccatgtaatgacctcttttcctctgggtagatacccagtagtgtgattgttggatcgaatggtagttctactttgagttctttgagaaatctaggagtcattttaatatagataattgaattgcagttaattctccatccagttttccacactggttacttactaccaccgatttgaggccatttttcatttatattactcgatcattttattcagtcacatttctaacagtatatgctgtttccaaagcatatcatgtgaacagtttaaaattctcaaagtataattctttgttgaagcatttgtaagttttacacaagcccttatatgatctgttttgatttttaaatcatcatctcttctattttacttatatttacttttcttcttgtgagatgtaatctcatacaaactttatagataggaagatgttgggaaactatcacatggtctgttatgttgtgttattttaataggccaaattatttgatgaaaagagaaatcttgatagttttttaattatgtgggacacggcattattttatcagaaaactgtatgttgaaaatattgcattgttgtgtatagatagagtggcatggattcaattttgtatgcataaattaaatttgtaatgtttaagcagtggattagaattttaacatgctttcacttcatttggtcctgttaggtaagcaagggatcttgtgtgttggaaaaagaattactttggtgcagccgcccaagaggagcttggggaggacgctggcccgcgaggctcgtcgcagacaaggtggcggcgatgtccgggagccaggccagtgccgcggcggcagcgtcggggcctttcgcgcggcagggcggcctgggcttcggcctcccgccggttccctggaagcgggcccgcggctagcgcgggagcagcagcagagatggaggctccagcgcctctctctcttccccgtccgcctgagccaggggaggccaggcggcccgggtgtctggagccgggggtctgctgtccgagaatgagaattttcttcccccagaacgtggagactgttcgatcaccaggagcacaaagttatcattgttgggctggataatgcagggaaaactaccattctttaccagttttctatgaatgaggttgtacatacatctcctataataggaagtaatgtagaagagatagtgattaataatacgcgtttcctaatgtgggatattggtggccaagaatcttttcgttcttcctggaacacttactatactaacacagagttgataatagttgtggacagtacagacacatgatttctgtaactagagaagaactctataaaacgttagcgcatgaggacctaaggaaagctggattgctgagttttgttaataaacgagacgttaaagaatgcctgactgtagcggaaatctcccagtttttgaagctaccttctattaaagataacagttagtggcatatccaggcatgctgtgctctaactggcaagggattgtgccaaagacttgaatggacgatgtcacgactttagattacatgatctcttctaacctcatagactttgtataaatgaagtgctggactttacctgaaagctgcaaaaattaatggtttagatatatttataataaactgatttaaactttttctataagaagaaaaattaagaccacttatttgaaaagaaagatggagagggaggaggaagaagagaaaacggccgggcggcggcggctgtaggttgtgcagcggtagcggctctcccccgcggcggacgatggacagccaggacaggaaggtggtggtgtacaacaacagcaccgggcttgtgaagtgtggttatatgcaggctctaactttccagaagacatcttcccagctttggttggaagacctattatcagatcaaccaccaaagtgggaaacattgaacaaggatcttatggttggtgatgaggcaggtgaattacgatcaatgttggaagttaattaccctatggaaaatggcatagtaagaaattaggatgacgtgaaaaacctgtgggactacacgtttggaccagaga

SEQ ID NO: 854 - DNA, 2412 bp, Homo Sapiens
ggcagaggccaggaggatgatgccagcagccaggaagtccgggtagtggcccaggaggggcacctgccaagaacccacgtgggtctcagtgaagttgcggatgctgtggctgaacatagagtccaggtagccactccaggcacgggccacggcggcgccaccgatgatgtattcgaggagaacattccagccgatgaggaaggcccacagctcgcccatggatacgtaggtgaacaggtaggcagagcccgtgcgtggcacacgtgccccaaattctgcatagcatagggctgccagcagggaggccacagcggccacaccgaaggacaagagcacagcagggccagccacctccttggccacggcacctgtgagcacgtagagacccgagcccaccatgccacccacgcccagaagagtcaggtccagcgtggacaggcagcgccgcagtgacgtctccatggtggagtcctccagcggcttcaggcggttcagcttctggcataagcgtgccaggctagcaatggtgggcagcccccgggccatggcaggtggccgagaagagcaccgagccagctactggaacctgctagggccagaggggaatgacaggatgcgtagccggggcctgaccagccttccatccctcctggtctgaccacccccagtcctctctctgtccctgacctggggacctggacaccctcaccaggggcctgctggagagctggaatggggcaggtgtcagaacctgtgggcaggaggtcacaggaagcctggaggccctgtctgcatcccaggcagcaaaggaggcctggtgaggccccacctgctcacccgctcggtggccctgaggggtggggagggagcagctccagggggagcagggtgagaggctgggaacggctcagtggtggggtcccagagccaggtgaaaccgaggcttccccagagtcgagccggacccggaacaggagccgcggctctgcgtcggggcgggtgtggcccaggcagccacctggccacagacagacagtggcggctacatacacccccgcccctgcacccgtggccaggctggggtatccgcgcgccaggcggaatgcaggggcgccctgggcccgcacacctccccatgtccgacacgccgctgctgctagagcctgctccgccgcgcccccgtccccggacacctgcgccttcgcctgttcttgggcctgagcccgtcccagtccccgtccccgcaggatctgctgcaacccacctgctgctgccgcagccgctgcctccgctctgagcactgagcccgcccagttcgccggcgccgagcgcagggcccgcccccatcccaggccccccgcgcggccccacccgctgccacacacccagatatttcaccctgcccactctgcccgacctcgcaaggtcgttaccggagctcaccggggtctagggaagccctgtgactgtgactcagtcacagatggagaaggtcagaccgccggctgactgactagcctaggtcagttcggggaggttaagggccacgtctgaaagtccgcagcccaccttctttctactgcagcggacacccttcttgatccctcaccccagtacatgaaccccacccagctgggccccagacaggccccacagcaccgtcatgtgagcttcaggcacagtgagttagatgaagacatgggtctggcagagtggcctggggcggtccctgacctctactcttacaatggaagagactgcagccttttgagagagttctgcgaattgagggaatgcattctggctgttttgagcctgcagctaccacgtcctgcaaggaagcaagcagcttctgggaccagcctgcagccctcctgtgggggagtagagctcctcagaccccagtggcagcccttcctagcctaggcacctctggcaggccgggagggccctatgggaccccaatagcagatccccacttgtgtttatcagcgacagccactgtgtcctgagtactgcattccagtgccccacgccccaggcaggcagctatgcaacaatacacctggctaattttttaattttaatttttttagagactgggtctcactatgctgcccgggctggtctcgaactcttggcctcccaaaaggctgtgattacattcatgaaccatggctcctggcctccccagaacgctatactagacatgtgttcaggcttacatgtggtttgtggaatggaatcttaggagcatctgcagcctatccagcctattgggctggtgacaggatgatggactcccagacaagatggtgccaatttggaacattctgcctcggccagaatgccaataccttctaatatttggctggtattgtcttgaggaacttctcagatggctcccacttc

SEQ ID NO: 855 - DNA, 2475 bp, Homo Sapiens
tttttgagatagagtctcttatcgcctaggctagagtgcagtggcgtgaccttagctcattgcaacctccgcctcctgggttcaagcaattctcctgcctcagcctcccaagtagctgggatcacagacaaccactaccccacccagctgatttttttttttttttttgagatggagtctctctctgtcacccaggctggagtgcagtggcgcgatctcggcttactgcaagctccgcctgtagctgggactacaggcgcccaccaccacgcccggctaattttgtttttgtatttttagtagagacggggtttcactgtgttagccaggatggtctcaatctcctgacctcgtgatatgcccacctcggcttcccaaagtgccgggattacagacgtgagccaccgtgccaggcccaaagcacttttttatagcccctagtttgctgttgtgtctgtttcctctacggcccgcacagcctgggtttgaattctggctctccatggccttgggcaagttggttaactttttgtgtctcaatttccccacttgtaaagtggggctggggaaaaaccctacctcatagggaacattaagtgagttcatgaaagccctcggtgtgtggcatgcgataaccactacctaagcataaggtatgtttacatgcactggttgtttaccacgacgcaccagcattcattcaagttattttcttccagagtctgcctggaatgtagaaccggccagctctcctcctcaaacagttcctgcaacctctggttatctgtgtgggcagaggcgggagtgtgggtgtgtggccctgccctgggacagggatgacgagagagcatgtgcttgtgtccagagctgtccccttccctgctcaggggccaccaaatatgtccatggtctctgctgcctggtcaacggccaccccgggctgccgtctcctggccagacctggagctcacaagctaattttagaaatgactggtcgactcagctgctgctatcacattggcccagaaggagggtggggggaggacgggtcggggaggggcagtaaggggaagggatgtgtgtcggtgtgtgtggagagggtgctccttcgctcctgctttcccggctcggtggggtcccttcgcggccacccggggagacgtcttagacagtcgtggttcctgtgatctgtgtcctctttgcagaaggtactattgggctgggttttagacgggcaccttgcgagcggatcggcgagttttaattttccggaatgcgctgctgggggctgcggtggcaggcctccggtcttttggtctattttaggcctttctggtgttgagagcttccgaggcctgattcctttgcctgttgcccgtgctgctcactttgaaaacaagagtgtttcggtggaaggatttgagaacaaaatgctggggcaaatggacattcgtaagaatcactctcctcaggccccagctgttcgctaataatttttaaaaatgtgtttagaatcatgagttaatctccactgtgaatctttgcccgcagacgtcagggtttatatttttcctcaactaccagtaatttctgcttcactggtgttcagttatggtcggggaagagccaggcttcccctttcgtgttaacaacgctgttgagtcgaaatgttaattttaatgttcttttttaaactgcaaattaagcatgtatgagtgttgggggaagggcaatggaagttcatggctgaaggtttcaatttcatgccaccttccttgagctctgtctgagggaaggtgtcttatctggcaccccggatagcaggcatttctctgaatgaagaagattcacaggtcccagtggccccatagtggggcagaagggggctatgctttgacatggagctctctcccaggagaggagaagacctcaccagctacaggcctctgggctgctgccttcctgcagcttttccatggaggaggccaggagtggggaggcccggaatggggagcccagtcggctcccagtcggctccaagctgtccagtctggcctcaacccgcaagtgtggggatctgggcttctatcctgtagggcctggaatacgacgaggctgttactttcactttgtggctgtccaaaaagatgctgcctcattcagtgcaccagctcatggaggctgagtgtcccactagggcttctagactccaacaaggataatggtggccttgggtgctgtatccattgctgacctaagttgtattctcctatgcctgggtaccatgtccagtgtgtaccttgggagcagaaaagagaggggtctatatactcttaggctatggatgagttctagaaaataatagtggagaggagagagagaaaagaaggaagaggaggaggagaaggagaagaagagaaggaggaggaggaaaaaagcaggaggagaaagagaagaaggaggagaagaataata

SEQ ID NO: 856 - DNA, 2443 bp, Homo Sapiens
gcacttgacctgtggcatgtgtcaactcattactgctaattgcagggactcagtgacctctccgaacttctgtcacccctgtcacggcccctgccctgtggaggcctgtggaatgggaagtggggaggggaaggagaagggggcggagtcagccggagcctcctggccaggcctggagtcaccctgtcctgccacagctctcatgggtttagagtgggccctggggcagagggtttgcaaggataggggtgggtggctctgccgagggcggtgttctgagtaggtctcattccccagtctgcccagcctggccccaccccagctctgctgccctgttactttgtccccctgtgttcaccctccacttcctgccggggacactccaaggcctgccaaggttggagcaggggtgggactcagccattcaacaaacgcttccttggttatgcagggctgggcattggggtggggggctgacctggaccctccaagacatcagattgtccaactgctcagttttcattggggcaagtgcctcgctgagggtgaagggggctgtgagtgcccatcagggagcctggacaggtcccgcctctcacagctgtcccactctctggagctgccttggtggcagatggcactgtcctagaaaggtgaggctggagctgtctcttccaccaggggtggccaaggacgcttccagggtcttccatgcaggcctccagggtcaccctgggcgtggctgagggcatgcagaccacgctgtgctcccccccaccccccatgcccgtcgcttgcctgacatgctcctcagctgtcttgccccgcagaagctgtgtggtctcccctgtgagtagagtcgggctccatgatcctccggagcagcgccagggactctccccaggcacaattttaaagggggccctaggacctgccaggtccacggaagtggtccttgtaactctctccctggtggcagcctctggtgcattccggcaggggcagcccctcctcatcacagggaccctgtgtgccaggccccagctgcgttgccgctgaattatggatttaatagcagagaagccttgcaggccgcctgtgctggctcgggaaaccggggcccagccggggcctgtcacggtcctggtgccgccctgcttcctgtcggcgccacggagcaagcggagagatttatcttcccggctttaagaggtactaacggaggaggctgagaggcaggagctgaataattgatggccttctctggctcaggatctgctgaaaatgacacggtgcaaggcagaggggctgagagtgctgaccacaaaatgctgagaagccactccagggcggtcacggccagaaggaggacccccactcaggacggggtcacaggcatttggggcgggtgtcagaggctcctgccctgggtcattccagggggccaggatacccagaagctgggcctagaggcccacagggctggctcacccccacttccctctcacacgcctgccatcaccggtgcttcagcccagcaaccccatggctcgttggccccgtccacagcccccactgcctcctgtgtgctgggcgtgggcctctgagctctactctcagcctccttagccccaggagaggagtggaggacaggggtttaacgtggggtgtggtgcggagcggggagggctgtggcgccccctcagcccctcctttcctaacagcctcagcctcccccctggagaatcccctacctgctgggcacatctggcctctccccaccattctgtctccagccgggagatctctacccagtgaaacagtgaaacaggaagggttccctggttaccccgcgcagggcgcagggcatgcagcgggggagtggctcgcttcttcagtgccccaccgctcacacctctaggggagcatacagacgggcaggctgtggggctctgaccccatggcagtgtctgggggtgaatgtttacagctcttgaaaccccagtgggagtgcgttaccgggtggtcttttagtctagcggtctgtaggtggctggtgagagtgagctcaattagacccctgccttataacaaggacagaggaatttctgtatcccagggtttcttgccttggtgtaccaaaaaattggatcacacgtgggcttggagaatgagtgcaaggttttattgagtggaagtagctctcagcagatgggggagccagaggggagatggttttcccctggagtcaggcaacattctcgggatgtccagcagcttgtcttcttccaccagtgtgttcctctccccacacagaggcttctgtctctgccttgctagggtcttgggtttttataggcataggatggaggcatggcaggccagggtggtcttgggaaatgcaacatttgggcaggaaatgcctgtcctcacctaggttcgt

SEQ ID NO: 857 - DNA, 2892 bp, Homo Sapiens
gcctccttaacctcagaggcgtgagcatgctggtccccttggtaagctttcctgggctctctgcaaacttcaaacttataagacaccctgtggggagatgagttcttgtccttttgtttttcattttaaaatttaacatgtgaccgggcacggtgactcacgcctgtaatctcagcactttgggaggacaaggcgggtggatcacctgatgtcgggagttcaagaccagcctgaccaacacggagaaaccccgtctctactaaaaatacaaaatttgccaggcgtggtggtgcatgcctgtagtcccagctactcaggaggctgaggcaggagaatcgcttgaacccgggaggtggaggttgcagtgggctgagattgcgccactgcactccagcctgggcaacaaaagcaaaacaccatctcaaaaaaacagaaagaaacaacatgtattcagaaaagggcacgtaccataaatgaacagctcaataaattctcacaaactgagcccaaccttgtaaccaatacccagagtaagaaagctgaacctaaccagcccccgaaagcccagcacgctcccactccaggatcaccactctcctgacctctgaactgttcttgcctttttttttttttttttttttttttgagacggagtctcactccgccgcccaggctggagtgcagtggtgagatctcggctcactgcaacctccgtctcccgggttcaggcgattctcctgcctcagcctcccgagtagctgggactacaggtgtgcaccaccatgcctggctaatttatttttatttttatttttagtagagacagggtttcaccatgttggccaggctggtttcgaactcctgacctcaggcaatccgcccacttcatcctcccaaagtgctgggattacaggtgtgagccaccgccaccggcctgttcttgccttttatgtaaatggaatcatgcagcgagtgttcctttgtggctgactctattactctgacttacgtctgtgagatttacccgttatgtgagttgcggatcattcactcctgttccgtttgtcgtgctcctaagcccgaatactccacgatattcatctgccttgatgacgctaggcttcccaattggaggaattatgaatgtgcggctacatgtctttctgtcttttggagcacatgttgtatgcgtttctgctgagtgtaaggctgggcggggcgtcggtggctcaaggggtccatggtgaactcacaggaacaccgctttgagctgcccagtggcgttcctatgcgtctcatccagttcctccgcatcttcacctgcaccattttattcttcttctttggaaaataaatctacttgtggttccaaagcctaactcatcctcagtaaccccggtagctatgaattcctatacaagaggctcccgcaggcccagcgccaaagctgcctcccctgcagcctcggtgacttcccgggtctctccctccggccctggtgtcccgggtgagcccagcacacgttgggattttggttgtttgttggcctggcccgactgtccctgtctctgagggcagagtcgggtcccatcccgggacacgcctggggttagccaccgacctgcagcctcccggccgagggtgcggggttggcggtaaggcctgccccagtgccccccagcagccgggcctccgactgcaggcccgggtccccgctcctccgcgcggagtcgggcggggataacctttgatcccgagccctcccctcgagagggggtggggggaggaggggatcgggtttcacggagtgttgggggataggactgggggcatccggcccgaaggcgccccctctgtgccccctccggggaagtctgggatccaggccctcgcccccagccgtgggcgcgcgcccctcgcagccggggtccggggagggagggtcccggcagggggcgccggggagggaggaccaggagacccgcggccccgcctccgccgcgccctcctcccgggcgggataattgaacggcgcggccctggcccagcgttggctgccgaggctcggccggagcgtggagcccgcgccgctgccccaggaccgcgcccgcgcctttgtccgccgccgcccaccgcccgtcgcccgccgcccatggagcgcgccgcgccgtcgcgccgggtcccgcttccgctgctgctgctcggcggccttgcgctgctggcggccggaggtaggggcgtcccgggtccgccgccccagcttagggtcccgaccccctcggcctcgcgctccctgcgagtttcggaaccacggggactcggagtccgtgcgttgccctgcgcggcgcccccggactgtcagcgccgaggcctcggcgacgcccccctcccccacggccagctccggtcctcatctcctccccggcctggggacttgtttcaaaaccggattcccccacccctcaaacacaccgtcctaccccagtcctagcaaatccagccggctccgggggccgcatcccgggccctgggggttcaggggcgctagctgggctgggggacgctggctgggggttaccgagcccagggcgccttgcacttgacgctggaagcgccctcggctatctttcctcaccgcttcccgcctccacccccaggtaggagctgttgtacccagcttgcggatgtgaaacttgagcctggagggtgggaagcagtcttttccccaggagacactagcggtcctgggataggggctggagaggaagaaatgagaaagccagggagcagcctggaggtttttggggcgtagctgggaggatggaggggatgcggacctggccacctcctccctgcctccctcccgggacagagggcccaaggcagtggttc

SEQ ID NO: 858 - DNA, 2588 bp, Homo Sapiens
cactgacctcaccaagtccctccccaagtgccagcctccaccctctctctccttgcccagaggagaaacctaaaatcgaaatctccaacgtggacgggggtacagagtccttggcctctcctggtgccccctgacccgggcacacctctcccacgaccatgtctgagatgtcccctcctcctccaggcccttcttacagtggggtctcctggaatgtcctttcccaaacccatctatgcaaatcctgcccttcggaggccccagtccagccccggcacctctcaggagctcgccctgcagagactcctcggtctctcgctccgcacctcgcgcaggaagcccgactcctccttcagtccctcctgagctaggtccagcagcctgaggaagcgagggtcgtcgtactcgaagcggcgcccgcaggtgagggaggcgatcacgttgctcacggctttgtccaagaggccgttggggcgaaaggggcgtcctgggggtgggagatgcgggtaaggggttgccttctccgtcccccgccttcccagttcccgctttgtgcccttctgcccatcacccaccggcttggtcggcgaaggcggcacaaaggcaggcggcctcctcggtcacccactgctccagcgacttcttgcccaggcccaagttgcgcaaggtggacacggagaagcgcctctgctcgcgccacgcgggcccatagcgcgacaggatcacccctgggggcgggacgggcacgtgggcgttgccatgaaggccttggccccaccctccgccacccactccaaccctggcgctccacaaggtctcccgcagtccctagcccggtccagctgggcacagggcccactctttgctcacccacattgctcccctgcctggggcggggtttggccccacctcgtctctgcccaccctgaccacctttccactcaaggaagatcccgcccgtcccgcccacactgagcccgcagcataggcgcggtccccgccaccgccacttcgacgcatcagcctcgcccaccgggcttctggcgggtctgggcagtagccccgccccctcccagcccacagactcgcacctcccccgtgcaggtggtttcctggcccactgtcctcagcccactcgctggcctttatctctgtttcacgtccaggaccccacgccctgtcggcgctgcttgggctacggtcactgtccacccggggcccacggaaacgcggtctctgtcccccaccgccgcttgccttgggaacgcggcccgaagcccaggacctggtagatgggcgcaggcgggcggtcggccgtgtcctcgccgcgggtcaccatcgcctcgcgcacggccgccagcccattgagcacgaccaccggcgtccaggccagctgcaggctgaacacgtccccgaagcggcgccgcaactgcagagggagggtcagggcctcttgtcaagccaggatcaccccagactacaggtcctagtcctatttgaaccttggacgacccccggggctaccaggagtgagcaggtggaaggaggagacccagcctcctgatcctggggcgggggtgggggtcacaccttctgtgatggaggaactcagtttggatgcgtcacccaggtatgaccttgcaagagtcaccaaaattgccgagaggccccagttagcatcccattcccagatgatggtccatgccggtgagcagtgaggcccgaggacccacagtgcaaaaggtttgaaccgggtcactgcacccccttcatcctcgatttcgtgatttaaacggcactcaggactaactcatcttccattcccaaggcctttccttctggtgtcagcagaagggactttgtactccataacatatgttgcccaatgggcttgcatgcccactgccaagtccagctccacctccaggcccttgccctactcttccttggcctttggaaaatccagtccttcatgccatgtataaatgtccttccccaggacgtcccccaaacctgcttccccttctcagcctggcttctgatccagcctgtggtttaacccaccacccatgtttgctggtggtggggcatcctcaggacctctgccgccctccaggacctcctccctcacctggtcgaagcagtatggtgtgttctggaagtccacatgcagcaaggttgcccagcccgggcagtggcaggggacctggcgggtagcgtgcagcccagcgttggtgccggtgcatcaggtccaccaggagcaggaagatggccactatcatggccaggggcaccagtgcttctagccccatggctgcctcactaccaactgggctcctctggacacacctggcacccccaccccaccaggcacagaggaccaggcaggacactctcggcacaccgagcgcgtgacccttcccttataaagggagctgatgatggccttcgccctctgctgtgagtgaacctgctgtgttgactgtgctgccagtggcagagtcaggccagggcaggtatgggctgctccagaggtccttgccgctgcttcctgctccaggcccttacccagggtagggtggtagaaa

SEQ ID NO: 859 - DNA, 2282 bp, Homo Sapiens
ggccgaggcgggcggatcacgaggtcaggaggtcgaggccatcctggctaacacggtgaaaccccgtctctactaaaaatacaaaaaagcagccgggtgtggtggcgggcgcctgtagtccgagctactcccgaggctgaggcaggagaatggcgtgaacccggtaggcggagcttgcggtgagcccagagatcaggccactggaatccagcctgggcgacagagggagactccgtctcaaaaaaaaaaaaagaaaaaaaaaaaagactctgactctgttgcccaggttggagtgcagtggcgcgatctcggcgcatcgcaatcccttcccagcccccgggttcaagtgattctccagtctcagccgccggagtagctgggactacaggcgcgtgccaccatgtctgactaaatttgtatttttactagaaagggggtttcactatgttggccaggctggtctccaactcctgatctcgtgatccgtccgccccgacctcccaaagtgctaggattataggcataagccgccacgcccggccttttgtttttctttttcttttttttatttgaagactgagttttgcacttgttgcccaggctggagtgcaatggtgcgatctcagctcactgcaatctccacctcagcaggagagcaggaatcttcagtgatccacgggcagatctgccgccattgtgggcacctgttcctcccgcgacctttgtgcccgcctctctccttccagtacctattgcatgaccccccacgtccgcctcccgccattgccagcaagtgcctcgcgcgggtacctggctgcgcttattaatccgttaagctcgctctgtcacgggcgccgtgatgtgctcacgcgcccgctccctcaggtttaaaaggcgcgttgcccggcaacagaagaaactgctggcttagccgttggccgagttggcggctggacgaggacgctcagagcccagctctcgagagttcaagcaaccgacggttccccactgctcccaggagcggttacctgggcactctgtgcccctccttcctgttcgggcccaggccgaggacctgccagtagggctcagttgcctggagcccgttcagcccatcccccagttcactttgcctgtgggatctccccgttgctcctgcccgtggactgagtggcaggccatcctacaagcacccggacacttgacatccgtggtgtcaagacaactctaagaaggttttccgtgatcctgcaagccctgccttcctttctgggatcctgccttcaatttgattgcacaggtaccacagcaagccagtgctgtgtgctccgagttccagggcgtcctccagctcagccactgcactgagaacatggactctctgtggggcccaggagctgggagtcacccctttggggtccacaacagccggctgtccccagacttgtgtccagggaagatagtgttgagggccctcaaggagagcggggcagggatgcctgagcaggacaaggaccctagagtccaagagaatcctggtgatcagagaagggtccccgaggtcaccggggatgcaccgtctgcatttcggcccctgcgggacaatggaggcctctctccctttgtgcccgggcccgggcctctgcagacagacctccatgcccagaggtcagaaatcagatatgaccagtcatcccagacctcctggacgagctcgtgcaccaaccgaaatgccatctccagctcctacagctccacgggaggcttgccggggctaaagcggaggagggggccagcctcatcccactgccagctgaccctcagttcctcaaagacagtgagtgaggacaggcctcaggctgtctcttcgggtcacacccagtgtgaaaaggtggcagagaaagcaccagggcagacactcgccctcaggaatgactcctccagatccgaggcctctaggcccagtacacgcaagtttcccctgctgccacacaggcgaggggagcctttgatgctgccacctcccgtagagctggggtaccgggtcactgctgaagacctggactgggagaaggaggcggcattccagtgcatcaagagtgcactgcaggttgaggacaaggccatctcagactgcagaccctcacggccttcccacactttgtcctcacttgcaacaggggcttctggtctgcctgccgtttctaaagcacccagtatggatgcacagcaggagagacacaagtcccaagactgcctgggcctagtggcccccctagcat

SEQ ID NO: 860 - DNA, 2731 bp, Homo Sapiens
gggccaggcatcgccagcccacgctgagcctcccggtggcgccgccccgcccatcctcccccccgccccgcgcagcaaactgacccaggacagccgcatggagagccccatcccgatcctgccgctgcccaccccggacgccgagactgagaagcttatcaggatgaaggatgaggaagtatgtggggcggcgggggcggcggaggcgggcgtcagggatgctcctccgcggtgctgctcacccgccgggttgtctccgcccgcagctgaggcgcatgcaggagatgctgcagaggatgaagcagcagatgcaggaccagtgacgctcgccgcggacacaccgtccgtctccgggacgccctcgcacccctggacaccagaccggactgttcccgacccggagacgcggggccacagcccccagctgaccctaatttattctcagcaccaccccctcccaggtcattgtgtctgtttccgaggggcctggaccgtagcccccgcccagctggccctctctgaccttgggggatcaggagcgaagttgggcgggacttcagagatccgcctcccttgcccttcccccgcccccggacggtcacagcacccaaaccgcaggccctgctctggcaggcaggcaaagctaggcagaagaggattcccaggatcctgggtctgttccctgccccagtgctgcagaacggacttgggagccctcctttgcctgctcccgcgggtcacccagcgagtgctgagaccccattttctgtcgaggcgggccgagtcttcccttatccccagacgcctagcgggcagggttgggctgaatcaaatgggagccctccagacataaggaggccagaggctgcaaggagcggggtcgtgaccgcttacaccccttctccacagcccggcccgacctggagggcccccggggcactgggcggtgagccacctcctggcaactctcggtgccgtcccctgccctcgctcgaggcctcttctccccagcaccgctgtggtgtgccgggatcctgagcctaggcctcccgatgttcccacccgcatgatcccttcccgccacacgatgctccgttttcttccgttgtgaatgccgcgtcctgtcctggtgacaggagaacaatgttggtgaacgtcgcagcgggtgtccgagtgctccgtgtgcccctgagagcgggtgggagcggaagcctgagcggcctgcggcctccggcgatagtgtgctatctgccgctgcagcgcgcgtccgcgcggcctctgggctatttctggccaggccgcagcactgtggtcggtgcgggcgtggcaggggcggggcggccttatcgctcggctctcccgcctacgcctcccgctgcagagtaagccgggctgccgtcttctcgccatgggctccggtgagtctggagtccggtcgggcccccggctgctccctaggccgacccgggttgagaggagctctggtcgtttggctgcagctgggagagacttgggtcagacttagaggggacttccagccggcgtgcggggtggtcagggtggagaggctggcgggctaccgggacgccgggcatcaggggctggatggagccgggccggcagtctgggtactcagagatgtcgcccaggtgcccgccgaccgctcggcttactgcggcgcttcccttgcagggccgcgcggggcgctgagcttactgctcctgctgctggccccgccgagccgcccggccgcaggttgcccggcgccctgtagctgcgcggggacgctcgtggactgcgggcgccgcgggctgacttgggcctcgctgccgaccgccttccctgtcgacacaaccgagctggtgctgaccggcaacaacctgacggcgctgccgccggggctgctggacgcgctgcccgcgctgcgcaccgcacacctgggcgccaacccctggcgctgcgactgccgccttgtgccgctgcgcgcctggctggccggccgccccgagcgtgcgccctaccgcgacctgcgttgcgtggcgcccccagcgctgcgcggccgcctgctgccctatctggccgaggacgagctgcgcgccgcttgcgctcccggcccgctctgctggggggcgctggcggcgcagcttgcgctgctgggccttgggctgctgcacgcgttgctgctggtgctgctgctgtgccgcctgcggaggctgcgggcccgggcccgcgctcgcgccgcagcccggctgtcgctgaccgacccgctggtggccgagcgagccggaaccgacgagtcctgaggagagaaccggtgcgtcctgaggagagaaccggcgctgggcaacacgggcctgcaaactcgacaggaccctgcccgaggggccctcgcgccaacctggaccggtccccgcctcctccgctgcccaatctctcagacccaccccacctgcaggcccagaccacgtgggacagaactcctgcccaccctaccccgagggaggcgaacccgcacttccaggcttgggaggaccatggggcacaatgcggtccagaccctgctgcgtctcccttccaaactctggtgctgaataaacccttctgatctggtcttctctgcacgactgacctggaaattcccctcgccaaactcaggaaaaggccccaggaggcggttcaaggggacacaaacacatcctcacatgcccaccctaacctcaggggcagacag

SEQ ID NO: 861 - DNA, 2284 bp, Homo Sapiens
aggaacaccaaatctattagcttgttttcctctttccttggggtagagctacattttgtgcaatatgcatcacacttccatttgctctctgaccagtataaaaattaaaatatatatatatatgtatatattcacacacagatatatatattcatcaagagagactaaataaagaagaaaactatgctcactggctagtagaaagatccgtcactaccaaggaatatgttttggtgtatgtggggacaaaaagacattctgtggttcaataggttagtaagccttgcactgataaaagtaaatgggtgtccatcctggctaacacggtgaaaccccgtctctactaaaaatacaaaaaaaatttagctgggtatggtggcgggcgcctgtagtcccagctacttgggaggctgaggcaggagaatggcatgaacctgggaggtggagcttgcagtgagcagagatggcaccactgcactccagcctgggcgacagagcgagactctgtctcaaaaaaaaaaaagtaaatgggtgtctttcccataaggtaggttgacccttagcatgagatgtgcattgcaaagcaacaagaagaacttagatattcggtgttttctttttttttttttccccaacctatgtggcggtgaatgctctgtatggggcatctctctggactaagcctctagggcacactactaggggctggggcagggaattaaaaactgcagtagccagtctctaagagctcctctaactcgtgaaagttgatgcctctattttagctgtttcatttgccttttttttcaataactcctctacgtaactcttcttcatttttgtctgtgcttgtcttgatgcggttcacaatcatggttttattgaccttgttttcgtgttacaaaatcactctgtgtttgtgatttgtttcatggtatttctcaagaagtggcttcaatcccctctgggataggcacattactatgtaccacagggcaggccaggctgcaggaggagcttgcagtcctggaggcttctggctctcctctcaccccgctgcccgcccctcagtgattagttggaatccaagacagcaatacaagatgtgtcgttggtgggagtgatggagtgcctgctgagtgggccgcagataagcaccgtgatttcggaggacgcttcatcatttcgccgtaagaacatgttaacgggtgattgtttgaatgtctccagctaataggatattattcataacactctggctagttggaatggaagatgataagaaattaaatccttaatggctttctttaagggaggacttttcccaggggaaccaggaaccctgggaaatcgctccatgtaccctggcaatatctatacggagagaattggctttaaatgaacctctgagggttacacaaagggtaaaagaaagagaacaaaaagcaattgacattaaccgggtccctactacgtgccaagtacttagacattttacctacatcacgttacttcatcctggccctgtctctgttgtgacaaggcactattaagctcatttcagaactgggaaaactgaggcacacagaggtgagctgacttggccaaggtctcatttctggtgctggagtcacgatttacattctaaagcaatattcttctcgtgaaatgaattatggagagagaagttgtctgggagaagtagccctcacatgcaatttgaaaggtggagaagccatagtcgcatagaggtagctgcagcaggtgcagagggaaggcgagggttgtgcaggtggcttctattgatgcctgggaatcatctatttcctggatacctgcagccaacattacccatgaatatttcctgcggtccctgagcttccgcatttcctggaagcttttctgagctttgctctccctgtctttccaacaagtaaggaagcttctgactctatgtatcaaatcccctcctgcttgaaatactgagaagaatgacagaaccctgcttgcaaagtaccctgcgtaagcattacacacatgcatggcacacacacacacatactcaactcacaaaggtaaattcccaagaatagaattacaggtcacacatgttggggacataagatattacaatgataacagtaacagtatggtttttttttccaacatggaaaccatttctggaacaatttctacaagcctgggaagaaagagaccacactactttttaccaacaactgctttttacacataatgaaatcctccttctagataaacaggacag

SEQ ID NO: 862 - DNA, 2519 bp, Homo Sapiens
gcagaggaaagggaagatgactataggatcagcttattctggaatagattcttgaagggctggacctggggctaaggaacaggagagaaaagcctcttctatgtaccttggtataatcatagtgactcctaacaattaccgcttcctcagtaaaattgttgaaatttagaacaacactcttcaaattagccactaggggaaagggcaaccaatcttctttttttctaaatcgtttaaccacatgaattaatatatagaaaactacactgcagtgcacactgtccctcagcaggcgtggtggcatggaaggacgcgaacgaccccgggagtggcgggtgaggagggaaggggagcgagcgggtgcgaggtgcccgcgttttcctggggcccgggagggaaagggagagggtgtgaggtgcctgccttctcggggcttgggagggaaggtgagcaggtttaaggcgcctgccttccttggggcctgggagggaaggagagagggtgcgaggtgcccgccattctcagggcctgggagggaaggggagcgggtgcgaggttcctgccgttttgcgaggctgcggagcctgctgtgtcccctttcccgcccactctccgacctgcaggcccacggcgctcaaggtaatagggtccccagccctggaatcaactccctgggtctcggaacgcaacccacacaaacctggaccctgtctctcactggcggggagtcgccttcgcatgcagacgtggagaagtcgcctccacccgcagctcctcccgtggacccaggccgcctcccccacgcccctcccggagtccccagaccctccgtggcgctcctggtaccgcccccactgccccactcacaaagagcctcagcttcttctcggggggcgacttcctcagccagccgctgtacagcacgtggccacttctcgtgcttccgccggcggggccacttccgggccacgaagacaaaggcgcaaatgccgggtcaggtgggcacagctcccgggagggtgagggggacggcagggacatgggggctgcagctcacagtgaaggtgggggagacagggcgagagggcgttgctggaggtggggtgtgagggacggcttgcgataccctgggactgcggggtagaaagcgcagttctaggggaggtcggggtcagaggtgaagctcgtggggagggcgagacccgggcgcaggtgctcacaggcgagggcggggttcaggttccagctgggctttgagttccggttcaggcttccatctgtggttccggttccaatttgaggtggagtttgggattaaagtttagacgaggcctctcgttcagggtttgcgttggggattggggtggggatttgcaccctgggtcagcctgggtgcatctcatcgggaccaccggggcgggggacatgggccgggtggctccttgggagaagagggacagggagcgcagctggtggagaggacaagaacgaggggcgcagctcattcagagggccacaacagagtctcaggtgctgagtcccatgcgccagatgaggaaagacaatggaagagttcaggttcctgctggggtttgagttccagttcgggattcggcccatggtttaccttctgacttgagttggggtttggggtcaaggttcaggctaggacttgagttccgggttgcagtttgggggtggggttaggtttcagagtgagggtttgggcctgtttgtgttgtgtatgtttgtgaatgtattgggatgtcaccgtgtgtacttatgtcacgtgtgtgcacgcatcagtgtgtgcatgtgtgagtgttcattgagtgtggcactgacagccaacccctctcctcccatttatgccccactgtcttatcctggttggggtgggctttacaagttccttccctgggccagttggaggttctcatgttgcctggggagagaagggaaggagagaacaggtcaaagatgagggcagcttggcctcaaccagacccggtgtcacggggaccaagaagccggaggtccttgtctcctgcctctggaggagcttggtttgcttctttgttcacacattgtgtgaaagcacagttgggggcatctgatatgcacaggatctgttcttgcctctgcagatgtcttagagaacaggacagacaaggggcctcttcagtaagccatccccaatgtgcactgcatgtcagcttacaagaggggcacaggggccccatcaggtagcagggaggatgcaaggaagagtgtgtggggatgggggtgctgggtggggccaggtgagtgggtgcctggcttctcctcagagcaaaggaaagtgctgaagagtgtgaaactgtgtgacatgttatgctttatgttttgagaatggattgcaggaacaagcagacatgggggacctgatgagggccaatgggatgtccatagagataagatttggcttgagctggtgggaaaagtggagatggagccacatggaggaaattgcagagtct

SEQ ID NO: 863 - DNA, 2452 bp, Homo Sapiens
gaacatttcacctaaaagaaggcttctccacagagcacaccaggacggacccccagaaccactggctggctgtatcccaccttcaggttcttgattggagactccttcatgtatcgttcactgatccttgtggctgaaagtcttgttgctccagccagatggcaaactacacctcaaggacagacacttgtcatacatgcctgtgtcccccagagctgcacccagcacagagctggtcacaaagtggcctccccaaatttctgtggctttagcctaacaaacacctgcaattccttatagctgaacaaagatgaatgaccctaacccgttcaagtcaggctggactccttccactctgatcatacatttggttttacaaagcgctgagcgacaggaagaaagaatggctcttactggccgagttgaagggcttcgagcacatttttctcaacagcacaatctggctccctgacacaaaaggcagggaaaggaaggggcagcggctcccaatgaacagagacggatggcggccgggcctctgccgccactgctgtgcccactgggcagaccagccacatctcctggctcaggccaaagactagggcagatgacacatggggtactcacaggagagctgtgctcagggcttcctgctggccccggaaccttccagaatggcctctcacacactccccgccctccctccttctctctgtctctcccggaaccttccagagtgggctctcacacactcccctccctccctccttctctgtctctctctctctctcagtgaaaggacttccttggcaagagtgtcaggtttcagttgtctgtgtcctgggaaattacaagatctttcccctttctctttttagctaggattacacatgcagagccatttggctcccctggcctgcgcagctgctgccggccgggccgggggatcatgccaggcagcccagccagaggtgagctgggtcacaggggtgagctgccaggcctgctcacccctcttcttggtgtgatcccctcaagtccaatccccagggaccttccccaggaatgctgagagcaccagctgtcccggccatgtcaggcatctggccaccaggtctccttccactccaggggcaaccaccgccagagggaaaaacggaaacaccaggttatttgtgatctgcatactcactcctcgtttagagagacaagcaggaggccaggggaatagatgggactgtgggaacagccaagggcagagggtgaagggcggcgatcagaaggaaagacggaatgcccacacattccctgccgctcccggctccagccgtggaggaagcggggctcggaggacattgcaccagacaggtcttgtttagaaaattggaaaagaacaaatattgattacaagagtgcaggagaatgggcccttccatcatcaaaaacaggtattcagccaggcgaagtgactcacgcttgtaatcccagcactttgggaggcaaaggcaggaggatcgcttgggcccaagagtttgagaccagcctgggcagcatggtgaaacccagtctctacaaaaaataccaaaaattagctgggtgtggtgacgtgtctgtggtcccagccattcgggtggctgaggtgggaggattgcttgggcccgggaggtcgaaccatgttcacaccatggcattccagcctggatgacagaatgagaccctgtttctaataataacagtaataataataataaaatacatactcactagctatgactctgctttacaggataattggggcaaaaatgttcttgggtgaaactgggtaacctaatttgaaaggtctgggaaacatggcccaatttcagcctcgctcgccactcacaggccaagtggaggttgcggttcataacatactggacactagacatcactaatgccttcattctacaaatgggaaaaccatggctgagaggtcacctgatctcccaagttcactcagagacgtggggatgggccgagctccagagcctgggccttgccctgctccaccccatacagcacgaagttccctggccaactaaggaaggagtgcaaggtgactgaagaaaacaaaaacaaacagaactgacacaaaaaacaaacaaacaaaactgagtgccaaagaaggagaatttgggggctgaggctgtggctgcagagtgggagtggggataatcaacgctgggctcctgagtgtctctggaagggcgggccctggtgtccagagcgcctggtgcccaccttcccctttcccccagggcccctgtctgagagctcttctacccactcctggctgctggggcacctgatattttccaaaacacaattttcacacccttaatagtgggctgcggaggagtcaggatcagagcctctagctcagatttccttccctgaaaggatacggtcttag

SEQ ID NO: 864 - DNA, 2410 bp, Homo Sapiens
caagcagggcatatgtgatctctgtcagctaaataaacaattttctttaggtctcttttgtttttgtagagacagggtcttgctgtattgcccagcaggagtgcattaatggggattcacagatcattgcagccttgaactcctgggctcaagtgatcctcccacctcagcctcccaagtaactgggactacaggctcacaccaccacacccagctaattaaaacaaaatgtttggacaggcacagtggctcatacctgtaatcccagcattttgggaagctgaggtgggcggatcacctgaggtcaggagttcgagaccagcctggccaacatggtgaaaccccgtctctactaaaagtataaaaattagccgggagtggtggcaggagcctgtaatcccagctagttgggaggctgaggcatgagaatcacttgaacccaggaggcagaggttgcagtgagctgagattgtgccactgcactccagcctggatgacagagtaagactctgtctcaaaaaacaaacaaacaaaaaaataaataaatttttgtttagcctgggcgcagtggctcacatgtgtaatcccagcactttgggaagccaaggtgggcagattgcttgagctcaggagtttgagaccagcctgggcaatacagtaaaaccctgtctctacaaaatgcataaaaattagccaggcatagtggtgcacacctgtagcacctgtagtggaaggctcaggtaggaggatctcttgagcctgggaggcagaggttgcagtgagctgagattgtaccactgcattccagcctaggcaacagaacaagactctgtctcaaaaaaataattttttttttttttttttttgtagagatggggtcttgttatgctgcccaggctggtctcaaactgccaacctcaagcaatcctcctatcctggtctcccaaagtgcagggattacaggtgttagccactgtgcctggccttcttcagggttggtgaaatcccctgttgctcatcctggctcgaggaggcctaggggccccggagggggaccagtagaggcaggtctctggctgagggagagtgagggtgtgcccaggactctgcgggtgtggccagcacctggtgaatgcacagccgattcgcaggtccagctcctggcgagcatccactgagagcgcctcgttgtggtcaggctcgcctaggcaggccatggcattacagatgtctgtgtccgtgatggagctaaacctggcccggaacacggtcttctcgccaccatgggccttgttcatgacgggcagaacagcatcaagaacctgggggtggggagtggccagctgtgacccacctcccagatccctgccacagctccccaccccactgtgaagcctggttccttccaggaaagaacacgtgtgctcggctccctctcctgcccctgccagaccctcctctatcccctttcctgcacctgccagaccctcctctatccccctgcctttccagaagccctgagcactccacaacaccccaccacatggcttcctttactcccatctagaaacatactcgaacactcccttcttactcccgccctctcttctaatcctctgctttcatccccaccaaatcaggaaatgctactgccaagtacatgagggacctcttagtccccaaacccatcccatgtgacacgattccctgccttctaggagggagggtttggaggggtgggtggaaattttaagaggctgaagaaaagacagggaaggaaaaaagaatgaaggggaaaggaaatgggcaagagcaggaaggccacgggtggtcctagcttgtggtgggggcagctcgggctaaagcacagcaggggtcctggagccgagactcactaggaaggccgtgcagtgggactagggtcgccgccggagcctggccacgcagcttccttactgggaataagtggcttcatttctgaagggagaaagccccatgagctgcccccattctccattcccagatgcaaaggcccccagggaggagccgccctgcaggggaggagagggtatctgggaagagacagagtgtgatcgcatttgctgagggtgctgtactgcaacgccaggtgcctcagctctgtctcactgaccagctcttgagccacgggtgagagctgggggtacaggagcacgggggcgacccatagaacaacagtctgaagggcaccaagtgagaccagcagtcatggccactgtgagggcaccatggccggggcaagcatggggcatggggtgtgcacagggagcagctgccacctgcttctctgcagggctcccagggttggctggaggcaggaggcatcctggatgaggcaggagatgagcagagcgaggcctgcaaaaggagc

SEQ ID NO: 865 - DNA, 2424 bp, Homo Sapiens
caaggactcagtaaattccagctactgttcctattaggtcgccaatataaatgcttgatgagtgaatgaatgacttccgtctgggacttggttgcaaataaagccgagctgcatcttagggaggggtggagactttgcccctgtttgtgccttgaagccagcagggccttgccctaggatacctccacccaccctcctgcccagcaagtggaggtgaggggcgtggcctggggctctccgggaggtcatggtcattgggtcactcggagcttgtgtttatatgaggcctggcagagggaggcccctggctacccacctttgtgcccgggttcaccaccactggtttctgcgttccctggactctgccctgcacgggccgcacctcccccgccggccctcgcccatgctccagccccagccctagccccaacagcggcctctccctgcttcccttctgacatcctccctgtcgcccaggcccgcagcccgagtgtcgccgccatggcttcgccgcagctctgccgcgcgctggtgtcggcgcaatgggtggcggaggcgctgcgggccccgcgcgctgggcagcctctgcagctgctggacgcctcctggtacctgccgaagctggggcgcgacgcgcgacgcgagttcgaggagcgccacatcccgggcgccgctttcttcgacatcgaccagtgcagcgaccgcacctcgccctacgaccacatgctgcccggggccgagcatttcgcggagtacgcaggccgcctgggcgtgggcgcggccacccacgtcgtgatctacgacgccagcgaccagggcctctactccgccccgcgcgtctggtggatgttccgcgccttcggccaccacgccgtgtcactgcttgatggcggcctccgccactggctgcgccagaacctcccgctcagctccggcaagagccaacctgctcccgccgagttccgcgctcagctcgaccccgccttcatcaagacctacgaggacatcaaggagaacctggaatcccggcgcttccaggtggtggactcccgagccactggcaggttccgcggcaccgagcccgagccccgagacggtaacgcgggggaagggggcaggaggtcgtcgggggcgcggcctctacgccctgagcagtgccctggacttgacctttcttttatttttttaatttatcttgctttcatttcctttccttttttctttcctttccttccctttcccttccctcctttcccccttttccctacccttgccttcttttcacagggtctggctctaccgcccaggctggagtgcagtggcacaatcatggctcactgcagcctcaacctcctgggctcaggtgaccctccccgctcagcctgaccttgcctttaaaggccactgcatgaggtggggaaggagatttgacttccacttgcctcggtgactttgtctgttaagcagaaccataatactggcccttcccctcctgtgctttgggcagtgactctccctagctcattgggaaccctggttgcccaaacagctctcaatccaacactagaggtgtggggggtcactgtggaatgttggggggcaggccccagtatgagagaaaaacccagagggatggtcctgatcagggctacccatgcccctgaggatggtggaatgaaggcagagtcgggggctgcataaaggaaagtctcttccagggaccaaagcttggagaactgagggtggaagggggattaaacagaagtgggtagggcagagccttctgcctgtgggctggatttcctcaggcaagaagcctgtgggtaagctctgtataatgcgaggaggagtccccacaaagcaggctggtcagtggtcacgctagtgtgagtctttcaaacatcccgtgtaagtagatactgtcattgcacagaggaggaaatggaacctggcccaaggtctcaagaaacaacccagccgggattcagactcggcagcctgcgcacttaacagccgtgagcaaccaggaactccccagccctttctcttgtgccttcaagagtgcaagaaactgaccactgcccctagagagctctctgaagagcattcccatggctacagattgggtttggagccgcttgggctcaccatgggccagcattgttttggatggcctgagggcaaggactgtccctgctcttcatgcatcctgaagattagctcagtacctggcacagagtcgatgttccagagaggtttggtgaatacagaaggtccctgttgcatggaatcctgcaaagcaatgttggtgttaccggaaccataggaaacagctgatatccaaccatttttgaacctacacaggtgtcagtttcatgtggttcagcctaatgagagcaccaccttaatcctgttgggttctcc

SEQ ID NO: 866 - DNA, 2313 bp, Homo Sapiens
ccacccccacctggagggcagtgcggtatcttagggcgtcattcttccagagccgcctgaggccagcagagaggaagtgctgtaggagccgtgagtgggcggcccggcctaccattgggagcagctgtcttgctgatgctggcagggtgcacctgtttcaaataaagaatgatcagagatcacacctgtaatcctcacgtcatgagcagctgaggcaggaggatcacgtcaggccaggagtttgagaccagcctgggcaacatagctaaagcctatctatctctcaaaaaaatttaaaaattagccaggtgtgctggcacatgcctgtcattccaactgctcaggaggctgaggtggatcacttgagcccaggagctcgaggctgagtgacccatcatcatgccactgcactccagcctgggtgacagagtgagactcatctctaaaaaaaaattgttttagaaatgaacagccaggctcccaaagcctgccagcctctgagggccggggaaggcgggtgcctggagaacagctattctttggtccagcctggccagagtctgcaccacagtgccccaggcccagccaggttgccagccctgggttgggaggagggcgaagggccggctaaggagacttcttcccacactgcctccccacccctgcccagcagctgcaggagaatcagcccctctgacatttagggggagaaattcagaatcaagagcagaaggcagaaatgaaaggattttctcagtgaaaggtcagagtggtttctcttgtttttgtttaaaaatggtttgtgttgaactatgacaaggccaaatgtactaaggcagcagaaacagggggagggcagggggagggcacggggacggctcctgagaaacagaggaacaggtcaggccgcagggcctcgggggcagcacgtgctccaaaggtggtgaggggaggggcgacaccatcagggcagggcccagcccaggcatgctccggtggacaggggagctgccaggaccaagctggatggagccaggccgccctgtggctcctggggagggttcccagagggctgccgggcgaagggagtcctttccaaaacggtttcctgagctctgatgcacacacatgcagctcacccccaagtctagcgttccattagtctaccgttccgttcttcccagcacattcggtgcgcagccgcgaccagtctaaccgtggcacctttccaccggccctgagccctggcgtgcccctccacgacatcccctgggcacggagttgtgtcgacaggtctctgtgactggctgggcatgttttcggggtttgcccgcggggcagcgtgtctcagagtttggctgtacgaagcggtgttgacgggtaaacccggttttgtctctccctccggcggttgagggctggttccgcgttccatctgttagtgatgggatcgtgttgccgtggacgtccgtgccgaggtctgtgtgtggacagcgctcagaccccctggctgcgcgcccgggcgtgtgctgggcccatggactctgcgttcagctctttgaggagccgccggctgtttgcagtggccgcatcacacacgctcccgccagcgacgcggagggtctgattcccctcgacccagcagctcatggtgtttgctctcagtggccgtcggcgcgaggcgggtccgtgtctcgctcagttgaggttcacgtttccccggtgcccggcgtcctggcatgagctcactggccgtgtgtggctcttctctggagaaatgttcaaaggccccttgtttaatcggccctttcctcttcatggtggagttgtgggagttctgggcatattctgggtacaggacttttcagggacgtggtttgagagggagctttgtggtgggctgggtttgtgtcctgcctgacctggggctgtgtgggtgctgaccggggtggggctggctctcgggggcagctcagaagggcctctgtccactccccacacagcccaggactgtggcacagcagcttgctcagacctgctgtgtgacctgaaccctgtgcctcctgccctgtgtcccctggggcctgcagcgctgtctggaagctcctccttgcccgttctccagttacaggaggcctccctctgggctgcagaatccacagagccagacgccccctgggcccccagcgcccccctgcacaagtggggaaactaggtcatggggcccaggcagtgtggaaggcgttgcaggagttgcccagggtgtggggtcctccagcctcagtgaagagtggcactggggcctgtcacagg

SEQ ID NO: 867 - DNA, 2410 bp, Homo Sapiens
aactgcttgggaaactttatcacagttcttggggacaagatctgtggtctgctttgctctgaggggcaggagaaaagggggcaatggtccgcaggggcagacgggcaggagcagagcagggggcgaaggcatattcagaatggcaaggaaggggggccagccgtgagacagcaggggaaggctcgctgctgggttccaaagatgcttggcagaaaaaattccaggctggaaaagcaagcgagagaagctggagggtggtatgtgggagacagctgggggctcactcctgcactgttagcctcagctttttactcccacttggatgatgaggtctgagacatccttactgccacctgggagaggccctgggaagggaagacttcacagagccatgaggggattaacttttctggtgaattaagcttcctgacatttccagagctgcggtgccctgggattccagctttgaaggagaaaggaaggaaggaaaagaggaaaggcttatgtagataatttttccaggctgctgagctccaacagacagtttctgtctctgcttcactcaagaagcccaggctcagaagataccaatcaaggaaatccccgctaggaagcctggggtagggagagctgctggcttgaccagggcacagccggcaaaagcctctacaagacagtcacccacagatatgcccaagaatcagtacacagtttccaaccagagatctccaaaatgaaacactcagggctacacataggaaaagcacgcacacacacacacacacacatacacagacacttacttttgtgtccttctggctatgctgacgagttttcctggtgaagcccggggctcacagagtaatctctgcagacaactgtggttcttgcctctggtgcctgcaggaggcaggcatgttgtgtccttccaagacagatggctcagggcactctggtaggattcaccaggaaactcatggagaagggaaaagggacaagattagcaacagtgaagggagggagaatggtgggagaggattccagatgaacggtgggtcgctggaggctgagcatgccagcaggatgtcagttctcagagcaaagcccatgtcaaacagccaacgcttgctccttctgtccccaggatcacctcctcgcacggggagcatctcctacatcaacatcatcatgccttcggtgttcggcaccatctgcctcctgggcatcatcgggaactccacggtcatcttcgcggtcgtgaagaagtccaagctgcactggtgcaacaacgtccccgacatcttcatcatcaacctctcggtagtagatctcctctttctcctgggcatgcccttcatgatccaccagctcatgggcaatggggtgtggcactttggggagaccatgtgcaccctcatcacggccatggatgccaatagtcagttcaccagcacctacatcctgaccgccatggccattgaccgctacctggccactgtccaccccatctcttccacgaagttccggaagccctctgtggccaccctggtgatctgcctcctgtgggccctctccttcatcagcatcacccctgtgtggctgtatgccagactcatccccttcccaggaggtgcagtgggctgcggcatacgcctgcccaacccagacactgacctctactggttcaccctgtaccagtttttcctggcctttgccctgccttttgtggtcatcacagccgcatacgtgaggatcctgcagcgcatgacgtcctcagtggcccccgcctcccagcgcagcatccggctgcggacaaagagggtgacccgcacagccatcgccatctgtctggtcttctttgtgtgctgggcaccctactatgtgctacagctgacccagttgtccatcagccgcccgaccctcacctttgtctacttatacaatgcggccatcagcttgggctatgccaacagctgcctcaacccctttgtgtacatcgtgctctgtgagacgttccgcaaacgcttggtcctgtcggtgaagcctgcagcccaggggcagcttcgcgctgtcagcaacgctcagacggctgacgaggagaggacagaaagcaaaggcacctgatacttcccctgccaccctgcacacctccaagtcagggcaccacaacacgccaccgggagagatgctgagaaaaacccaagaccgctcgggaaatgcaggaaggccgggttgtgaggggttgttgcaatgaaataaatacattccatggggctcacacgttgctggggaggcctggagtcaggtttggggttttcagatatcagaaatccccttgggggagcaggatgagacctttggatagaacagaagctgagcaagagaacatgttggtttggataaccggttg

SEQ ID NO: 868 - DNA, 2494 bp, Homo Sapiens
agctcatgggagtccctgaaccatatagaactatagcatatagcaaataacacatcaaatccctgccaccccattgggctctgcccacagactcacccaggcaccactgtggtctcttgggttccccccaccccaacccccaccccaagtcaccaccactgaggctgattaacaaaaacacaacatcaaattcctttacttctgaggtctcccctttaaggggaggcagaaatagaacattctttatcggggagggaaaggggtttaataaaaactggtataattagttaaatactgatctcggttaggccctctctgtgttcatgggcccagtcttggctggctgcctccccccagggagccccccctcaccccggggtctgaggtggcaccaggagggggctgggggcggccagcaccagcggcgtcctgctcagcccctctgcagggagcgagcaggcaggcaagccgctgggcggtgggacgtcaccaccgcaggaaatcgcgaatgaacttccagagcttggtgacccacaggttggcgccgaggtccatcaggtactggatctcgggcgtgagcatgcgccggcagagctgcgcgtgccgctgcccgatgctcttcttgaggttgtagcccaggatggacttggtgcccagcggctgccagggctgcatggcctcgtcctggatggcggcggcgtccacggcgtggcccccgtcgatgcagatggtccgcatgcgctcgttggcatggcgcagggcggccacctcgcgggccatgcgctcccgcccgaaggcctccaccttgcgccagaagctggcgttgaagtggcggtagaggtgggagtccagcatgttccaggcggtggcgcgcccatacagctcccccgagagccgcggcacgggcgagtcgcggcgggcgttgagcttgaagtagagcacgtcctccagctcccagcacagcaggtccttcagcagcaccagcgactcgtcgaagtactcttgaaggagcaccaggtggaagcgacgctccacctccaggatgtgctcctgcacctgcgggctgctggggtccaggctgttgtcatagcccaggtcgaagaagagcaggtttcggaggtagtgggcattgaagccgttggggtcgtagtagcgatccgggtcttgcaggaactcggtcagcttgtcgccggccgagagcttccacgtgaggggcaccaccggcccgaagtagtggaaggaggactcgaacaagcgggcggggtcgcggagcaccgtgatgaagatggcgttggtcggcaccaggccgcgcacctcgtcgtagtggaagcgcatgtggttgcagatgatgttgaagcaggccccgggccgatagtcctgcaccaggctgcgggcgaagaaggtcgggtagtcgaagtcattgcggccgttagggaaggcgaacttgagccggtgcttctggccgaagcggaacaggatgttgagcagggtgctgctggccgtcttgtgcgtcttcaagaacacgatgttgcgccgcggctggcactcccccgccgagccgttggcccggatcactgcctctggctcgagtgcaggtggagagcaggacgctgcggcctccggggtcctgctggggacagagaggtggggagagcctcaggggggtgctggggccctcaggactctggtagttagagagggagattattgggaacagtggtggcaaaggagctgggatagtgagacctgtggggcctgagtccaggctgggtgcctgcgcgggtggtttggcctctctagcctcatgttcctcttctgtgaaatggggacgataacaggccctattcacggtgttgtgagatgaggcacacaggctctcctctcattcatggccactgtgttgcatgtaccatgaatcagtatcagcttgggccacatgaaactgccattttataggacaaaaatggtccatttttgcagaaatttgcagtttcctctgtgtcaagttaatatcaccaaccactggtattgcaccagctacaggctgtgctgggtctgtgcagagcagccccatgaggaaacgggagagcctggttctcaggagctgggcctggagtcagaccgacccgtttgaatccatgcccatggacaggtcgcccccaccagggccccgttggcatctcagatgatgcaaatctgagccctgtacagacagtgttacctgattctcatgctctatgaggaaggctctgggttttttttgtttgtttgtttttctttttgttttgagacagtctcactccgttggcccagcctggagtacagtggtgccatctcggctcactgcaacttctgccttccgggttcaagcaattctcctgcctcagactcccaagtagctgagattacagacacacaccaccatgcccagctaatttttgtatttttagtagagatggggtttcaccatgttggccaggctggtctcgaactc

SEQ ID NO: 869 - DNA, 3457 bp, Homo Sapiens
aaaaattagccggatgtggtggcgggtgcctgtaatcccagctactcgggaggctgagacagaagaatcgcttgaacccgggaggcggaggttgcagtgagcagagattgcgccactgcactccaacctggtgacagagatgccgtctaaaaaaaaaaaatgcaaggattactgtgaaatccgtatgttaatgtaaaatattacttgtgcgtttagaagacaaagtgattcctttttccagaaaaggcaaaacggcccaagggagcgtgagagccgtggatctgaccaacctggtttagtgtcctgtgccgtctcccagctgcaggacctgagaaaacgtacttgaaaactcgtcaagcttcggcttcctgaccacacaaggtcacaccttctcagaagttgcggggaggctcacacatcactaccgcgccgggcacacagcaggcgccggctccagccctcctgctcccgcccgcggagcctccagcgctcagtcgaggtcacagcgagctgaactgaacccaaggcccgcaccaaacccacaggcacttgggggcggagcacccgcaggcgcggctcccggcgcgcggcccagtttcctccacatgcagatgaaaatcacgacccaaacgtcctcatggtggaaatcagaagacgcgcagggaaaacagggacgcggaaactgccgggaagcgcaggggctgacaagcagcctggcccaggccgtcccacgagcgctctcccgcgggagtagcgtttccgaggccgccagcgagtcagaggaaggcagggcgcatccgccctccagcaagaacgcgatgcactcgggcgcgacgacggtccaggcagttcccaggaggctgggataccagcccggccgcccctccttccccgcggctccccgccccgcctccggccctgagtggcgagtggctcggccagaacccggacgtcctcacctgagcggggcccacagcatagcacctgcgggcggggcggccctggagccccgcagccgcgcgcgccgcccgccagcaaagcccacgcgccgcgccgagcgcagccacacagccccacgcagccatccggccgtcgccgtgcgcacgtgcacggcgtgcggccccccccccccgcgagtccgtccgctgcacagccaatcagcggtcggcgcgcgcggcatcacgggagttgtagtcctgtaagcgcgcggagcccgtcgggcgcctatggaactcgacccgcaggccaaaggggctccgttgcaaggaagaagtgcggggtcccgccgcctcctagaccgagatcgcggtgagctggccgcggcgcacaatgggcacggcctgggcggcggcgtccgtactatcgccctgtgcctgcggatcccggtaacattgcgcggcaggccccaggccggcctccctcagcttcgcggactgtctgggccgggggtctcaaccttgacttcagggccgggccgctggggcagacccttagtgatgttcaggtcctctgggcccctgccagtcaagggacgctcgtcgcgcgccaattgttaagtctttcattgtttctgtaaacctgctgacgccctcccagcgcatagggagactgcgcacgtgagtccgcccccgcgcgcactgcggagaggtagaggcacgaatgtagtacaaggtacaaaatgactactccagagagggccagatgactaagtcagcaaacacttagggaacacgactgtgtccgctgcgcgtttcccggagtagacacaagggtgaatgaacaaagaatggatttcggtcactgaaagtggagaggtagccgactccgtccgtggaggcccttagcagagctggatctggtagtcccccggtcatgaggggagattctgctggaggaaagaggtctccattcccaccgtttgaaatgtgtaggatgccctcagattctttggcccattcataggtatagctatgctaaaaacgcgggaccctacaatgtacttagcactagcagagagggagtcgaggatatggacagagactgcactagctcacacattagcaggccagggtgcggtggctcacccctgtaatcccagaactttggaaggtcaaggtgggaggaaaacttgagtccaggagttccagaccagcctgggcaacatagggagaccccttctctattttaaaaataataaaatagggccgggtgcggtggctcacacctgtaatcccagcactttgggagactgaggcgagtggatcaggaggtcaggggttcaagaccacctagccaagatggtgaaaccccgtctctgctgaaaactgcaaaaattagccaggcgcggtggcaggcgcctcaagtcccagctactcgggaggctgaggcaggagaatcgcttgaacccaggcagcagaagttgcagtgagccgagattgcgccaatgcactccagcctgggtgacggagtgagactccgtcttgaaaaaaaaaaaaataataataataataataaaatgaagaagtagttagcggtgtcctttggtcctcagctttgaagggcaagatcttaattcagttcaactacagctaatcagaatttggaagactaattcaagtcagtcaaactcacaatagcccgacacttaaaccctgccaggggacatagctctctaggattgcaatgttcctaatcccttccttctattaaactacctagaaactgatttagtcattagaaatttcttggtatgatggcttttaaacatgcccacagttttttttgacaatcggctcctcaaaagcatagccaggcgcggtggctcacacctgtaatcccagcactttgggaggccaagtcaggcggatcatctgagatcaggagttcaagaccagcctggccaacatggcgaaacccgtctctactaaaaatacaaaaattagctcgtcatgcacctgtaatcccagctacttgggaagctgaggcaggagaatcgcttgaacctgggaggtggaggttgcagtgagctgagagcgtgccactgtactcgagcctgggcaacagagtgagactctatctcaaaaaaaaaaaaaaaagaaagaagaaaaaaaggccggtcacagtggctcatgcctgtaatcccagcactttgggaggccgaggtaggtggatcatctgaggtcaggagttcgtgaccagcctggccaacatggtgaaactctgtctctactaaaaatacaaaaattagccaggcatggtggtgtgtgcctgtaatcccagctacttgggaggctgaggcaggagaatcacttgaacctgggaagcagaggttgcagagagctgagctgagattgagccactgcactccagcctgagcgacagagcggaactatgtctccaaaaaaaaaaaaagctggagttgggtgggtatggtggttcatgcctgtaatcccaacac

SEQ ID NO: 870 - DNA, 2424 bp, Homo Sapiens
cccaactgctcccacagttaccagggcagaaaaaactgagattaggggtagggcacaaaggagaatatatttatgttttatttgcataattacaaattaatgttaaaaagaatgcaaagtcaggtccagggtagggatgaagaggttgcagatgccctcaagtattggaaagctctggccttctggccttatgtcttttttctttcttttctttttttttatttttgagacagggtctccctctgttgcccaggctggagtgcaatggtacgatcttggctcactgcaacctcaaactccccggctcaagcgatcctcctacctcagcctcccgagcagctgggactacaggcgcacgtcaggtggcccagctaatttttgtactttttaaaatttttttgagacggagtctcgctctgtcgcccaggctggagtgcaatggcggaatctcggctcactgcaacctcagcctcctgggctcaagcgattctcgtgcctcagcttcccaagtagctgggactacaggcgcgcgccaccacgcccagctaatttttgtattttttgtagagacgggttttcaacatgttggccaggctggtctcgaattcctgacctcaagtgacgcgcccgcctcagcctcccagagtgctgggatcccaggtggagccaccgcgccgcacttctcgggccttcttctaactcgggtccctgggccccccaggctctcgcttccctcccctacgccgccccgcgcccgcctcagacctctctgggacccgccggcctggcgtcctggcccgcccgagccccacggtccctcgggtcctaacctcggcggggcaggcacctcctcaggaagccccggagcaggctgtcgttgtataggtggcccaggctggcggcccctgaccgaaggtcgcgtcgggtcagtgtgcagcccgtggctgagaggcggctgctgaggggccgggcgggctaggggccggctagccgccgttcgcccctgctttgcatattcatgaagtctagcgaggccggtcgcccaggctagccgtggacgggtcatgaattattcatgaggaaacctctggtcccgcccagaaaggcctcgttgactattcatgagccgaggagcgggtttgggccggaaaaggccgttgacccccggtgggagggaagcgtcgacgagctgaggtgagggctgttgagacgcgaggtctcggcccagagagggcactcgggcgttgttagttctgtctttatgtcaaaaaacaatttttttttcttttcttattacttaaggctttaagttggatttgaaagtatcatatttcgtgagggcctaaagtactgtgaagagaatcgggagggcagggggctgaggaggaaggcaaaagggaggcgatttcccccagaactggacagagagcacccaggtagttttgaaattcagatttttctggacatgaaatcaaacttgctgagcaagcagcagccataatgagccatgatgaggctggcagggcagacgatgtctgtgcccgacattggagggggccgtgtgtggtggagctttggggaagtttatcttacctgggtcagattctccccagccattgaggttttctgccaggatcgatgcctggtacaggccaagaggtgagagaggtggggacaagacaccccgccccccttgacctcagctcccctttcactttagtgaggatttgccaattaatccctatggactttagttccctaaacagagggagagagtcttgaacctcaggattagccaatcgccaaaatgtgtccgagtacgcagggcactggacaggctgtgcagtacatcgtgtactcagctggtagaaatgaggggtggttctggcccctaaaggggtttttaatctcagcaggatcataatctaatttctcctccattggaccatcaatctgttgaggtaggaacagtattttacatctcgtaatcctgcatgttgttgcctggcacattgtagttgcctcgtagatgttgaatgaatgaataattgaaatagcatgaaaaagatattaaaaagtcaaaagagcatgaacaaatactcaattaatatagtggaagccattttctctgaatgagcacaggtaggggaattaccagggccaaatggaatttgttaaaatggtgaataatttattgaagcaagctctgttggaaggtctaagtaattgggcgaactttggcaaaccaagttcccttgcttagcctcactttccttttcttttttcttttttttttgtgagatggagtcgagctctgtgccaggctggagtgcagtgacgcaatctcagctcactgcaacctccacctctcgggttcaagcgattcccctgcctcagcctcccatgtagctgggactacaggtg

SEQ ID NO: 871 - DNA, 2371 bp, Homo Sapiens
ctctaggcctttcatgtggttgctggtcagaagcacatttgataaggtgtcccggctgtcctggccgtccctacatgaagtctgtctagccaaggcatttccaggggtctaatgagaagggaactgtggttgggtgatttcgaaggtgatgggaaagacgttgtttttcatttataaagctgccagggccagttggggaaaagcagaggaaagggaaactacaagaaagtagatccaaagaaacagaacctgaaagagctccccaggctgctgcctagaacatctggaactaagctaatgggcatggagggagagcagctgccaagccatctcttggcacgagctctgagagccgcctgagggagctggagcagacgccgtgggacttttcccctgagttattgcagcttcctcctggagccggcccggggtggcggctcaaacatggaaatgtggtctgaatcctcttcccagcaaccgctgctgggcctcagtttctctctgtgaggcgggcagttgagcgaaatgaaattataatatttaattataatattgcgagtgtcagacactgcgctgagttctgcatgtggatcctcttaatccttaaaacaactccagaggtggcaatgattgcacccactttacagatagaataactggtcagagagggtgtgtgtgtgttacctaaggtcacggagccagcaagggcaccgggtgagaatttgaacccagagccactggcttcctaaccacagcgctctcctgctgagcagggacaagtactcatcttcccagctctccctgcagtcagggagccagaacaccctgggaccggaaactgctgcctggatgacctcagccagctacctcgtttcgcagacggggaaagtgagaaccagagaaggccggtgactggcccaaggtcacgttgtgtcccatatcctcctctcattcccggacgtccagctccccaacagccccagcacagagctggggaaaaatcttcagagacatccccttgggaagacagctggaaggcagggctgagccggggtcatttgtgacccagcggtgaggtgatgaggtactgacgaaagtactgtatttcccccttttgagaaacgctttggcatcagatgagtcttgggggagggaggagaggaatttggcagggatctggttataagccatctggagggtggcgtgaggaccggaaaagccgctgcccgttctgtttggtctcatcccctgaatgaggtcactgaatgtgcacgggaggctcagcgctgccccactccagcctgatggagaaatcctacccgaaatcccaaagcagggcagggacattcccaccagatacttttgcagcctttgtcctgtgggacgaagcaagggatgatgacacactcgcctgcccacccggaagtgagtctcaggtcattgcatcagaagggtgacaacctaacacaagtcattgctaagcaactctcgcgtgctcagtattcacattttcttgcttcattctgaccactacactgcacaggagccattattctcaccccccgcctccatttacagatgaggacaccgagacccagagagttttttgttttgttttgttttttgagatggagtcttgctctgtcacccaggctggagtgcaatggcacgatctcagctcactgcaacctctgcctcctgggttcaagagattcccttgcctcagcctcctgagtagctgggactacaggcacctgccaccacacccagctaattttgtattagagatggggtttcaccatgttggccaggctggtctccaactcctgacctcgtgatccacctgcctcagcctcccaaagtgctgggattacaggcatgagccaccgcgcctggcctgttttattttttgttttgtttgtttgttttgttttgttttcagagatagggtctggctttgttttccaggttagggtgcagtggtgcgaccatagctcactgtagcctcaaactcctgggctcaagcaatcctctcgcctcagcctaccaggaactggaactacaaatgcatgccaccatccccagctaatatttttcctttttggaaaaatgaagtctcactatgttgcccaggctggtctcaaactcctgggctcaagtgatcctcctgcagtgctgggattacaggcatgagccactctgcccggccaatctcagagagttttgatgaagttacaaaattctgaccatggagccagaactcaaatctaggtatgtgaggtctgagcccaggcttccaccagggccactgtgctgcaactgccaccacttcctggcacctcaagtgacacccgagcatcattcaagggaa

SEQ ID NO: 872 - DNA, 2500 bp, Homo Sapiens
ctctggagaacaggatacgtggagggttaggaaggggccaggcctagagacgggagactccctcccggagcaggtggaggcacaggaccattcgctaccccatctgccggcacctgcgggggagcccaggcattctttgtaagccctcctgaccacctggctcaaagaaaacagaagcatggaggccgccaagtattttcaagaaataatcccatgaacatggcatcacttttttagaaagaggggcttggggcaggcagaggagagaagggagatcaaactgagagccaagtttccagacggtcctgcaggaggagaggatgcagctgcccagagggaagcaggatcacatttaaggaagtgtgtggggtccctggatgacaccagcacccagtgcggctctgtctggcaaccgctcccaaggtggcaggagtgggtgtcccctgtgtgtcagtgggcagctcctgctgaacccacagctcactggggagcctgacagtggggccatgtgcctgacactcctctctgcttgtggacctggcaaggcagggagcagaaaacagagctacttgaaggctttctgtctgcgtctgtgtgcagtgtggatttagttgtgctttttacttgctgggagagcacagccaccatttacaagcagtgtcaccctcgtgggtggcgaggacagaacaggagcctctgctctctgtacctatctgggcccggtgggctcccttgtcctggcttccatctctgtctcagcgaccattcagccctgcacaggaacacatgttgcttagaaaagccaaatccagcccttgtctctgcctcctctggtctcatgatgtgcatctgttaccttgaaactggaaaccagtctatcaatgtctgtgccaattttttattccctccccaacctccttccccatacgactttttatttatgtaggatgtgtgctgtctaatgatgggatgaccacacttttccatgttctaaaagtgctcctctcccacagggtcccagggctggtggttgctttgggtctacagctacgtcttacccgcctcctgcctcaacagcctgtgtggtggcaaagccggtgtggggctggggaacgcagcgttctccaggaggggacccggctctccttctgcagtgcaggcgaaggcctagatgccagtgtgacctcccacaaggcgtggcttccagactccccggccggaagtgatgcttttttgccgcgggccctgggtttgaagcagcctggctttctcttggtaagtggctggtgtcttagcagctgcaatctgagctcagccacctacacaccaccgtggccgacactttcattaaaaagtttcctgagacgacttgcgtgcatgttgacttcatgatcagcgccgctgggaagaaccccagagccggtggggtggggctggaagcagcaggtgcagtgatagggctgggtgcccaggaggcctcagtgctcaatcaggccaaggtggccaagcccaggctgcagggaaggccggcctggggggtgtgggtgagcacaggcaggcaccagctgggcagtgttaggatgctggagcagcatccgtaactccactgagtggggtagtctggttggggcagggaccgctgttgctttggcagagagagaggatccccactggggagaggctgttctgactctgcaggtgggacagggacagatggccaccagggtgacccggctggtcttcctttgctatgctaagccctgggacatggaggattcctgccacacagcctgggcccgggttcttacctgtggccaccgctctggcatgagcccctcagtcttgggtggtttctgcctggtccgggatttggtgttgctgctgagtccagcctttctgccacctccgcatgggccgtgggtggtgatgtcagctgcctcccaccttggcttcagtagctcacccagcttacaggggagctgccctgggctggagatgggcatgcaccctgggtcctacttgaatgaatgcagcttgaggagacccggccatatacactgggccacaggttaccctcggcaatgcccacatcagccgtcagcctgagcctccccaggagagcaaggctcacacgacaaaggctgcccgtggccagtgaggtggctgagcccagccaggacctttctcggactcccgggatgtggctctgctcgtgagctgcctggtcagctctctcggggtgagaggggcttgtcacacgggcccctgcctgcagtgtgacccttctcagcttctctcagcagccctgcctgcagagtgtcaccaccaccatgatcatttccctgacactgcgagggtcgggggacgtcctgggtagagacagggcccgtggcagcagcaggctcaggggcgccctacactggtgggctggggacctggtggagaccacgccaagggctggacaaggggacgagcctccaccctggcctctccgcaggcc

SEQ ID NO: 873 - DNA, 2431 bp, Homo Sapiens; identical to SEQ ID NO: 853

SEQ ID NO: 874 - DNA, 2451 bp, Homo Sapiens
caattaaagatttccctaaacccagcagggaccagcaaatacttatagaagattagagatttcttgtgagtgcaaagggctcagagtgacctgatgctatagaccaaatcttatggtcccctcaaattcatgtgttaaaatctaattccccatatgatgggatttggaggtgaggccttggaaggtgattagatcatgaaagcagagactgtatgaatgggatcagtgtccctatcaaagggactgctgagagctccctcatctcttctgtcatgtgaggacacagtaaaaagatggcagtctatgaacaaggaaggaagccctcatcagacacgaaacctgctgacgagttgaccttggattttaccatctccagaagcatgagaaatgaatttgtttctctgctacctagtgcagtgcattatcttttggcacccagattggctacagtaccaacatatcaacttgtacacgtaatttttgaaattctgatgccaaatctttgatggcaacaggtgattgatctgctggaggaatggactgacatgatccctctttccacaataaaccagagagtaaaaacaagcaaaagtaggtcaaggtcttctaaaagccgtacctgaaaggtttccagtaacagttgattagatggtaattcaatcacacaaacaaccacggcaaagatacacaactatcagacattttcagaatagcctctaaaacaacatctgacaacattagggagttaaagaaggcacgaactttcaaaaagtcaaactttatttaaatgttattgtagaaacttgtaattttaacactatggatgaattctagggcaggtggtggcatggcatggcgatttgggggcacaagtgctgagttttgaagcttcggttttgataccctttggagatgccccctggcctccacacccctgcccacctgtcaagaagagcctgtcctgggcagcacctcagggacaaacagcccagaagcccagttgagggcagacctccaaggttggaggaagaagccgcctctgggagcaggaggagctgctggatcccctcctcccaggtttcttttcctgccccccagcgcctcttgcaggcaggcaaacaaccccagcaggagcagcagcaggcccttcagccgcagggctgcagctctgctgaatgagagaagcctctctctggcgagtcagaggagcgcaggccatatacccgggtctctacctccatgtctcccactgtgcccaggactgagcccagcgtgggagatgcgggctggggccgtgctggccaccccctctcttccacctcttgctccagccatgctttcagctccagggctgaggccagtggctagagcagatctcatgatgtcaggtagctcctcactgggctggtccttggcaggaccaggacaggggcaggagggatctggagctgctgatagctccagttctgtccctgaaggggggtcttcccctggtgctggcactggctcatcagctggcgctggaatttcctgtgttgctgcacatggaacaggagatgaaaaagaagaaagactcaccaacgtcagtcactttccactggaattttcacacacagaatcaacctcgctgaatgtaaggtattccagcccgaaaacactgcccctgcaaaggctcatagactataggccacctcaccgtgtgcctgtgcctcgatgaactccagaggctccagctggacaagaacaatgtgcagatgtggccgcgatgggatcaccggtggggcctggcctggtagggcctgccctgggctgccctgtggtacttgggggcgcctttgcccaaatggccagaggcgcctggagtgagagatgagtgaggtattgcccctcacaagagggcattagctgcggggatccgcccacagaccctgacccaaatgacggatgaataaaacgtacactgacacagagttattctgctttgccagtcctgctgagtgtcccactgcctgcacaccaagagaggtttgtcactgcagctggccgtgaatagctcgcactgcaggcatttatttagtatagaatttacaacggaagctttgagtaaatactcttgtggataattaacatggttaagagagtagttctaccaatgattaaagctcaggtaccatggtttaaagtaaataccactgggggcaatttcccgggtctacctcccccctcctccccaagaggactatctggctcaaaggctagttaatggaagtagggtaaacagacttaactggggaagcctctattgtccctaacatttaccctatgagctaatgctctaagataagaagcagctgccttcagcctgttcaattattacaagctatgtaacctttccgccttccaaaaggtttgtgactattccctgtaactttccctaatatttccctttaa

SEQ ID NO: 875 - DNA, 2402 bp, Homo Sapiens
ctgcttttgcaggctgagttttggagtccctctgtgctcgggatggagttggagcccacccctctgaccctcactcgggagcagtggagccctgagcctttctgaacactggggaggatgggtgtagacggactgtgcacttctgccccctttgccaacctggtgggcaggtgctgagttcacaaggtcctagaatcccacaacgaagccagggtgcctggtgggagcccagggagtcccagctgctgttcattcccccttctcctcaaaaagcctgttcatctgtggcgtggggactatcattagtggggagtggctaaggtaggctaggcagggacgcagcctacaagccccgtggcatcttttccttccctgtggacctctggggtgattcccttgtctctgtccctgcttctcagaaatgcccctatcaatctgagcgtggtggctcacgcctgtaatcccagcactttggaggctgaggcggggcagatcacttttggtcaggggttcgagaccagcctggccaacatggtgaaactccatctcgactaaaaatacaaaaaatgagccgggcatggtggcgtttgcctataaacccagcaactcgggaggctgagctgggagaatcacttgaacccagtggagattgcagtgagccaagatagcaccactgcactccagcctgggtgacaaagtgaggctctaccaaaaagaaaaagaaaaaaaaagctccaatctgtgtgtcctgcctccccccaggaccaggcctgccaggcagcagtgggagctgacctttcagcagatccacaaactgaaagttgaactggatgtcatgcttcttcgagaagatgtagacggcacggcagggtgctgacagcaggtccatgtagagctccagggccatgttgagacacatgccaggccccacagctgcagctggccagccacagacctgggcctatgtctggccagagtccctggccctgtgccctctccgatctgggcccaggaccctgcattctggaacctcttgtttccctttgtgttgtcataaggccaggaagcctgcaattctcacagcatcaaggattctaaggaggcccaggagtaggctggcagaggcccgtggcaaaggtgtggcagccgtgaccctactctccccctctcacgtgtgtctgtgtcccgtggcgccacctcacagacaccctgtctgagaagggattatgcctgggaattcccagggccggactttgattgcagaacctgacgaaaggggctttgcagggtccagaatgaggaggaggcaatgagaattatccctggaggattctagaagtagaggctgggagcatccacaggtgaatggagcctgaactatgactagaaaggaattgggagaaagagacacaggaacctgggagcttcgggagcagtggggacaccaccaccaggaagtcagggggcactcggcaatgaaagtggcagatgcaataaaacttttaacatattgttgtataatgtacaataatgtaataaaaatacaccccctatacattattgttccaactctagctctatctattgccctcctcatatgaatccctctccccataccccattctctagttaatcttaactaggcctcctgtttatattagccacatcaagcctagctgtctactctatcctgtgatcaggatgagcatctaatttgaaatatgcactcatcggtgcactatgtacagtggcccaaacagtctcatatgaagtcactctagctattatcctcctatcagtcctattaataagtggttcatttaatttgtatatactcattggaacagaagaatttctctggctgctcctaccatcatgacctctggccataatatgacttatttccacactagcagaaaccagccgagcctctttagacctaacagagggggaatcagaattaatctcgggctttaacgtcgaatatgctgcaggcccatttgccctgttctttatagcagactatataaatatcattataataaatgccctgaaggccgcaagaggttcgtgggtgcagtgcacaggagaccatatctggggacagcagctgcagcagaccccaagctgggccatccctgccacttgccaggtggtgcttggcgaaggcaagcagctcccacccgcccggggaatacagcgcgacccccggcggcatgctcttcagcaccaccccaggaggtaccaggatcatctaccactggaaattcctgatggagtgttgaaacttacccgtgaccaaaacactcccaagggatctgcccaccattcccggggtcaccagccctgccagtgatgatccccccaacggaagccagccagagccacctgagcaatagtcc

SEQ ID NO: 876 - DNA, 2500 bp, Homo Sapiens
aatatttgtacgtttagtagcaatggggtttcactgtgttgcccaggctggtctcgaactcgtgacctcaggtgatctgcccacctcggcctcccaaagtgttgggattataggcgtgagccaccatgccccactcccattcgctttttatcacaggagccaaagaacactctctccctggtttgcgttttttttttttttttttttttggttctaccaagacattttaagatgagtttctgtcatttccatttgaaaaagtcctgactagtttactcccccgaaccaaccagaagacacaaagcagagctcaccttcctggaaatgggccctttaccccctctttttttttttctcctctagtttggaaattctttctctccacttctgcctgtcccaggcttcattggccatgatcgtcctccattgctgggtctcagtctcctcctccctccataaatctccccctttctcagatgaaaagaccaacactgaaaaggcaagttgatgtgctccggtttgcacagagccctggaagcagagctgggatttgaattctgggctcctgattctctgtccagggctcttcattctggcagagcaggagatcaatttcttctctttctttttttttaaatgaagcttttatacatagctatccacatatgtacaagcagctcttaaggccagagaagttaattccaaattttagagctgtggaggctctacagattatatggagtttcagctagtgattaaatctgaggtaacagcatctggaggctcagccttagcactgaggggagttggagggaaaaattaagccaagagtaaaatcttcccgttctgaaaataatagtggcataacacaatactcctggactgtgggaaataaaatggagagggacatgattagaaggaaacttctagaattctactaattccacgttcctcaaattggtacaactggtgacaatctcagagtcacctgtcatcgcatcaaagtttgacagagaaggatgacccacaggagcagccttgctgtgcttgaggattgtttgacacttgaaatgagcttcggatcagttcttggctgaagtccacctaggcccctttcgcgaaggctaagctatcagagtcaaccaccactcttgccccaccctgttcaaataccgtcgtcggggttgataactgtatccagtgaacatctgtactggaatccggagcatctacctccctccacctgcagcctgaggaattctgatcctttggtgatttccagaagcctctggacgcagctgtccgtgaggcggatctgcccgtcgccggcctcggggctggacgacacgcccggagtcccagggaggccgcgaggagcctgcccctcggccaggaagtgaccgctgtctgcgtcgcggcccttaaggacaacccctgggcggcaaccatcttcctccacccaggagatcaatttctttgttgaggttccacctaaggctgtagcactcactcactgaggttcctaagaaacctgcctgtcctaggaaacctcctactgagacctgccccgcactgccacctggtggtaagatataaaaacacaccctccacggtgggatcagattgcgcgcctgctccgcccccaccccgccctctccccggtggtggggtagagggatggtggaaagggaaccaagagctagttcccagaagtgtaggtatctgggattgagattggagtggggctacacctccttctctgttttcagtaccagccatagctctgtcactgtgcctctagtttctttcctctttgcagacattggccacttgtgaaactaattgtattccctctttgcattgtcttccaggacacctggaaccagcgtacagttcactgttagcaactggatagaatcgcatggcaggaatttagaagaggagcttaatctctgagtccacattccttcccctgggcctcattttcctaccttattttatatttagttttctgatgatgttcaggacatccttccagccaccttaactctcctctttgtaagggacaggagggacaaagcaaggttatacattcagaaagagcttgcctaccttctgcaagtctcagtttcctcccctataaagtgggcacaagaatccctgccttggagggttttgtgtgtgtttcaggagatgctggattaatattagtgtccaccctatttcccacctccccatcctccaggctctctgccagttatgtgatgcaggctaggatgcaaaggagatcaacagcacagatcactttttccccagtgccatttgtgctctgcaggcccagtgggtgcccctactagagccttgtaccctgagcccagtccctacctgccttctggaagatgttggctccagaattctctgcctccctcctgcaggcattgtggcattcacagctgatttgcagagagcccagatgcatctcataaataaggaatgtact

SEQ ID NO: 877 - DNA, 2480 bp, Homo Sapiens
gagactccatctcaaaaaaaaaaaaaaaaaaaaaacaaaaaaaaacccaaccaatcaaaaaacaaaaggtacctacctggtaggttttggtaattctagagttaatctgtgtggtgtggtggccaggaggctcagtgcacattcaataaacatcagtggccatcatgattcacccacagctgcaagtcatccccgcgactgggaagtcctcagaactcagagtccctgtccctggcaaaatttccctgtcctaggttctcctctgtcaagagactgcttttcctatagcgcgaatagatggtcatggattattccacaaatgactctctactgaaggtgttcagcctggcttgccctttcaggaagcaggttgaggtttctccagaaagttgcccagaagtagtgtctctccagctgttgcgacgacagctggctgaacgtgccctaacccagccctgactcttgcttcttttgagcctgtgcagcagccgtgttcattaccaagtgctgccggcagagcctggtggtggaacgccaaagtgtgtgtttcagtaaatgctcgtcacgtgcctgcgttagtctatgcacgctacattttcgtagccctcagttatttcattaataggcctgaactagttctataatattggggagtgaagaatgaatgatcctatttcttttttctcagtttgtctatctcatttttcactatatcctgtgcctagaatagtgcttggcacgggtagatgcttagtaggtatattttattttatttttatttttgagacagagtcttgctctgtcacccaggctggagtgcagtggcacgatctcggctcactgcaacctccgcctcctgggttcaagcgattctcctccctcagcctcttgggtaagtgggactacaggcgcccaccaccacgcctggctaatttttgtagagagagttttgccatgttggccaggctgagctggagcaatgctcctctcacctcatggagcctccacctaccacagctgtcagtttcccctaatcctaggaacccccgccccaagggaaacaggacagacagcgcccgtgtcccactctgctcattttcagatgaggaaacagtcaccaaggtcccgtgcaaactcgccgcccacccaacagcccacatcacttgccttgctccagcttcccgctcgccagctggtgttcctggcagccagcaggtccgcgggggccccgtctcagccaggctgggggccgggggctgggcctcaggaactctgctgctgctgttggggctgccccaagctagcgtggacagaagcccagagctcaggggcacctcagggctgaggggctcaggctggcccttgggtctcgggctcagggcagtcacccagggtgtgtgcctgcagccaatcagggttgtggggaggaaggtccccggcactgccacagtctgcaggtcccatgagcctggtcctggggttgggaaggtgggagtctctggctccaggaggctgtccctgcccttaatctccggcagagtgcctacgggaggagggggaggagccgcccccacagtgggccacagctaactgtccacaggccccaggccgccatcctgagctggctcccaggctacagtccttcctgtccacagctccaccatgtcaggaccaggacaggagtgggtgctgtcgacagggaacaaagggggcagcgtggggctgagtctctggggcaggtagggtgctccgtgacccacgggttcctcattgtccttggaaacctcattggtcctgtcccaccatggagggggcagctggttctggctgtcctagtcgactaggaagtcattttggctcccaggggtggcaggcgtctgcgtgccatcaatagaaaccctgggccagggcgggctggagagctcaaggtctggagcctctatgggggtgtcttcctcacgcaggaaattgaccagagtgttcccaggagtctgctctgaaggtgggggtggggagtggctggcctggctgggccaagggctagtgggccagggtctcagtaccccctcctccttggctgcaggaggccctgtggcaggcatggggctgccggtggaaggtgcagcaggacggctgtgcagtgggggcgtccgatcccctgtccctgccaggtctaggtcaggcccctctaagggcccatagcacagatcctcgtggagatgaatgaaattgtagtcgtagtggaagtcatctacaaacacgcgccccagtgggcccagctctggggcctcctcctcaatggcattgccatgctggctggcgcaggtgaagggcttggggccaggaggcgtgagatgaagtcagcctcgctgaagagctcgtggctgaggagccgctgcctgagccttcagggcccagtgtgtccaggattcgccaacagggtggtagagagcaggtgactgtgctggctggctgctggg

SEQ ID NO: 878 - DNA, 2364 bp, Homo Sapiens
aagctcctcttgtaaccgccaagtgggttatcaaggcaggggaattgcagtggagaaagagtttaatttatgcagaaatggctgaacaggagaccagagttgttttttgtttgtttgttttggtttttcttttgagatgaaggcttgctctgtcgcccaggctggagtgcagtggcgtgatctcggctcactgcaacctcctcctcccaggttcaacccattctcctgtctcaacctcctaagtagctgggactacaggcatgcgccaccaggtctggctaatttttgtatttttagtagaaatggggtttcaccatgttggccaggctggtcttgaactcctgacctcaggtgatccttctgccttgacctcccaaagtgctgggattacaagcaggagccactgagactggagtttttttattattcaaattagtctcttggagcatttaggggctagggtttttcaaaggtagtttaagggaagggtggcgggggtggctaggcaatggggcctgctgctgactggttgggggtgcaatgataggggtgtgggaaatgatcctgtatgctgagtcacttctgggtgaggccacaggagcagttggcaggtccaggtggaaccataggtgtcagacatacaaaaagcctgaaaagatacctcaaaaaagcccgggcgtgatggctcacacctgtaatcccagcactttgggaagccgaggtgggtggatcacctgaggtcaggagtttgagaccagcctggccaacatggtgaaacctttgtctctactaaaaatacaaaagctagctgggcgtggtgatgggcatctgtaatcccagctactcaggaggctgaggcaggagaattgcttgaacccaggaggcggaggttgcagtgagccgagatcgtgccattgaactccagcctgagcgacgagagagaaactctgtctcaaaaaagaaaaaaaaaaagatacctcaaaaggccaatcttcacgaagggccaggggtcccacaggtgagtggagccccagcagccccctcagctctgcgtgcccatgtactggtcttctccctggctctatactcagtgttcaaggggttgcagtgagacggggcttgggccgcggagctgcgcctggctttgctgctccacaagggcaccgtggctgtcagcctgtccctgcaactgctgcagagccacgtagggttacaggtggtggctggctgtgggatccacttcttgtgcatgacacttctaggcatccggctgggtgcggctctggcagtcagcagggcctctgcaccagctggcccagtctgtgctagagggcatggtggctggcaccttcctctataccacctttctggaaatctttccaggagctggcgacttctgagcaaaggatcctcaaggtcattctgctcctagaagggtgtgccctgctcactggcctgctcttcatccatatctagggggctttgaaatagaggccgctgttctccctccctgccccagtgtgtggggaaaaggaaggaatgggaagggaggttctgaggacgaaagctttctctaggagctaaggatggagcctttggcactatctgacccatgagagggaagtgggcaggcaagagagactggtctcagccccaaggaacgagagacggctgagtcactagagacatgatcagggacattagtgttactagaaaggggtcccgatccagaccccaagagagggttcttggctcttacacaagaaataattcgaggtgggtccataaagtgaaagcaagtttattaagaaagtaaaggaaggccagacgcggtggctcatgcctgtaatcccagcactttgggaggccaaggtgggcagatcaaaaggtcaggagatcaagaccagactggctgacacggtgaaaccctgcctctactaaaaatacaaaaattagccagctgtggtggcgcatacctgtaatcccagctgcttgggaggctgaggcaggagaatcgcttgaacccgggaggcggaggttgcagtgagccaagattgtgccactgcgctccagcctgggtgacagagtgagactccgtctcaaaaaaaaaaaaaaaggaagtaaaagaattaaagaatactccatagacagagcagcagcatgggctgcttgactgagtatacttacagttatttcttgatcatgtaactgcccagcgggttctccttgcccactgcctagacagagccgattgatcaagacgggaattgcaatagagaaacagtaattcacacagagcctgctgtgtgggagactggagttttatcattactcaaatcagtctccccgagcattcggggatca

SEQ ID NO: 879 - DNA, 2467 bp, Homo Sapiens
gagaggttctggaagggcaggggcgtgtggtgacactgggtgctcctgggttccagtacctctctagccagttggaagaatataggcaagtcaagtccttcctcctccctgagcctctaattcctcaccggtaaagtagggatgataaaaataaattattaaattgttgtgaggtttcaatgagggcaaagcttgctgcctgaaacagagcaagctcttgtggcgtcttagctatttgtattagttacttgtatttttctctgcggtttcccttttaactcccacctcctttttattttaaaaagactccttttgaaaatgccagcctgcctcagtagtaccaggagacaccagggaaaggcttccttctttccaagctgaggctgagaaggaatgggaagaacgaagagaagcacctttgtggaggcctcctccagctggccctgggtttaggaacatcacacactcaacctccaaaggccctcaggggctggcccaaggtcacacagcttgacagtgcggagcacttcgaagccagggcgtgtggtgtagaacaggctgggtgcctgaattcaatcagccctctctacttctctactcagagcctcccaggctgtggggtgttcacctgtgcaccttcaagccgatcacttccttggggtcctcgtcaattcaattccatggaaatattacaaggggtagacagagatgagccgtgtcagtgtctgtactagcagagggcaggaccactgagcgtccggaggggagacgagtgtctgggtgtccctgggaacctggcttgtctcgacccctctggggggctcctcttggctctgacctccattctcccagactcacccccactcatgcccacccaccccgaggggccccccagtgtgcactcacacactcacactcaaactcaccaccccacttgctctctaattaccaggaacgtggcgctgtctcaggttcttcctcccctgcattcctcagcagctgccctcactgggcagggcaaattataccgtggcccgaccataaaagccactttccaaaaaaagaagctttaaggcccccgagagacgcagctgagcctctcacctggcagtgcctgactcaggaggtgatgtctgggccatgagccacagagcctggtgtccctttaagcagggagtacaaattctcatccctccctcctgctctccctgacgtcagctggaaggcgtgtgagtgagtgaggggctgaggtaccgcccgcgcgagcacacacagacacacacacacacacacacacacacacacacacacatcttccagacccatcccctgcctgccagctccacgagccagagagagacagagcgcggacgccgcaggaggcagtgcctggaccccagctgcccaggagaggtgaggggctagatggggcctgaggacactgtgccagaaactgtggctttggccaggccgaaggagagaggtacaacgtgaaggtgggggctggatcagcccagttcagcttacagatagggtgttgggggtatagaggataccacctgtctctccctccctcattctctccccgtgacccccaaatgaggtgaggccgtgtggctcccgtgggagcatgtctgtgtctgtgtctgtgtctgtgtctgggacctgcgtctggctcaggaggcagagagcagcagatacctgccaagccgcagcctcctgtctgggaagcagcgggagagaggaccgccttgaccagagaaaccccagtgccgcttccagttgctgaaagcagagtgcagcagggacccttgctggtccttcccctggaatgttgggctgggaagggaccggctgggaaaggcagacagttggacctggagcagctgtcttatcctgactctattttttccccagtgtgatggggataattgtgttagttggcttagagaggtggctccgtgtggttattctcttcccccaggtaccaccccaccccgagcccttgcttcttgcctgcctgctggtctgctctgacctccacccttgccagggcacagcccccggagggcaggggtgataagtcagggcctgccaggcctctatcttgggatacagggacttagggtggccttggctggtgccaagcccatgaatggcctgaccctggcacaaggagtccaggcggagataaggggcgacgctggcacccacaaggagacagcaggttcctgccaagctgccagcctgcaggctcttcccagggagaggggagggggacacagagcgagaacaataataaatacagagtgtgaactgctgcatccactggggctggggtaggagaggaggaagtatgcccagtggggggtgggcaacctctctgagagcctggcatcatgctgcctggctgtgatccggcaggggcctctccctgggaaagggggtctccagctttctgggggat

SEQ ID NO: 880 - DNA, 2366 bp, Homo Sapiens
gactcatgtgcctcagtgtcttcctctgtaatatgggggtgatgattgtacctacctcacaaggaagtttccagtaaaatgaaagcccttaaaattatgtttgtttcatcaccaatgactccataaatattagcaacaataccagtactaagttttgtcattttttattaacttcttgtaaacgaccctactttcctgctctcacacactccttacacctgcatcccacctgatttagccactttctgcctaacctgtcagaaagggtagatagcttcccagtcacctgttgctagggaaactcaccatttcagcccggatggtgaagattccagcttgagagaccagctcgggtctgaagtgtttctctatctactgtgctgagatctctccttctcgaaccctgctatgcctttgcatacgctgttttctccacctgccacgttctcaccccttcttcttccactgcaaactcctatgcagccgtcaaggccccattctcctctggaaagccttcccgatccccttggcaacaaccaccaccaatatttattcactgagcccactttgtgccaagcattgttctagacacgggtatgtaaccgcgattgagagagacagaccacgcacagcctggattttattttaagagctattgggtgccgttggtgggtttgagtgagtggggtcaggaagtgactcactcctccgagggcttgtgggagcctcagctcaggggcgggcagggggcgtggggaagtctgcagccgagagtccaggtaggagtctcctgcgtggtcccgggagaggaaggggcctggcccggggcggggtgtggaggtgggaggacggcggtgcgggatggagggtggaggccaggctgacagggtgctggtggtgggttgcgggggtcgaccccaggctctggcctatgtagctgccattttggaggtgaacagcctgcggggaaactggcatggtttggggaaggcggggagagggggagaaatgaaagcattgagtttaagtggcctgcagaaccccgggggcccaggcggcacggcgggcgctggggctccgggcagagctttctggaggtttgtggcagcttcactttcacggcatccacccccctcgggccctgccgcagagaggaggaagctcctgccggctgagcgggcctggaggaagtgagcagcggggctcctgcctcccggcctggtccccgaagaccccagaagaacccggaacttgcttccattcggaatccagggaccaccctttgcactcagtaggcctttgttttcctgcgtggaaagcggttgggtgagttctggcatcggggccaccatacttgagtgttgggggtcacggagggaggggcccagacaccacctgggaaggatcccagagtgcagtcccagcccaggccacccggggaagggagtcggtaaagtgggaccttgagtccccacggcccctccggctgcccctgctcagaggctgctcggcgtcctccctccctgttctactgaggagttgccgcctctgaacttcagccaacccctccgtctccaggtgaagaaactgaggccctggggccaggaaggggcttgcccaggctgctgatccctttgggcagcatcgagtccaggccctccttgtaaccatgcatcaggaccagagagggcagggggtttgcccaacgtcacacagcctgagtgaggaggagctggcctgggacccaggcttcctgacgcccaggccaggctctttcgttttctctggccatggccctcagcttggatattaaggggctgggagtcagttgtgtccccaccacctccatgctacagggcaggatggagtctggcatcccccgccccaggctggctgctggtgtgacatgggtggctccagtcgagtgaatgcctccgtctcccacagctcagggggctccctgctctggccaccaacttctgccatgtgactcccctacctcaatgtctgattgagtttgaaaacactgagaagacccaggggctgaaaagggaggaagagggaggccagaaggcgccagccgagccagcgaagccttcacaggagaggaagtgggccaggggaacaggaaggagggctgggctggcctctgggtctgcccctgtcccgggcatgtggtgagcccagccttctgcctgtaatgaggaggaggaagatgaacagtgcctctgtcaaccctggcccttccggtttatgggatgggagatgtcaccattccacgtatccacctcagccagccccacacaggccgaccggggaggtttcccttgagctcaacctgacaagctctgaggagtgagctgtac

SEQ ID NO: 881 - DNA, 2333 bp, Homo Sapiens
ccgacatacacgcacacacacacagagtgcacacacatgcacacacgtgcagccgcatttcctggtgcgcttgctgtgagggcacaggggtgggtaggctggcaggcacgtgaagttgccatcagccccgagggaccgtgagcgagttgggacttgggggagaaaaaaatgggggcggacgtcagctccctgggcggccgccgccaccgcctccgcctccccgaggcccctcctgcattcctgggcagcgaagcccctcgctaagacgggggctgatgtcatcccgggctgctcagccaggggacccgggggccctggtggctgcctccggaagtgagctagccgcctgccggccgacaggtttggaatctccagccagaggacagaaaacctgcatgggtcaggtgagcggggtctggccgagggcagccgggcagggggcagcagggtgcggcagcttgcccaccggaacctcccagggtgcacctcaggggggctgcctacctgaagggaagtgaggacgagggtgcccaaaggccgccccctccacccccacccccatccccatcccccgcctttcgggaccgtcacgccctggagtgagtgcagccggcttgttcctcaaagctccttgtctcggccgatcagctgggtgagccctggaactggaacctggactgcccagtgtgttgactttataactccgctggggtggactcccagcctggcacttagctgcctcttaattctgagcggcacccgtggatgcagccggctcctggctcagggatgtttacttacccttggtttgcctgaagaaagctgctgtttttaattttttttcctccaagcaagcccaaaacttccatgagcaaaagagtccaaagaggcaagaggacactggcgttttaattgctctctccctccctaacttccttcttccctctcctcctggctggccccatggattacctgggagataaactcacagtggcccagacccacatgacccagtggatgggcaccgtgaggaggtccttccaggaagccctcaatttggtgaccaccacggtgggccacgaacggacgagtgcagagtcggccagccggacccccttcaagcgtacttcctccttccgacacctggcttcccggagtcgggaatccttccgccgcttctctgctcgcagccaacagagattttcttcactgaggaaaaggcatacagattcggaaccgccagatattgtaagcttattatgttttaaaaaatattaaaacaacactgaaagctcctcccctccagtcctcccagggagggggtcccagacatcaaaccggggaagttacttcttccagaatagttgtcagtcaaagcccaggcacttcctgtcccctgtacctgggaaagaggcacgtagcaataattcctctctcctgaagtcagtcaggacatttttgctggagtcgacgtctgtgtggacagggccagcacgtgagttgggctgaatttgccagttgatttatgtttaagtgtgaacaccccaacccccgacacgaaagctcatccttctccctatttttagggtggattagtggcacctgcctcatctcctctcaccctcctaggaagcacaagtggcggtgtcatgtgcacgctgagttgtagcttttgtcgttccaccgagctttcattggattgccaaggaaagggtcttaggagaccgaggtgtggtgggcgagtttgcccgctggccgtgaaccttgggtttggtgtgagtgggccagggagggaggccttgatttcttactcaggcaggctcgggagggcttggattgggacagcagggtggaatgacagctaatgattaaaaccttggcctgtgtcctgctaggcgacagtgcagaaacaatcgtaaggtccttctgatgatttggagaggtgggactgggcccagaaagcgaaagtgcctactgtgggggaagcacagtgagtgagtggcagagccaggtcccgaaccccaggctctgacctccccattcacggctctttgcagtccagctcccagcagatgttctccccagaccctcccaattaattcagggctgcccaggtcactgaccagacctgagcctaaagagagggcctgccattttcacataggagacttctgccacctgactgtgttggcccagtttatgggagcacttgaggacaggcgaagggctaagccagcccctttttctgggttcctcctagccaggagtgctatagtcattaagggacccagcatttagggaggagccctgagctggccctccctacactcgag

SEQ ID NO: 882 - DNA, 2378 bp, Homo Sapiens
gttaaggctggaataacatagcgactcagttccccgacctggccatatggagtggggctaggcctgtcctccctgcttctcactcccttcctaaccccatagttctctgagactcagatgccacaagggcccaggtgcttacataggggtccaggagtctgctggtgtcctgcatgagatctgtctgcttctggagctggccaaggagcacgcggtactctttcgagcagctgcctatagccgccatgctcgccatgcttggaaacaggagtgcaaggaccagacctaaggcagagaagaggggtgtcacctgacttggtgaggaaagccacagatgggagcctcggggagggggttcaagagggccttgaaaggtgcctccttcatcccagactttgtgtagtggagggcgggggctgggcactgtgtggcacggtgtgtgcccaggtgtgcccaccaaggccaccatcatctccccagtaagtcactgcccagggcctgacacagcaagcagtgggagggactgagacagtggctgcgatttaccaagtaggtctttgagcaaaggctgcagtgcctggccggatcccagtcctgcctacagcacggttctaacctcgggagctgactctctgcaaggtgggactggctccctgcaagaccactgggctaaagaccggccactgccctaggacctgccttgtcagctgctctggccatccaggtagatgggcctgagagggcttcagggcaggcagcccgggagcagcttgtgtcctcagctctgtctagaaccaggagaggctgccttttcaaccagaggtgcagcctggaacagatgtggaagaccttccagtccatgtccccactttcctgacaggtaaaccaagtctcaggagaaggtcctactcaggtcacacaaggccagggctctcccctgacctctcttgcctccctcctctctccataagtggctccttctgtcaggcccaccagggatgctgtgagcctgtcagaaggtgttgggggcgggtacagttaccgctcaccaccacccccaacggggcaccggcagccacgtggtcggaaggggcctatggcgcaatggcccggaaggcagtgacaccatcgttcccgtcctaagaaccatccggccctttggggaagactggctgttggggagggccaaggggccaggcacccaggcttagcgaccccacggcaccctcgccgcctccccaggtatctgctgccgggctctggcaggggcctgtgcctgtggcagcgcacgtgggactggggtttctgtgtggctgtgcatctgggtctgtgtgcggcgtgagggagacctgttccgttcaccatggggactctggtctgcatgtgggggttcctgggctggtgagatccagggctgtagatgacgtcatatggctgtgtgcgcatgtggccatgtgggtgtggctgtgcatgctgtgtgattgtgtgggccctggggcccccaggcctggctgactttctattcatcccgggcaagctggaggccccacaacccctccacacctcacaccacttccctgcccagcttctgagcctccctctcctgcccagcctctttgcccatcctattctctcaccccctggttcccagagttgcctctacatcttgacatcacctccccctggaagccttccagggatgccccttctctacctgtggagatgccaggttctcagtggaccactctctctgcctgacctcctggctctctccccttctcagcatccttctgcctggcgcctggcctccccagttcccggagggcagagggtgcctctgctccccaccggcacccgtgggcagacccagcaggcgggttctggcggggaggaaggaagtacttactgagcagcgtcctctgtgtgagcagtacccccatgctgggtgcccgtgctccggcccgcgcccgctgggggtgacacctctcggctgggagccctgcaggctggcagccactttatgcccgctggggcgattggccaacacctcatgaggtgggtggggatggggaggggggagggcaggccttctgggaacatgaccccaaaaaccaaaatttccacgggcggccaatgggcgcagggcgcggtgtatgcccgctcctcctcctgttttcttcgaattcgttcttcgaggtcagccctacgcccaaggatgatgtaaaaccgcagcctcagccttcctagggtgagtggggaggaaaagggtccatgccatcttcagggaactgggccagggatgggcaggagggacttcgagctgggcctctggaggccccaggccagtcttggcccaggagccattggcctcacaggac

SEQ ID NO: 883 - DNA, 2269 bp, Homo Sapiens
agtctgctggtgtcctgcatgagatctgtctgcttctggagctggccaaggagcacgcggtactctttcgagcagctgcctatagccgccatgctcgccatgcttggaaacaggagtgcaaggaccagacctaaggcagagaagaggggtgtcacctgacttggtgaggaaagccacagatgggagcctcggggagggggttcaagagggccttgaaaggtgcctccttcatcccagactttgtgtagtggagggcgggggctgggcactgtgtggcacggtgtgtgcccaggtgtgcccaccaaggccaccatcatctccccagtaagtcactgcccagggcctgacacagcaagcagtgggagggactgagacagtggctgcgatttaccaagtaggtctttgagcaaaggctgcagtgcctggccggatcccagtcctgcctacagcacggttctaacctcgggagctgactctctgcaaggtgggactggctccctgcaagaccactgggctaaagaccggccactgccctaggacctgccttgtcagctgctctggccatccaggtagatgggcctgagagggcttcagggcaggcagcccgggagcagcttgtgtcctcagctctgtctagaaccaggagaggctgccttttcaaccagaggtgcagcctggaacagatgtggaagaccttccagtccatgtccccactttcctgacaggtaaaccaagtctcaggagaaggtcctactcaggtcacacaaggccagggctctcccctgacctctcttgcctccctcctctctccataagtggctccttctgtcaggcccaccagggatgctgtgagcctgtcagaaggtgttgggggcgggtacagttaccgctcaccaccacccccaacggggcaccggcagccacgtggtcggaaggggcctatggcgcaatggcccggaaggcagtgacaccatcgttcccgtcctaagaaccatccggccctttggggaagactggctgttggggagggccaaggggccaggcacccaggcttagcgaccccacggcaccctcgccgcctccccaggtatctgctgccgggctctggcaggggcctgtgcctgtggcagcgcacgtgggactggggtttctgtgtggctgtgcatctgggtctgtgtgcggcgtgagggagacctgttccgttcaccatggggactctggtctgcatgtgggggttcctgggctggtgagatccagggctgtagatgacgtcatatggctgtgtgcgcatgtggccatgtgggtgtggctgtgcatgctgtgtgattgtgtgggccctggggcccccaggcctggctgactttctattcatcccgggcaagctggaggccccacaacccctccacacctcacaccacttccctgcccagcttctgagcctccctctcctgcccagcctctttgcccatcctattctctcaccccctggttcccagagttgcctctacatcttgacatcacctccccctggaagccttccagggatgccccttctctacctgtggagatgccaggttctcagtggaccactctctctgcctgacctcctggctctctccccttctcagcatccttctgcctggcgcctggcctccccagttcccggagggcagagggtgcctctgctccccaccggcacccgtgggcagacccagcaggcgggttctggcggggaggaaggaagtacttactgagcagcgtcctctgtgtgagcagtacccccatgctgggtgcccgtgctccggcccgcgcccgctgggggtgacacctctcggctgggagccctgcaggctggcagccactttatgcccgctggggcgattggccaacacctcatgaggtgggtggggatggggaggggggagggcaggccttctgggaacatgaccccaaaaaccaaaatttccacgggcggccaatgggcgcagggcgcggtgtatgcccgctcctcctcctgttttcttcgaattcgttcttcgaggtcagccctacgcccaaggatgatgtaaaaccgcagcctcagccttcctagggtgagtggggaggaaaagggtccatgccatcttcagggaactgggccagggatgggcaggagggacttcgagctgggcctctggaggccccaggccagtcttggcccaggagccattggcctcacaggacacggtggttgggggctgaggggagcgagacatcttccttcttgagt

SEQ ID NO: 884 - DNA, 2496 bp, Homo Sapiens
tctgtactttgctccttttaggcagtggacaaagcactttttttgttgttgtttttttgagatagagtctcttatcgcctaggctagagtgcagtggcgtgaccttagctcattgcaacctccgcctcctgggttcaagcaattctcctgcctcagcctcccaagtagctgggatcacagacaaccactaccccacccagctgatttttttttttttttttgagatggagtctctctctgtcacccaggctggagtgcagtggcgcgatctcggcttactgcaagctccgcctgtagctgggactacaggcgcccaccaccacgcccggctaattttgtttttgtatttttagtagagacggggtttcactgtgttagccaggatggtctcaatctcctgacctcgtgatatgcccacctcggcttcccaaagtgccgggattacagacgtgagccaccgtgccaggcccaaagcacttttttatagcccctagtttgctgttgtgtctgtttcctctacggcccgcacagcctgggtttgaattctggctctccatggccttgggcaagttggttaactttttgtgtctcaatttccccacttgtaaagtggggctggggaaaaaccctacctcatagggaacattaagtgagttcatgaaagccctcggtgtgtggcatgcgataaccactacctaagcataaggtatgtttacatgcactggttgtttaccacgacgcaccagcattcattcaagttattttcttccagagtctgcctggaatgtagaaccggccagctctcctcctcaaacagttcctgcaacctctggttatctgtgtgggcagaggcgggagtgtgggtgtgtggccctgccctgggacagggatgacgagagagcatgtgcttgtgtccagagctgtccccttccctgctcaggggccaccaaatatgtccatggtctctgctgcctggtcaacggccaccccgggctgccgtctcctggccagacctggagctcacaagctaattttagaaatgactggtcgactcagctgctgctatcacattggcccagaaggagggtggggggaggacgggtcggggaggggcagtaaggggaagggatgtgtgtcggtgtgtgtggagagggtgctccttcgctcctgctttcccggctcggtggggtcccttcgcggccacccggggagacgtcttagacagtcgtggttcctgtgatctgtgtcctctttgcagaaggtactattgggctgggttttagacgggcaccttgcgagcggatcggcgagttttaattttccggaatgcgctgctgggggctgcggtggcaggcctccggtcttttggtctattttaggcctttctggtgttgagagcttccgaggcctgattcctttgcctgttgcccgtgctgctcactttgaaaacaagagtgtttcggtggaaggatttgagaacaaaatgctggggcaaatggacattcgtaagaatcactctcctcaggccccagctgttcgctaataatttttaaaaatgtgtttagaatcatgagttaatctccactgtgaatctttgcccgcagacgtcagggtttatatttttcctcaactaccagtaatttctgcttcactggtgttcagttatggtcggggaagagccaggcttcccctttcgtgttaacaacgctgttgagtcgaaatgttaattttaatgttcttttttaaactgcaaattaagcatgtatgagtgttgggggaagggcaatggaagttcatggctgaaggtttcaatttcatgccaccttccttgagctctgtctgagggaaggtgtcttatctggcaccccggatagcaggcatttctctgaatgaagaagattcacaggtcccagtggccccatagtggggcagaagggggctatgctttgacatggagctctctcccaggagaggagaagacctcaccagctacaggcctctgggctgctgccttcctgcagcttttccatggaggaggccaggagtggggaggcccggaatggggagcccagtcggctcccagtcggctccaagctgtccagtctggcctcaacccgcaagtgtggggatctgggcttctatcctgtagggcctggaatacgacgaggctgttactttcactttgtggctgtccaaaaagatgctgcctcattcagtgcaccagctcatggaggctgagtgtcccactagggcttctagactccaacaaggataatggtggccttgggtgctgtatccattgctgacctaagttgtattctcctatgcctgggtaccatgtccagtgtgtaccttgggagcagaaaagagaggggtctatatactcttaggctatggatgagttctagaaaataatagtggagaggagagagagaaaagaaggaagaggaggaggagaaggagaagaagagaaggaggaggaggaaaaaagcagga

SEQ ID NO: 885 - DNA, 2285 bp, Homo Sapiens
ttagcacttgacctgtggcatgtgtcaactcattactgctaattgcagggactcagtgacctctccgaacttctgtcacccctgtcacggcccctgccctgtggaggcctgtggaatgggaagtggggaggggaaggagaagggggcggagtcagccggagcctcctggccaggcctggagtcaccctgtcctgccacagctctcatgggtttagagtgggccctggggcagagggtttgcaaggataggggtgggtggctctgccgagggcggtgttctgagtaggtctcattccccagtctgcccagcctggccccaccccagctctgctgccctgttactttgtccccctgtgttcaccctccacttcctgccggggacactccaaggcctgccaaggttggagcaggggtgggactcagccattcaacaaacgcttccttggttatgcagggctgggcattggggtggggggctgacctggaccctccaagacatcagattgtccaactgctcagttttcattggggcaagtgcctcgctgagggtgaagggggctgtgagtgcccatcagggagcctggacaggtcccgcctctcacagctgtcccactctctggagctgccttggtggcagatggcactgtcctagaaaggtgaggctggagctgtctcttccaccaggggtggccaaggacgcttccagggtcttccatgcaggcctccagggtcaccctgggcgtggctgagggcatgcagaccacgctgtgctcccccccaccccccatgcccgtcgcttgcctgacatgctcctcagctgtcttgccccgcagaagctgtgtggtctcccctgtgagtagagtcgggctccatgatcctccggagcagcgccagggactctccccaggcacaattttaaagggggccctaggacctgccaggtccacggaagtggtccttgtaactctctccctggtggcagcctctggtgcattccggcaggggcagcccctcctcatcacagggaccctgtgtgccaggccccagctgcgttgccgctgaattatggatttaatagcagagaagccttgcaggccgcctgtgctggctcgggaaaccggggcccagccggggcctgtcacggtcctggtgccgccctgcttcctgtcggcgccacggagcaagcggagagatttatcttcccggctttaagaggtactaacggaggaggctgagaggcaggagctgaataattgatggccttctctggctcaggatctgctgaaaatgacacggtgcaaggcagaggggctgagagtgctgaccacaaaatgctgagaagccactccagggcggtcacggccagaaggaggacccccactcaggacggggtcacaggcatttggggcgggtgtcagaggctcctgccctgggtcattccagggggccaggatacccagaagctgggcctagaggcccacagggctggctcacccccacttccctctcacacgcctgccatcaccggtgcttcagcccagcaaccccatggctcgttggccccgtccacagcccccactgcctcctgtgtgctgggcgtgggcctctgagctctactctcagcctccttagccccaggagaggagtggaggacaggggtttaacgtggggtgtggtgcggagcggggagggctgtggcgccccctcagcccctcctttcctaacagcctcagcctcccccctggagaatcccctacctgctgggcacatctggcctctccccaccattctgtctccagccgggagatctctacccagtgaaacagtgaaacaggaagggttccctggttaccccgcgcagggcgcagggcatgcagcgggggagtggctcgcttcttcagtgccccaccgctcacacctctaggggagcatacagacgggcaggctgtggggctctgaccccatggcagtgtctgggggtgaatgtttacagctcttgaaaccccagtgggagtgcgttaccgggtggtcttttagtctagcggtctgtaggtggctggtgagagtgagctcaattagacccctgccttataacaaggacagaggaatttctgtatcccagggtttcttgccttggtgtaccaaaaaattggatcacacgtgggcttggagaatgagtgcaaggttttattgagtggaagtagctctcagcagatgggggagccagaggggagatggttttcccctggagtcaggcaacattctcgggatgtccagcagcttgt

SEQ ID NO: 886 - DNA, 2448 bp, Homo Sapiens
tgtgacattcgctgctgaacgaaatgggggcccgcccccaactctcggcaggagctggtgggccttttccctgttgcagcctgggaacgccttggagaaggccatacccacggcaaggtgagtgcagctctgaacgttgcagggtgaagccagtctgcacaggacgtctctactggcctctgcttcatgtcccattgtgtctgggctcgggtcatgtggctcaggacaggggtggcccttcatgaaatcccccaaatttagatggaggagaagccaccgccacgaaggcaagtgccttccaggaggttggtggccgcagcccccagccaggccagtgctgacccacctccgggacactgcatgtggccctcacagttgtgccaggcagtgcttgatggggaggggctgtggggatgtgcacgaccccatccaggtcctgctctcagaggggtctggctgcccttacagactttcaaacatcttatgtatttatttttcgcatagttaaaattcacataacaaaatcaaccctgttgaagattgcattctgctggcatctagtgcagccaccatgctgtacaaccccacagtagccgagttctcgtttccgtcaccccacaaaaagccccgtgcctatgaagcaatccctccctctgcagccattctcccagccccggaagctcctgctctcccagaccttcagaagcaaaggctgcagaggcctttccagactgggcactcggacgtccacctgaggtcctctctctcctgcccccagcagggaagccaaagcaactgctacagggcccagctggcacagactccaggcccagccagcaccagcagttgctcagcatgccccattctccccaggtcccaggtcctgggtccctgacttcagagggtcctggccactgggacggctggcagatgcaagatgggaagcagccctgacccccaccacctcctcctgggacacgcccatgccctgcctctgctatccttcctcagctgcctgagggctggctggtgtgagcccaggctcctgtagggtatgccaggagcaagctgtgacctggccccgggctgtggagcccatgctactctccactgaggatcctgggctgctctgtcccgcgtacgggcatccgggttctgatagcccgccgggccctgggccaccagaggccttgaattgcgtcctggtgacagtcagccccttgcatggggcacgcacagacctgggcctaggctggggcaccgagatccccacatccagcagccgcggtgaggctggcctgcctgcttcccggggccacctctgccgtgccgtctcctccctctcccctgccccctctgttggttgctcctcccccgccctctctgggcaggcacggccgggtgggggtgaggttctggcaaagccccctctgttttccagcccagtggcgctcacatgtgacggtgcgggggcagcctcgtgaaaagcccctttgtgtctcctccctaattaagaaatagcagcaggctccgggggcccaggccccacgtcctctctgaacgctggccgtggtcacaggcggctggatgggcaggcctagcagtggacttcaaggaagaatcccccaggcccaccaggcagccctgctgctttccgggggctcctctcacattgtcaggccacccggtaggtctgggaggctttctccaccctcgggtcccaggagctgagatggtacccgcaggagcccacgtgggatctgggtgtctggacctggggtttcagacctgattctccctcctgttctgtggggcctccctgaggctcagccctcccctctgtgaaatggggagaataaggcgctctgccccccagaatccacattcagagagctagaagtccttccaggcctggacaaagaggtgcccgtcctccccaaaccaaggcagagggacatctgagagggtgtcctgagtccacctccccctgtcccacctgggatgtccgtctgtgtctcctccgcatagctgcccatgccctcaggaaaacgagggctcttgtctcttttccagaaccccagattctgaggcaaaggctcggaaagaacccacagttctcacggcattattgtcactgagcgggtcttaccctccagcctgggaggcggactctctcagagcaggggtgctcagcagggagggctgaccgaggggagccctgagagacccctgacgagaacagggggcctgcagaggaaacaggtcccctaaggtcacggtcacgcccagtgagactccagcccagctttccggagtgctgtgcccagggtcacgctgggacaggcaagcggtgtcacctcttttcctgaagacactttacacccatgtggaaaaggagaacggtacttttcactcacctggaggagggacagaggcaagggctgcccc

SEQ ID NO: 887 - DNA, 2374 bp, Homo Sapiens
gggctttggggacctactgcatgctgggtgctgggatgggggcagacattgcctttcttccctactccctgcctgacccccctttcccctactttgtcccaccaccccagtggtctcaagcctgcaaggagatccacaggcagtaggagacatgggctgtagagtgggatgggggtgagcatgggtgcggtgtgcacacacacaagttgtcagaggcaccacctgttacaagctctcagatgagcactctagcttaagaggcaggataccagggtggcaacagccccagagctgccatttcgagtgtgatattatcctcccatgtcccctctctgggcctcaatttccctatgtgcagagaggaagcagtgacctacacggtcttcccagttttgccattgtgatgatctcactatactggaccctccaatgactcagggatgttacccgtgttttgctaaggctacagcttgtagccagagaaagccctaaacccatgtcccagggtctcccctgagcttcagatccccattgagaaggaaaacataccagtttctgggtttggcccctccccccatcgccatatcttcatcctacttcgcttgtgccttccccagcctcgtgggttgaaagtgtccctcaaatacctaggtagtcctccaggcaggactccaggggtgttccttaggaaactgaggaactctcaccccttgaacaccacgagcttgctcacacagtgacactcagcgatgactttggctctgctctcccctcctccatctcccacgagcttccagcccagaacacctggccagacccaggtcgggggagttagatcccggggtcaagcaaccagaactgggggctcttgcctgaggattccagcttctcttcccaggtgcccgtctgatggggagatggctgatgcccagaacatttcactggacagcccagggagtgtgggggccgtggcagtgcctgtggtctttgccctaatcttcctgctgggcacagtgggcaatgggctggtgctggcagtgctcctgcagcctggcccgagtgcctggcaggagcctggcagcaccacggacctgttcatcctcaacctggcggtggctgacctctgcttcatcctgtgctgcgtgcccttccaggccaccatctacacgctggatgcctggctctttggggccctcgtctgcaaggccgtgcacctgctcatctacctcaccatgtacgccagcagctttacgctggctgctgtctccgtggacaggtgcgctgtgcctggggcctggctgggcagggctgtgggggcgggggttgggggaggagtcctgaacagatcctcactggccttaggaaggagagagtgggggaccagaaagggaggtgggtgggaggaaacaaaagctccctgacccctcgcaagcagcctctgggcacctgcagggcgtgcttgaggggactgtcctgcccttcccctcctccactgtgaacttccagaggacgcctctgagtctcaagtggcagcacagggtctggcacatagtaagtgctctgtaagcgcgaaatgaatcgcaaaagaagctcacgaatgcgttcatcagtttttttgttttgttttgttttgttgttttttttttttggatcttggctcactgcaacctctgcctcctgggttccagcgattctcctgccacagcctcctgagtagctgggattacaggccaccacacctggctaattttttgtatttttagtagaaacggggttttgccatgttggacaggctggtctcgaacccctgacctcaagtgatccgcccgcctcggcctcccaagtgctgggattacaggcgtgagccaccgcgcccagcccagctattttctaactgcccacacctggccaagctgtgcacacatctgcttccacagcttgaaacttggggtcaaatccaggctcactccagctgatgaccctgggcaagtcacttctctctggacctcatctgacgcatccataaaataatcctagaaataacaagtcaccgggatcgggcccttgctaggtgcaagggcctaagcaccttgcgcgttcacacccttaatccccgccacgtcccccacggttcacaggaggcgcactgggccgcagggcccgggcgcgggacgtggcgcgggcccctgcgggagggcacctgcccgccccgctgaccaggcgccctccgcaggtacctggccgtgcggcacccgctgcgctcgcgcgccctgcgcacgccgcgtaacgcccgcgccgcagtggggctggtgtggctgctggcggcgctcttctcggcgccctacctcagctactacggcaccgtgcgctacgg

SEQ ID NO: 888 - DNA, 2500 bp, Homo Sapiens
ccgctgaatcaggaggcccacccagcccggccattccacccaggatcaagcccactgcccaaggcggaggtgggtgttgcccatcctgggctttggggacctactgcatgctgggtgctgggatgggggcagacattgcctttcttccctactccctgcctgacccccctttcccctactttgtcccaccaccccagtggtctcaagcctgcaaggagatccacaggcagtaggagacatgggctgtagagtgggatgggggtgagcatgggtgcggtgtgcacacacacaagttgtcagaggcaccacctgttacaagctctcagatgagcactctagcttaagaggcaggataccagggtggcaacagccccagagctgccatttcgagtgtgatattatcctcccatgtcccctctctgggcctcaatttccctatgtgcagagaggaagcagtgacctacacggtcttcccagttttgccattgtgatgatctcactatactggaccctccaatgactcagggatgttacccgtgttttgctaaggctacagcttgtagccagagaaagccctaaacccatgtcccagggtctcccctgagcttcagatccccattgagaaggaaaacataccagtttctgggtttggcccctccccccatcgccatatcttcatcctacttcgcttgtgccttccccagcctcgtgggttgaaagtgtccctcaaatacctaggtagtcctccaggcaggactccaggggtgttccttaggaaactgaggaactctcaccccttgaacaccacgagcttgctcacacagtgacactcagcgatgactttggctctgctctcccctcctccatctcccacgagcttccagcccagaacacctggccagacccaggtcgggggagttagatcccggggtcaagcaaccagaactgggggctcttgcctgaggattccagcttctcttcccaggtgcccgtctgatggggagatggctgatgcccagaacatttcactggacagcccagggagtgtgggggccgtggcagtgcctgtggtctttgccctaatcttcctgctgggcacagtgggcaatgggctggtgctggcagtgctcctgcagcctggcccgagtgcctggcaggagcctggcagcaccacggacctgttcatcctcaacctggcggtggctgacctctgcttcatcctgtgctgcgtgcccttccaggccaccatctacacgctggatgcctggctctttggggccctcgtctgcaaggccgtgcacctgctcatctacctcaccatgtacgccagcagctttacgctggctgctgtctccgtggacaggtgcgctgtgcctggggcctggctgggcagggctgtgggggcgggggttgggggaggagtcctgaacagatcctcactggccttaggaaggagagagtgggggaccagaaagggaggtgggtgggaggaaacaaaagctccctgacccctcgcaagcagcctctgggcacctgcagggcgtgcttgaggggactgtcctgcccttcccctcctccactgtgaacttccagaggacgcctctgagtctcaagtggcagcacagggtctggcacatagtaagtgctctgtaagcgcgaaatgaatcgcaaaagaagctcacgaatgcgttcatcagtttttttgttttgttttgttttgttgttttttttttttggatcttggctcactgcaacctctgcctcctgggttccagcgattctcctgccacagcctcctgagtagctgggattacaggccaccacacctggctaattttttgtatttttagtagaaacggggttttgccatgttggacaggctggtctcgaacccctgacctcaagtgatccgcccgcctcggcctcccaagtgctgggattacaggcgtgagccaccgcgcccagcccagctattttctaactgcccacacctggccaagctgtgcacacatctgcttccacagcttgaaacttggggtcaaatccaggctcactccagctgatgaccctgggcaagtcacttctctctggacctcatctgacgcatccataaaataatcctagaaataacaagtcaccgggatcgggcccttgctaggtgcaagggcctaagcaccttgcgcgttcacacccttaatccccgccacgtcccccacggttcacaggaggcgcactgggccgcagggcccgggcgcgggacgtggcgcgggcccctgcgggagggcacctgcccgccccgctgaccaggcgccctccgcaggtacctggccgtgcggcacccgctgcgctcgcgcgccctgcgcacgccgcgtaacgcccgcgccgcagtggggctggtgtggctgctggcggcgctcttctcggcgccctacctcagctactacggcaccgtgcgctacggcgcgctggagctctgcgtgcccgcctgggaggacgcgcg

SEQ ID NO: 889 - DNA, 2419 bp, Homo Sapiens
agcgctcgggggtagttcagcttttagccctccctacagccccatgaggaggctctagtatgcctcctttttgccaaatgaggagactaagaaacgggtcaacctctcacccaggcgagaagggcatagagctgggatttgaacctggtcaggtgcagttcggggcccctgctgccatcaggggtatatggtggctggggcagggtggtaaagcaggagctcgggagcccatggttcatccaacttgacctctgaactcaatggggcctatgtcccctcgtcctctctggccacctccacctgccacccccctgctcccatacacagtgcttgtctcttgctatttaacttcaggggcttctccagctgggtgcgggaccctggctgtgggggaaggaaggggacccttggggatagctcagctcctcactccacctccctcccccgaggtgctacaaacacagttaagagtgggaggcttcggcccccaggagaggagagagcatgagctccaggcagccccaaagatagggtcccatccccaatgtccggagatgcttctgacctgtccagtcatgcagccaagggagggacaaacccagactcaaacccagggctctgcctccagcctggggctcccagaggcctcgcagcaacttcacttcatagatggctctccaaggggacccttctgtccccacttactccacaagcctcctgatgagcacgcaacacagggctgcctcccccggtatatgggccccactccacagaggtcaggagggggctcccgcctgtcccaccccatatcccgtaccctctccgggcacccaggctatccacccatcccttctccacctctccgggttgggggcccagcacacagagcccagggaagcccctcatcccacagcagtccctagcctcccctgaatgggttgggaaggagagctgacctgggactggggaccgctttttcctccagccaggagccatgagagctgggcccaacccctccctaggggaattctaagacaaagttgggggatgggagttcaggcagaaactgctgggggaactgagtcagagctgaaagtcttctctgtgactttcactcccagccctctggctggtccacaggggccgggagggaggcagggggacatcacctggctgagacatggggcggtggcagcgcgcgctctccagtcctccccggtgctgggaccgtggccatctctccagggccctgctgagctctggctgctggggccgcaaagactaaaagcccagagccagcccacttcctgtgcagaggatagaggggcaaggcctggggtggagaggcggggagacgaggcttatgagaaagcctgaaactcctcaagcacccagggccagataaagatctgcctcctacgctgggggcggcacacacacacacacacacacacacacacacacacacacacacagacacacattgtcaaataggggcctagctgcacacaggagccaagggaacgcaggccctccctctctcccctcctacatcacccccacgccaactcacacaggctacccaacacctctgacgcctccatccggtcacacacatacccactaatacgtaggcttcacacaagcaggtccctctaggtgaccccagcgtctcaccctcctcccagcctgcaacacaccatctttccgagactcccatttcacccagccttccaggaagccccttactccgtttagcattcagagatgactgttttttttagtttttaattttgtgggcatgtggtaggtgtctatattcatgaggcacatgagctattttgatacaggcatacaatgtataataatcacatcagggtaaatggggtatccatcacctcaagtatttatcctttctttgtgttaaaatccaagtatactcttttagttatttttaaatgtacaataaattattgttgactaaagtcaccctgttatgctatcaaatactagatcttattcattcgatctaattctgttttcgtacccaacaacaatccccacccctccaacccccactgcccttcccatctccatcactgcccttcccatttccatgaattcaattgttttaatttttagctcccacaaataagtgagaacatgtgagctttgtctttttgtgcctggcctgtttcacttaacataatgacctccagtttcaaacatgtggttgcaaagacaggatctcattctttttcatggctgaatagtactccattgcatatatgtaccacattttctttattcattcatctgttgatgggcacttaggttgcttccaaatcctgggtattgtgaacagtgctgcaacaaatgtgggaatgcagatgtctcttccatatactgatttcctttc

SEQ ID NO: 890 - DNA, 2483 bp, Homo Sapiens
gtggacggaactgggtggcaggctgtggttttaggacatgtggccagattggctgagggtaggagggtgcagtattgactgcaattgtgaaagcgtagaattttctcgtggaaagtggcttggaacatggtccaatcgaacatcatcatcctacaactgaggaatgtgaagtctgagtttctaagctcccaaacccgtctgaaatgagaacacagacacacacacagacatgcacacacacacacacacagaccacagacacacacatagacatgcacacacacacacacagaccacagacacacacacagacatgcacacacacacacagaccacagacacacacagagacacacaagatgcacacagacatgcacacatgcacacacacagacacacagatgcaatatagacagacacgcacagacacatacagacacacacacagacatgcaaagacacacacagatacacacagacatgtaaaaacacaaagacacacaggctcacacagacacagacacatacagatgcacacagacacagacatgcaaaaacgcacaaacacacacagacacagacagacccatgcacacactgacacgcagacacacacactgacacacagtctcagggaggctgagccgggtgctgggttagctcacagacttgcttccaccatggcttctgacacatgggggtggccatgaggatgggggaggccgtggggacagaagcacagccggcctgacccaggcgggccagagctcaccgggctctggtccttcgttcccaggtgggcggctccagcccctccatcccctcgggtctgggcaggctctgtcccaccgggcactgccttggcccccctggcacccaggcaacccctaggcaggcctggctgggcactggtgtggggcctggctcataccggggggtgggaagaagggtcctgccccgtctccctgcatgtgggctctgtcttctgcagaacaacctcaggcctgcaatggtgttggcatctgtcagagcaaagcagaacctccctcctcccagactccagtggctgagctgggccgtcagggcagggatggtgagggttcaaatgccagggcagagcaggccacggcatcccgtccacccacaaatgtctccgcagaccctggtgatggctgtactgggggtgcagcccccagaaccactcgaagctcacgtagactgctcccccaagcacgggggtgggggaggctggccccctgagcagggcccggcctctgcaccagtgcagccccacctccctcccagcccaggtccaggctgctgggggtgcagagagggcgagctgcaagtggaggtgagaagggagctcgtgggacgcaggctcagagagaagcctccgaggaacctctctgttcccttcacgagcggagccttggggcagctccgtgtttctgccacagttatctcaggagatgatggctgtgggctgtgtttgtgggtgtgtgcatttgtgcacctgtgtgtgtgtgaagagggagagagacagaggggagtgagacagagacctggagaggggatgggagagagagattggaaggggaaggaggaggagagaggcaggaaagcagagagggacagggagagtgcggagggacaggaccattagggaaacagggagagggagggagaagagagggagagaggaggtgtgagaaacagcaggagagagagggagggcgcgggagagagagggattccaagaagggggaacctccctacagctttctcccactgtctctcagagacatccctggggccgcctctgcagagggggttgctgcgagctgctggagggagtgagggtgatgcgtctcccggtgccccaaaatgaggcctccgcctgcactccagcaacccagacccagggaaaacaccaccaggacccctcaacagcaagggaggctctgtcagacaggcccaagcctccaggaagctgggccctgcccctgagctgggggtcttcaggcccctgccagagccacttcctcttaagacacctacaagccggtccccagtaaattctaaacgccacggttgttcccatggcgttgctctctcacttctctacctctaaactgtaggattcctaattctattcaaaacagcggatgtttctctgttttctggggcaccaggatgtgttgtgagtgctgagggcagacgtgggatccggaaggcccagctgggaacccacgctctgcaatgagctgccctgagtccttggacgaggtggaaaattactccagtctcagtttcctgtaaagacagatcagcagttacacccctccacgggttctttgtgatgtcactgaggcggtgaaaggagcacctgcctctaatggcacccaccattaagtcggatctcagcaaccatctgcgtggcaggagctatcacactggagcctcgcagtagccaaggagag

SEQ ID NO: 891 - DNA, 2439 bp, Homo Sapiens
tagctgggattgcaggcacgcaccatcatgcccagctaatttttgtatttctagtagagacggggtttcaccatgttggccaggctggtctcaaactcctgaccttgtgatccacccgcctcagactcccaaagcgctaggattacaagcgtgagccactgtgcccagcctcgagcaaagttttaaaagtggaatgggtttcccgttcccaacgtaggctccccacatggcagctttattaaacggagtagattttatctttatgtatatgaaataatagcatcaagccactctcccccttgctcacaatattttagctaagttggccccttttccatttctaagacactgcaaactctttcccacattggagtcctctatgctgttccttcggctgagatgcttgtccttgccctcttcaccggccaggtcccgctcctgcaagtctcagtgtaaatgctcctgttaaagttgtccatcttgacccctccccaatttaaatcaggtcctcttgataaccttttatcattcctgctcatttgttttctttctagaacttaccatactttatttattatttttcgagatggagttttgctctttttgcccaggtggagagcaatgacctgccctcacctcaccaaaacctctgcctcccgggttcgggattatcctgccgcaggctcccaagtagctgagattacaggagcctgccaccacgcctggctaatttttttgtatttttagtagagacggggtttcaccatgttggccaggctggtctcgaactcctgacctcaggtgatccgactgcctcagcctcccaaaatgctgagattacaggcgcgagccaccgcgccaggcctatgctttgtaatcacataacgtgtcttgttatttttgtaacctgtgttgccctcctttacgaaggcacaggcacatctgtttagttcctggccacgtgggcacctggcgctgagtacttacttgtccgtgctgattgatgtcctcccccagcccccatcttcttttcagaagtttcctctttctgctccgagaggggctgagccagccgtggctcccttccatcccgattccagtggagacaagccggggaagtttctgggagctgcgcgggtgagcagagctgagacccggcatggctgtactggccgggtcactgcagggtgactggcggctcggcttgataacacgtttacctgagtcatctttggcaaaggttaccaggctccaggatggaacacgcatgggggaaatgcctcttccgtgacacgcccacctcgctctaaagtgagacgagggagggagggcgcggctgccaggtaatgaagtctagagtttactagagttgagggattgatgtgttgcgtatgggctgggtctcatttccaggaagctcaggacaaaaccctgttcatgttagagggctttggccaaattctgtcctgtgtgtttgggtgaagtcctgtcttcacaagtggttttagttccttcagagtaagaattatttgtattttatttatttatattatttatttatttattcatttgagatggagtctcactctgtctaccaggctggagtacagtggtgcaatctcggctcactgcgaactccacctcccgggttcaactgattctcctagctcagcctcccaagtagctgagatcacaggcatgtgccaccacatccagctaatttttgtatttttagtagagacagggttttgccgtgttggccaggctggtctcgaacacctgacctcaggtgatctgcccgccttggcctaccaaagtgctgggattacaggcgtgagccaccgcgcccggcctgttttttaaaatttctatttgacagatgaggaaatggaggcccaggcctcgctgcactaagaagagggctctggatcctgacccaggtctgggtgaagctcaggcctcttgacttagggtggaggtataaacagggtaaacaggtaaaaacaagcgaaacaaacaaaaaaaaagcataatcactaatgccattgaaaagaattacttaagactttgaggccaggtgcggtggctcacgcctgtaatctcagcactttgggaggccgaggcaggcggatcatgaggtcaggagatcgagaccatcctggctaacacattgaaaccctgtctctactaaaaacacacaaaaaattagctggtgtggtggcacacgcctgtagtcccagctacttgggaggctgaagcaggaggatcacttgaacccaggaggtggaggttacagtgagccgagattgtgccactgcactccagcctgggcgagagagcaagagtccatctcaaaaaaaagaaaaaaaaagattttgaaatgtaaagctgtaaaatcctgtacccttctctacagccccaggcttgctgacaggcaga

SEQ ID NO: 892 - DNA, 2450 bp, Homo Sapiens
gatcttggttcactgcaacctccacctcccaggttcaagcgattctcctgcttcagccccaccgggtagctgggattgcaggcacgcaccatcatgcccagctaatttttgtatttctagtagagacggggtttcaccatgttggccaggctggtctcaaactcctgaccttgtgatccacccgcctcagactcccaaagcgctaggattacaagcgtgagccactgtgcccagcctcgagcaaagttttaaaagtggaatgggtttcccgttcccaacgtaggctccccacatggcagctttattaaacggagtagattttatctttatgtatatgaaataatagcatcaagccactctcccccttgctcacaatattttagctaagttggccccttttccatttctaagacactgcaaactctttcccacattggagtcctctatgctgttccttcggctgagatgcttgtccttgccctcttcaccggccaggtcccgctcctgcaagtctcagtgtaaatgctcctgttaaagttgtccatcttgacccctccccaatttaaatcaggtcctcttgataaccttttatcattcctgctcatttgttttctttctagaacttaccatactttatttattatttttcgagatggagttttgctctttttgcccaggtggagagcaatgacctgccctcacctcaccaaaacctctgcctcccgggttcgggattatcctgccgcaggctcccaagtagctgagattacaggagcctgccaccacgcctggctaatttttttgtatttttagtagagacggggtttcaccatgttggccaggctggtctcgaactcctgacctcaggtgatccgactgcctcagcctcccaaaatgctgagattacaggcgcgagccaccgcgccaggcctatgctttgtaatcacataacgtgtcttgttatttttgtaacctgtgttgccctcctttacgaaggcacaggcacatctgtttagttcctggccacgtgggcacctggcgctgagtacttacttgtccgtgctgattgatgtcctcccccagcccccatcttcttttcagaagtttcctctttctgctccgagaggggctgagccagccgtggctcccttccatcccgattccagtggagacaagccggggaagtttctgggagctgcgcgggtgagcagagctgagacccggcatggctgtactggccgggtcactgcagggtgactggcggctcggcttgataacacgtttacctgagtcatctttggcaaaggttaccaggctccaggatggaacacgcatgggggaaatgcctcttccgtgacacgcccacctcgctctaaagtgagacgagggagggagggcgcggctgccaggtaatgaagtctagagtttactagagttgagggattgatgtgttgcgtatgggctgggtctcatttccaggaagctcaggacaaaaccctgttcatgttagagggctttggccaaattctgtcctgtgtgtttgggtgaagtcctgtcttcacaagtggttttagttccttcagagtaagaattatttgtattttatttatttatattatttatttatttattcatttgagatggagtctcactctgtctaccaggctggagtacagtggtgcaatctcggctcactgcgaactccacctcccgggttcaactgattctcctagctcagcctcccaagtagctgagatcacaggcatgtgccaccacatccagctaatttttgtatttttagtagagacagggttttgccgtgttggccaggctggtctcgaacacctgacctcaggtgatctgcccgccttggcctaccaaagtgctgggattacaggcgtgagccaccgcgcccggcctgttttttaaaatttctatttgacagatgaggaaatggaggcccaggcctcgctgcactaagaagagggctctggatcctgacccaggtctgggtgaagctcaggcctcttgacttagggtggaggtataaacagggtaaacaggtaaaaacaagcgaaacaaacaaaaaaaaagcataatcactaatgccattgaaaagaattacttaagactttgaggccaggtgcggtggctcacgcctgtaatctcagcactttgggaggccgaggcaggcggatcatgaggtcaggagatcgagaccatcctggctaacacattgaaaccctgtctctactaaaaacacacaaaaaattagctggtgtggtggcacacgcctgtagtcccagctacttgggaggctgaagcaggaggatcacttgaacccaggaggtggaggttacagtgagccgagattgtgccactgcactccagcctgggcgagagagcaagagtccatctcaaaaaaaagaaaaaaaaagattttgaaatgt

SEQ ID NO: 893 - DNA, 2481 bp, Homo Sapiens
ggcacaaagacatcaggctgaacaggtccttcatctggggggcctgtggtccccgaaatgcatcttagacactttgcacaggtgtgcgtctctatcctggctgctgtgtgagctgaggacaaaatcctggctgctgtgggagctgagcctgtgggcaggctgagccaggggtgggagtgagagggaggggtgagaggggcctgagcacctactcagcgcatgcttcacagaactagcctgctccaggaagttccggtgcccagtgccacaatgcacactccagccctgtgcctgcacaccagaccccgggcccgctccacatgggtgccttgagctgattccctctgctggagttgctgaagggttctgcaggcctcaatctacagtcagcccccaaccctgtcatcagcaggggccccagcttacagcaacgcagctgttttcactgcaggctaactctgccacagcgttgccaacctgaaacatccagcccagagtgagtttttggggaggcgggaggctgtccaagcatcttacctgctgtgtgggcaagaagcggcctgcatctcatcagagtttggggatccaggacccagatctgctgctccgcagttgtgtgaccttgggaaggtcaggtcccaccctgggtgtgctcttctttcctgaagattcaatccggcctgtgtgctaggagtggagggcctgctggagtctgaggaagatggcagctgggtcggtagcagggtgagcagggtctgagtggggccaggcttcccacactggacaatgatgtccactgtaaagcccatgtcctggatttttgacaaacatcttagcaatcgacctgacactccactatgtccaagttgatttgtttccatgctggacatgtgtctaccaggacgtgctcttggctgccactggcagggcctggaatgaggacacttgttgtgcaccttgctttggagccccagacaggcaaaaaaatatccatgtggcttcacccaggtcatctctttgcttgtatgaacctcaggccacccttagaaagggtctcatagccccggtgtctcactctctgacctttgccaagtcgtcttcagcagcagctggaactctttgaagtggctgccacagatgttggcaaagcccggcctgggatgcctccaccctgcaccaggcacggggctgcctctgctgcatattcacctggaaatcatccacatgccaagcaccgcagaggcaaggggagtctgccattggactgcgttcaacacggctgcagggatacagacaagcacattccctggcagaggcacgggcccggctggctggagctgcagcagctgtgtgtggtcacagagcttccaaatgagggagatggatggcctcgcttcacagtgtgcccagagcatgtccacggtgcctgggaagaccagggactcaccatgcccggctctggtttccctcacagtgaagcctccttgctggtaggatccatggccaagcatgggggcaggggctgggggagctctgtcagtgacttctcgcaggcagcaaggcctctgggagctggccaggaaaacagaaactccatcctggagcaggtgcgcaaaccaacagctcagaaattaacaaggttcccaccaaggaccatgagccacctgtgctgtcctgtttgttctggtacttgcgcaggacacggggtggggggcgggggaagcacatgtcaacagggagctggtggccgctctgagagccagctcctttctcataacttgcttgaaatccttctctttgcagaagatggaacccagcacatctcgagagcccactgcacaggtcaggtgcatttatgtttactgtttctatcagcaaaagagcaaaaccaaaatcaaacaaacgaagactctggcaagattgcttgatcctgccttgaggtgagcacacagcagcatcgggaaagtgcgtaactcataaagatggtgcagcctgcaggtcaggaggggctggggtctgtcgagggcagctggggctttgcagcctgatccacaacactgcactcagagcggggaggtgctgtctccaggcccacctgtgactcctgaggtacaggcagagggtcgggcgtgtatgacactgcataggagtcctctccgcagtgtggaacccacccacgtcgcctgctccctcagtccccaaatgcatctggggtctgagatcagaaacagcagaagctctggtggttagtggaatagttacctaagtggaccctcatctcctgggcattctttgagcacctccctgctaggcactgtttcaggggctggtgacgggaagcccaccttgcccatgaggctctttcggcacagaggtggacactgagggaccgctggctcacacgcatgttgaaatatgtgctcagctgatgtcttcccaagtgagccctcctgcaggacaggaccacacagtgtcctcaaa

SEQ ID NO: 894 - DNA, 2223 bp, Homo Sapiens
gctttcacatcggccgtgatctcttccatgttcccttcattcattcattcattcattcatttgttcattcattccacacttgcacaccctctatgtccccagcattttaccacacaccagaacacaaaaggtaaccttgccctcatggggcctggagagtaatggggaaacagatgaataactctgcatgtgtcctgaagttatagggaattcacatttaatttatacctgtttctttacagcaaagctttttgcagaaaggatttgaaccaacctgccagaaaaggcacaaggaataacatgatacattttaaccaaagaagataattaaaatcaaaggagaaagtgtttattgagcacctactatgtcccaagcatctccgacacatcctctcactccatggtttccatatccccgagttagtgttattcccctttcagagataagcaaagcgaggctgactagccctagctgagagtcaaacagctgagtcaggccccaaagttcacatgacatcatagaatagctgtcgatgagctttggatttgacgatgagtttcccagcagcctgggggagaaggaaagtggaacatattacccgattgttcactagacaagaaaaagccagatatttctttgaagggaagcaaagcccttcctagcagtgaattcatttgtctcttctcaagtgggagttggaagagagcttgtggggtggaacacagggggccctgctaggactgtccaagttgggcgctcctatggcatatatgtgaggaggctgccacgtgaatgcccatggtcccctggaaaatgttcgtcctcagtgaacatcgccctcggtgtctgtgcatgtgtacgtgtgtatgtgcatatgtgtctgtgtgtttctttctgtctcactgtctttctcttttttatctggccctcccctcacttcatctgtttgtttgtttgtttgtttgtttgtttccacctctgtccctccctggcaaaagtccctgctgctcaaaactctgccagtttttaggaagtgctgttttgtcaaaagcctgcacacgagacccccgtgggccaggactgacttcctccccacacagggctgggcggggcaagcaggaaggagcctgttacagtcaaggtgacgcatccttgccgggccagcccgaacagcagctgggtcggcaagcgacaggagcacgggtcatcttttccccagaggcgtcggaatggacctgtgccacccaggtaagcaactgccgtcaacctctctgggcctcagggtgctctcttttagaatgggacagcagcccctgcctcacagggtcctagataaaggaatacagcgcaggtgggaaatgcagctgcaagaagcaaacatttgtgggctcagcctgtgtgtccagttgcgttctaggggctggacacacagcagtagcaaagcagacgctgtttcccccttcataggcttgtgctctagatgaggagaccggcagtgactctaatgtgattccatatgtcagttgatggcaggtaggatgaagaacagtaaagcagggtaaggaagacaggaatgcatggtggaaaaggccccaagaggagatgctgtctgatgagggacctgaggaagatgtcagctaaggggctttctaaggaacaaacattccagccagaaggaacagccagtccaaaggctcagaggtggactcagaaaagtgacttgcgattaagatgatgatgggatgttggtgatggcgatgcttgtctgggtgatacaagggccttgaggcccctttttggcccccgggggttggggtggtctttggggaggctgaggacgctgcctagagccaggggagggccaggagtgagcaacagaggctctggttgaaaccctccccagctactaagacaatgtgtctggggagaaagaggagaaaggaggctgcaaagatggtgaggaaaagaacatcagggtcgtgttttgggaggcaaattgaaggcccggtagaggggccaagtttctgcaccctggatgtcagcatgctccagagctgcaacagttctggtgaacacggctgctggaattccagaacctaagggctcgtgggagctgtctgctccccaggtccagatgacctcagccttgtccaggagcacccttgcttcaaacgcacctaatgtggagcagcctggccccgcccactgggcatcccccttcc

SEQ ID NO: 895 - DNA, 2495 bp, Homo Sapiens
cccccgatggacactggagtcattattctcaacataatggaggatcgctcccgagtgctggagactcagaggcatagggagatgcctcgtttttcgggggatgtctccccttcttatcaccatcatcctagcccccatggggaccctctcctcaaggtcccctatggcatcccattgctaagtccaagttctcctacaggatctggtctcacccctccctgctctccccgcactccttcctctgcacccttctcctggattttgggttcctcaggacccagtcctggccccctctcttctggccatttcctataagatcctgactactcccgtggcctcctgggccacctgtgtcactgccagtcacccctaagtccccgatcaaagctcaggcctctctccttgtggcccctgccctctagccagctctcttgtgtaccccacagaacctcatgctcaagtgtttccaactgaactcttcatcctccccctagctggcttcctgccctcgatccccccatgtcacccagcgagccccactgggtgtcctggaggagcccaggccggtggctcctctccctctacctgtcctcagtggcctgggttcagctgctcaccctctatctctccctgtccactccctccctcctcccagtcatctcctgggctcctattaccagtgtcattgttggaaacaggggtctctcatgtctgtcttgctgcatggaccgaagtccgtcggccgcctcgggggtcctctccattgggacattaccctacttcctctccaccagggcacacctggtacacacctccactggggacctaccacacctcttcttcctcctcttcaccagggcacacgtggctccctcccactgcagggcctttgtctgggttgatccagagacgcaaggacacagtgcccagggatctttccttgggggcctgtccacctccctcctgtaaaatgggaagctgcgtgtcggtgactgcctcgcccacaggctctttcttctctgggactggccagactccctccagatggccccacccctgccatggctgattggtccaggctggacacgtgacccaagtgaaacccaatgggattctctcctgtgattctgaacccggggaggagacctggagcctggaggtggcagcgacttgggagccgcgtgggcctgtctgttccacacactgccttcttgccccttccttcaacctatggccccctcagaggacaacctttttccttaaactcctcggacgaggttcctgtggcagccgagagagtcacgcagcgggggtgccttccccgcctgtgggggagccccaggcggcccgcacagtctcgtggtggtcgggcctggccacgtgtgctcctcggtccccatgtggccccagcagggcgcccgcctccctcccagggcttcctcccccaggagggatagcaggaaggcaggcaaggacaggacctgagtccacacctcgtccgcggtcacctgcctgaccaggaggaaggggaggggacaggagtgattccacggaggtcacctgggagctggggctgggcgaccccagggctggatgacctcagggctgggtgacctcagggctgggtgatctcagggctgggtgacttcaaggctgggtgacctcagggctggatgacctcagggctgggtgaccccagggctgactattggcggagcacctggggtgggtgccatgggcacctgagagggaactttgacctgagcggaggtcagaaccctcctctgaggaagtgccccaccccactgagctcccagaggctggtggcaggttgaacaggggactatgccagcagagggactgccttccagagactttggatcatcaccacgatgggttgattttacaaatttagccactgtcaccggaggcctggctgaacttcagagtttcttctccagcgtcggtttcttggtttgtaatggggagggctggatccccctgcactgatactcccatggcatggctgcgggaggggcgcccatcctgctggcctggtggctgtggagcggccggaggtggcgtgtgccaaagctgctgctggtgctccctctggctgccttggggtgatgacaggagctgacggcttggcagcagctcccagggaggcagcagccgggctggcggcgggtggtggcggtggtgggagggggcttctggagagaacaaagcactgaggatgctgggctccaggggcgacagaggagtgggggatgggggcagggttctggagtgtgtggcccacagggaggccatggcacgggtgtgtgtgcgggtgtaggatttggaacccacctcgtggttgtgtgagcccaggcaggtcacttagcctctctgggcctcagtttccacagttgtgcaattggaacaataccatcattacattattgtatccccagtgctgagagtagtgagtggcacagagtaggcattca

SEQ ID NO: 896 - DNA, 2390 bp, Homo Sapiens
acagactagacctactgacagtcaagcagaggtaggaagtgccttcaggagaggaaagtgaggcatctgccttcatgtaggagactgcacaggcccatgcagatgctccatgttggttaacagggagctctgcacacacaactctgaacactttctgcctaaagtgggtgggatcactcctctctaagccatgagaaacagatcccacagccatcccagcccaatctgaccctcatcacccattcactcttctaattcatttattcattcaacaaacactcccgtaggcctgttggggaccatgtcctgggctgggtcctggctgtagcaattctcaggcctgtttgtaactctcttgtcagtctgttaccccactgctgggcccttctccacccaagttcccttcccccagatagctcgaagggcttgtgctcatcctaggtcactaagttttctcactgaaacacaggagaccttctcagttcaccaggtgaccttgagcaagttcccctcccaaaccacacccagtgaatactggagagaagaaagctgacagaagccgggctgggttaggcctggctgtggggacatctgagggcagctaggtgtctgcagaagaggaggggctggtgctgaggcctgagatgggaaaagactgcagtggctggagcctgagtgtctggttctgggttgggaagaatagagcctgggactggcagtaggagtggagagggtggcaccaagacctgaaaatggggcaagggtgggggccggggcaagctctgagctggcagggagccaggaaggtcacaggatcagggcaagaactcagttgtctctgaggccctggagagggtgcagacctctgaaccacctgtcctaccttaaggcaggtgtgttaatgcccctccctggagcaaagggctgaccaggcctacggcagaaaggtgaaggtagacagacagcctccttcctgctgccagttgggacctgggccaggcagatgggtacactctcccctccccactccatggctgttccagcctcagcagccagtttgaaggattcccagggggtagccaccttgcttcggcctcttccaggctgggaagtgggagcctgtgcctttaaattctcagcaggttgaaatggctgatgacatcactggttcccgggagcggtagagctggagccggagccaagggagtccaggctgccgggggctgcagacatggagggccagagcagcaggggcagcaggaggccagggacccgggctggcctgggttccctgcccatgccccagggtgttgcccaaactggggcaccctccaaggtaagacccctgagacccagtgccccccgctttcctgatccctggttccacacaccccccccacatacactgcaggctccctggtgctcctgactgaggggctggtactttcctctgctcagcgagcaggggctaggtgaagagagcaccctgggggctgaggggcagtgacaggatgcccggagacagatgaagttagccatctccaggagcccttgggagagtcctggactgggtatcagaggacccagctgtgctccacctttgctgtgtgaccttggccaagttgcttttcctctctgagccaatgcaaaatgagggggcttgtcgctgaagactaaaactgtgacatctgggatggctaagttgttagtactggaggcggtgtgatagttggggggaagccggcacacagtgtgacacttggagccaaggagggtgcctaaaatgccacctcaaagaactgagtttgagaagggaggtggagatggagttttaggtactctgaactgagaaggatacgggacagaaacagaagtgcgtctccagaggcagggcctccctgcgccctgttaccctacctagggccatcctggggcaagtatagacattcttctgccctccttggtgaaggacactttatcctgtcttctggagacaggggacatcagagagaatagatggggaaggaggataggtctctacaggactccgtgactccccacccctcccacctgccggacataaatgggatacctgcttgcctgtcctttcaggtaggggagaaagtggaggatgtaagagggcacaacctgggcacagagagatgtgacaccaggatcaacttagaatcctggacttgctctgaatgctagattcacacttggtgaggatggactattcaacggggctagatggaattctagcaaatgttgggctcataaatgcagacaatgggagatgaagattccccagaatataatgtggccaggaaccctagaccccatcccttcattttacagacagagaaactgaggcgctgggcagagaggta

SEQ ID NO: 897 - DNA, 2497 bp, Homo Sapiens
aatctccacggccaagtgctgagacaagagccctggggctcaaggcccctcaggcagggtgcggtgagggcccgtcggaggaagggcttcctcctgcccatcctggctgggcgctgtgcgggactgcaggagcctgagttggggtaaaaggaatttcaggggagacagtcagatccaaggtcaactgcccagctcagcccaggactccagcctcttgcaacaagatgggccaggcccctcgctggagtctgctcagcaaggggcctgtgggtccctgggcaagcactagccgggtcctaccctcagcctggggcctccttccagcctcctccctggcgcagcccagctagagtttgttcatttcctgggggctcccgcctccccctcccctggccctgcactgcgtgagggcgcatctcctagaaccagccccccagagtctgctgagattaggagacctggaggttaccccagggacaccctgcccctgtgccccagacaggtgtcccccccactatgggtgatgaatgtcgaggagctgccattataattagtgtggaatgtgccgcctctcccagggaggaaaatcccatcttggaaatacacctcagatgcaagttgaatttcacccacggggccataaaaccattttttcaatcacctggtgctgttgggggctggcaccattaatcctggagatgttatttagagccaagacatcacttggggaaaaaaatcaggtccgcactccatgaggaacccctctctatgccctgcagaggcctcaggagatggacgagactgctcgggcaccaggcagggaggggcagggacgcagctaccctcacagccaccctcacggcccaggagccatgcctcacttcatcagctcctgccagaccctccctaccagagatggccccatcggcataagggaagactgaggccagagaggaatggaggaattggagggctggaacagctggtgggctggacggctcagctccacttgccctgcctgcccccagcagacactgccctcctcttcattcccaaagcccccacccggcccagatcctctcctgagatcagtatcatccaacagccttttataaaaaattgtttccttgattaccgagggtaacaatgaaaacacgtaattgaatctccaagaaattaccatttttataacttgcgcccagttcccgagataaattaaacgcctcccctgtatggtgagccgctcactgcgcatcagagaggggctgatactgccctttatcatcgatgcgggacttactaagaagaatgcctcacactgcctcccgggaggctcctggcacctccagctcatggccctgagcgggcagagttggccagctggaggcgccgggcgggtggtcaggtgggccccctcctgatcactcctggccctgttactggctagctgcgtggtggtgtgggtggtaagtgggagggccagtcagaatcttagcccagactcccaagaaaatcaggcctgtgcgcagccgggcagcgacagctttctgagaagtgcaaccctggagccagagtggggaaaaggcagggaagccgggtaggaggaaggaagtggagatggcagagagggaggatttacccacctgccccccacttgctggccaaagctgaccccacccaattgcgccagtgcccagaggacccaagatatcacaaggtcaggcagcagagcggctctgggggaggcgaggccccgctgaggcaaggcaccgcctggcacagggtccgggagcaggtgggggcagcagggtggccacacccacccaaggagctgctgggttggtcagcagaggggcggggaggtggggccagctaccgggatgggctgtccatctgtgagcagctggtagtgggtttcctgctggcagttgctagtggctggattctcatggctctctggctggctggaggccgtttgggttgtggggaagcagaagcctccagcctgtggactgagtttcctgaaaatgtctgcaggctgcactcagcagagccaacttcaagcaaaggacccgagtgacactattcacgtgcaaaccaccgcccctcccagcgtggctgtttgcctgagggcccagagccaccccctggggaacactgcctagtcagaaacctggcagtggtggctgcacagcgaggaggggtgctgtcaggggacagaggacctgctccctgggaacgggagaactgaggcccaaagagtggcctcccacttgatctaggcaaactcagggtcaagggcaacaggctgaggtcaccaggagctcaaaggctggctctgaaggtgagaccttcttctgaggaagcaagtggcctcaagcagcaccctctggcagccggcccagaggactggagtggggtgggccgggaggaacatcgttcgggacggggtgggtgcctacacccacaactgtgctcctgccttctctccctccct

SEQ ID NO: 898 - DNA, 2349 bp, Homo Sapiens
ctggttctcaccccagccctgacacaaacgccatgagggtcctcagaccagtcactctcccttctgtgggactctcagagtttcaaagctggaaaagagaagccaagctgcagcctctgttgggcaactctaaatgccaggtagcccacccataaatacatggaaaggtcttcctcaggggaattggagtctgcctccagagttcccaagcccacgccccaaataaaactccaaaattatgaatgtgtgtatgatggaatggcaaacaggcagggtgcaacctttctcactggcacaaggaggtgtcgccaggatgccaacctactctgactcaggtgccaagccctcccccaaccctgcacacaaacgcacagacatctgtactgatagtgcaagaaattcatctatgtttattaccatctaaaaaatagcactctttactaagcatttcccacatgcctggcacttcccacatccaggttcacagccagccctgaaagggaggtatcaccttcattttacaggtgaggaaataagtccagagaggggaagtgacttgctcagcttgtatgtgctgagttgggatttgaacccaggcctttcgtctcagcatccattccactgggcaccccgtgcccacaaagcctcctcctgggtaatggctttttggctcagttgaccctggatcctcccccagcctgcccagtccctcggatggcatttaatgaggactcccaggtttgaataagactttccccaaccgtgacctcatttaagcaccccatgatgagattcgtgattgcccccactttacagataaggaaattgaggttcaccatggtcaagtcactcccccagggacacacagcctaggagagtaagggctggggctgaagaaaccttgcttccccgatcggaccccccagcccacacacccctcatggctcacccagctccgaggagttcccagcagaatctccaactccacaccacagtgtgccaggcatggtccatcctctcttctctcgctggtgccctccaccagggactccactctgccctgctgctcgcttcttcctggcccctgctggactctcctcaagcgctcggcatgcctcccactgactctgaagagtggccagtgctctctgcagctcgggtccgggggtgtggatgaaggagccccaggcagtctcatgagcacagagagcaccgtaggctgcggtgagctccggctcatcctcccagctacatgactgcagcctcctatgcgcatcccagcgggcatggatcagggccagtccctgagcatccttggccaggaagctcaggtaccccagtgggttgccagggacggccttggtcaagtggcaggaggtcctgtaccagcggagggcaggggagccccccagggccacccccaggaagcccagcatcccaaacagccctgcctgaacccccattctgcactggcccagtccagtcagacaaagcccctgggatgcctgcccttggtggccccaccaggcggcagctgagcagtggaacggaagcggagcccagcaggcccggtgcggcgggaccaatgaatggagctgcgggaggaggaggaaagaggctggagtatggggtgatcttgggcttgtaaccgaatccaccagccgggcaggacgctgattggctgaggagtgcacttgccagggcccacgcccccattctgcctgccttctcagcaccatccagtcacctgctgccagccctgcctagattgggactatgggagccaaagccctaagctgtgggatggggaccaggctggggctttcacatctccttgaagggaaggaaaagggttcaggagcttggaggagtcccttagaacccacccttctcacccttaccacagcggtggctgccacatccacctccatcaggctggcagggggccatgggcctctgccagggctgggtgaaggaagggctggggctctgaagctaccaccctgggagttcccaaggcttctgggaaagggagtgccacctggggtgctcccctgccaagtcctggttcttagaaaggctctcggcatactcaggggacagagccccagggctccccgcttcctaggactccaagcatgggcctggccttgcagcaaccctcctggtctgataactgggggagacgcagcgggaacaggccttgagagccacacagggcagggctgatgctctggatttgaaagaactatggtccctagagtggcagagagtggcccagggtgtatgtctgtggccacctccatccctggccacctggggggacacagcaggcatcatgtgtgcctc

SEQ ID NO: 899 - DNA, 2355 bp, Homo Sapiens
atgcccccctggtaggaagagggcagagacctggttctcaccccagccctgacacaaacgccatgagggtcctcagaccagtcactctcccttctgtgggactctcagagtttcaaagctggaaaagagaagccaagctgcagcctctgttgggcaactctaaatgccaggtagcccacccataaatacatggaaaggtcttcctcaggggaattggagtctgcctccagagttcccaagcccacgccccaaataaaactccaaaattatgaatgtgtgtatgatggaatggcaaacaggcagggtgcaacctttctcactggcacaaggaggtgtcgccaggatgccaacctactctgactcaggtgccaagccctcccccaaccctgcacacaaacgcacagacatctgtactgatagtgcaagaaattcatctatgtttattaccatctaaaaaatagcactctttactaagcatttcccacatgcctggcacttcccacatccaggttcacagccagccctgaaagggaggtatcaccttcattttacaggtgaggaaataagtccagagaggggaagtgacttgctcagcttgtatgtgctgagttgggatttgaacccaggcctttcgtctcagcatccattccactgggcaccccgtgcccacaaagcctcctcctgggtaatggctttttggctcagttgaccctggatcctcccccagcctgcccagtccctcggatggcatttaatgaggactcccaggtttgaataagactttccccaaccgtgacctcatttaagcaccccatgatgagattcgtgattgcccccactttacagataaggaaattgaggttcaccatggtcaagtcactcccccagggacacacagcctaggagagtaagggctggggctgaagaaaccttgcttccccgatcggaccccccagcccacacacccctcatggctcacccagctccgaggagttcccagcagaatctccaactccacaccacagtgtgccaggcatggtccatcctctcttctctcgctggtgccctccaccagggactccactctgccctgctgctcgcttcttcctggcccctgctggactctcctcaagcgctcggcatgcctcccactgactctgaagagtggccagtgctctctgcagctcgggtccgggggtgtggatgaaggagccccaggcagtctcatgagcacagagagcaccgtaggctgcggtgagctccggctcatcctcccagctacatgactgcagcctcctatgcgcatcccagcgggcatggatcagggccagtccctgagcatccttggccaggaagctcaggtaccccagtgggttgccagggacggccttggtcaagtggcaggaggtcctgtaccagcggagggcaggggagccccccagggccacccccaggaagcccagcatcccaaacagccctgcctgaacccccattctgcactggcccagtccagtcagacaaagcccctgggatgcctgcccttggtggccccaccaggcggcagctgagcagtggaacggaagcggagcccagcaggcccggtgcggcgggaccaatgaatggagctgcgggaggaggaggaaagaggctggagtatggggtgatcttgggcttgtaaccgaatccaccagccgggcaggacgctgattggctgaggagtgcacttgccagggcccacgcccccattctgcctgccttctcagcaccatccagtcacctgctgccagccctgcctagattgggactatgggagccaaagccctaagctgtgggatggggaccaggctggggctttcacatctccttgaagggaaggaaaagggttcaggagcttggaggagtcccttagaacccacccttctcacccttaccacagcggtggctgccacatccacctccatcaggctggcagggggccatgggcctctgccagggctgggtgaaggaagggctggggctctgaagctaccaccctgggagttcccaaggcttctgggaaagggagtgccacctggggtgctcccctgccaagtcctggttcttagaaaggctctcggcatactcaggggacagagccccagggctccccgcttcctaggactccaagcatgggcctggccttgcagcaaccctcctggtctgataactgggggagacgcagcgggaacaggccttgagagccacacagggcagggctgatgctctggatttgaaagaactatggtccctagagtggcagagagtggcccagggtgtatgtctgtggccacctccatccctggccacctgggggga

SEQ ID NO: 900 - DNA, 2475 bp, Homo Sapiens
ccaggatactggctcctaaaaccacacaaccacagtcctattgctgcacctaagaaaatgaatcttccacaagtccccactcatttcttgaattgtcctgtggaagattttataagcctcccaacctaggacaccataagggttcttgtgccacatttggttttatgtttctttaatctctttaagcccagaaccactcatgatgctgagctgcatcaagggccagttatcctgcagcagaagaattattgttattgttactatttgttttgtgaccactatttaaatccgctaacagagttcccgaatccatttaactgggcacaagcaggcagtggcacatggtcacctccgtggagctccgggatgctgtggggccccttgcacgttgagccacacaaatagggagctctatgccagctgcagctgccagcaccaacatacgtgttcaatctttttctaaattttaggttcactctcctgcctgaggctccaatggagtcactgagctgcacttggccattaaagcccacccaggacccttgccattctcacaccaagcatgaggcccccagtccccaactctgaatgtgctgtcatcccactcagaatcatgtcttctcttcaaccaccagtgtcaggaggacaagctaccaggataattatgctctatgaggcaaactttgactctggggcctggaaacccagaagccattgattagtcaatagcaatctaaacaatgcactcataaagccagggaatgcaaatgtggctggggctctcaggagggcactggtggtcatgagaacagggtggcatctgtcctgagcaggatcgggacagcaggtgtggccccagtctgctgggctctgcagcccccacctctgctcctgccctgtcccagcagccaggcatggccccgcctctgtggggccctcttttctccagggaagccggccacccaggccttgacccttttcaaccctgtccccaggcccatcactcctcatttatccttcttagagatacttaagacatcaacagcaggactgggatgtgtttacgaaaagaacccaaatcctagctcaagccacaggcacaaagtacagcccaacagacagggaaggggcagggcaagggagtgtgaccctggcggcagctggagaaggcactgctggagtatgtccaggaggagctcgccagtgccagggcaatgggacaggaagggcaagccaagtccgagcccagggaatgtaaaggaaacagcagccatgtttcctttacgtcgtcttggtatttccaagcagctccgcataaaatctttgcgcacacacacacatgcatgctcactctctctctctctctctctctctctctatctgcctgatagtttccttcaggtctggattctacgtctgacctttgtcctggcaagcttgtcctcccctccagcctgccaggggcacactctgcatgctcatttttatactccaaggtctttaacttcaaaaggaggcgggggacaatctagaaagctggccaaagtgagatgcaacagagggttccagagacagccaccgcccaatgcagggcctgatctgcaggctgcactggccccatgaccgcagccctccctgcaactggggctcacccactccctgcacagcacccctacgggccaggcagcactgggtaagagggaggaggggaggccccgaatcagggtgactctgcccagcttcaaacactcccacacaccagaagggctcacctttgaatgccacctcccagcgaccttccaaggagcggttccggccagtgataacatactgatagccaacccacaacctgcagggcacagagacagagacagagatctcagcggcaggagggatgcaaccatcaatgactgtgtgttttttgttttttgagacagagtctcgctctgtcaccaggatggagtgcagtggtgcgatctcggctcactgcaacttgacttcctggttcaagcaattctcctgcctcagcctcccgagtaggtgggattacaggcacaggccaccacgcccagctaatttttgtatttttttttttttttttagtagagacggggtttcaccatattggccaggatggtctcgatctcctgacctcatgacccacccgcctcggcttcccaaagtgctgggattgttttttaatagctatactgacctccacaacactgagcttctaacatgagacactcatgttagaatgcattaaaattcaaaacaagaaagttcacagggcaggaaaagttttatctcagggaactcttgccaagactgtttctatgagctaaaccggtaaagctttcacaatttaagcaagaacaatcttattcttggtagacatgaaaccccatgaatacaactcggtgactatgctaaaaccataggacagggcactccacaggggagattttcatggca

SEQ ID NO: 901 - DNA, 2223 bp, Homo Sapiens
aatcaggctcaaaaagattgtcttaaaagagtgaaccttggcaatttaccataaaataattgcaatgcagattgtgcatggaaatgattggagatattttaaggtcatagtgtcttcacaaattgagctgaaagggaactgttaggatgatcttgcctaaccctctcttctcacacaggaagaactattttaaactcgagaggttaagtgacctggccaaagtcacacagccaccactagttaactcgtatacattgattctcctgtggggctgggcagatgaggaatcttttgttctcttccctgtttgcagagattttttttgaggttactttccgagttctggcaagtacccctgcttctggtagctttgtgtctcgattcaatctcattctttttattttattttatttttgagacagggtctcactttgtcacccaagctggagtgcagtggtgtaatcttggctcactgtagcctccacctcttgggttcaagcgatcctcctgcctcagccccccaagtagctgggattacagacgtctgccaccacgccaggctaatttatggttttttgtatgtgttttttgtgtttttgtagagacagtgtttccccatgttgcccaggctggtctccaactcctgagctcaagtgatctgcccgcctcagcctttcaaagtgctaggattacaggtgtgagccaccgtgcccggacttaatcccattctttaacttgttttgttttgtcctctccaggaggctcccagccctttcggattggttgagaaaagtggcctggctggtctggggccagcggcacccaccctcccctcaattgcccaactccccccccccaccgaactgcccaactccccctccccaactgcccaactcccccacccccacaatcccctcccgccacaactgagggaggcggtgctgaaaaacagctgactccagcaatgctgctcacgtgaccactgcagctgcagctcccgttccactccttgtcctgggctaggtgggcactaccaggggctcctttggtaaggagtaccgggtaggcacccggtcctgccaatccaccactggaacagctggggggacagcagacaggcacggtcggacagacttgacagatcaggcatcaggccctctgcgctggtcccgggctctttaagcaggaacgtgaatggcctcaagatgtctcacatggtcccactagccctcctcctccctttgttccctacctccaggagggctgctctgcccttccttcctctgttctttggccttatgttccccgccaccacagaccttcccccgccccacccctctgcagacttagccgtgcattgcaggcatggaggattaatcagtgacaggaagctgcgtctctcggagcggtgaccagctgtggtcaggagagcctcagcagggccagccccaggagtctttcccgattcttgctcactgctcacccacctgctgctgccatgaggcaccttggggccttcctcttccttctgggggtcctgggggccctcactgagatgtgtggtgagtaactcgcctctatcctgtgcctctttcctcctgggtccttagtggggtggctagggcataggatgagggaacttacctgcccttctaagctcccatagcagtttgggcttagctggacctcagcatttaacacatcctattgtgattgattatatgtttgactcctcaccagacaagatctccgttaattcagtcattcgttcacacattcattcagcgcatactgagccttttctgtgtcaggcccagtgttagcctttggggaacgtgcaaagcatgagacaagtctaatccctgccatcctagagcttatgttctagggaagggggacagacaaaagaaatggttaggtgctcccacctgaaatctcagcattttggaaggctgaggcgggaggggaggatcgcttgagctcaacagttcaaggtcagcctgggcaacatagggagaccccatctctacaaaaaataaaaaaaattaaaaaatagctgggcatggggaagactttctgaagaccaagaggacacatgggagctgaaactcgaaggaagaaaaggagctggcaggaaaggagtgggggacacacattctaggcagcaggaagtgagccttcggaggtcctgcctgctccagctctgtgccccaaggggtctct

SEQ ID NO: 902 - DNA, 2448 bp, Homo Sapiens
ggtgtctacagggcatccaagcagacataggttgaggaggcagaatatatgtgaatctggagccaagaagagaggtaagggctggaaatagggatctaagacccctggacagttgtgagtgtgcacaatgagggtcagatgcagagaaaattaggagactacagagagcagaacccagggtggggatctgggagtcagcagttgggcatgggcctggtagaaagggaagccaaggaggaggagagggggcagtctcagacaccaaggaggggagagtgactagaaagaaaaccttcttgcagagacataggggatggggaagaactgcagactgaactggggcaaaggactgttggccttaaccagagagatttgagggagagatgaggctgagagccaggggatcctgccatgtcccagcataaaaacagtacctgacacagatgggtgcttgggagctgttgtcggatgaatgagtggacagatgcatggatggacggatggatggaaggatgatagattgatggacaaacagatgaacagatgaatagctggatggacaactggatggatgggtagacagaatgatctcagagatcagaaaaagcttcatgcactaagtgggactgaaccgcgtctccatgggtagaaagcagaggaatctccacttgagtcaggaatgacccagtgctctcaatccagggagaaagccagcctggcttcactggggacacttgtgtgggggactcagaggccctttaaatgaggccagacgaggttggacaggtccaagccaactcagcactcctctgccacactgcacaggaggggatgtgtcactcagggagttgctgggacctatgggtcccagtgttgtcatcagcaccgacagcctcagagaggaaagacacacactggggtaactccaaggctgtgtgtggcacttgccttggacagcagacaggcacagggacacctctagggggctggccacccccctgcctcatgtctaggtcccagccccgcccactgcaaccctgtgcccgtcatgcccagcaggctcctgctccagcccagcccccagagagcagaccccaggtgctggccccgggggttttggtctgagcctcagtcactgtgttatgtcttcggaactgggaccaaggtcaccgtcctaggtaagtggctctcaacctttcccagcctgtctcaccctctgctgtccctggaaaatctgttttctctctctggggcttcctcccctctgtcctcccagccttaagcactgacccttacctttctccatggggcctggaggaggtgcattagtctccgggtaaccggcaggaagggcctccacagtgggagcagccggatgcagcctggtcccggggcctgagctgggattgggcagggtcagggctcctcctctcttccagggcagatgtctgagtgagggacagaggctggttctgatgaggggccctgcagtgtccttagggacattgcccagtgactcctggggtcaaggacagaggctgctggggtgggcctgggagctgctgagtctcatagtctaggggagcagccccaagaacagctgagggtctaggctgaggactggatgccaatccagcctgggagggccacacggcctggtgacacagaggtcaccccaaggggagaccaatggagggcacagagagggctctgggtctaggctgcagctctgtggcctgtgctgggtcatgaggacatggggacacagagggacgggtgagactgggtgaggtgccagaatccaaccctcccaggacagtcaccagaaaggagacagtctcttagggcagagatgtgtctgtccctggagccccgtcacctctggggcccagtgtctctctgttcacggatcggcctcctgccttcctcaaagggcatgttagactcaggaaatgaccagaggggagtgaatgaggggtgcagagaactccatggctaccaggtgaagtttggggtcatcacaggctgctggggtgggcctgggggctgctgagtctcatagtctgtgggagcagccccaggaacagctgaggtgaagggttctgtggtcgggcttgtggagacaggaaacatctcagagcctcagaggagccctgaggcttgtctaggtggagcccactccttgccaggagagccaagtgggctgggctggggcagagcccggtgcctgtgagggataggaagctccagttcaaagcaggcttgggtctccccacacactgcctgccaggacagtcctacaggatgagcaggggacccacagttcacggaggaggctctaggtcctggaagaataaagtgggtgatggaggggggtatagggatggaaatgagggatccaggggtcaaggccagattctaaactcagactccagagatcagagaaga

SEQ ID NO: 903 - DNA, 2383 bp, Homo Sapiens
agagagtcgggcatatgggcaggcgcttatcaaggaagaaagcagagtgttgaggctgtttttttaagccacaggtaagaagaaattgctgagtcagcttcagcattcattaacagccaccgatttcccgggaaggcccgagggagatgaataagcagcagctgcgattccatcaagcttaatttaaaatcctggtggaggaaggcatggaaaccagtgctgctggtcccaggagaatgctggagttgaatatctctgcattcagatgcgggctttacctaggagtaagaaagcctgtgtaattagacctaatgacaaagaggctccacacctccctcagtcccggggcaccgggctgcagccgacagctccaaccagacacctcgcagttcccaaggccagcaccccagagaagggatgtagggatcttcttcagagcagaaggtcttcagggatctcagcacatgtgctccaagcagacatctccctagtcccgaggggcagggccgtggacaagcagctggaagcccacccggccagccttgatccagaagatgacccctgggtgacccctggtgaaggccggcatcagtggctgcagagacgagggggcccttctcacaccccaagagtcaattcaaccagatggtcggccaccaggcagagacggggctgcccaaggagatccacagcacatcccataagacacacactcggccctggccctgtgccctcctgtctgcccctctagccacccactgcccgctgcccaccaccaggcctccagagcaggctcagctggcgctaagggcccagctgtcggggatgctgagatagagcgagggtcaagttccctctggttctcagaaggccctggccaggatgtacaggtggccgcaggcgtcagtcttggaggtggccgcaggcagtgggggtgcaggcggcagatcctcggtatgaatttaaatcatttcagcccttcagccagccagaaaacagttccaatcccatcctgctggcccagaagtaggacgaggggagagacaaagccaaacccttgaccagctccccctgccctggtcaggaagccagagtgtgagagtgtgcggggctcggcatccggccccactcggccatccgtgctgaacaggatgccctgaaggacgacaaggctgcctcggatcctgatgccacgcttgtttcaaatccttgacggggagaaacgcggggcgccacgcggcacctccaggtcaccggttcccactctgggattcaggtgagaagccagggtctcggggtcccctgtgacctcttggcctttgcccatggagggcagtcgtttgactaaaacaggacctttctctcccaaggcacatttccaagccgtttctcacttgttcaagatactttttactttaaatggaacgcagtcaagaagcaatgtacggccaccatgcacgtggctgctcctctctcctgggcctgggcaccctgggggtgccccaggaagaggcccccacaccatggaggtgagcgaggggctctggccggcccgagggggctgggatggcgaggatggccagattgggcggctgccgggtctcggggcccggtgggtccctcctcggtggcttgacccgtttgcctttgagcaatgactcggtgggcagcagagccccacccgtaaccagcctgcacagcgcagccccacaggaatctgttcaggcaaaggttctaattatcaagacatttttatttcaagcagagctcaatatttcaagttcattctgtgcctacgtttcagaaaaaaaatcttccagcaagaacgcaataaacaagactgagagcctcattaggagcctgtgagccccacatcaccagacgcgctgcagctccccgtgatgaccgctcctcctccgagccccgcacacggcgcgggttacatggaaaaggcaccgcagctccccgtgacgtcctctcctcctcggagccccgcacacggcgcgggttacatggaaaaggcactgcagctccccatgacgatcgctcctcctctgagcaccgcacacggcacgggttacatggaaaaggcactgagtgcggcccacaggagaggcggggatggaaccaggaccccaatgcataggctgggggacgcaccttggccacctcccgtggcgggatggttttcccaatcggagatcccagcagggcccatgctggcggctctgcctgtccctggcacggaccactcctcacctgtggatgacacccccatcccaggtctgtctgcaggactcaggcccctccccaggtgcccccctggtactcagggactttccagcagcacatggagctggggttgcatggaggtgtgtggggg

SEQ ID NO: 904 - DNA, 2293 bp, Homo Sapiens
ccctctgcaccaccccatggtgttaccaaaagttgaaccatgggttggttcaactttgcagagaagagaccacctaacccatctgtggaaattcactccttagcgatactgatgctccctaagaaattcaatcctgggcctgagtgatggttggtgcaaaaaacaaattcaagatcccagtgtcctccagaagcctggatttccagggatcctgctgtgagtcacaggacgtcaccggtccccttctctttgtgggttgagtgtgggggccatgtggactccctcatgagcagatgccaccagggccactggccccagcttcctccttcacagctgcagtgggggctggggctggggcatcccagggagggtttttgtatgagcctgtgtcacagtgtgtggtattcggcggagggaccaagctgaccgtcctaggtgagtctcttctcccctctccttccccgctcttgggacaatttctgctgtttttgtttgtttctgtatcttgtctcaacttgtggtcagcctttctccctgcatcccaggcctgagcaaggacctctgccctccctgttcagacccttgcttgcctcagcaggtcactacaaccacttcacctctgaccacaggggcaggggactagatagaatgacctactgagcctcgtctgtctgtctgtctgtctgtctctctgtttgtctctctgtctctctgtttgtctctctgactgtctgacaggcgcaggctgggtctctaagccttgttctgttctggcctcctcagtctgggttcttgtcggaacagctttgtccttgggttacctgggttccatctcctggggaattgggaacaaggggtctgagggaggcacctcctgggagactttagaaggacccagtgccctcggggctgatgctcgggaatcacagagctgggacccagagccaggatccagacccagaatgaggtaggaggtggaggggctgccctgggcgtctgggggctgccagggactgagccctgagccagcctgagactcaggaaaccccgtcaggagggagaagggagaagcagactctggacaccagaaagccaggggaagggtcacaaaaggagtggatgtgacggaagggcgggctcctgggtctcttcagaacatatcccctgtgcccagggggatcagaggggcagagtccactgcgtgaaagccccactgctatgaccaggtagccgggacgtggggtggatgccagaaaagactccacggaataagagagagcccaggacagcaggcaggctctccgatccccccaggcccttgccccatacacgggctccagaacacacatttggctggaacagcctgagggaccaaaaggccccagtatcccacagagctgaggagccaggccagaaaagtaaccccagagttcgctgtgcaggggagacacagagctctctttatctgtcaggatggcaggaggggacagggtcagggcgctgagggtcagatgtcggtgttgggggccaaggccccgagagatctcaggacaggtggtcaggtgtctaaggtaaaacagctccccgtgcagatcagggcatagtggaaaacaccctgacccctctgcctggcatagaccttcagacacagagcccctgaacaagggcaccccaacacctcatcatatactgaggtcaggggctccccaggtggacaccaggactctgaccccctgcccctcatccaccccgcaggtcagcccaaggctgccccctcggtcactctgttcccgccctcctctgaggagcttcaagccaacaaggccacactggtgtgtctcataagtgacttctacccgggagccgtgacagtggcctggaaggcagatagcagccccgtcaaggcgggagtggagaccaccacaccctccaaacaaagcaacaacaagtacgcggccagcagctatctgagcctgacgcctgagcagtggaagtcccacagaagctacagctgccaggtcacgcatgaagggagcaccgtggagaagacagtggcccctacagaatgttcataggttctcaaccctcaccccccaccacgggagactagagctgcaggatcccaggggaggggtctctcctcccaccccaaggcatcaagcccttctccctgcactcaataaaccctcaataaatattctcattgtcaatcagaaatcttgttttatctcattttttcttttctcacatataattcctagcctttcctgggttctcaatttgtggtggaaag

SEQ ID NO: 905 - DNA, 2388 bp, Homo Sapiens
gcttccaccgcttgatgtcgcagacatcgcagtccctgatgtagggtctggccctatggggcttagtgggtgttctccccgtgtgtggagatgagaaatcgtaaaaagtaaagacacaagacaaagagataaagcgaaaacagctgggcccgggggaccactaccatcaagacacggagatgggtagtggccccaaatggttgcgtgcactgttatttattgcatacaagacaaggggggcagggtaaggagggtgagtcgtccaagtgattgataaggtcgagcaagtcacgtgatcataggacagggggcccttcccttataggtagccgaagcagagagggaaggcagtatacgtcagcgttttcttctatgcacctatcagaaagatcaaagactttaagactttcactatttcttctaccgctatcttctgagaacttcaaagagggaccaggagtacaggaggaaagtggacaaggagcgtgaccattgaagcacagcatcacagggaggggtttaggcctccggatggctgcaggcaggcctggatactatccagcctcccacaagaagctggtggagctgagcgttccctgactcctccaagaaaagggagactccctttcgtggtccgctaagtaacgatgccttcctaggcactggcgttaccgcctgaccaaggagccctccagtagcccttatgcgggtgtgacagagggctcacctcttgcattctcggtcacttctcacaacagcccttcagcacctgaccctatacccaccggttatttcttggttatattagtaatacaataaagagtaatattaaaagctaatgattaataatatctacactaatgattgataatgtccatgatcatctctgtatctaatttgtattataactattcttattgtaagtatattctttattatactgaaacagtttgtgccttcagtctcttgcctcagcacctaggtaatcctccgcccacatctctgaggggctgaactgccccccaccttctggaagctgggaggttggaagaggggatgcgtgcgatggactcagcacacagctgggaactcgaggcacacctaagccttcgcttgtgctgtgcggagtccacacttccttccccactggggtctcaaaacctcccctcactcaacagggtggtgctgctcaaagctctgggcacacattagggctggggagggggtggtggagagggggctccagcctgcccaaccaccaggcaacggggcacctgcccctctctcagctgggtctggacccgcgtcccaggctcaggctgcaatgcctttctctttctctttctcttctttttgcagttccgttgggtcctgcccaggacagataaagacagagcagcctgtctttatcggaggttcctctgccagtaggaggggcccggagaaaaccagaaagagggccagagccagagaaacatgaagcaccccggggcctcccacaccagtgcctgagcaggaatggggaggggccatgattcacaaggccctgggaggtcactttaaagagggctgctcaactgcaaggacgctgtaagcaggaagagaagccacagcgcttcagaaaagagtgggacagggacaagcatatctaagaggctgaacatgaatccacagatcaggtacctctgcacgctttgtccgccaggcccctcctgccacttcctgccaggcggtcctgctgggcctcagccctggcctccccctgccccagccccacctctgggctccctcccccctggttcccccgctgcccccactcccagccaagctccttgccctgctgtgtggtcccacgactgctgcttctgaatgggccaccttccccacttgccccagcccagtccgcctgctgagactctcccccgaaaatcatgcccgggctggtgcttcccgccctgggagggtgcttcctctgtgtgcttcccactattcctgggagctctggaactgggagaattgaaccaaaggatgatttgagcaatcaggcattttgttctcagcgctttggtgcaatttctgtaagatttactttgtttcaatacaaagtcttaggagagggtgtgggggagggaatggtctctgtaccagaaaataagtcacttcttccaaagatgcctccactgtgagcagagtaggatgcacacgaccccagacacaggctcctcctctgtgagcaccgttcacctttcagaatgacacctgcaacatggagtgtaggaaaaaatatgatgatcaggagaaatgctcttattttaggccaggcacggtggcttatgcctgtaatcctagcactttgggaggctgaggcgggcgggtcacttgtggtca

SEQ ID NO: 906 - DNA, 2267 bp, Homo Sapiens
ctctatctgtcctttttaattatatttacttctctctctatttctgtcttttctcactctctcccctctccctctccctccctttcttcctctctccacttccgtctttatctccatggccctgctctctgactctcatggcactgctatctctgcctccctctctctgtctcccttttctcttcccctccccttcagctctcagctgggctgtgggttccctcttacctggggacttgctacttcctgctggaggacaggcaggcgggcaggtgctatgggtgactagagtccgaccccccattttatagtctggcagacatcaggccctatagtctgtggcacaaaggggaagctggctcagcaggcctgggcagggagtgggggactggggccctgacctcgcctggatcactgcagacagcagcactttcctttgtgagaccagcacacacagcagaaaccctggccacagcagcttcaccttccaaccctaccctgactcctttctcaacaaccccagccagggatgggcccccaaaagggtccctgctggctgccaacatggggcagggaaaaggggagaccctgggaggcaggagaccagagtttgaatcctgactcagccactgcgcgctgtgtggcttttggtaggtctctacccctaggggggcctctgtgtctgcaattataaggtgggcacgtgtccctgttggatgccatatagaaaagaaggtgacaatgagcacagaagcgttttgtaaaggcagatgtgggtttgatatggacagccttttttacggagtgcttactgtgtgccgaacccgtgttatctcggtcagtccccgggacaatctgccttatttggtactttcattatgcccatttcacagaagaggaaagtgaaggcacagagaggtcagagccagcccaggccagccagctctgggcctgtgtgctttcttctcctgctgtccagccttgaccttggcctgaggccccctggcctgacttcctctttgtaggttggggtgggaatgggagagtcgcactgtgctcagctgggttggatatcggagacctgggtctttttcttttccccacattgggccccatcctttcctgacctatcgacagtgatccctctcgccaccccagttccccgcctctacccaggccacgttatctgacctggaggacagtgctggtggccagaaatatgactgcctgtcccagagcctcctgccctggcaagccccagatgcccaccacatcttgttcaccactggccccagcacctagctgggcctggctaggtagagcttggcacatcatgggttctcagtcaataactggtgactcaatggtggttccaatggatcggaacagaaggtagggtacggaggagatagggaaaccaaggcaaggagagagaagtaaggaggcagatagaagtaacagacaaagagagaggtggagacagagacacagagaggcacaggggacatggacagtgaaggagcgagagacggagagacagaggtcaagttggggtgatcaagcctcaggacggaggaacagacgccagaaatcacagggcccaatcctcccatttcacaaatggagaaaccgaggcccaggtggaacaaatgacttcaacatagtcacatggcgggaactcacagtacagctggggtcagaaggagcctggggagctgctcagctaggtcacctgcagtcggctccccagtcccaggcagggtatattgcgggggcatctggataggctcctgtctcttctttttcggggttctaggctccccgtggagcccagctctgtcttgaactctccctggcctggagccagctttgcctctgtccctccaccacccagcaccccctcgcttcctagcctctccttggcctttcatcctgggccaagacttggtgggtggggtgtgggcaggaactgcaagatggggtagccactggaactggggccaagacgcctgtggtgagggcccacccaccagtctaggcttcaaagccaggtcatctggggcagttccgtgccccccctaaagccccaggaatgggctgtctgccagagggtgggggcagagaagggggatggcccaccatgttggtggctccactctgagcatttattattattattgtatccttcattatatctttttcttttttgccctgtcttatggagccaatttattttcttttctttttttcttttctttttttttttt

SEQ ID NO: 907 - DNA, 2408 bp, Homo Sapiens
attacaggcgcccgcgctactcccggctaatttttgtgtttttagtagagacggggtttcaccatgttggccagcctggtcttgaactcctgacctcaggtgatccacccacctcggcctcccaaagtgctgagattacaggcgtgagccattgcgcccagcctaaagtcatgcgtttgatagagctgcatttcaccctcttaaaaggaaactggtgtggccactttacaggtcatgagcaggactcaggtgtcctccaggtcacacggatggtaagaaagaagcagggctggatttcatctcagatgatctggtttccagtcatgctgttttcctatgcttgttacacccattttacacacaagtatgtatgtatgagggacctcttaggtccctcatacgccaattcagagggcagggtttcgggacaagaggcacacagcaaattgtacaagtcctggatatttggcaagtgtgccacagtttgcaaagcatgtttgcaactaacagctcctctatgctgcccacagtgccatccggattcatcttcaggctttgtggacccagcaggccctggcctagccctcttctcctgcctcacttcccttcaggtcccctgagctccaggccaattgggctaccagctctttcttgtacatgtgccccaagttcccacctctgaactttttcttagaatgcctctccttccatctcactctgtacatatcttcctcatccttcagagtctagttcaaatgcctcctctaacggcaagcctatctggattgcttcaactggaagagaaaggggaaagagagaaggaaaggaataggcatttcctgaatgtttactctgtaccaggcatgttatgtaacctcacaacaactctgtgatatggtttgtttctgccccattttataggcagaaattgaggggaaatgactcgctggagctcacatagctaggaaggatgcttctggactcctcatctagtgctcattctcctgctctagtcaggaaccttgtggggctgatgagggccaatattccacctctctccttcttcgtggctgatccctgggggtggtgatctggtcctttccctccctgctaaagccagagctgctgacggcttgccattggctcttcagccagggctggcttttgtttctgtggcccagttgctgagtcggggctttgtctcccaggggcccctcttccctccctgcctataagagcccgacctcggctggtctcagatctgacatgttccctgggcctatctcggtaagtcccaggtttggaggaggggtgggatcagagttctgagtgagcattctgggaggcgaggaacccaggtccccagtcctagggatgtcactgtgtcatcctgaatgccatcctcatcctaaccaaggatgagccccaaccatcaagaccagcacctgcttccctcatttaaaaacaaattattcctgtagccctattgcctaaatttccaccatcagagctacctctttgagctaggtgctgtctttggaagggctctcttatgctgagcatttcagcactcgctggggtgatgcacccacccaccagcagccacaaaaattttcccataacaagcagataagagaatacagagtggggctcagagtcaatgagacccagcaagggtgagttttgagatggggataggatggaagatggcattggtgacagatggaaaggacaggagagggacaggccaaagccatgcattgcccctagcccagtcactcctggactccctatgtggatcctgaccaggtccaagccagccatctgcataaagaggagagcagagggtcagggtggaagattataatgttcttctcttctgcaggaaggggccacaatgaccctgcaatgcacaaagtcagcgggaccctggaaggtaggaagaggcatggggagggggtgttcagggggtatggggagggttcaggtccccatgaatcctaggaggggggcattataaatgcctatttcacagaggtgcaatcaaggctcagagttgagaagggacttgtatgtcacatacagggaggttgaatgtgaatttgggtcttctggttcccaaagttgacctgttacactctttggcagaggttgcagtctttgggcatgatttctttgaccatctctgtgtgtgtttgtttgttttataaagcttttggatttatcatcagcctttaaaagcctggaagaaccacataaaagtccagatctagtgattgtcttgagaaattggaaggtctggcctgcattcccacttggcaaccattggtggcactgggaagaggccacccatttacctggcacctgtgctgtctagtgtctcacatttatcactgctcttgccttcc

SEQ ID NO: 908 - DNA, 2432 bp, Homo Sapiens
ctggctcagcacctgagcgtccacttacaggacactcacctgcagaggtgccctgagcgccattgtgggttaagggactttctcccctctggagacagtccctgagaagctgaaggtcttgggggcctctcaccaaatgtctttgggaggtgggaaaacatcaaatgcgggtgtggcttccctggaacagctctgtgtggggactcaggagccaagtcccccagcacacgcctctaacactttcagtaggggccacctctctggagccacgggtggctgccaacaccctgtggttcccagcaggcaccacccaggcaagagagagaacaggccggggaacaatgggctggcctggccgcaagcgctggggcagatcacagaccggatggcctaagctcatgccctggggccacctctgactccctgcaagtgtggcaagggtcccttttggacaccttgagaagctgcagctgggagaggaccacccgcctgtctggatgtccagcccaggtgtcagggtccaaatgaccagtcccaggccgcagcccttaccacccgccctggctgcaggggctcccagaagccaccaagggcctggctcggccttgcctatccgcatctgagcttcagtttcctcatctgctcaagaagggaggtgaatactgattaaattatgcaaactcttagcggcaggattaggtgtggctgggacagccaaggctccccagggtggtggcatctctggagcccggggatgggccctgtctcccttccgggccccccgctgggcttgggtaccttctctccccttcctccttcctccctccagaggggacccctgcagagctgcctccgccccagggctcagcctgtgtctgacccaaacagctcctgcctccccctgaggatgagttgggtgcacctccttcctgcaggaagatgagggctagagatggaggtctatgtcagggccacagagtctggaatcctccctggagctaaaacagccctgccttattcaccctgcgcatcccatcctctgcttcagccccgccgggctcgccctgcatgcaaggcggggctgggacccagggtctgagcttcgccctctggacatccggctcatcgcctgccaaaggtcctgtggctggaggctccggcctcctcaccctcccacagggtcccagggccgatccaggcctgcgggccaggaatgtgctaacggggcaacttgggccttgctggtccacgcaggcacctgtggactttgagaggggactgggtggggaggggcggggaggggcggggcggggcggtgccgcagagtgcagggcgggcggggccaggccagcagggagtgagcttgtctggccgcctcgcctcggagccactgcactgctggctgcagacacaggctgcaccatgaagccagccctcctgccctgggccctgctgctgctggcgacagccctcggcccgggccccggacccacagcaggtatgcctccctgcccttctgtgtccccgtctgtctgtccatctgtctgcagccaggcctgggctgacatccctctgggctcagcctctgtccatctgtcaggccatctgtggctgtgctaggggtgatgggaagaaattctgagggtccatgtggaggggcagcccatggggatgggaggtctgagccgggcccaccctaaacctgctggtagctaggagggaggcgggggagaccagcagaggcctccgcctgtgtccccagccctgacagggcgggatcacggagggggagccaggattgtgggtcctcatcagggtggggctgaatccaggaaagtctagggaaagccccgaactccagaaccaggacactggtcccaggctgccccccgtcccccaccccatttcccatcgaccctcttgccacttatctcacttgcaagcatctctcggcctcctcccccgacccctgtgcgccaccaaatccttggccagtacatatttattgttgcttttaagtgccaggcactgcacttggtgaagtggggccagcggggtggctcaggcccaggcctggccctcgactggcctcttttgatgggggatggggaagggccagggaagtgcaattccagcctgggtgcatgcacctgccccagtccctccctgcaacccttccttcatgccagcccctggaaatatggccttgcccaccggtcttatggcccataggagaagttttgggcccggcgcccacagccccttgtggtgtgcacccccacttccctttccccactgctgggacccctgcttgaaatgtccctcctctccccagaaaggaggggagcggccctggccttctgccctgagcacggagctctctttggggtctcaattgcagcccctgggagagcgagaagtgtcacgttcag

SEQ ID NO: 909 - DNA, 2359 bp, Homo Sapiens
aggacggacacctcggaccctcccctgcacccagtgctgtagggagcaacttcagccctgggcctgggatgaatgccctcgccagcctggggccaggagacaggctctccctggctcagcacctgagcgtccacttacaggacactcacctgcagaggtgccctgagcgccattgtgggttaagggactttctcccctctggagacagtccctgagaagctgaaggtcttgggggcctctcaccaaatgtctttgggaggtgggaaaacatcaaatgcgggtgtggcttccctggaacagctctgtgtggggactcaggagccaagtcccccagcacacgcctctaacactttcagtaggggccacctctctggagccacgggtggctgccaacaccctgtggttcccagcaggcaccacccaggcaagagagagaacaggccggggaacaatgggctggcctggccgcaagcgctggggcagatcacagaccggatggcctaagctcatgccctggggccacctctgactccctgcaagtgtggcaagggtcccttttggacaccttgagaagctgcagctgggagaggaccacccgcctgtctggatgtccagcccaggtgtcagggtccaaatgaccagtcccaggccgcagcccttaccacccgccctggctgcaggggctcccagaagccaccaagggcctggctcggccttgcctatccgcatctgagcttcagtttcctcatctgctcaagaagggaggtgaatactgattaaattatgcaaactcttagcggcaggattaggtgtggctgggacagccaaggctccccagggtggtggcatctctggagcccggggatgggccctgtctcccttccgggccccccgctgggcttgggtaccttctctccccttcctccttcctccctccagaggggacccctgcagagctgcctccgccccagggctcagcctgtgtctgacccaaacagctcctgcctccccctgaggatgagttgggtgcacctccttcctgcaggaagatgagggctagagatggaggtctatgtcagggccacagagtctggaatcctccctggagctaaaacagccctgccttattcaccctgcgcatcccatcctctgcttcagccccgccgggctcgccctgcatgcaaggcggggctgggacccagggtctgagcttcgccctctggacatccggctcatcgcctgccaaaggtcctgtggctggaggctccggcctcctcaccctcccacagggtcccagggccgatccaggcctgcgggccaggaatgtgctaacggggcaacttgggccttgctggtccacgcaggcacctgtggactttgagaggggactgggtggggaggggcggggaggggcggggcggggcggtgccgcagagtgcagggcgggcggggccaggccagcagggagtgagcttgtctggccgcctcgcctcggagccactgcactgctggctgcagacacaggctgcaccatgaagccagccctcctgccctgggccctgctgctgctggcgacagccctcggcccgggccccggacccacagcaggtatgcctccctgcccttctgtgtccccgtctgtctgtccatctgtctgcagccaggcctgggctgacatccctctgggctcagcctctgtccatctgtcaggccatctgtggctgtgctaggggtgatgggaagaaattctgagggtccatgtggaggggcagcccatggggatgggaggtctgagccgggcccaccctaaacctgctggtagctaggagggaggcgggggagaccagcagaggcctccgcctgtgtccccagccctgacagggcgggatcacggagggggagccaggattgtgggtcctcatcagggtggggctgaatccaggaaagtctagggaaagccccgaactccagaaccaggacactggtcccaggctgccccccgtcccccaccccatttcccatcgaccctcttgccacttatctcacttgcaagcatctctcggcctcctcccccgacccctgtgcgccaccaaatccttggccagtacatatttattgttgcttttaagtgccaggcactgcacttggtgaagtggggccagcggggtggctcaggcccaggcctggccctcgactggcctcttttgatgggggatggggaagggccagggaagtgcaattccagcctgggtgcatgcacctgccccagtccctccctgcaacccttccttcatgccagcccctggaaatatggccttgcccaccggtcttatggcccataggagaagttttgggcccg

SEQ ID NO: 910 - DNA, 2436 bp, Homo Sapiens
tattgggtgggtaccattaaaggatcatttttaaataaaggcaaaatcacgactctcgtgcaattacagaatgaacacccatcagagattttatttaaagcattaattaatgacagaacaaggaaaatggcacaactggttcaaaggagaatttaagcaccacacatagacatgcaggcaaacacaaatgctggcattcatttacaagtagatacgaaatcggtcaataacttgaggataataatcaattgcattccactggacacaattcatttgcatttctatggcaccaagcatttgtattactattggtttttttcttaagcttcgagagttaggaaatagctcaaagatgatgaaaggcatagatatcctggagagttatgctagacagaacattcagcaatctttatagattttttggcccatatcaacatcttttataattttttctgacagtacagtgcagccaccaccatcccagagaagaagtgaggggctatgttgtgtttcctggacctctgtttcttaatctgcaaaatgggcatgataagagcctttgacaatccagagacatgaggtcctgctgggacaagtaccgtgggaaacgtgaagtgctaagggacagtgtcccaaacctcagtgtggccctccttcctgatttagttcacatccttgttctaccttggaagatttattttttttcctttataccaactttgatttgataatacccttgaaatcagagaatgaggtgctgattctgtatgttttttttttctaatacatatgaatatagacaaaaagccattgagataagaaaggtaagttcattcttgtaccaactaatccagtgctctgtgggaagtacaggattaggaagaaattaaatgatagcctacaaacacacacacacacacacacacacacacacacacactccactaaccaccaccaccaccaccgccgccaccaccaatgtattctgcaaattcatatacaatttgcaaacctcctcctgaaataagagagagagggcaattgaaactatctaaggcagcacttggaacacgcaggccaaagactgagccagggagggattgttatcacatgggctgtggggaggcagagctcccctgtgtccccgagagcacccctccccggggccccaccagcccccaactcgcctctcgaattcccacctctccccttgctctgcgcctttggaaacccagacagcggccccactcccgtgattcatccagcaggaatgtgggagttctcgaattgctccagctaaagccttttaattccccttcggtgatgaatgggtgaggccctcaaatgaaatgtggaggctcccagtcccagcccgcggccctccccctcctcggcgtaattatttctgtgcagaacatgtcaagtgccctgcttcccgggaacttgtttcgcatgcaaacatttggtgattaagcgaggcttacttaattaagcactttgtaatgactcttaaaccaaagaacagtggattaggagtccagttcgtgctggtgatgggaaaggcagcttcatatcacaaggaggcagacagtgatctggtgtggggaggcggccgggccaagcggggcagagtaggcgctctgggaactctgctagaatcactcattcattcattcaatcaatttatttttggagcacttcttggagccagagtagctggtgaacaataataataataataatagggccaggcactgtgctaataagtctgctgaataacaagagtgaggaggagccagagatagttattgagagctgactctactaggcatgaactgctagtagtagtgacggcaataataagcattttcattgcagcagcaaatccttgaataggattttgctgtggccctgcgtgccctgaaactgctgggtttctgccatggacttggcctttggaaacagcccccatctttgttgctgtcttactgactcactggcttctcacccaccagtggctcacttcccacatctgtgtaatgggtagttggatctagatcttctctaagatgcttttgggtcttaggagcctagggtgtctcctctgcttctgggggccacaggaatggtggcgccactttgggggcctcagctgcaatattgcagaaggcttcagagcccagccctacacagctccaggacagagcaagggtgactctcagctcagaccttcataaattgtgggaccttcaccaggtagcttgtcctctctgacggacaagtccttcacctctcaattgaaataacccttccatctgcttccagggctcctgtaagggaatcacacagactcatggacatagatgccctttgaaaaccatctacctggtggcagaagccatcatgtctcaaacttggacccacgaacacacccca

SEQ ID NO: 911 - DNA, 2391 bp, Homo Sapiens
ctacctctggcaccctcagggctgcccacgttgcacccctgtcctgcctgcctccaccatgagcagctgcactgttgagggttacctgggggaacaagctggctggcggtcaggtacttcttatctgagaacatggcggtccaaaatttaatcatgatgcttatgtcttcacgcagccgcttctctccttgagtaggaaactttgggggacagcttcaaacaaccataagaggacaacggctgagtgtctggagtcagggactagaggccagtcacacaaagcagtgagaaggtgatgcagacaatttcttaatgacaaaaggtcagcccaaagccagtcattagcaaggatgatctggcccattcccatgggaaggtgtggtggctcgggagccctcttatgccctcctccctcactgcccacagcagcccctacagctttccactgaagctgcacttgtggcagatcagggcaaggaagctgcactcacacaacagcacagcctatgggtgcagagccccaggcagtgggtgtttgcaattcttcgtgcaataagccttcacattaacagggaaattaaatggacgcacttaatctcctaaatcagttgaactgagggaaaatttgcctacatctcgctgggaggctagctctaagtacacgggacacatgcacagggctgaaaggtatttaaatccacagggccagggatactgaaggaggaggttggtgagcacaactgggcaactgtgtattcctgtgagtgacttcctgggggtctggggcgatggagcacttggaggggctgggccgtccctggatgctgcacagcacatcttgggggagtacctgaagtagtcaaaggcagtggagtagatcttctcgcgaagcacattgcggatggttgcatttggaaccacatcggcatgcaggagggacagccccagggtcagcagcctgtgagggagccccggacccggtcagagcaggagcctggcctggggccaagttcaccttatggactctcttccctgcccttccaggagcagctcactgaaatgtgttccccgtctacagaagtaccgtgatacacagacgccccatgacacactgtacacaccaggggccctgtgctccccaggaagagggccctcacttgaagcggggcccgatggccgccacgtgccggttcatgctccccttggccctgccgatgttcagggacatggagcgctgcagcaggctggagaagatctccacttggtcagagctgcagtacttggcgatctcaaaccgctgcaccaggaactgagcgaaaagaggaagacgctgtggtggtggggctgagccgggctaaccctggggccggcagagacagctgaggaggggttctgggctgactggccgagcttgccgaaggccttgggctcggctacccccaccccaggaacagtcctggccccccaggtggagcaccccacagccttcgtgggggaacaggcacgtacgtcgatccagatgtagtggggggtcacttcggggggacagggtttgggttgacttgcttccgaggcagccagggggtctgcttcctttatctcagcagaaaacaggccaaatttctgctccactgtcatgtgccagcccctgccatctcccgcatgaactacaggtacagaaggaatgttagctcctctgtgaaacacaaaaaggggctactgtcaagttttctctaattaaaaaaaggaacacgtgctcactgaataagatttagaaaccaagaaaagtatgaagaaaaaattgaagatcgcctatagtcccacatcccagggtcatctgtgtcagtgcttggtgtattttctccagcctctcgaggctgcattctgttcaacccggttcaccgtgtggacattgcaggtgtgaggtggcagcacccgggatgtacctgatgccctgacaggcactgggtaggtgactcttctctataaccctgataaccctctgtggctgtgagcgggaagacccctctgtgggctgctgagctggcaagggcagaagagggttctggatccagggcctggctcctcctctccaccccacacagaccctacccgataccttcatcccgctaaccagattaggaaggcccatggagccgaggcgagcctgcagccaccatggccaggcctgggagcccagggtcaggctgctcccatggcccagtcatgctcagccaggtccccattccgtgggggggcatgaggggtgcccagagggagcagcatggtgcccgggagacacctgggtgctgcagagagtaagaggtgcagctcacacatggaaagcccccatgatttctgggtgtttttacaaggagaccaacaaacagc

SEQ ID NO: 912 - DNA, 2258 bp, Homo Sapiens
ggctgaagtgcaatgacatgatcatagctcattgcaaccttgaactcctgggttcaagtgatcctcccgactcagcctctcaaagtgctaggattacaggcatgagccactgcatctggcacgtggacatttctgacttatctcaactagggaaggtactcaataaatgctaattcccttcttcctccccttaattatttgacttcagtaccccaggaaatgaggactgggatattggatggtttgggagaggaggaaagaggtgtccagggaaaaggaagaaattgggaaatagaagaccacggacaaataaaagaggaggggttaattcagaatagggaagacgggccaggcgcaggggctcacacctgtaatcccagcactttgggaagccgagacaggcggatcacgaggtcaggagttcgagaccagccttgccaatatggtgaaaccccgtctctactaaaaatacaaaaattacctgggcgtggtggcactcaactgtagtcccagctgctcaggaggctgaggcagaagaatcgcttgaacctgggaggcggaggttgcagtgagctgagatcgtgtcactgcactccagcctgggcaacagagcaagactccatctcaaaaataaaaaaaaagaaaagaaaagaatagagaagatgattttaatcatcagagctttccaataaaggcaggctctggctgcttgggggaggttgagagcctcctgtcattagaggtatgcaagtagaggctgagggattgtgagccacacagatgtgtttgtgaggactcgcaatggccaggaggtagattccttcactcagcaaactttgggagagggctgtccttgcctggtcctgtaatggggcagggaagccaaggtgaataggacaccatccctggccccagggagcgcccagcccaggaaataagcaaatcgctgagatccttttactctgcagttctgtgctttgaagcatccaagccttggagggagttggctggggattttcagtgtgcgccttttggtattgatccactgaagttggagctggctggggaatggcaggaggacgccgcagtgttattagtgcggaggacacgctgtaatctgtcagtgtcaccccggttgcagctggccaggaaccatcctgctgttaacgcctcccttcccagcagccatggagcacacaacttgtacagcacctgccagtgcctccacctctccttgtaggagggagagtgtggatatttattctttttctgcatctccctagcatgagtcctcgtctccaatcacactaatttattcagtgttttccaacacaccttgggcattcctacctctgtaccttcagttaccagaattccctaccagcggtggtcactcctgtccattcatccatccacctgtccatccatccaatcatccatccatccacccacctatccattcaatcatccatccattcatccgtcatccatccatccccccattcatccattcaatcatccatccatccattcatccatccacccacccaccttccatccattcaactttgcaatccgcttcagttcaattcaattcaattcacctttattcaactcataaggttactgggctttgccatgtaccacacacatgtgataagtgaggcatgcctctgccctcaaggagcccatgggaagaatcctccccattctccatggccagctttgcatctcacctctgttaatcctttgccatgcccttcagcagaagcaacggactctgaagggctgtcctgtgaggagagttcagttctggctttcatgaattgcagaggacagagctcagacaaggagagaggcaaagggtggggaggaggtgagagtgagatgagctagtgggacggggattttggctttgtggagggagctgcttccagttagctgtgagtactcagcagtgtattgggggatgaagggaaagagaagggggcaaggaaaccactattggagaagtgggttagtgtggcggtgaggaggtgagctctgcagccaatggactacctggcttattgtctcagctccaccatattcctgctgtgtgaacctgggcacatatcttaacatctctgagcctccatgtcctcatttgtaaaatgaggataataagacctatctcacaatgttgcctttagcattaacacatgcagtgcttaaattaatgcgtggcacaaagggagagcttaatagattccagcttt

SEQ ID NO: 913 - DNA, 2486 bp, Homo Sapiens
agaataatagcaagatagtttgaatttgtcttcttctctcacaacaatctaaaaattaacatgatcccatttatatgaaatatctagaaatatatctgtacatgtggacattcccatcgcacacctcccatccaggctgtcctaaagtggcatctcctcttcttctgctcatgttctccccctctcctcacctctcctgctgacacgtggctcctccctgccttcctctccagtagccccagcagatcaggcccaaccagtcaacaagctcctggacttggggaacaaaagtacatcttcttggatttctgaggacttgccctgccagggtgtctttctcaatccaatctctccttcccggcagtccacttctcctagatcctgtaatttatctaatcttattcatctgtatctacttcgtggacttccttacatcttcacctgaacaccaggaatcttcaggtcatgcccatatgcccttggttctcctgtagtcccttcttccttcttcccctgtgatgccaccaagtcgaagtctcttctcagaccctggagtgcagcagggacttctctggtctctgccccagggattaagggggtggaagagtggactcctgtgcccttcctatgcctgtgttttcatcagggttagctgcaaaaggtagggattaggctgtctaggtagggattatggcattaggtagggattatggcatttccagagctgagctctatgcccagcaaaagatacgtgctcagcaactacttgacagagacctacctcttatcacatgggacacattatactggacccaggatggggctgaactgggagaggtagctgtggacctgctcctcgctctgccctcaccctaagagctgatggggcatccaccaggaagagcattcctgggcagggagagggccatgagcagccttgtcctgtatgtgagacacagctcagcccggtcacaagatccagatgactatgactgcaattcaggggaagtagagaatgaagattgaccagaataaccctctgggaatgtgccctgggcctcctagagggaagagcttcccttctattcagcgctgcaggatccacagaggaaggagagccctggccaccagggaggagccacatgagaggacccggtgtccccacaaatgggaacgtgagtccatgaaagtcggtccctgctctgggtttgattgtgacctatgaggacattgtgtagtcaccacctgagtcctctacaataaacagtgagagcgccacggacagattcactcccgaggagcccagtaaagtgggaggactgaggtcacagggagaagacacaggcaccacctggcctggccctgacagggggcagtggacagaacagtgcggaggcagtggggtctctagaggctctggtcaccttgtcataccatggtttgtctcggtctggacactagagggcacttggggatcattcctgagaagactgaggttgatcagagcagaaccagccacctgtcctgcctagtgtcctctgctcagggctcacagctgcgtcctttacacccgtgggaccacacagccccacccctgccaccccctgacatcctcaggcatagggacctgacccagggcccagggtgggattagaaagctgggggtctgatttgcatggatggaccctcccactctcagagtatgaagaggggcagggagagatttggggaggctctgcttcagctgtgggcacaagaggcagcactcaggacaatctccagcatggcctggtctcctctcctcctcactctcctcgctcactgcacaggtgactggatacaggtccaggggaggggccctgggaagcctatggattcttgctttctcctgttgtctctagaagccgaataatgatgcctgtgtctctcccacttccagggtcctgggcccagtctgtgctgacgcagccgccctcagtgtctggggccccagggcagagggtcaccatctcctgcactgggagcagctccaacatcggggcaggttatgatgtacactggtaccagcagcttccaggaacagcccccaaactcctcatctatggtaacagcaatcggccctcaggggtccctgaccgattctctggctccaagtctggcacctcagcctccctggccatcactgggctccaggctgaggatgaggctgattattactgccagtcctatgacagcagcctgagtggttccacagtgctccaggcccggggggaactgagacaagaacccacttcctcctctgccaggagggtgagccccggcagctgctgctcaggcctggcctgtggcttctgcggctgctgcttccctcatggtcccaggggcatccagggccctgcctgggagtggaggctcctcctccccttctgtcctcagagtcaggaacagggaatccaggaagcagaatatccctctcccttaacttg

SEQ ID NO: 914 - DNA, 2411 bp, Homo Sapiens
tgtggacattcccatcgcacacctcccatccaggctgtcctaaagtggcatctcctcttcttctgctcatgttctccccctctcctcacctctcctgctgacacgtggctcctccctgccttcctctccagtagccccagcagatcaggcccaaccagtcaacaagctcctggacttggggaacaaaagtacatcttcttggatttctgaggacttgccctgccagggtgtctttctcaatccaatctctccttcccggcagtccacttctcctagatcctgtaatttatctaatcttattcatctgtatctacttcgtggacttccttacatcttcacctgaacaccaggaatcttcaggtcatgcccatatgcccttggttctcctgtagtcccttcttccttcttcccctgtgatgccaccaagtcgaagtctcttctcagaccctggagtgcagcagggacttctctggtctctgccccagggattaagggggtggaagagtggactcctgtgcccttcctatgcctgtgttttcatcagggttagctgcaaaaggtagggattaggctgtctaggtagggattatggcattaggtagggattatggcatttccagagctgagctctatgcccagcaaaagatacgtgctcagcaactacttgacagagacctacctcttatcacatgggacacattatactggacccaggatggggctgaactgggagaggtagctgtggacctgctcctcgctctgccctcaccctaagagctgatggggcatccaccaggaagagcattcctgggcagggagagggccatgagcagccttgtcctgtatgtgagacacagctcagcccggtcacaagatccagatgactatgactgcaattcaggggaagtagagaatgaagattgaccagaataaccctctgggaatgtgccctgggcctcctagagggaagagcttcccttctattcagcgctgcaggatccacagaggaaggagagccctggccaccagggaggagccacatgagaggacccggtgtccccacaaatgggaacgtgagtccatgaaagtcggtccctgctctgggtttgattgtgacctatgaggacattgtgtagtcaccacctgagtcctctacaataaacagtgagagcgccacggacagattcactcccgaggagcccagtaaagtgggaggactgaggtcacagggagaagacacaggcaccacctggcctggccctgacagggggcagtggacagaacagtgcggaggcagtggggtctctagaggctctggtcaccttgtcataccatggtttgtctcggtctggacactagagggcacttggggatcattcctgagaagactgaggttgatcagagcagaaccagccacctgtcctgcctagtgtcctctgctcagggctcacagctgcgtcctttacacccgtgggaccacacagccccacccctgccaccccctgacatcctcaggcatagggacctgacccagggcccagggtgggattagaaagctgggggtctgatttgcatggatggaccctcccactctcagagtatgaagaggggcagggagagatttggggaggctctgcttcagctgtgggcacaagaggcagcactcaggacaatctccagcatggcctggtctcctctcctcctcactctcctcgctcactgcacaggtgactggatacaggtccaggggaggggccctgggaagcctatggattcttgctttctcctgttgtctctagaagccgaataatgatgcctgtgtctctcccacttccagggtcctgggcccagtctgtgctgacgcagccgccctcagtgtctggggccccagggcagagggtcaccatctcctgcactgggagcagctccaacatcggggcaggttatgatgtacactggtaccagcagcttccaggaacagcccccaaactcctcatctatggtaacagcaatcggccctcaggggtccctgaccgattctctggctccaagtctggcacctcagcctccctggccatcactgggctccaggctgaggatgaggctgattattactgccagtcctatgacagcagcctgagtggttccacagtgctccaggcccggggggaactgagacaagaacccacttcctcctctgccaggagggtgagccccggcagctgctgctcaggcctggcctgtggcttctgcggctgctgcttccctcatggtcccaggggcatccagggccctgcctgggagtggaggctcctcctccccttctgtcctcagagtcaggaacagggaatccaggaagcagaatatccctctcccttaacttgggacacaaagtctctacactgaagttc

SEQ ID NO: 915 - DNA, 2386 bp, Homo Sapiens
ctgatggagaaatcctacccgaaatcccaaagcagggcagggacattcccaccagatacttttgcagcctttgtcctgtgggacgaagcaagggatgatgacacactcgcctgcccacccggaagtgagtctcaggtcattgcatcagaagggtgacaacctaacacaagtcattgctaagcaactctcgcgtgctcagtattcacattttcttgcttcattctgaccactacactgcacaggagccattattctcaccccccgcctccatttacagatgaggacaccgagacccagagagttttttgttttgttttgttttttgagatggagtcttgctctgtcacccaggctggagtgcaatggcacgatctcagctcactgcaacctctgcctcctgggttcaagagattcccttgcctcagcctcctgagtagctgggactacaggcacctgccaccacacccagctaattttgtattagagatggggtttcaccatgttggccaggctggtctccaactcctgacctcgtgatccacctgcctcagcctcccaaagtgctgggattacaggcatgagccaccgcgcctggcctgttttattttttgttttgtttgtttgttttgttttgttttcagagatagggtctggctttgttttccaggttagggtgcagtggtgcgaccatagctcactgtagcctcaaactcctgggctcaagcaatcctctcgcctcagcctaccaggaactggaactacaaatgcatgccaccatccccagctaatatttttcctttttggaaaaatgaagtctcactatgttgcccaggctggtctcaaactcctgggctcaagtgatcctcctgcagtgctgggattacaggcatgagccactctgcccggccaatctcagagagttttgatgaagttacaaaattctgaccatggagccagaactcaaatctaggtatgtgaggtctgagcccaggcttccaccagggccactgtgctgcaactgccaccacttcctggcacctcaagtgacacccgagcatcattcaagggaaatggcccatatcccggcaattcccccacccgccccactttcttctctgaattagggacttcggcagagacagagccccagcagcctccacccgtcccctcgtgtcggccttgctcacccacggatgagtcagttggaatgtttggacatcccagctcagcggctgtggtaccaggagctgtcaggaggcgggaatgcagagaatgtggctcactgtgctcccgcccgcccaggctgaatccgcagagaggtttggaaggtgaatgacacaatgtttgtcaagggtttgggacgacaggtgcatgtgaagatgaggacaaagactgattcttttcttggggctgccagcacagtttcgcatccctcccacacatgtccgcattccaggcccagacactccgtgccctgggctcctatgaagggcaagaaaccactgattaggaagcaagaagaagaaaaagaaatgtcccaggctcttaaaagaaagagtgtttgacctctttacccaaatgccatcctgaaacacagcttttttgtttttcgttttttttttcttttagagacagggtcttgctctgtcacccaggctggagtgcagtggcacgctcacagctcactgcagcttccaactcctgggctcaagcgatcctcccgcctcagcctcccaaagcactgggattacaggcgtgagccactgcaccaggccctgaaacactgctttgattctgtctctctcctactcagatgcctttgtgcaggccgacaatcttttctggtgtcttctctgtgcggggctgtgtctgggcactgagtagacagtagtgaagaagatgatgatagtccttccccagggagtttcctttctggagagaggttcagataattaaaaagtgagtgcgctcacgcctgtaatcccagcactttgggaggccaaggcggatggatcacaaggtcaggagttcgagaccagcctggccaatatggtgaaaccccgtctctactaaaaatacaaaaattagccagccatgatggtgggcacctgtaatcccagctactcaggaggctgagacaggagaatcgcttgaactcgagaggcggaggttgcagtgagccgagattgcgccattgcactccagcctggacgacagagcgagactctgtctcaaaaaagaaaagtgagtgtgtgattacagatgagcagtgtgggggaggaaacaaactaggtctatgatggaaattaggggaatggggttcctttaaaatgaaatcaaactccgagagctgcgtgctgcctaaatgtgtcacctcactgcccac

SEQ ID NO: 916 - DNA, 2500 bp, Homo Sapiens
cctgaatgaggtcactgaatgtgcacgggaggctcagcgctgccccactccagcctgatggagaaatcctacccgaaatcccaaagcagggcagggacattcccaccagatacttttgcagcctttgtcctgtgggacgaagcaagggatgatgacacactcgcctgcccacccggaagtgagtctcaggtcattgcatcagaagggtgacaacctaacacaagtcattgctaagcaactctcgcgtgctcagtattcacattttcttgcttcattctgaccactacactgcacaggagccattattctcaccccccgcctccatttacagatgaggacaccgagacccagagagttttttgttttgttttgttttttgagatggagtcttgctctgtcacccaggctggagtgcaatggcacgatctcagctcactgcaacctctgcctcctgggttcaagagattcccttgcctcagcctcctgagtagctgggactacaggcacctgccaccacacccagctaattttgtattagagatggggtttcaccatgttggccaggctggtctccaactcctgacctcgtgatccacctgcctcagcctcccaaagtgctgggattacaggcatgagccaccgcgcctggcctgttttattttttgttttgtttgtttgttttgttttgttttcagagatagggtctggctttgttttccaggttagggtgcagtggtgcgaccatagctcactgtagcctcaaactcctgggctcaagcaatcctctcgcctcagcctaccaggaactggaactacaaatgcatgccaccatccccagctaatatttttcctttttggaaaaatgaagtctcactatgttgcccaggctggtctcaaactcctgggctcaagtgatcctcctgcagtgctgggattacaggcatgagccactctgcccggccaatctcagagagttttgatgaagttacaaaattctgaccatggagccagaactcaaatctaggtatgtgaggtctgagcccaggcttccaccagggccactgtgctgcaactgccaccacttcctggcacctcaagtgacacccgagcatcattcaagggaaatggcccatatcccggcaattcccccacccgccccactttcttctctgaattagggacttcggcagagacagagccccagcagcctccacccgtcccctcgtgtcggccttgctcacccacggatgagtcagttggaatgtttggacatcccagctcagcggctgtggtaccaggagctgtcaggaggcgggaatgcagagaatgtggctcactgtgctcccgcccgcccaggctgaatccgcagagaggtttggaaggtgaatgacacaatgtttgtcaagggtttgggacgacaggtgcatgtgaagatgaggacaaagactgattcttttcttggggctgccagcacagtttcgcatccctcccacacatgtccgcattccaggcccagacactccgtgccctgggctcctatgaagggcaagaaaccactgattaggaagcaagaagaagaaaaagaaatgtcccaggctcttaaaagaaagagtgtttgacctctttacccaaatgccatcctgaaacacagcttttttgtttttcgttttttttttcttttagagacagggtcttgctctgtcacccaggctggagtgcagtggcacgctcacagctcactgcagcttccaactcctgggctcaagcgatcctcccgcctcagcctcccaaagcactgggattacaggcgtgagccactgcaccaggccctgaaacactgctttgattctgtctctctcctactcagatgcctttgtgcaggccgacaatcttttctggtgtcttctctgtgcggggctgtgtctgggcactgagtagacagtagtgaagaagatgatgatagtccttccccagggagtttcctttctggagagaggttcagataattaaaaagtgagtgcgctcacgcctgtaatcccagcactttgggaggccaaggcggatggatcacaaggtcaggagttcgagaccagcctggccaatatggtgaaaccccgtctctactaaaaatacaaaaattagccagccatgatggtgggcacctgtaatcccagctactcaggaggctgagacaggagaatcgcttgaactcgagaggcggaggttgcagtgagccgagattgcgccattgcactccagcctggacgacagagcgagactctgtctcaaaaaagaaaagtgagtgtgtgattacagatgagcagtgtgggggaggaaacaaactaggtctatgatggaaattaggggaatggggttcctttaaaatgaaatcaaactccgagagctgcgtgctgcctaaatgtgtcacctcactgcccactgaacacaccatatttttctgcctcactgcctcagttcctgtaatctccccatccgggtt

SEQ ID NO: 917 - DNA, 2340 bp, Homo Sapiens
gctctatcaagttttttagaggggaaaaatcttaggctgggaggggaggtgacttgcccagagtcacacagctcttggagggcagaggggaggccaacatctgcccttgtgactctgatattgaagcaaaaatgggtgattttaataatccaacagtgtccaggtttgattctgcttctacaaacacagagacctaagctctcactcctgtagttatactcacaattccacagtgtggcttttgaatctcatgattgcaaagctggcatcatgccacaggtaccattctgcaatgcgaccttctcactcccctgtctcagccatgtttcccattagggacacagcacagcctgtttcttctctatcagctcagaggtctgaacagagggacagaggtgagggccagagacgtgaagtcctatgatctgcctgctcagcctcctgacacgggaccctggcaagtcattcccctcccagggcctcagtttccccacagggcctggcacaagtaggtgctcagactcagggtgagtgagacaacctctgagttccttgtgtctcaaaagaaatctgttgttcccattgggcttcagcagcagcaccctggggccagcctgggtgtggcccggccacaaggacatgccgggctccaggtcacctcccctcctccaccttctttgattccttcaaatttcccaaagagatgggcacccccaacacctacctttcttctggggtcagctggccgtgtctgagggtgtcagaaccagagctgagcccggggagctttgtgaacccatctaagctgttttccccacctctctctacagtttacccgcccagcaggagggagggagcaatcagactcaagcctgggtgcaaatcccggctctgccactgctttcctgtctgatctgaaccagctacctaacctctctgagcttatctacaaaagctgaatgatccttcccttatagagctattgcaagaataaggacatgggggtagatcacactatccccaacttaccaagggatcttcctctgacagagactgagcaagatccaactgttctgagctgtgtggatcccacgtccagctgtgcatctgtgtaataaccagacacgtcctccggcctcccagatataccctggaattcgaaagggaaagtgaaagtcacaacttcccagcagctcatgaccaagcacagtaaacacgctgctccccagcaccacctgcagtccaggcccagcctccttgctgctgcacttagaggagcagccgcagaccagacatccgggtccctctcatccaacccacctgcctcacatcctcaggattcaaggtctgctgtgtcagctgcccatgtctcaggcagtcagaaccagagttgagcctggggagttttttgaacccatctgagccgcttgccccccaacccccgccccgatctctgcagtttaagggcacagcaggtgggggagagaagtcagactcaagcctcagtgcaattccaggctctgcccctgttttactgtctgatctgaactagttacctaacctttctgagctcaagaaagacctgccactgactgaccgtggggctctccagattactccccgtccttccgttcccccacattcctcagatgcctgccttactcccacacatgccatcagcatcagcacagtcccccacacatgctgggtggatgcttattgcatatttattgtaatgcttctgaggttatgttttctgttatgtttttgatatagagtcttgctctgtagcccaggctggagagcagtggcacaatcatagctacttcaagtggcacaatcaagccatcctcccatctcagcttccgagtagctgggattacaggtgcctgccactacacccagctaattttttgtaattttagtagagatggggtttcaccatcttggccaggctggtcttgaactcctgacctcaagtgatccacctgccttggcctcccaaagtgctgggattacaggtgtgagccacggcgcccagcccattgtatccttcttgtgactttgtgtcttcatagcttagctcctactaataaatgagaacatacaatatttggttttccattcctgagttacttcactcagaataatggtgtccaacttcatccagattgttacggatgccattattcccttcctttttacagctgagtaatattccatggcatatacatatataggggtgtgtgtgtgtgtgtgtgtgtgtgtatatacacacacattttcttcatccacttgttggctgatgagcatttaggttggttccatattttttcggtt

SEQ ID NO: 918 - DNA, 2495 bp, Homo Sapiens
ggtcctatgattagtcctgttttacatgggaggaaaccgaggctcagaaaagtgacctggttagtccctttgcctctgcccaatggctcagtgaggacttgctgactgtgagaatgactccagttcagagcatgttctcaggctgtggtgaggctctggtccagggtaggctcggaagcagcctgtcctcagactgatatgatgccagctcccaggtggcaggagcataatggtaccccccagaaaggagggaggcatccagtccgggtccttgagtctttttttgtttgtttgtttaaatagagacaagccttgctctgttgcccaggctggagtctggagtgcagtggaatgactatggcttactgcagccttcacctcctgggctaaagtgatcctctcacctcagcctcttgagtagctgggactacaggcacacaccaccacgcctggctaattttttaattacttctggtagagacagggtctcgctatgttgcccgggctggtcttgaactcctggcctcaagtgattgtcccaccttggcctcccaaagcgctaggatgatagatcacctcccctgcccagctggcccctctgttctcagcctgtgtcaggcatggcctctcccccatcgctgggctgttccccggcccccaggagcctccccctcgctgctcactggactatcgtctgttttggagtctcctttgggtcccaggctccagcccctgcgttggagttggtggcttctccagagcctgtggtgaaggctgtgcctcagggcaggccagggaggggacccatggggacagatcgctgaagcgacaagcattcataatgcagggaccactgctgggctctcagacaagccccagaggaccagttcctggcagtggccacattgccacgtgtctcagagcccaccttgggagacccccttcctggagaaccccaggaagtccccagagcccctgcccgccagcctctgagaggcccagagggggcagagacttacctgaggccactgagctgctctgaatccccccttgcaccatcgggcccaaagactcacccctccatgccgcctggaactgctggtccagcctggaggcgcagcgcagggacaggctgtccccgcctggcaggagcccccctccacggcccgcaggcctggcagctgggacagggctgaatgggaggcattgtcggcagaccaggcaagccaggcttccccaggctgaggtgaagaaggggcgggcggcgggcgggagcagcggctggagttacagggcctcctgcctgccccagccgaggactgaggccccggcctgaatccttgggccagcccgacagggagggggcaccagcagctggcccgggagtcagcagtcctgggctccctcctgccatgtgggctgccctcccagaggctgcttcctagtctctgaaaaacacatcccattaataagtagctctgaggtcacagtgggggttcaggcccgcacctggcacacagtgggtgcttcagaacaggtgaccctttccttccgtttgtgcttacacattgacataaatagtttaatactggacacacaggattctagacactcatttttttcacttaacctcagattactgggagttatccaaattgactcttccgaatctcattattctgtggtatatagtattccattgtgtaaatgtatcacattgacttagccattcatcttggacattggctacctccaattttttgctatttacaaacaatattgcaaagaatatccaaatacgcatcttcccaagctcgtgtttgttttttaaataatacatccagaccatggccaatgttcatgtatcttgatttttcagattcctgcttctgatggaattgcatcttctactgtttgttcctttaattggaaacaggggtcaggcacagtggctcatgcctgtaatcccagcactttgggaggctgaggtgggaggatcacttgagcccaggagtttgagaccagcctgggcaacacagactctgtctcaagagaaaaaaaaaaggccgggcgcggtggctcacgcctgtaatcccagcactttgggaggcggaggcgggtggatcacgaggtcgagatcaagaccatcctggctaacacagtgaaaccctatctctactaaaagtacaaaaaattagccgggtgtggtggcaggcgcctgtagtcccagctacttgggaggctgaggcaggcaaatggcatgaacgcgagagccgagatggcgccactgcactctagcctgggcaacagagtgaaactgtctcaaaaaagaaaaaaaatatatacatatatatatatatatatatatatatatatatatatatatatatatatatgtatgtgtgtgtgtatacacttatgtgtgtatatatttatatataataaaaatataaatgtatatgtttatatatatttatatatgttaaacaatgaac

SEQ ID NO: 919 - DNA, 2492 bp, Homo Sapiens
caaaaacccctcagagcctcctcctttgggcccaggaaagtgccaatcaccctgagcctccctgccccccaccccccacgcagtggaggtcctatgattagtcctgttttacatgggaggaaaccgaggctcagaaaagtgacctggttagtccctttgcctctgcccaatggctcagtgaggacttgctgactgtgagaatgactccagttcagagcatgttctcaggctgtggtgaggctctggtccagggtaggctcggaagcagcctgtcctcagactgatatgatgccagctcccaggtggcaggagcataatggtaccccccagaaaggagggaggcatccagtccgggtccttgagtctttttttgtttgtttgtttaaatagagacaagccttgctctgttgcccaggctggagtctggagtgcagtggaatgactatggcttactgcagccttcacctcctgggctaaagtgatcctctcacctcagcctcttgagtagctgggactacaggcacacaccaccacgcctggctaattttttaattacttctggtagagacagggtctcgctatgttgcccgggctggtcttgaactcctggcctcaagtgattgtcccaccttggcctcccaaagcgctaggatgatagatcacctcccctgcccagctggcccctctgttctcagcctgtgtcaggcatggcctctcccccatcgctgggctgttccccggcccccaggagcctccccctcgctgctcactggactatcgtctgttttggagtctcctttgggtcccaggctccagcccctgcgttggagttggtggcttctccagagcctgtggtgaaggctgtgcctcagggcaggccagggaggggacccatggggacagatcgctgaagcgacaagcattcataatgcagggaccactgctgggctctcagacaagccccagaggaccagttcctggcagtggccacattgccacgtgtctcagagcccaccttgggagacccccttcctggagaaccccaggaagtccccagagcccctgcccgccagcctctgagaggcccagagggggcagagacttacctgaggccactgagctgctctgaatccccccttgcaccatcgggcccaaagactcacccctccatgccgcctggaactgctggtccagcctggaggcgcagcgcagggacaggctgtccccgcctggcaggagcccccctccacggcccgcaggcctggcagctgggacagggctgaatgggaggcattgtcggcagaccaggcaagccaggcttccccaggctgaggtgaagaaggggcgggcggcgggcgggagcagcggctggagttacagggcctcctgcctgccccagccgaggactgaggccccggcctgaatccttgggccagcccgacagggagggggcaccagcagctggcccgggagtcagcagtcctgggctccctcctgccatgtgggctgccctcccagaggctgcttcctagtctctgaaaaacacatcccattaataagtagctctgaggtcacagtgggggttcaggcccgcacctggcacacagtgggtgcttcagaacaggtgaccctttccttccgtttgtgcttacacattgacataaatagtttaatactggacacacaggattctagacactcatttttttcacttaacctcagattactgggagttatccaaattgactcttccgaatctcattattctgtggtatatagtattccattgtgtaaatgtatcacattgacttagccattcatcttggacattggctacctccaattttttgctatttacaaacaatattgcaaagaatatccaaatacgcatcttcccaagctcgtgtttgttttttaaataatacatccagaccatggccaatgttcatgtatcttgatttttcagattcctgcttctgatggaattgcatcttctactgtttgttcctttaattggaaacaggggtcaggcacagtggctcatgcctgtaatcccagcactttgggaggctgaggtgggaggatcacttgagcccaggagtttgagaccagcctgggcaacacagactctgtctcaagagaaaaaaaaaaggccgggcgcggtggctcacgcctgtaatcccagcactttgggaggcggaggcgggtggatcacgaggtcgagatcaagaccatcctggctaacacagtgaaaccctatctctactaaaagtacaaaaaattagccgggtgtggtggcaggcgcctgtagtcccagctacttgggaggctgaggcaggcaaatggcatgaacgcgagagccgagatggcgccactgcactctagcctgggcaacagagtgaaactgtctcaaaaaagaaaaaaaatatatacatatatatatatatatatatatatatatatatatatatatatatatatatgtatgtgtg

SEQ ID NO: 920 - DNA, 2354 bp, Homo Sapiens
aatacccatacctgttaggagctgcagtcactgactggcagcgtttcattcattcactgaatattggttgagcacttgcaatgtgccaggcacgctgctagccaaggaggcagtcattaaacatacagataaacaaacaaatgtgagatgacaatagttatgagtgctctgcagtagacgtgcagggacctgtgagagaatgtagtagggagggccttaatttagggtgtgtggtcagggaaggcctcgctaaagatgtagcttctaagctgagatgcaaaggaggcagtgaagagctttttccagcagagggaacaccatgagcataggccttggggcggacgtcttagaacattctagaaacggaaaggaggccagtgagaaaaagggagctcaggagcagaggctggggaaggctgcagggcctcaggggcattggaggcaggcagggcaaggactctggactttatcctgagcacagggtgatggggcaggagagtttaagcagggagggtgaaactcactctgattggcagccctgtgaaagaggattggctgggcatggagatctaaggatgaggaaaggatatcccagagtgccagggcgcgcaaaccaaacttcacactctaggaagacagaggccagaggaaccaggagggcttcctggaggaggtggcatttactctgggcctaagagatcacaggaaaatggaggccagcattctaggcctggggaagagtttgggcaaaggcttggcagtaagagaataaaggtggggcttgatgggccagaggataagtgactcctcaaggtcacaagacaccctgatggctgggaccccatctctgatggagcaaggcttctgatacccaactgaggcttggcgccaaggactgacatcaaggaagtggattcctgcaaacctggcacccgagggtccacttcctcaatttctgtgcagctgggaggtgaggtaagaggaagtgtgggccacaggctaggcccagagagcctggaggaggagcctctgccagactggagagaagcaggcctgagcctccccaaaggcagctcctggggactcccaggaccacaggctgagacgagacgcagggtggctggaggaagtgagaggtgaactcagcctgggactggctgggcgagactctccacctgctccctgggaccatcgcccaccatggctgtggcccagcagctgcgggccgagaggtgagtgccggggtgtggccgcccccgggccttctcactgctcctcataggccttagggacaaaggccagtccttctgcagtccctgatcaacatgagaggctggggttgagtcagaacccaaatactcagaaatgcaacctctcagaactgctttaacgaaactttgagctgtggctcaccaccctcagacacaaatgagaacactgaggctccaagagtgggagtgacttgcccacggtcacacaacgagtgaccggcagtgtctggagaggaatgcaggtgtcctgggtcccaggctggggccctttgcttcacatggtgatcagcaatgactttccatcttctgcgcaaacagaattcacagaatctggcttgttcttccgctaatcagggcttgcctcaaatgtcacctcctccaagaagccttcctgacagcccctacctcattgctgtctgaccctttgccctatttcccttttctgcctggttcttatattacaggaataatattatatgctcatttattattttttcttgaacgttggctcccccatgagaagcaagctccacgaggctgtgtccgttttgatcgctgctgtatcactaggaggtagctcatccctattgagcaccaggaccaagggctcaataaatgttgctgaatgaatgaataaatgaatgaatgaatgggtggatctttgagacggaaaaggtcttagattcttctagtccaaccttgccattgtacagattggaaatctgaggcccagggaggataagagacttactcagggtcacagagagtgactggcaaggttggggcttggagcacggcctcaccagcatctagcctcgtcgcttgggaagcattttcagaatttttcctcagtagccaggtctgagctctaagctgcgggggccctgaggacgcaaagcctggcccctgcaccccctggattggaacagcaggtgacctctgttacctacgtggaggccactcagggggtcaccagagacaggccaggctggtgtgtgcctacgcggggaacagaaggcccatgttggggcctggggctggaagtagaacctgaagcgtgggttggggcaagggcagcagaag

SEQ ID NO: 921 - DNA, 2282 bp, Homo Sapiens
tgcagtcactgactggcagcgtttcattcattcactgaatattggttgagcacttgcaatgtgccaggcacgctgctagccaaggaggcagtcattaaacatacagataaacaaacaaatgtgagatgacaatagttatgagtgctctgcagtagacgtgcagggacctgtgagagaatgtagtagggagggccttaatttagggtgtgtggtcagggaaggcctcgctaaagatgtagcttctaagctgagatgcaaaggaggcagtgaagagctttttccagcagagggaacaccatgagcataggccttggggcggacgtcttagaacattctagaaacggaaaggaggccagtgagaaaaagggagctcaggagcagaggctggggaaggctgcagggcctcaggggcattggaggcaggcagggcaaggactctggactttatcctgagcacagggtgatggggcaggagagtttaagcagggagggtgaaactcactctgattggcagccctgtgaaagaggattggctgggcatggagatctaaggatgaggaaaggatatcccagagtgccagggcgcgcaaaccaaacttcacactctaggaagacagaggccagaggaaccaggagggcttcctggaggaggtggcatttactctgggcctaagagatcacaggaaaatggaggccagcattctaggcctggggaagagtttgggcaaaggcttggcagtaagagaataaaggtggggcttgatgggccagaggataagtgactcctcaaggtcacaagacaccctgatggctgggaccccatctctgatggagcaaggcttctgatacccaactgaggcttggcgccaaggactgacatcaaggaagtggattcctgcaaacctggcacccgagggtccacttcctcaatttctgtgcagctgggaggtgaggtaagaggaagtgtgggccacaggctaggcccagagagcctggaggaggagcctctgccagactggagagaagcaggcctgagcctccccaaaggcagctcctggggactcccaggaccacaggctgagacgagacgcagggtggctggaggaagtgagaggtgaactcagcctgggactggctgggcgagactctccacctgctccctgggaccatcgcccaccatggctgtggcccagcagctgcgggccgagaggtgagtgccggggtgtggccgcccccgggccttctcactgctcctcataggccttagggacaaaggccagtccttctgcagtccctgatcaacatgagaggctggggttgagtcagaacccaaatactcagaaatgcaacctctcagaactgctttaacgaaactttgagctgtggctcaccaccctcagacacaaatgagaacactgaggctccaagagtgggagtgacttgcccacggtcacacaacgagtgaccggcagtgtctggagaggaatgcaggtgtcctgggtcccaggctggggccctttgcttcacatggtgatcagcaatgactttccatcttctgcgcaaacagaattcacagaatctggcttgttcttccgctaatcagggcttgcctcaaatgtcacctcctccaagaagccttcctgacagcccctacctcattgctgtctgaccctttgccctatttcccttttctgcctggttcttatattacaggaataatattatatgctcatttattattttttcttgaacgttggctcccccatgagaagcaagctccacgaggctgtgtccgttttgatcgctgctgtatcactaggaggtagctcatccctattgagcaccaggaccaagggctcaataaatgttgctgaatgaatgaataaatgaatgaatgaatgggtggatctttgagacggaaaaggtcttagattcttctagtccaaccttgccattgtacagattggaaatctgaggcccagggaggataagagacttactcagggtcacagagagtgactggcaaggttggggcttggagcacggcctcaccagcatctagcctcgtcgcttgggaagcattttcagaatttttcctcagtagccaggtctgagctctaagctgcgggggccctgaggacgcaaagcctggcccctgcaccccctggattggaacagcaggtgacctctgttacctacgtggaggccactcagggggtcaccagagacaggccaggctggtgtgtgcctacgcggggaacagaaggcccatgttggggcct

SEQ ID NO: 922 - DNA, 2398 bp, Homo Sapiens
cagagattaaacggaggcgtgccaagcacagtgccgggtatggagggggagctcaggagagctgccacgtgagctggggaagccaacgacatgatacatctggctccctccagccctgacagcctgcgattctgtgattccgagatcctagaatcatggcacgagattctgagactaacgcccctgcccctgcagccgaccgggaggtcacaggaaggcctccctcctgcctccctgggagtccccaccctctgcctccccagccccagcctcccaagttcatcctgggcagaggatgggcttccaggaccccacccttcgggacatcatccgggccccagcctccttacctgcccatggggtgagggcttccctccttgccgccaggctggttatcattctgctgtcccctctccctgcccagtccccaggtgcccccagggcactcctaactagggtccccacaaggcacccacttctagaccgcttgcgggctcaggttccctcccaggccctcggccacggctgtccacagagcctctcccatctggtctccggccctgacttcccaaccagagcctggtacgtcaccccccatctccaggacacatcctgggggggcaggggcaaggataggggggagaagcttcccagggtgaggaagagaagaggggagcaagggacacagaagccaatagaaatagaggggaaagggggtcgggaggaggtggagaaagagagagagagagaaagagggagggggagagagagagagggagagggagaggagaccgtgagtaggaggaaaggcagaatgagggggagtgatgagagatgcgtgacagggagaagacgagaaggaaagagaggagaggagacacgggtgagagggagagatgcagagagaggcaggagggaggaaggagaatgagggggtggcagggagagtgacagagagggactgtgccacagatggtgacatggagcccgtgaaggagggagtaagcagggaggggctgagggccggagagcaggtgtggggggtgggggcggggtgcaggttaagggaggaggcccggagagggagcaggaggggcgcagaccctgttaccggggagatttcagccacccacgcccgctggccttggctcctgcagggagttggagagaagaatgtgctcagtgctcaggggagccgaggctgccagccagtagccagagcagctcgtgaggccactgcggcacaggtcccccggggcagcagctgtgtcccaaggcaaggctgggtgtggggctggccagcccgggagtccacagtccagccctgcagtcgggcacaccggccgcagcacggaccactggggaggccgggtgggggtcattagtcctgggattggttacatctggagagccccaggcagggtgaggagtggaaggacagaacagagaaccaatattttaggctttgagggcaaaatcattgtgcagtgagaaaacagatttttactattttgtaactgacaaaactcaaaatagaataataataattgaggccagtattttgtaatgtaggtccactcatgagaagaatagagttctttttacagacatcaccttttgcttaattggagtttagagttagtgtttcatcaaaccgattgcaaatgttcatccgtaaaaaccattctcagctcctaggctgtacaaaaacaggcagtgggtgggatttgccccgtgggccatatttactgatctttggtctaagagactctgccgtacagtcctgagcacaggcccagatgtcttgggatgccgtgcccctgcctgtgctgattcctgcctcagcacaggagtgataaggaaaggaacagtcagagacggaagggaaaaggacacacgtcttggctgagcacctactatgtgccaggctgtacctaggctgctttccaaactgggccattccctgggaccagggctggacctcctttgtcactaggtacctggcactgcagagaactggaagttgaatgcatccagaggtgccaccatgcatgcggcagcacacagtaggacacacccacttccagccggagccggcctggtctcttaacgctgcccgtccctttgccttgtgcccgggacaaggcccttgctccaggtctcagcctcccattgtccttgtccgtacaagttcatgaggtgtgggtgggctcctgggagcgtgtcctcagggtcaagggtgggttttccatggcactgaccacccacccctacccacggcttctcactgccctcagaataaagctctctcgccgcagcccacctggcactgcatccttgattcctgccgcctgcgcgggcctcctcctctgctgatttcactcgctcctctgtgccc

SEQ ID NO: 923 - DNA, 2479 bp, Homo Sapiens
tggaagacaagcggacccacctcccagggttgtttgcagagattaaacggaggcgtgccaagcacagtgccgggtatggagggggagctcaggagagctgccacgtgagctggggaagccaacgacatgatacatctggctccctccagccctgacagcctgcgattctgtgattccgagatcctagaatcatggcacgagattctgagactaacgcccctgcccctgcagccgaccgggaggtcacaggaaggcctccctcctgcctccctgggagtccccaccctctgcctccccagccccagcctcccaagttcatcctgggcagaggatgggcttccaggaccccacccttcgggacatcatccgggccccagcctccttacctgcccatggggtgagggcttccctccttgccgccaggctggttatcattctgctgtcccctctccctgcccagtccccaggtgcccccagggcactcctaactagggtccccacaaggcacccacttctagaccgcttgcgggctcaggttccctcccaggccctcggccacggctgtccacagagcctctcccatctggtctccggccctgacttcccaaccagagcctggtacgtcaccccccatctccaggacacatcctgggggggcaggggcaaggataggggggagaagcttcccagggtgaggaagagaagaggggagcaagggacacagaagccaatagaaatagaggggaaagggggtcgggaggaggtggagaaagagagagagagagaaagagggagggggagagagagagagggagagggagaggagaccgtgagtaggaggaaaggcagaatgagggggagtgatgagagatgcgtgacagggagaagacgagaaggaaagagaggagaggagacacgggtgagagggagagatgcagagagaggcaggagggaggaaggagaatgagggggtggcagggagagtgacagagagggactgtgccacagatggtgacatggagcccgtgaaggagggagtaagcagggaggggctgagggccggagagcaggtgtggggggtgggggcggggtgcaggttaagggaggaggcccggagagggagcaggaggggcgcagaccctgttaccggggagatttcagccacccacgcccgctggccttggctcctgcagggagttggagagaagaatgtgctcagtgctcaggggagccgaggctgccagccagtagccagagcagctcgtgaggccactgcggcacaggtcccccggggcagcagctgtgtcccaaggcaaggctgggtgtggggctggccagcccgggagtccacagtccagccctgcagtcgggcacaccggccgcagcacggaccactggggaggccgggtgggggtcattagtcctgggattggttacatctggagagccccaggcagggtgaggagtggaaggacagaacagagaaccaatattttaggctttgagggcaaaatcattgtgcagtgagaaaacagatttttactattttgtaactgacaaaactcaaaatagaataataataattgaggccagtattttgtaatgtaggtccactcatgagaagaatagagttctttttacagacatcaccttttgcttaattggagtttagagttagtgtttcatcaaaccgattgcaaatgttcatccgtaaaaaccattctcagctcctaggctgtacaaaaacaggcagtgggtgggatttgccccgtgggccatatttactgatctttggtctaagagactctgccgtacagtcctgagcacaggcccagatgtcttgggatgccgtgcccctgcctgtgctgattcctgcctcagcacaggagtgataaggaaaggaacagtcagagacggaagggaaaaggacacacgtcttggctgagcacctactatgtgccaggctgtacctaggctgctttccaaactgggccattccctgggaccagggctggacctcctttgtcactaggtacctggcactgcagagaactggaagttgaatgcatccagaggtgccaccatgcatgcggcagcacacagtaggacacacccacttccagccggagccggcctggtctcttaacgctgcccgtccctttgccttgtgcccgggacaaggcccttgctccaggtctcagcctcccattgtccttgtccgtacaagttcatgaggtgtgggtgggctcctgggagcgtgtcctcagggtcaagggtgggttttccatggcactgaccacccacccctacccacggcttctcactgccctcagaataaagctctctcgccgcagcccacctggcactgcatccttgattcctgccgcctgcgcgggcctcctcctctgctgatttcactcgctcctctgtgccccaggcgtacccagcctcatgtattcattcacttattcctgcaggt

SEQ ID NO: 924 - DNA, 2500 bp, Homo Sapiens
tccctgggagttcccccggtgtagtcactgggatggaatgcacacaggtccctggtagaggcccagaccagcaagctgggagggtggggagtgtcttagtctttgtgtgggagtgaatgcgggtggggtgtaggatcaaggatgtggtttagtggggggcctactaggggcttcttagtccccccatttggagaggggtggtgccagcagggctggtttcaggattgggaccaggacacaggtcttagagccccctcacctcccacaaaggaaggtaagctgcaacccctgtgggaagggggctcaagggggctcagccatccgggggactcagcaccaccagacctgtccattccccttggtcagcctcagccatccgggggctcagcacccccagacctgcctgttccccttgtccaccatttccaccaaagcccacaggtgggcctgccccaggattctttttgaaatagcttgcacctctggggccacccacggatgggacctcatgggtatctctgaatccaagtgggagccggaggagggatacagggaggcccactcactgcctgccccaaatctgacaccatctcttatcctctgggccactcccagctgcacacaatccgttggctgggtgggtccaggtgcatgtggcctccacggcacagccacacccgactcctgtgtgtgctccctgcagtgacgcattggccctgcggctggcctgcatcggggacgagatggacgtgagcctcagggccccgcgcctggcccagctctccgaggtggccatgcacaggtagccggcctatgccctatgcctctacacctggggaggggccctgggcggtgggtggaggccctgaacacagcacagggctgggccctgaggaagctctgtgggggatgtgccttgacactggggctatactgaaacccttggctgcttcccgcacctctcctgggagcccccagctcctggcactcgccccctgccacctgtccctggcattcctgggcaacaaagcagagcccagggcccttttctctctcgccgtcctcattgagcccagatggtacatttccaccgtggtcttaagagggggtgctacgtgagctcggatcctagatcctgggggctgggcctctcagcgagtctccggtgggggaatagagtgggcagtggcttgtgagggccctgtagaatgggggtttattttccacgtggccagctctggaagacagggccaaacacccggtgggctggcgggcggctggctggcggaggaagcaggaagttggaatgaatttgaccacaaacagtccataccacgcggcccctgcaggtggaggcgcccacggaaagggccccgggtggctgtggggtgggagggcacaggcccctgctccccacagctgtgatggtgtcatctaagtacaggctgcccctacctgctcctgcagtaatggctttgtccccccatcctctttgtctatagcctgggtctggctttcatctacgaccagactgaggacatcagggatgttcttagaagtttcatggacggtttcaccacacttaaggagaacataatgaggttctggagatccccgaaccccgggtcctgggtaagagccttgagatccctgaccctgacttgcgctgcggccagtgggggctgtcagagccgctccttggggcgccacagtccccaccactccgtatcatcatctgtgtcacctgtgtccacatctgcctgatcccatgggcttttgggtttgagatgcctggttctgagtgcacaaaccagtgcatggtcctgggtctccctctggtccgagagccttcacctggcaggcaggactcccgtctcctggccagggcaggggcctccctgagcagccttcctggtagcctggtcccatggtgtccactcggcaccgcccaccacaagggcagctgactgccctcacctgtgcccaccgggtgtctttgcctgtgtcccgcagactggcaggcccaggccacgctggcctctctggccacgtcctcagggccactttccccctctcctgaactccttccttctctggtcccctcgagctccttcccagtccccaccctcctgggcttccccttggcactccgctgtcacccgtctggccccattgccggggcctgccccgagcctgactcctctgctttgctcccacaggtgtcctgcgaacaggtgctgctggcgctgctgctgctgctggcgctgctgctgccgctgctcagcgggggcctgcacctgctgctcaagtgaggccccggcggctcagggcggggctggccccacccccatgaccactgccctggaggtggcggcctgctgctgttatctttttaactgttttctcatgatgcctttttatatttaaaccccgagatagtgctggaacactgctgaggttttatactcaggttttttgttttttttttattccagttttc

SEQ ID NO: 925 - DNA, 2467 bp, Homo Sapiens
tcttggaggaggcggggcctggccctggccccggatcgccgagaccggccacgctgcgccgcctggacgccgggctcctccacccacagctctgcgaccttcacgagctcgaccctttctgcgcctcagtttcctcatctataaaatggagataatgcctccgcgcgctgagcccgagcgcggtcgtgctgttacactattgctgctgctatgtcgttaatgacggcacagcccttatggaaggggggccaaggaaggcacggggaccttcccgcaggacatggggtgggcaccagccctaagccatgcacataacccactctgaggtcaggacctgggttcctttcgtgtccactgggggccttagccgttgtcttcacttctctaggtcccagcccttcacaatgggcgcgcctccctgcctgagagggaggccccagccaagccccagtttccaccgcaaaaagccacacagcaaacacttaatggaccctaaatttataaaaattatcccatagagtcctatgaggcagggaatgttactgtacccatttcgcagatgaggaaacttggggcaccgacatttcccagagccaacatgtaaaccaggcatttggcctgagtgacagactggtgcaggtggccagcagcttaatttgtactgagcgcttactgggtccccacagcgatcctgaactgtgttcctgcccacagtgactcggccggtccgggcatggcagacccagtggcgggcatcgcgggctcggcggccaagagcgtgcggccatttcgctccagtgaggcctacgtggaggccatgaaggaggacctggccgagtggctcaatgccttgtacggcctgggtctcccgggtggtggcgatggcttcctgacagggctggccacgggcacgaccctgtgccaacatgccaacgccgtgaccgaggctgcccgtgcattggcagccgcccgcccggcccgaggtgtggccttccaggcgcacagtgtagtgcctggctccttcatggcgcgcgacaacgtggccaccttcatcggctggtgccgcgtggagctgggtgtgccggaggtgctcatgtttgagactgaggacctggtgctgcgcaagaacgagaagagcgtggtgctgtgcctgctggaggtggcgcggcgtggggcacgcctgggcctgctggccccacgcctcgtgcagtttgagcaggagattgagcgggagctgcgtgctgcacccccagcccccaacgcccctgccgctggggaggacaccactgaaaccgcccccgcaccagggactcctgcccgcggcccccgcatgacacccagcgacctgcgcaacctcgacgagctggtgagtcccccagcaccaggtgccagggacccgacagcacagccagtgcctgcaatctgtccctgaacctcccagggtccaccctgctatctgcagaacagtctgccccacaaaaagagtgcacatgttgagcaccaaaccgaggaatgtatacctgaccccaaggaaatgggtagcccacagagagggaggtgccggggagatgacgcagcccagccgggcctgggacaggatgcgggctcctggcacgatcttccctcactttgtgtgctaactgtgcctcaactgagcttgtgcattccttcttctggggggccgcatgatcggggcgcctcctctgtgccctccctgcagtcagtcttaggcagatgtacccacaacctcatggaggctcgaggttgagcgggtgctgtgatgctcggttgagacgaggcatggaaaaacctgggcaaggtgcctggcacacagtaggtgccccagggggctctgcaggtctccccactccccaggcacccctgggaagcctagctgggttgctgctgttgctgggagcagggatcctgtttggaattacaggattcgttctactctaagcataggcgttgctgggccctgcccccaagtctctcctctcccaggatctgggtggcccctgccacccctgagggctggaccaagagtttccttcttatcagaaggtcaggactacaatgtgcctgcctgggaggcagatagcggatggcagtgggcagagcctggggccccaccccctgtcctggaccagggtcactcaaggccccacctgcttatttcctctggcggcaccactgccgctgtgggcggggaggcgggcagggctgcccacatagccagcttggcagcgctctggctctggtggggggctgtatgtggtgcgtgctcacccggccagtggtctgtgtgtgcatgtgtccgatgtgtctgtggtacgcctccacatcagtgcccacccaggggcatggggccccctgcacctgtgtcctgtagcctgcctggccttcctgtgggccccagccttcttgtctgagaagtgggtgaagcgggagtgaggacgggctctgg

SEQ ID NO: 926 - DNA, 2385 bp, Homo Sapiens
tgtggctgtgtgggtatcacacatgtgacaatccatcaagctgtgtctacttacggtctgtcctcactgtaggtaagtcataccttcacaagaccgtttggaaagagatactatttactaggcaagaaaaaccaccaaatggctagaaaaacatctaatgaatgacatgccagacttgccagaccttctatcctgaaaaccactgaggaaagtcaaagaacccggttaaatgaaccagatctggatcatggttggaaaactttatttaaaaaaaaagtcggccaggtgcggtggctcacgcctgtaatcccagcacttagggaggccgaggtgggtggatcacctgaggtcaggagttcgagattagcctgaccaatatgatgaaaccccatctctactaaaaatacaaaaaaattagctgggcgtggtggtgcgcgcctgtagtcccagctactcagggggctgaggcaggagaatcgcttgaacccaggaggtggatgttgcagtgagctgagattgtgccactgcactccagcctgggagacagaacgggactccgtctcaaaaaaaaaaaaaatctgctgggcgtggtggctcacgcctgtaatcccaacactttgggaggccaaggtgcgtggattgcctgagcttaggagtttccaaccagcctggccaacatggtgaaactctgtctctactaaaatacaaaatattaactgggcatggtggtgggcgcctgtggtcccagctactcaggaggctgaggcaggagaattgcttgaacccgggatatggaggttgcagtgagccaagatcgagccactgcactccagcctgggcaacagaatgagactccgtctcaaaaaaaaaaaaaaaaaaggatgtccgttctccccaagatctgcagattcaaggtgatcccagtcaaagtcccagcagtttgctgttcttaagccaacaagctccaagggccagcacgcacttcctgtcctgctggccggactgggcctggtgaccctgtcgccgcaggccttttgcagcacaggctctgagagcaacggtgcggttgcctgactgtcacggaacaaacacacaccaggcgagcactagcctgaggccgaggggcacatggagctggcctgagcccagccaggagtctggaagcaagcccagctcctcccggccgtgccctcgagggcctgaccgcgaaacgctcgtacgcacgggttggagttgtttgccacgcgtggcaactgcggcaggaacctgactcacgcacggacgccagcacccacaagtgagaggcgcctcagacacgtggtgtcggctttggaagcagctggtgggtggtgaggaaatgtcacagctctggaaagacagaggcctctgtaaggtggtgtcaaaatgccaggttgaatcaacagtcatctgcggggactctgaaggcaggcaatccgcccagtgaactggcagcaccgggcaggagggtctggagggagaaccctggtggcatggctggtgtgtgaggatcaaaggcagaggagatctttcctcttcagcatggtaatttggcactgggctaagcctccagctgcctcccgctggtgacctggtaaaggggaacataaactcctttggtcggcaacattgcttacggcaacactgccctgtggcaggcagaccacgtggggactggggagtcattggtgtctgggaggccacgtcactggccttcctgagtgatccccacacctgggaatgtgccctgcgggccatagccgcgggattgctgcaggaggaacttcgcctcccgtggggcaagaggcatctccgtgagtgggtcccagcccctgaatcgcagtgggaatcagggaggcggcaacacctgcgtgccgtcataaagacccccaccatgccctcgtaaagacccccatcacaccgtcctgaagacccccacataccctcgtaaagaccccatcacaccatcctaaagacccccacacacactcgtaaagaccccatcacaccatcctgaagaccccacacaccctcgtaaagaccccatcacaccgtcctaaagacccccacataccctcgtaaagaccccatcacaccgtcctgaagaccccacacaccctcgtaaagacccccatcacgctgtcctaaagacccccacataccctcgtaaagacccccatcacaccatcctaaagaccccacataccctcgtaaagacccccatcacaccgtcctgaagacccccacacaccctcgtaaagaccccatcacaccgtcctgaagacccccacacacactcgtaaagaccccatcacaccatcctgaagaccccacacaccctcgtaaagaccccatcacaccgtcctg

SEQ ID NO: 927 - DNA, 2500 bp, Homo Sapiens
aatcttttggtctcttggagatcctcctgcaccttctaccactctaagcctctagacccaatctctacccaactgtggctggcaagggggagggcagcggaagagagccgggctcctctgacaaagccctaattttctggaacccagatgctcctcactcttgttctcatcttcttgcttccccccaacctcctgaccactcctcaaagtgtaggtgatccaccactgtcaccagggtcaggggaagtcctctggacagagagtatgggagtcctgggttctggccctggctctgctaccaacttctatgtgacctttgtgattcctttgcctttctgggcctgtctcttggtcagtctagcgagaatcaggtgactgctaccggctcacatctcctggagtccctggtctctttcagagctgctctggcactcccgggtgggagtgggggactgtcttgttccacacatccccaggaggcctggctgaaccccagacctgagtcgagggtgggataattgctccctgcgggggatgtttttcctagaggtgtgggctggtcccagggaacctgggactctgagggcccctgggcaggaaggaggccaaggtttccttctggccagagtgctcagctccagctctggggcagtggggaagaggttgctcaacgttggggtggggccctggcagggaagatggcgccgaactgggagagggaggaaagagatcagcttggtgactctggggcagggcaggagggggagccccttactgtgtgtcctctccctaggaggatgaagaagcccccaactcaaaggagggtggcgtcagaaagtcccagggaagagccctaggataggatgaggtcccgcagcagcagatttgtcccgcagttcttcatccctcactcttccaaagactctcatctgaattccgttttctttaaacctcccctgagttctccatctgactgcctcagtttccctgaatctccagccaaccctttggttctttccaagcgtttccctcgtatcctcctgaccacagcagctggtggcatagtgtgcgtatctgtgggcaggagttagtgaaggcctccttccctccctccaaagccccaggccccacggtctgccacccgcaaaattccaaccacgagggggcgccttcctgcccgccgccccgtagggagacccggcctaggccgctggagttccgagttccagggtccttgtgatggaagggcgggcgcggcccccacacctggtcttccagccctatccaaggaggactgccagacagtcccgctctgaggtgcaggaggccgggccgcctcggctaccctgaatccacccgaagctagagggcccgagcccggggggcggtcgggtgctcacctccagagcttgcccagcgtcttgctgagctcagcgttgtgcaggtgcgggtactggtccgcgagcttcctgcgcgctgcctgagcccacaccatgaaggcgttcatgggccgcttgacgtgcggcttgcttttgctggcgccgttgacgcgcacgggcatgggcaccagcgtccagtcgtagccgctgagcacctggctgacggcctcgcggatgcacacggggaacttgtcatcgtccgcctcgccgtcctgctgctccttcttgaccttgcccagctcgcctggccccgggctggctcgcaggcccgatccgccgccgccgccgtcgggccctagcgagggcgcgctccccggggacaggcagcggggctcctccgagcccacggggctcagctccacctccgataggtcctgctcctccgccatgtcgcccccggccgccgccgccgccgcctcggccgcctcccccgggccagccgccggggtcctcgcaaagagtccaacgcccacctggatggaaggagggcgcgatggagcggccgcgcgcgcagccccgagggcggcccgagacaggacgtgggcacagccccgaggtggcggcccttcctgctccagctaaacccatctggcccctggggcccacgcacatgccagactctaggtgggtgcgtcccgcctctgtgtcttcccaccacctggtcccaaccgtctcttggtgtgggtggctttttttttagcctccttttttgggtggaggtttgttgatgataaggaagaaaaaaacggagcctttattttgctctaatcccggcccctggaatttcccaccttttctctcacctttccttcttccctcagcctgccccaacggggtttagaggagagccaggtggggggcaagggcggggtgtcgcctctctccacctcacagcagggtcccaggcctgggcgggccagggaggagcaggctgcgcactcacctcctcggacctctcctccagtctggggctcgtccttaggaagtggaaaaccgtgtcccaaggtgtgcggtccagctcggggctgggaggtgacgctggtgggctgggagggaggggc

SEQ ID NO: 928 - DNA, 2402 bp, Homo Sapiens
tcctgcctcccggcctggtccccgaagaccccagaagaacccggaacttgcttccattcggaatccagggaccaccctttgcactcagtaggcctttgttttcctgcgtggaaagcggttgggtgagttctggcatcggggccaccatacttgagtgttgggggtcacggagggaggggcccagacaccacctgggaaggatcccagagtgcagtcccagcccaggccacccggggaagggagtcggtaaagtgggaccttgagtccccacggcccctccggctgcccctgctcagaggctgctcggcgtcctccctccctgttctactgaggagttgccgcctctgaacttcagccaacccctccgtctccaggtgaagaaactgaggccctggggccaggaaggggcttgcccaggctgctgatccctttgggcagcatcgagtccaggccctccttgtaaccatgcatcaggaccagagagggcagggggtttgcccaacgtcacacagcctgagtgaggaggagctggcctgggacccaggcttcctgacgcccaggccaggctctttcgttttctctggccatggccctcagcttggatattaaggggctgggagtcagttgtgtccccaccacctccatgctacagggcaggatggagtctggcatcccccgccccaggctggctgctggtgtgacatgggtggctccagtcgagtgaatgcctccgtctcccacagctcagggggctccctgctctggccaccaacttctgccatgtgactcccctacctcaatgtctgattgagtttgaaaacactgagaagacccaggggctgaaaagggaggaagagggaggccagaaggcgccagccgagccagcgaagccttcacaggagaggaagtgggccaggggaacaggaaggagggctgggctggcctctgggtctgcccctgtcccgggcatgtggtgagcccagccttctgcctgtaatgaggaggaggaagatgaacagtgcctctgtcaaccctggcccttccggtttatgggatgggagatgtcaccattccacgtatccacctcagccagccccacacaggccgaccggggaggtttcccttgagctcaacctgacaagctctgaggagtgagctgtacctactttgtcctgtctgggatagggtggggggtccctgggtagggggctgggggctgcaggagcacggtgggcggccgctctgcacctgcctgaggaaggaccacttcctccgccaagcctttgcttggctgtgcccgccctcagcttctgtgcctttttctaacccgtcaccccgcaagggttggctcaagggctctttctcacagggcccgtaccccctgcctaggctggcatgctgacgtgtccccagaacctggcttctaccctccttctgtgcctccaggtctagagaaaatgaggggctcagtgagtttggggcttctcagaccgtgacgccctctcctgcctcctctgtgcaggcttgggaggcgatggagccggagttcttgtacgacctgctgcagctccccaagggggtggagcccccagcggaggaggagctctcaaaaggtgtgtgcccacgcaggtctgagggtggagggtgaaggtctgtgtggcaagagtgagcctggccatgcctgggacttgcagcaccttcccagctgtcagctgagcgcccaattctgctcacccctgcctccaccttctgctttatgcttgacctaactcctcctcctgggaccttctacagagctagaacctcttctctccagatgagagacggtgtggattacgatggtgaatactgattgctctcatcctgtgagccttctgagtgcccctactgcaccagcacctcttaccaatagcaactcatttattctcaagggcgggcatcagtgcctgctttatacagatgaggaaactgaggcacaaggggtgacgtgccacagtaacaggaaactcttagcaagtggtggacctgggttctgagcccaaggagggtggtcccagaactgaggttccacacggaccacgcagcgatgcccaccatggagtgatactttgcagggtgtggggctcctgacgtgctcccctcacacgtgtgggtccctttcaaaagtggggtgagcataggatggagcaattcaacgactataggtcgccctttcagtaaagctctgtgtcatgagccctttggggggttggcggccacagttcctgcaacctcccttctaggagatggctcaaaagaaggacatgggcaggtacccagagctgtcaccctctctgtgttctctgaaagaaacaaatgaacaacagcttgcaaggaagcagcgagatgtcccagtggggaag

SEQ ID NO: 929 - DNA, 2439 bp, Homo Sapiens
gagatgcagtaggaggcacagcctcacttgctgctggagggagtcaggtgagacttccccacacagggagtaggcggaacagcagcgtgggaagggggctggcactggagccagccggacccggttcaaatccaggctgtgccgcttcctggctctgtgaccttgagcaagtcctttcactaatctgagtctcagagtctgtatttgcaaatgagggcttggcgtatggtgctttggtgaggattagaagacatgatgtttaacctatgtgtctcttgataataatatcaacaatggctactgatgacacaagttgtgagcagtgtgctagggactgtacatgtttgaaactgtgtcttaaactcaccgggccaggtacggtggctcacgcctgtaatcccagcactttgggaggccgaggcgggcagatcacctgaggtcaggagttcgagaccagccgggtcaacatggtgaaaccccatctctactaaaaatacaaaaattagctgggtgtggtggcacgagcctgtaatcccagctacccgggaagctgaggcaggagaatcgctggaacccgggaggcagaggctgcaaggagccgagatcacaccactgcactccagcctgggcaacaagggtgagactccatctcaaaaaaaaaaaaaaaaaaaacaacttatcaaatcctcataacccagtgtttcttggccccggccctaccgatgttttaggctaggtaattctttgctggggactgtcctgtgccctgcagggcgtttgacagcatccctggcctctacacaccagatgccaataaatccccactaattgtgacaaccagaaatatttcctagacatggccagatgtttctagggggtcagaatcaccccccattgagaaccacagtcataacccaatgaagtaggtacaccgagcactaaaaggacttatccacgtcaaagagccagcaatggtggctctgggacacaggctggctggctactacattgcaaaagctgccccttcccttgcctccccgacccatctccccagggcctaccgccagctgcaggtcacggctgcgaagtacagccgagttcttctcctcactgagctgtgccaggcgcatggcgatcatgtagttctcatccttgagccgcagcagctccaggctgcccgcctcccagtcctcccgcagccgttgacagcgctcctgagcctgctgctggtcccgcagccgctgctccagccctgcccgctcctcctcgagcacccggccccgggcctgcagttgctgctcccgctgcagctggctcttgcgagcttcccgcagccgtcgcacctctgtcatcaagaattgggtcaggccctcaggcccctcctcatctgccaggacagaacaggggacagaataggcagctcaggcaagtaaaatccaggagataacatactgtgtcaaaaaactcaaaccataaaaacactagagggaaattctggaatatatttgtagaattgggagcaggggaggtcttcctaaacaacacacaaaatccaggagttataagagaaaaaagatggacaaatccatataaaaatgtttaaacctttgaaaaatgaaagatgtaacaaagttaataagcaacagagtgggagaaaatataacaagaactcagagccgtaatatataaagagctcctacaaatcaataagatcaacaaccaaataaaaatatggacaaaaactatcaataggcaagtcccaaaataaaaatagttaataaatacaggaaaatatgcaccaacctatcaacaataattacagtagctactaatatttgttaacttcattctttgtgctagatatatcttaatctttatgacaacactgtaaggtaggtactattattgtacccatcttaaagacagaaaaactgaagcacagagcagttatttacccaaggtttaataactagtaacctgtgaactgtatcactcaatgaaatataaacttaaaacaataacattattttttacatatcagaatggtaaaaacgtttaaacatgatccccaggattcaaatgggcccttacacattcctggtaggaggtatgttgatttaacagttaaaatacacagactctttgagaaattcttctcagaacctcttcgcctgagacacatttgcacaaagacgcacatacaaggatgttcccgtatcgttgtaataatacaaaactggaaacctaggtatccatcaactggaaatgggttaaatgaattatgtcctaacttcactaatgaacagtatgcagtcacttaaaacaagtgtatgtaacagaggtgaaagaatcactaaaatcagttgttctaagaaaaagcaaaatacacacgtaggcgtgtgtgcgtgtgtgtatgtgtttgtgttttttatataaaaa

SEQ ID NO: 930 - DNA, 2451 bp, Homo Sapiens
ctgaggttgggagttcgagaccagactgaccaacgtggagaaaccctgtctctactaaaaatacaaaattagctgggtgtggtgggacatgcctgtaatcccagctactcgggaggctgaagcaggagaatagcttgaacctgggaggtggaggttgtggtgagccgagatcgtgccattgcactccagcctgggcaaaaagagcaaaactccgtctcaaaaaaaacttagccaggcatggtggcgtgcacctgtaatcccagctactcgggaggctgaggcaggagaattgcttgaactcaggaggcgcaggttgcagtgagccacgattgtgccactgcactccagcctgggtgacagagcgagactccatctcaaaaaacaaaacaaaacaaaaccatactgatctcacaccggtctttcattttatgctcactattctgcaagttctgatacaaagacaagtcttgtccccgttttgctaggattttcattcctgaatgtttaagtatgtcctggaagcttctaggggcaggaaagggtttggaaacagaccttcccctgtgtaatccttgctttagggcagatagacttcttccatcagaagccttctctagtcccaacccaggcctgtgatgcagcagggcgcgccaccacttgccagagccatggtggctcggggtgcccagcccaggtccccccagctactgctccatgtaagtcattgtcttgtgcctctttagggaggggctggagacaggtctgaggaggaggcgtcatccacggagaaaccaaccaaagccttgcccaggaagtccagagaccccctgctctctcagcggtgagtcttggcctgctgcctccccggtcccacccctcctggctggcagtagtgacctggcccttagggtggtgtggagcaggtgtagggcccggagcagccctctgcctgtccagtgatcctctgcctctcctcattgccccgtcctgtcccacccacccctgatagtgtctgacctccagtgcttttcgtgcctgggtgaagggcctgtgtctctgagctgagttgctggcaggcactctggaggtagagcaggccaactctggcatgaacttggcggtcctggcattcgcaacctgtcctgacatcccctccgtgagccaggtggtgagtcaccccacaatgcaatcttaaactgaggctttctgccctcccctaggatctcctccctcacagcatcactacatgcacacagccgcaaaaaggtcaagaggaaacatccccgacgggcccaggactccaaaaagcccccaagggcccctcgtaccagcaaggcccagcgccgccgtctcacaggcaaagcacggcacagcggggagtgagaccgagaacgaagcggtgccccagtctaggctgcggggacctgtccttgctcagcttggctgtccctgtagcccagcctgcacctaggtaatgactgcacagctcaaggttgggaagccaggacctctctggcctggggccagctgcctttgcctggggtcagctgcctttgcctggggtttgaattcccgaaggagcaggcagctgagagcaggcctcccccaggaagagccttcagagccacgtgggggcatcttcccaaatgtgcaccccacctggcactcatcagatttgtgcgcttgtgatttgtttgtccttgataccacgcacaagggcaggtttttggggtggtggaaatggccagggcccatgggtctgtctccagcagttagccctgtggctgcaataaagtacagttctccctgtgttaagatcctaaccagggttaaggatcagtgtgtccgttgctagaatccagagcccacctgctgctctgaaaagcaggctcctgaggccagtgggggagcagtgccccccatgcccttcaccgaggagcctctgtgcctgtcccttgtcctcggccccaggagtctcctcaactgacactgaagtggtggaagcagttgagtgccaggtcatcccccatcaccacactggggcagcgtccccaggcttccagcagctcccaggtgggtcccaacgtggaaggattaattaattctttctaaagcagttgcagccgggcttggtggctcacgcctgtaatcccagcactttgggaggcccaggcgggcagatcacttaaggtcgggagctcgagaccagcctggccaacatggtgaaaccctgtctctactaaaaatgcaaaaattagccaggtgtggtggcacacgcgtgtaatcccagctacttgggaggctgaggtggaagaatcacttgaaccctggaggcggaggctgcagtgagccgagatcacgccattgcactccagcctgggcaacgttgtgaccttgtctcaaaaaaaaactaaaaaataaagcagttgcatcttgactcgtacaaaagta

SEQ ID NO: 931 - DNA, 2384 bp, Homo Sapiens
ggggcccctggaatcacccaactgcagctcccacccccacacctagccctccaggaggtcctgccaggcctgtctccaaaaacggccgctccaggtccccacagccttcctgcagcagtgagcaaacagtgaaacagtatttcccagcccagaggccaccatggcctccctcctgccgagcccagagcagtgccctgtggtaatgcactgagggccactcctcatcctccctgtgacaagggccactgccgtgtgtacctctaggttatcccgagtcaaatcagtgatgaccaacctctttcttacttcaccctcccctgtggctcacctgcctggatactcccccaaatctcaccgcctgagcccactgttcccatcacgtcctgatggtgcgtcaggcctccctcaacatgtccccatgcccaccagggactcatggctacctggaagaaggcgtgtggagagatccggaaggtcagccctagcaggtcctcgtggatgcaccggtccccagccacatgctccaggggcaggccctcctggctaggagtctttctgtgggcgaaggtgcaggtccttcagtgtcacagtccctgcagggacctgccccgccccactcgggctccttaccgctgtccctcctccacgaagtagaggcaggtcactccactggccctgcctggccctgctgtgaagtgctgcgctagggaggtcttcagctctgccagctcctcagggctcagcttctggagtaagtggtgaaaagttcccatcaggctgtgctgaggcccacctaggctaggcaccctcccccagcagggcccccgttgagacctgggggtggaagtaggcaatggccatggcctggtggcggcggctggtgcgcacagtcagctgcttccagtggcctgtgtacgtctctgggtcgtatgccgagtatggagtggacctgtgggaatcacgagctggcccaagtgcccacaactgggcaagcagtccccctgctctctcctctggccacaccttccttcatctggctgaaatggcaggcactccagaattcccggggcaggatcaccaccctctgctcccacaccgcataggacttcccgggagccccgtcacaggtcctcaccggatgaactcctggaaggccttcaccacctgcttggtggcttcggggatgtgcacggtgtcaaacggggctgccacagcacacgtcccgcccttgtacttgccgagccgacagcccacggtgttatcctccccatccaccccgacgccaaccagaaactcacacttattacgatactcagtctgcagggagagagagctgcaccttaccctggctgcccagcgcttgggcctggaaaccctgatttccccacaggggctggcagtcaaacaagaggaacagctgacaactatgtgatgttaccagaagaaaacacaaagcagggagatcaacaggaagggtgagcaaaagcaaagtttttcaaaacccaggataggggtttgtggccaccgaagtctagtctgacctgctggggtgatggcctgaccccctccagcgggcagcaggccttgttgtgcttgtgcctctgctcgagcagccagggcagcaaggcacggttggtgctcccgatttccctgtaagaggagcagatcggtggttggactccacctactgcccccgacccatgccaggccactccccaaatgtccaggctcctgacccctcctttgggatgtcattgtgcccactgtgacgtgggtgtcttgctggctagctcccaaaggggccgccagatcctgtgctgggcctcccaactggtgcatggacaggctgaggaagcacaggccgggcagagccctggccaagaggggcgtcttgcgcccacactcacttggcaagtttctgcagcacctgctcgcactccagctgcttccgctcaagctgctcagcatagggcactgtccatagaggggtcaccacgtcggccactcgtgttactggtggctcactctcaccctcctgtcgcctcctcctggccatggggtcggccttgggccgggccaggcgcacactgagtgggcggcctttccagagggcaccatgcaaaacgcgcagggccttgtccctctctgcagcgctgcggaatgtcacaaaggcgcagggtggttgcccaaagagtttggttttgtggggctgcagaccaaagcggcccaggaagcgccggacgtcgctgaagctggcgtggcgaggcacgttctgcagctccagtttaaagatctcagaggtaaacaagtcatccctgatgtagctgtagagcccgggctgaggccccggccctgtagccgccccagcgccctctttctccacc

SEQ ID NO: 932 - DNA, 2499 bp, Homo Sapiens
gacctccagcccatccccagagcatggacgcttttggccttgccaccaaggtccctcctctctctaagaggctgcccttccaccaccccaaatcctttccaagacaaccgtgagacacagagggtttagaaaccaggcaagttttaaatataagtttgcacaatattaacattaaatatacatcataaataaggcttataaatataaaactgataaaaattgataaaaatcgataaattagtcatgtccctccaaggaactggcctcgcagtttctgagaccccctctaggagagcaatggctcctgcgtgagaaaattccaggatccaccaccagggggagcagccagcagcgaggacccaagacgggcttcccggcgctgggaggtgggtctgcttttacagagacctccgtgtacacctcccagcgccatttgcaccacctgtcctgatttacagatttttaatatccaccttacgtcagggaatccaagcaaccgacaggcagtgggggccttgtacagcctctaactccctagcttcacaaagagaaaacaggtccacagaggtaaagtgacctgccccaggccacgtggcgacttcggggctggcctgggacctgagctccattccctggacccccggatcagggctcctgggacaccctgccgctgttacagctgcctaaagtgaggtcacccagacatccaggtgtctggtttgggacatgatgaggcataggaggccagctcaggctgtgacctccccttcagaaacacggaaaggaggaagtctgggggcaacggccctgcaagtcatgagagggaaggaccggcaggcctcggggagcaaggcaggggggcagtcagcccggccatgagtcagcctgtgtcatcagacccctgaatcaatggaaagtcggtcccgcgtggcccgcccggccaccccactgggcctggggaacttggggctgaggtgggagcgcaacagcctgactctgtctcccagcctggaggaggtagaggggtctgcccagctcccacctcttaaagtgcacttctcagtggctagtagcagaggggaacaggtttggggacccgggagctgtcatcctgcgatggttcctctcatccacagagcacctgccgcatccttcaccggcaaggggtgctctcgaggctaccggggcagctgtcccctggtcatgagtctcttgcctttcctggagggtctggtcctgcgcacccccttcctcagggcctggtgggggctgtgtctccggctccggttcgggctctccccccacttgctgaagacccgccccactgagtgcatgaagcgatggtagccatgcaggaacctgcagccctccagcttgcgctgaaaagcatccgaggcaggggtgggggtgggcggctgagaggccccccggccagccttcgtgggctcagccgtgtctgagttgtccagcagctgggccatgcagtagatgttgttcctgagcccgaggatgttcggcctcgccatctgcagcttctccaagtcctcgatgttcagcccagacctctccaaatcctgggccttggggaggcgctgctctaagtcggccagtctgtgcaggacgcagcccagtgtggcattgagggtctgcaggaagccccgcctgcccagccccctcagggtctcctcactggggaaggccccggggcgctccctgcagtgctctctcagtttaggaacatccaggccttggatacgtatctggcgggaacaggaggatcacagggtgaatgctgaggatccggaccacactcacagacaagtaagccttgaaatgctagacctcatgcaccccaatccaatctcccactggacagatccggaaactgaggcccgagagggaagaggaccccaagatcactgcaggcaaggtcggagtgatgttggggggctggtgggatgcccgtggggaatgaagagcttcaagagggctggactctgtcttgctcactgctacgtcccagtgcctagaccagagcctggcaggtgtgcaggaaacacactgagtaagcaggtgagcatggtgatggtgtccggagtcccgccccgggaccacagagctaggaaagctggagggccagccttagctcctcagggttaaggctggaataacatagcgactcagttccccgacctggccatatggagtggggctaggcctgtcctccctgcttctcactcccttcctaaccccatagttctctgagactcagatgccacaagggcccaggtgcttacataggggtccaggagtctgctggtgtcctgcatgagatctgtctgcttctggagctggccaaggagcacgcggtactctttcgagcagctgcctatagccgccatgctcgccatgcttggaaacaggagtgcaaggaccagacctaaggcagagaagaggggtgtcacctgacttggtgaggaaagccacagatgggagcct

SEQ ID NO: 933 - DNA, 2455 bp, Homo Sapiens
gctgcttctgcaatgacattacatgaaataatctgaaatacgatcttaactgtatctggtgggtcccgttaaccctgtaagttatggacagaacatttactcaaattgtagccaagtctaggctcatgggaacacgtgaccaattcaggtgaatgaaagggactttaaaacattaatttccagcttaggtcttcctaagactgcctgcatgttccttaacaccactccagcctgagtgtcacgtggatcctgaatgcggacttgtgtgcacactgctgaaaaataagcaactgaaaaccccaggcagcggggtggagtgatgatgaaagacaccgagacctatcgggaagctggaaattcccccccagcttcggtgtttgggctgtatctcgcttttccacttccctaaatcacccccgtggtgcgagtgtgctcgcagcagatgctccctaattgtctcttgtatttgtagcaggatgagcagcaaacaaaactcctcagacaccgagttaaagaaggaaggggtttattcagccgggggcatcggcaagactcccgtctcaagagccgagctccccgagtgagcaattcctgtgccttcaactctaagtgggtgcgtgtgagagggtcgtgattgattgagcaagctgggggtaagtgactgggagctgcacgcactgctaagtagatcggaacaaaacaggatagggatttcacaatgcttttctatacaatgtttgtaatctctagataacataaccgattaggtcaggggtcgatctttaactaccaggcccagggtgtggcgctgggctgtcggcttgtggatttcatttctgccttttagtttttactttttctttctttggtcgcagaaactaggtataagacaatatgagaggtggtctcctcccttatattgacagtaaaaccccaagggcaggaatactcttatttctcaacaccatttcaacaaccaaactaaaacctctcacctgagtgtaagggagtggtgaccttcttaagccgggagctcttccatcagggggttccctaagggcatctctgttcctagcgggggagccgtcaccccactttgctctgcttagcctgagacacgcaattttctccagcttttactcttcgctgaattctcaaggcggggttggggggatgttcaggctcaggaaggaggttgggggcccggccgctggacgctgttcaccggtagcccggaccagagcaggagtttcatcaccacctgcggggacaggtgggacacatgcatttccggggccatcctagacctcctggaggatgctgattgacactgtccagtttgagaactactgtgtccccggagcagaggcctccccattgcccttgggtagcgggcgtcgggcacagggcttctccggatgagcggggcgggcatgagagcacatggaactgggggcgggaggtcggggcagccaaggaggagaaggaggaggcggagggggagggaggggaggaagaagaggaggaggagtcctttgtggccacccggaggggagagacttggttgggaggcgccaaccgagctggccgctgggactctgcacccaggtgcgccaacccttgggcgcacgctccccgcagaccctcgctgaaggagcggtgggcggcgcgccgcgaccctggcgggctacagattacaccgcttgcagggcgctgctggggcgcgcagagcggggctgccccagggtggctcccccaggttggggcgcggcgggcggcggccgcgggcgcgcgtcccatccgggtcccgagtaaccgccaccgccgctgccaaagctcgccaacatggtggacctggaggccgtggtggccgatgtcagttacctgatggccatggagaagagcaaggcgaccccggccgaccacgcctgcaagaggaccgtcctgcccgaacccacgtaccacctgccccggcccgcgccggtccccgacgccgccgccccctgcggccgccagcgaccccctgcgtccgggagaatcgggagctgagccgtcgctgtcccggagcgggtgacacagcggagcgggcgatgcggggccggcctcctggctccagtctctgaaatggggcatcggagggcgggtggggggcactccgggagagagcgctccaaagtgcctggcgccgcgccctgcgcgcagctagcaccccagcaaggggctggttatgacttggctggaccagttccatccctgtcgccccctcccccagccctgtcctctcctgtcccatccccgtggttctacctgttgcattggtgtggtccctttgggctccttgcctgtcactcgtttgcgctccatcctggtcgctccttcttcccgggctctgtggttcccctttccaactccatcctttcagctccctctgggccgattatctggggactgcagg

SEQ ID NO: 934 - DNA, 2471 bp, Homo Sapiens
ggccccatgggtgggctctgagatgtggcacacggtacccagggcagggctgggaagggtggggtgcaggggcctccctggctgcagggcccacccaccaggtgcctgggcttgctgcactgagcaggcatgggctctggcccccctcactgtcccttccaggcccagcctgtgttcagggcccaggacagggtctggccagcaggccccaggcctccaagatgttctcagcctctggagtgtgtgtgatgatgagcactcatggagcttcctgtatgctgggccctgggcttctgagagggccaccgggtggcgactgagtcacgaggtggagggccagtcccagggactccaggtgacctcgtgtcggcaccacgcccttctcccatgggcagtcctgggcgccccttcctggccttgggcccagtggcctgtggcctgaccccgtccactcctgcttggttgtcccagcagcagcaggagcccatgctggagaaggtgttatggggcaggtggagggcccggctgactcagatgatcccccaagtttcttttcaatgaacacttgtttagtgcagtttttcctcctcaaatccccctcacacaggcagacaccctcttggcccagggtaatctgctgagcctttgctcaaatatagcagctttgctgctttctaaacacaactaatccaatttgggatttggggattcgaggtgggcagcactgggcctcagatgagcccccatcaccccagacccatgcaggaagagccaggcagggtggggccctggggccacctggtgggctcagggccagggcatcgcgatgtccccatccttcacactacggggcttcctggctgcagagttggggactcagctgggaatgctggccatagaggcagagagcccccatcctgctgggccagccctgacctggcttctccagggtggcccagtgtccccttctgcccttcccctggctcccaccgtccacatccctctatctgcccaccctggacaacaaccagcacagtgcagtgtggccctgcagtgacaccacctgcagagaggtcaggcccagcctcccccgtctcctaaaaggccagcaggtcccaggagctgggggtggggcctggctgtggggcctccatgccccaggggccagggcagaccctccttagccggcaaccactgcagattcctcccctggccagcactcggggacctccctgcccctgccccgtccccctaccttgcctgctgagacatagggctccacgggtctctctcctggggccgggctgactgtggcctgcgaggggcagtcatcgtgttgggttttcctgccagaggcagaaaccacaaaattacctggaacatacacgccccaagtgacagattcaattcaattccacaaatattgacctcgcgtctaatccactcgtcctccagtgccagctcattcctgagaagcccagcctggcagccgcagatcccatttaatcccagccccacaatgtcaccagctcgcagcttgggagctgggctcatccaggccctggcaggtggggccagagctgggctctgacctctgtacccacacttaccaccatgtaaagtgctgggaagaggggtggggagtcacggcaagttgagggtccaggcttgccccagctcgccagatgctcgccctggctgccctgacctagcagctaatctctgcggggcactgcggctacatggtgactccagcacggggacatttatcagaaatggaactgatggattaaagtggaaccaagcgaattgatttttctccctgggcactgaaatgctgcgcttaatcaagcgatcaactccgtgggcagggtggctgtggggacggaggtgggggacaaggggatggtggccatggtggggactgaaaggtggctatggggacagatgaggtgagccaggtggccctggggtcgagctccagcccagcctctggcaaagaggccctgtgtgcagaagtccgggtgtgatgccctccccccaccgattgtgtgataccggccagtcctgtcccggctgagcctcggtggccttgatgtaaccctgtggggtctggtggcagggactgattcactcatttgctcattcattcatgtgtttgacacacactgcagcaaaggaaaggtgagagcagccacaggctggccagggacgattcagacttcagagtgtagcgtgcccgcccctcctcttgtgaggtccagccttggtgtgtgtggattcccaggcaccctccaggtccaccctccactctgcagtgccccgcccacctgtccacatactctgttctgtggtttgatcgccatccttctgctctgcggccaactggatggcccaagcggactgagttgggcagggtggtcatacctgtggagcctgtggctgtggttggaggccccgtgggcagctga

SEQ ID NO: 935 - DNA, 2371 bp, Homo Sapiens
ccccctcagcctggagttatttctgaggtccttgctgtcttttgaggaggaagaaaatggattccccctcccaggcccctaggcttcatgtcccaggtccctttactttttcttcttcttcttcttctttttttttttttttttgagatggagtcttgctctgtcacccaggctggagtgcagtggcgcgatctcggctcactggaacctctgcctcccgtgttcaagcagttctcctatctcagcctcccaagtagctggggttacaggcgtgcaccaccactcctggctaattttttgtatttttagtagagatggggtttcgccatgttggccaggctggtcttgaactcctgacctcaggtgatctgccctcttggcctcccaaattgctgggactataggcatgagccaccgcgcccagccccaggtccctttacttctgttcctctcttgactctctcctttcaaagaggcttctcattccaagaagcgcctggcccactggtcttggtcccgccctgctgacagccagttatcccctgagcccagccaggagactgaaaagctttactgcattctcttaagggcttcacagccaggaaaaccagcaaaggggaatatagtgtctgcagaccggtgaggtccagggtcgctccataaaaatggattcctggaaaaacataaaccagcaatttaccctgtgaattttattggcctaaaaaaaaaaaaaaggctatctcatttgaataatgaagagagataaaccattcctagctcctcttttattagtgaataaggacacaaacactcaacagaaatggaacactcacacaaagcttcaggtctgatttattagccactttagtttcataaaactcagcatttctattaaaataaaatgatgtccaaaaggtttgcttgtttttaagaaaattgcatttaatacagggcaagactttgttatggtttatttatttatttatttattttttaaacaaagctcaaattctcctgacttcacgcctgttactacagctggagggaaaccgatttcagaatctatctgatatgtcggatttctttgtggcatccacttcatcgctcagcagccagccatgatgtcataagcccatcagatttccggtagggggaaaacgctggggaattggaaagaatggatgtttcttacccgtcaggaaggcaggggaaggagctgggtatgtttgggaggagaagccgcgtggctggtgggggacaggagcaggctcaatgtttgtgatattaaatgtcaggcagaaacctgaaaaccccagctacccagatgttttctcaatatccagatgtctggcactgagcagaccatgctcccgcctcccaggaggtgctcagcatttgggctttgacctcaggtctccgggtgagcgcacactgccaggagctgtacatcctcgcggctgcccacccttgggtttgggattttttttctaaatctttacacatagatgacaggagtaactaggtccagatttttaaaagctgttgaagcagtgatttgagaagttcagtctctggaacgctatgtaagccaaaaaggaggaaaaaaaaaaaaaaaccctcagccaacacacacacaaacatatgtgactcttaagccataggacttaagaacccaaaacaaaaccagcaagtctgagaaccagggctggagaccgacactgagaagcgctgagccctcccccaggagcacgctttcccccaaatcagaaaaacaccgcacagctttgttcttcctgacaaagccccttgcttccagggagccgacagttgccaacaaaagcacagggtggaactcatttacacgcaggctgggcttcaaggagccatcaagtgcagaaatggaaatggctttgcctaggagccctgcctccctgcgactggtaatggggacccctggagcctgggggagccccgcaggtcacagatggagcagggtcctggcctcctggtgcctggctaagcatctgccccacggaagtcaccacctaggcttgtgacatcacagctaattgcccctgacaatgagccaggaactgcaggcccctcagggctgcaagcctgagacttcacagggagccgggaggagaggcagctggggaggggccatcgccaattaaaacccagtgctcagataacaagaaagaagtggttgagggggacagtatcgtctctggtggggagagggcaggaggaagtgggtgtgcggaaggggctgagggtggggtatttgtgccctcatctcctaccacaatccccacccccagcctttacagatgaggacattgaggccaggggtggctgagtggcctgc

SEQ ID NO: 936 - DNA, 2467 bp, Homo Sapiens
aggccctgtctgccattctggttgctcctcgcccaaggccctgtctgccattctggttgctcctcgcccaggcacgcctgccccccacctcagcccctctggcaggctgcggatgttctcacatcttcctgtcttggcacctgtgtcttcacctgaatgtctttcccctttgtctgaatgttgccaactcatcttccaggcctcagcttaaacaaccctcccctggaagcctcccctgaccctagctgggcaggagcctcctctgtgtctccactgttcctgcatctccccatccatgtcagctcttaccactgtctgtctcccccgagaatgttctctcttcatccttatgtacccttcccctaaccccacgcctggtacgtacttggtgctcagaaagtgtcattgagtgactgaatgagtgaaggaatagtgaatgaaccagcctttgctttgccatgaccactgccatccccttgggtaagtcactgttcctctgagcctcagtttccccatccttaaaatatctctgcggccccgcctgcttccagattgtaagtcactgtacacatttttgaagccaccaacactaacgctgcagggcatgtctgtaggtttgccagctgggtctgtgtccccaaaactgtgcggtggccgccagggactctggtcagtgaacgtagaaaggggagagaccctgtttctgagagcagtagcaggaagagcaggggctctggaggcagccagccctgggttctaatctttgctccagtcctctctggctgtgtgacttacagcaacatgtctctgagccttggtttctccatccataaaatagggccacagcatccgcccgtagggctgttgggtggattatatgaagtcaagttcccctaaaatccagcctggatgtggaaagtgctagtaattaagagccttccacccttgcagcccaaggaacagcaggtggagcttgcacgtgggcagtggcgtcccagacctgcccctttgccccacacataacgcccttccagaaggaagggaagagctaggaggggaggggcaggggcctacaggccgcattaaatggtggttttctaccgtaaaattcagcccaatttgaatcccagcactagagggcctatggggtggagccccgggacccccagccccgcccttctccaggccaggtgttacggcgcagatccgcacggtctccctccgcctcccgccgcaagtccccgctgctcaccgccctcgcgcaaggcgccccagcccgtaatccagcagtgcaggccgggctcgaagaagtgggagcgcgcgggcaggcagacggggcgcacggcggccgagcgcaccaccgggtggtcgagctgcagcagcgccacgtcgtagtcatggctgtcctcttcgtggtacgggtgcaggagcaggcggctcaccttgaaggacacctctccaggccagcgcgagttctgccacaccttgcccaggaacacggtccacagcaccgtggaggccatgctggggtggggtggggtggggtggggtggggtgaggtgaggtgggaggaagctgcctctccccatccagggaccctcaagatagccagatccccgcccgggacagtgccctccacacccagccctcccttccctccctgaaggtcgcctagctggtggtacagcgttcagccttcacccactcggcctgcctgggttccacgccccagcttcatccctccctagacatgggtgtgcctctctaagcctctgccacctcatctgcaaatgggaatggcattttctactcgaatgttcttgagagaatccaataagaccgtgtatctaaaaaatgtagcacagtgccaggcccccgacacagatttcttttttcctgtgtgctttacagacccaggctgctctgaattccctgaggctggtgggtcctagtggggagcgggtgggagttgagcgtggaggaattggactgcggcagtcagctgcctgggtggcagatgggcagccttcgggtctctaccctctacctgagggcagtggggagcctgagatggggttaaagagagctaggtggtcagagcgccctgcgtcccagagaggatacaaaaggggatccctgtgcagggcctgggggcgggatctggagcccagatctgtctgggggtggattgggggaggtttcagcccaccaagcagatgggaaagatggccatgaggcctgatgagatgtcccctgggggctccccagccccacctgctacctcgtgtcacacctcggggagtgtcatagcttatgaccaggttgggcagttctgtcctttactgaatccccagcatctagcacagccctggcacatagtaggagcacaagtgttgctgaatgagtgaatgagatgaatgaatgaattactggcccaacttaaagcaagataccaaaagtagatggc

SEQ ID NO: 937 - DNA, 2340 bp, Homo Sapiens
gatggcggcgatcggcggcgttgaggcgggatccgggcgagccgagtgaaggtagcggcgagcggagaccccaggagaccgggctgggcccccaccctgaggcggcagcagccccgccccgtcgccacccgccgccctgggcccgcgacatcacctctggggtgccccaggcccttcgcggcctagcccaggggccgagccggggactggagtagcggccgcagccgcccccaggaaggggctggagcgggcagaaggaggagggcgggcgggagctgttcaaacggggaaggcgggaaagctgcggggccgggagggggcgtgcggccgccccgggggcctgcggacccgggccgcccctccccctgcccgggccgtctccgccctcgggggcgccgtgaggccgccggagacgcgggaacccgggttcaggtcgagctgtgcggctcggaacccgcgatgcgggggtccctcgggctgtcagggggaaagggctcgtggccgcggccacgggagggctggggctgcggctggcaggagaaagtacgaggagctttcttcttttcctcttcacagagctttgttgagctagctgttgccgcaaaactgccgggagaatcccactggtttgccttggggaccacaaaaatggtggtcctgggggctgtttgtgtaaatcacctggtattttgtgtgtttcttgcgtgcaacccggcttggccgtgccttcgtggtgggcgccttctccatgcaggcccattttccctccaccaactactacttgtagattcactttatagcgtgcaaaagcggagaaacatctctgtcccctcttttggagggctaagctggtggctgattatatttcctcctaatagaacaaagtaaaaaactgaatcccaaataaagcctgttgattggacaaggcttctcaaaattcgattgctggtcttatggaatgtgtgttgtcagccaatctgtgcggtggtcgtggttccgcttaattgcactgcaatgagaggattcaatccccatccccgactgtcgggatctctgcagcttccagagctggcaggggctgggagtgctgcctaggtaggtccctggagaagggagtggcaagaggattcggagtcaccgtgttcggagattggaagaaacctggacgaagttgagaaggcatcacttgtctgtatcgtagaagtaacaagaaaatttcagaaattggcaaccggcggatgtgcatcttcctttacctgcactgactggcattttgagttcttgaaaggagtggttggaagaagagaatgcagaatcttggacatggctctcatcctggaacagacctggagttcagaatttctcttactgtccgtgtgacggggcttactttgtttcctttttttcgatactcatttacattatggggtgaagaaggttgttgattgcaggagctcaagttacctcaaaaaaagtctgaaacctgttttttaactgtaatttgaagtttcaaaatgacaaagtgctatatctgaggactttttcctcctgattactttggtcatcccaaaggcctatgcctgaacataacttgtatgcttatctaccagggaaagagcaactctgccccctcctttttcatatcctgaagaaaagtccccgaagagctatttaacaatttgtgcatttcataagtatacatttttatggtaccagttttttacttgtatcaacagtatgaaatagtgaacttttacttatgttgtcatatcttagcacactgagacaaacaaaattattcttgcctcttggagttgacaacattgaattttataaactcccaaattattgaattgagactgggttttaacacctgtttcacatttgccaacatttaatgtaattatgacctcccttttctaatgtgaaaatcaaacctaatattcattttcattaatcctcacaatctactctctacccctgaactctgaattttcacagattgtattcaagacctggaaggaatatcaggggttcatctgatcttatataaatgttgcctgaactctgcctttctttcacactgttgcttgagatttatctggtatctttccaaaactaaaccctgagctgcaataatatcctgattttaaagaacgtagaaattcagggcccatcggtctgcccaagctgtggctgatacagtccgttgtgtttaattttagtttttcaagctcttggctgccccagttcttcagtgaattggacgtgtcttcaggcctcattccttcttttttcttcaggttatttaatccagtaatttataaaatgctcttcagt

SEQ ID NO: 938 - DNA, 2468 bp, Homo Sapiens
acgcctatcccgtagaatggcttacatctaaacagatgacttttgtttttgagatggaatttcgctcgttacccaggctggagtgcaggggcgcgacctcggctcaccacaacctccgcctcccgggttcaagcgattctcctgcctcagcctctccagtagctgggattacagacatgcaccaccaatgcccagctaattttgtatttttagtagagatggggtttctccatgttggtcagactggtctcgcactcctgacctcaggtgatctgcccgcctcggcctcccaaagtgctgggattacaggtgtgagccaccacactcagcctacaggtgacttcttaaatcaatactgagattatagtattatgcctcttccaaagcagcctggtgaggacaatctcccactcccaccctaaaaaggaataaagaaaattgcagcatgaacaaaaccagaatggagaatgggccatttcctggagtggtttgagccaagagggagctgctctttgtccgtgcttgtttctctgagggtctcctgggcacagctgataaaccacccaagtttgaaagacacacgttattttattaatatagccatctctccccactgccccagtggtgaaggtgtttgcattgcaacatggaggggcaccaaatgctctgcgggccctagcccgctgccacaggctaggcctgcctgcagccaagaaggctgctcaaactctagatgccatttggaggcatgaggacctgagcccagaggtggcagtgtcctacccagggaagtcaacagatcgtgctccaggtcccagctctgggctgggccaggactaaatcctggctcccctttcttggtactaaggggattagtgcttggttgtctgtagggggtcagagtagggagggttccaggaagggttccagagtgggctcacaggggacctcctcccctggcctcttggagtccaggtcgtcgagggcgcaaagctgcacgccatcctgggcaagctgggcccgcagcgtgggcgcggtgaggacgcgcagctcatgcagccgctcccaagagcaagagaaagcgtcggggccttcaccgcagccgccggtgggaggcacactggggtagccggggtgcgccatcagctcggctgtcagggtgtggcccgctagggtaccttccaggacccgcgccagggccccggacacgcggtgagcggacatgtgccggccgcaagtgctcaggcccacgaaggcgtctgtccacctgtggggggcgggacatcagaggtgggaccaggccgggccatggccaagggctaggtaggctagggaagggacggcggggtgggagggggtaactggggtggcggcagcggtcgacgccagactcgcttccgggttgagaaacggacacagctagccaggtgaacagccagtgcggagggacagaggcagctatggtaggagacggggcggggagcctcaccgcaggccgtggcgggagaaggggcccacggcggcccgggcgtcgcgctccacggcgcaggcgaaggcacgcgcgggggcctccagccaagtgcagccacccacaccgcgctccagcggcagtcgcgtaaagcgcaccccataggcctgcagcgcctcggcgaacacctggcacacgcctgcgggcggagcgggtcagggaggagcacgtcctttcacctgggggcatcgaacttcccctactcccccagccccgcctgggagtaacgccctccaaactgggatcactaaccacgcacctgggagcacgtgcacgtgctggtgcccgtccgcgtgcgtgggggccctgcccagcagctcccggaagcagcttagttgggcctcgagctcctcccgcacctagagggcgagcgagagacaccttgagcgaccgggagtagctgccgaggataccctcctcgtgcttccgtgtgatggctccagtgtttgaatgcggaagtcatccaccgccagctcctaacggcctcacagtaccctccgggcggagctctgggggtcctcgcgagcatcctcctgtagctgcggctccgcacctgaggcaaatccacgtctccggccgccaccgcctcccggaatcccatcttgccaaggaagaagccttccgggccgagcagcgatgaggcgccacggcgggccggacccacggggcggccctcggacaggttggcgtggaggcccgtggggatgctgtgcctgagggcggagcgcgagctggagcactagcggccgcggagccgcgcgccccaagccgatcgccgccctgctagaggccctcccctcacctgcgggccagctccgccgcgctctccgtggccgcaccgttgaccagcagggacacgctggtcacagccccggccagaaaggcctccacgataccctcatcgcgtcgcgggcagtaaccaaagtcgtccgcggtgacc

SEQ ID NO: 939 - DNA, 2782 bp, Homo Sapiens
tctctttttttttttaggtggcagaaacttagccccagctaaagatacacagaacctttgcagtctgattttctttctgtttcttctcctctgtcctgtctaatcctggtagcccaagtcccaagacagaggagagacagacatgcttctctctcaagatggggggctttgaaagactgatgcctaccagagggctgaaaaggggggctgccctcggagcagagcaaagcgaggactcagtggggccatggagcaacagggggccaggtcctgccctccccaccaacccagcactaactgttctttgcactaatagttactgattgtccacagggctctgggcactgttctaaaagtggggaccaggaggaaagctctctaatggggttgacactccagtagagaaagcaggtaataaacaatgaaataaaccagaacataggaagagttgtcacagaagaggctcctcaatgtggggaggggaagacaagacgtggagaggtacttacgaggcccatgataaacatctcaccattcctgctcagtcagtctctctctctctctctctcagatgcgcacacacacacacacacacactctctctctctctctcttcctggctcttgcaccagatcctccaaattctgtttgacctgcccttgcacacctccagggctctgggattccagcagttggtctcctgccccctagggccattagcaaagccagaggaagctggatggcaaagggcagtggggcccttcactctttcccggaagaagtgtgctgaggccagacgcgtcacgtgacagtgggactcgccctcctggaagccagctcagctggtggagatggcacctcagaggcctcggcaggccctccacccagccctgcctcacggctgcctgccgtctgctgaaagattagtccgagcacgaccaggacgtggacagctccaaggccacctccaccagcaggcctgccctgactctcccagcactggccattacagctccttcctggactgacccctgcgtggttccatccccatgcaggtcccctcccccagggccagcctgaggctcactcaggcttagcagcaaagtgcttcataaactgcaaagtgccacatacatcgcgcctgtggccatgtgttcaagaatgctgtgactaaagtgaggagaaaggcagtttctgtgccacagcctccaccccagatacacgagcccgtggagctgtgggaaagaaggaggaggtgctggacgaagctggaaatggtaaggggaggctggggaaacatccagctgtcagcggcctccccggggcacgctgggatcagccaagagaatgcaacagccaggggtgggagccccctccgcggttgcacacgccaggtccctccagtcttgcaggttcaaatgaaggcttatgtgaagggggaatcgctctggacagctcagtgcccctcagagtcacatcaccaccattttccaccacgcggaggtggttgaaaaaaaggagtcacagatgggtaaggtttgaggggcgtcgggctgacgaggcaaaaaaaaaagtaggtgctgtggtgctgatgggaggttctccctccctcacaggacgccaggaaggaaatggggccgctacagaggtggtgaggtgccagggcccacggagggcccacctgttgcgcgggggcgagcaccaggcgctgggtgcacgggggcccgtgcgtgcctgtgtacgtgcgtgggtgtgcgcgcacgtgtgctcaggccgcgcgtgcaggggccgtgcgtgcgtttgtgtgcggtgcgcgcgcgtgtgtcccgcgtgtgcacgggcgtggcagaggcgggcgcgcgacctggccgcggtagtgcgtgcccgtcgctctgcgcgcccgcccgccggagcgcagcatcgcctccggccaggagtgtgcatgcgtggggtgagtgagcgagtcgggggcccgggcggggtgggctgcggagagcagccacggggcgccgccgttcccaggacgccctggcaccgggcccagcccccaggtcccacggcgaggcgaggcggcagctggggccggccggccaccccctccccaacagctggccgcggcccggggggctgcgggagaggcggagagggggcgtcgggaggggcctgaaggcggcccggccgagccccgcgtcctccctcccgggtgcgggccgcggggggcggccgcggaagggcggggcccccgggcgggcggcctgcggccctcgaggagccccgagaacaaaaggagacggcgacggctcctccgtggtcaaaacaacctgcgctggcggcagcccaaggccgggccgcggcctccgagccctccgccttaaccccttcgccgccgctgcctccttcctgcgcctggctggaggccgcaggggccgaccctccccgggagccggcgaggtgcgggcgaggtgcggactcccggccgcagccgggcggaggtgggacggtacccagtcacgccgcgctcccggctgccctctcctcccctccaccgcgcgcgtcgtcctgccccgccccctttcccacctggattccgggtagacttgccaactcacggctacgtgaggctgggaggggtggggacggctccgaccccagcgctccctcagatgtttttataccccatctcccgtgcagctaggcttttgcaggcggcgcgctccgcaccctgcatgcgggggagagaggtgcttcctcctgcagggcgcgggcacaggtacggcaaggc

SEQ ID NO: 940 - DNA, 2377 bp, Homo Sapiens
catctcagggaggccagttgggggcaggtcctggatctgttttaggtacctgaagcccaaagaataggatacactggctctgctattctttcccacccctcgcctatctacccctcaggccagactactgcacccctgctcctatcactgtgtgacttgtccggcaatcatttctttttttcttttgaaatggagtcttgctctgtcacccaggctggagtgcagtggcgcgatcttggctcactgcaacctctgcctcccgggttcaagcaattctcctgcctcagcctcccgagtagctgggactacaggtgcatgctgccatgcctggctaatttttttgtattttaatagagacagggtttcactgtgttgtccaggctggttttgaactcctgagctcaggcaatctgctcacctcagcctcccgaagtgctaggattacaggcatgagccaccgtgcctggccttggcaatcatttcttttttctttttttgtttggtgttttgagacagagtcttgctctcacccaggctgaagtgcaatggcatgagctcagctcactgcaacctccgcctcctgggctcaagtgatcctcccacctcacccacctcggctcccaaagttctgggattacaggcatgaggcactgcatgtggcctctggcaagcatttaaaagcctgttctgtgacagcccatgacatcagatccactcaagtggagggctggatagagcccccgacacatccgctggcatggaggttcagctcaggagtacaggagccctgaggaggctcctgactcaccgctccatggtcccaaacagccagtggggctccttggtgaaaggcatctccatgccatgaaattgcgccatcttcgtggcaatggctgctgacaacactggctctcgaagctcttgagttttcaatggccgactctgcacccaggaagctatcagggtggtgatggggctggggcaggagtgggaagggctggggcaatgaggggaagtcagggttttgggggaaattccctacttggggtgagggatgtggaggcagacattgggcactggggtagggttagggggtggaggtgccttggggaggagagggtaggactgggcccgtactgggatgtactgttccagccggccctctgggaagactccgtacagctggggccccagcgaccgctccgcaagtatggcgaacatcacgctttctagcaccagggagtccacgccctgaaaaaggatggacagcaaaggggccaaggcaaagtggcacagggacacacatgagggctcgccttcctcccaccagagctgcgacttctgatccaattgcctggaggctctggagcacaggctttagcgttggtctatttttatttagagatgggggtctcactatgttgtccaggctggtctcgaactcctgtgctcaagtgatcctctcgcctcagcctcccaaagctctgggaatacaggcccaggcttcggtgtaatgaggtgttactcagaccgtgaacctcggtgtcctcaactgcgcaacgggaacaatactacccgcatcgcgtaagcgacaggccctaaagccactggtgctgcggcgctcacacccccctcacctgcaagatggctccgtacagccgcagaagcacctcccggggctcctcgccaacgctgggcaggtggtccgggagcgagcagcggaagagcaggttgctgaggcctccgctgcagacccacaccaggcgcgctcagcccgcggccggccctacctgccgcggccccggccccctcccggccaggccggccccgccccgccccaggcgcgggcgcaagaggggggcgaaaacatggagcatcctgagggccccgcggctgacccctgaccccgatccgcgcaccggagaggctgacccctgacctcccacctcacggggtaaaccctcagctcctcgggctgcactcggcgccaggccccgcccaagtactcccggcaccattggtaggctcggcgctcggcgtcacgcgacagcgacgaggcgcgccgccgttttggggtagtgtccgggcacttagactgctgcaagccgtctttggccaggcagccgccaacagccccgcttccggccacagctgtcgcctcggccgccatggcgcgggctcgaccgggccccaggccaggctgcgctccgctcccttcggacgggctcggttccttccggccgcgctcggctcctcttccggccggcctgggcttctccggtcatactcgggtctctccggctctattcggctcacggctgcggcgctcggctctctccgtgccccggcccgggggctctttccgaaggccgaattc

SEQ ID NO: 941 - DNA, 3534 bp, Homo Sapiens
agcaaatggttacatcatgagtcatgaatacagagtgatttattcacaatagccatgtaatatgtgggatttaaaaggaactggtacatttatttctactgataccaaaatcttttaaatctatcattgattgaggaaaacaacttggttagacttagtgtccaatatggtagtatttatgaaaaatattaaatcaagaatagaaaaattgcatataaagccagagatagacctcaaatttttttttttttttttttagatggagtcttgctcttgtcacccaggttctggagtgcaatggcgtgatcatggctcactgcaacttccgccccctgggttcaagtaattctcctgcctcagccggtatagctgggattataggcatgcgccactacactcagctaacttttgtatttttagtagagacagggtttcaccatgttggccaggctggtctcgaactcctgaccttgtgatctgcccacctcggcctcccaaagtgctgggattataggcgtgagccactgcactggccgacctcaaatttttatgcctggagattagtaaagggcatggaataatgaaggggaacttttattttattttgtttttgagatagggtctcagtctgttgtccaggctggggcgcagtggtgcaatcatggctcactgcagcctcaacctcgaggtctcaagtgatcctcccacctcagcctcctaagtagctgggaccacaagcacatggcaccacacctggctaatttttaaattttctgtagagatggggtctcactatgttgtccaagctggtctcaaactcctgggctcaagtgatcctcctgcctcagcctctgaaggtgttgggattacaggcgtgagccaccacgcctggcctaattttattcattaaatatgttagaattaagtgttttcccttgagacctgtgagttttttcagtgaaaaaatattcaaaaggtttgtcagtatgtccataaaaaagaagataggaggggagggacaggacccaggagggcagcctacagcctgctctccccgttctgtcctggggcggagtctgtactgcgagttgagcttttcccaaggcgcatgttactcctggagccaagcctagcagtgcagccgcacagtcagggtggggtgggccaggcggagaagcaggctgcagagggggcagggtggtggcctggggatctcagggaagggctatgggagcacggcggtgtcctcagtgctggggctttcaggggccttggtaccgcgagttgactcttgggggcaggaggtcactccatgcaggggcagcaggtgctggccaccacattgtccagcaaggtggcagcagaggcctcctaggtccccttcctaggaaaggagcctgggctgccctgatgagtctcctgtctctctctctcccgcaggatgaagatgagacgctacaagctctttctcatgttctgtatggccggcctgtgcctcatctccttcctgcacttcttcaagaccctgtcctatgtcaccttcccccgagaactggcctccctcagccctaacctggtgtccagctttttctggaacaatgccccggtcacgccccaggccagccccgagccaggaggccctgacctgctgcgtaccccactctactcccactcgcccctgctgcagccgctgccgcccagcaaggcggccgaggagctccaccgggtggacttggtgctgcccgaggacaccaccgagtatttcgtgcgcaccaaggccggcggcgtctgcttcaaacccggcaccaagatgctggagaggccgcccccgggacggccggaggagaagcctgagggggccaacggctcctcggcccggcggccaccccggtacctcctgagcgcccgggagcgcacggggggccgaggcgcccggcgcaagtgggtggagtgcgtgtgcctgcccggctggcacggacccagctgcggcgtgcccactgtggtgcagtactccaacctgcccaccaaggagcggctggtgcccagggaggtgccgcgccgcgtcatcaacgccatcaacgtcaaccacgagttcgacctgctggacgtgcgcttccacgagctgggcgacgtggtggacgcctttgtggtgtgcgagtccaacttcacggcttatggggagccgcggccgctcaagttccgggagatgctgaccaatggcaccttcgagtacatccgccacaaggtgctctatgtcttcctggaccacttcccgcccggcggccggcaggacggctggatcgccgacgactacctgcgcaccttcctcacccaggacggcgtctcgcggctgcgcaacctgcggcccgacgacgtcttcatcattgacgatgcggacgagatcccggcccgtgacggcgtccttttcctcaagctctacgatggctggaccgagcccttcgccttccacatgcgcaagtcgctctacggcttcttctggaagcagccgggcaccctggaggtggtgtcaggctgcacggtggacatgctgcaggcagtgtatgggctggacggcatccgcctgcgccgccgccagtactacaccatgcccaacttcagacagtatgagaaccgcaccggccacatcctggtgcagtggtcgctgggcagccccctgcacttcgccggctggcactgctcctggtgcttcacgcccgagggcatctacttcaagctcgtgtccgcccagaatggcgacttcccacgctggggtgactacgaggacaagcgggacctgaactacatccgcggcctgatccgcaccgggggctggttcgacggcacgcagcaggagtacccgcctgcagaccccagcgagcacatgtatgcgcccaagtacctgctgaagaactacgaccggttccactacctgctggacaacccctaccaggagcccaggagcacggcggcgggcgggtggcgccacaggggtcccgagggaaggccgcccgcccggggcaaactggacgaggcggaagtctagagctgcatgatctgatagggtttgtgacagggcgggggtggcggcggcccctagcgctatctccctgcctcctgccggctccttggttcttgaggggaccaggagtgggtggggagtgggggtgggggtagggtttccctactgaagcccttgtgaatcaagggtcaggcctttgagctcagaaaatatccctcctgttgggagagggcgcaggccgtgacgtctgggtggcccttatgactgccaagactgctgtggccaggaggtgccactggagtgtgcgtggtggtccctgggtagcgggggagggtaggcaggattggggaagagagcctgcaggatctcaccaggcagcctctggggggtggccaggccgggaaaaagcccaccatttggcatccctgggccttgggctccgtgtgggagaccggcctgccaggaggacccagggctctgtaagtagatgcatttgggtccaggaggaagcgtgg

SEQ ID NO: 942 - DNA, 2484 bp, Homo Sapiens
cctagtagctgagattacaggcgtgcgccaacaagactggctaagttgtgtatttttagtagagacgaggtttcaccatgttgggcaggctgatctcaaactcctgaccttaggtgatccacccgcctcggcctcccaaagtgctgggattacaggcgtgagccaccgcgcccagccgggaaacatttaccagggacaataaaggcttagaagaaccttttggggaaactttgtgaggagcacaattccagagggcccacagcagccacagcctcctggcgtgacaccaggcacactgccggctgcacaggttgctgggcacaggcaggcacagccagtctggaagagcagcccgtcttaaatctttggtttctttccaaccaggagcaaacattggtagaaagagccagggcatatttactctttacacccagaattttcattcattattgaaccatttggcttgcacagtgctctctgataatgtggtccataaaaaccaccattaaagctgccctttcacctgatctgggtggggctaaacgaggaaacgagaagtttcctgtatgcttcaaaatataaatcaatgccaggaaattctgaaaatggatgctgcctgttaaacatgaaatcactaagggagcttctgcaaaacccacccggcagcatgaggaacggtgtctacagcgtgctccaaacggccacggccccgctccttacagatcaaagtttaagccgcatattctcatatttcaaacaaaactacgttacagacatcatctacgtgggcacggatacacactaaacaaggacgtagtacacaattgaggggtgccccggggagcgcggcaggaatgccttccgggaagaatcctctggtcgccggagccctcgcgctgcagaggaaaccagcgatccatcgtggcttcgaggcaaaagacagacatccgagacgcagtttacactactctggcttaaaaggacaagatgttcaataaatatagagaactcagtgtgaagaaaagacaaggacaaatctggaccacgtgtacagacttcaggccctgcctcagaggagtcctgcgggagtccaggaccggcccctcctccacggatggccagcttcctcctgactgcccccaagcccggctgtgttaagcacttcgcgtcgatataaagcattggtatttgacattttaacagtaacaaacttgccagtgctttacacactgccagcttccagagcttatcatccgtgctcccagaacagacgccaaggtcatgctcccagccggattgtcgtagcctcgccgccgtgatgaggcaggtgtggaggccccagcagccttcccggcgctggcgtggaggcccctcccgcggatcacctgaagcagggccacgttgcattgcagttgcacagtattgtaaggatcaagcagcgatgtcctaaccgtaaacgaagaggaaggtgaaatgaaggcaaagagaatcaaccacttcccaaaacttggccacaaaccgttacagaataagtcctgcaaagtggatcaaagtgacccactgctacctcaggcccagatggtgtgacctgcgtggaaatcatataatgtccctaacattattgcaatagagccactaacgggccattttctaaactacactgttgacatcgttaaaacctaagaggccagtgcccccaagtgagcagctgcatccgctgagagtaagcggcgtgggctgcaacccgcagatgcgtacagaactgaaaatgccaaatatgtacacaaaattgttgacaaaagggttttcttctaaaatcaagatttaactatcaaaaataaatttctacatttaaatgtatatatcaacataattggtctgtaataattatcttaaatagttttcacactttcccagtttgtgagcaggacgccggcttctcagctgtgtgagtctggcttcggattctcttcaattcctcgtgcaaagagtcgaaccagctggcagtggactctgcagagacaagcggccacgtgtaaaccccacgtgtccctcactcaaagctggcctgagccccactcctggacaggggctgcagtaaaccccacgtgtccctcactcaaagctggccctgagcaccgctcttggacaggggctgaagtgggggtccatcccccatggaacggtcagacgtcaccgtgggctgtaggagtccagcccacaatgacgggccctgggcgtggaataattcacttagactcccgggatgccgagtttgtaaaggggttgccaatggccaggtgggaaatctgggcatcggtagacctgactcgaactccagcacccccatggaaagcagagcgtccgctccagtgtctgcccactccacccacccacccacctccattttctcagcagtactgagcgcgcaaggcctgcgaggagtctgtgcggggcgactcaatgcgtgtaagagatgtgtga

SEQ ID NO: 943 - DNA, 2482 bp, Homo Sapiens
gtggggggcccgagagcaactgtccccacaggggctgctatgtccagacccatggacctggcatgtgctccatcagccaggctcaacgacgtcagccaccaagcatgctccatctgtgcggctggggggccaggggcacctgacattggagctgcccttggccaaggctgtcccacctgtggtgccaggcaactcccttcctctgggggccttgtgatgggggagaggctgcccgtccagcacccacccctgcttctcaccgcccacagcaccctagcctgagaggccacagcttaagaaaagagctctttattccacgtcgtccgatatttttacacaagtaaaataaaatgcatatctctatataccgcgatctgggtgggaggcggcgttctggaacaaacgctgccgccgaaccctgtaaacatgatggggtggagatgggggtggcgggcggcaggcgtccatcagggaggacctggcctggcctgccccacgggtcggccgcccggctggcttggcggcgtggagagagaccccgtatgtacacacacctggctgctgagcacgctcttgtgtccgctgggggtcagcagggcccaagcactgtccacagcaccagcgccaggcccaggggggtgaggctgcaggtgaggctgggtagggcacctgagccttctgagtcaccagtcccgccacccccgctgcctgcctggcccagacggcagtggctgcgggtgcggttcttgcgtgaacagcctggcctccggcgagggcccgaggtggggaaccctggtggctcggagccctcgggccgcactgcagtgagcgggggctcagcagagccaggcagagtcccaaagggtgagtcattgatgtgccgtgggccagagccgttgcccggcgggctgtcaccgggcggcacgcgtcccttcagcgcattgcctgccgaagctggtcttccaggctccagtactgaggccttgtcagcggcatctggctggcagcacttgggaagccccagcggctcctcatcggtggccctgccggtccagatgggatggtaagggccggtggccacagcgcagccctgcaggtcattggcagctaggcgtttgaggtcacggccagccaggcgttgcgggaggctgcagggcacctcggaggaggagccgcggaacttctgcagccaggcccagagtgggcgtgcccggcagtcacacacccaggggttgtcgttgagcctcaggtactgcagggcacgcaggggggccagggcctcagtgggcagcgctgatagattgttggcaaacagatagagtgtcatgaggcggccaaggtcacggaaggcatgcgggtgcacatgggccacgcggttctggtgcagtaggagacggtcgaggctgtgcagcccacggaaggcgcgctcgggcacgctggagatgcggttgccgtgcaggaagaggtgtgtgaggttgcccaggtcgcggaaggtgtcatcaggcagtgcctgcagcgcgttgtcctgcaggtagaggtactgcagggcagccaggccgcggaacagccccgggcccagctcctgcaggccgcagcggtccaggtgcagcgtgtgtaggcggcccaggccgtggaatgtggcagggtccacagaccggagctgtgcattatcgctgaggtccagctgctccaggagggccaggccagtgaaggcagccgcatcaattcgggccagcacattcgagtgcagccacaggatggtgaggttgcggcaggcacggaagctggcagctggcacatgcgagatgcggttgccgtgcaggaagatgcgctggctggcagcagggatgcccacgggcacagcctgcaggccctgctgggggcagcttgtcgtcaccttgggctcattgtagcatacgcaggcacctgggcatggggctgccacctgccaggcctgcagccacagcacccatgccagcagccggctccctgtgggcagaagacagagtggttagcaggaagggcaggggtactggagaagctggaggttttgctagagccaggtgggccccggagattgggtctcaggaggacctggggctgggtccaagatgtggccaccacccccgggaatcgcagtgttgggatccctgcttcacaggcctcatggacgatgctgggctagaacatgccttggagccatgcactccaccctggaagccacatctgcagactccccataccacacccaggagcagcccactgggtcaccaggggcactcacttgaaggcctcctggaatggacactggtgactgcaggtacctcctcaggactccagtgaacacagagcccgcattgcaggagtccccggggggtcccagtgggggttccacccacagggcctaggaaacactgcaatggggctggggtccctctgggcacgtctatctcaaaaacgggcgcctggatgcccgagggcg

SEQ ID NO: 944 - DNA, 2395 bp, Homo Sapiens
tacaggttgacacactttacccgtcccttcaccccagggccttgcgatttattggcaagggtggagtctcgctcacctggttaaaacgaagacgtcaaggagggaggcagctgtggtcaggcggtaccaggtggtgccagcccaccagtagagaagtctgaagagccggcctggaagaatgaccatcaagccgaaggctccatatggtgtttgggggcaccgctcctttgtcccgtctgccgtcctccctgcccctaccccacccccacctgccagtatgcctctgtcctgccctaccgggacccaggtccttggatcccacctgcccacaccctctgtcctgctctgcagctactccttcccttccacgcaagggggtccccacagctctgggctcccagtgattattctagaatgacctttccccaatggtcctacagtctctctgcatgggcaggatgcccaactgcagagagatgggtaagaaagcactatcaccaagaatggaagtaactgggcacgggttgcagcccacctggcgaagtggccaccatccagagtaaggagcccgcccgtgagacggcgcttcggagccgcgagctggaactctgctggtccacatccgagtagcctgcggggaacgaggacactggctcagtctctgtcactttcgagcctcttccttcactgtcttctgtgagccaagaccacaagtcacccaccctccttcacatccccacagccccacacaggcccggtgtgcagtaaggaatgaaatgggagctctttgacattctgtttcttctgacagcttcctgtttgcatccctctcctcaccagccacccctcaagctgctgttcagaactaggtgctggggtctgacatgcacaccactcagaatgactgagcacccaccatgtgtgagccccacaggaaagtgctggaatgggcctgaatgcaaggatgttggccttaggttgccatagactcgtggggtggggaggacagacaagtgaagggcagtcacagcccagggcaccaggggccaccgcaggccaggctggggcgcacccagggccgggcatgggaggggcgctgtgcctgccacatgctgccctctctccagctccccggggctccctgcccagccttcctgaggcctcccagcagcctcggatctgctcaggagggaggaagcatcgcctacccacgtagtcgtcctcagaggagtagcccgaggaagagcccaggaagtcctcggtggccttgcgccccacaagcccgctggccctgctgctctctgagccacccgtgcctctcctcctccgcacccgcaggtcctcacctgtgcagggaagaaccaggggctcttctgggcctccaagagcttctgaaaagtggggtctgggcagagaggtgctctgaggagggaatcccggggactgcaggggacactgtgaggagtatctcgcgggaggccgaggaagcaaagccccgggacggagggctccacactcaccccagttggcgtcaccatgcagttcctccagggagctcctgggtgggaaccaggactcgtggaccagcgactcactgtagtaggaggtgtgtgcatcagaggacgggcccagctgtggcgctggggacaggcgcttcatgttgctggatttcctcttcaaggtcctgtgggacaaccatgagggcagaggtagggagcagggaggtgagcccagccaggagcatgaaggaaagccacagcctgcggccctgcctagtgcagggtgtgggttcccttgttgctaggcaactcgcagctgccattcccctgactctcccaatgctggcacgtcctctcctgttctctctgaatctcaccagcagatgggcaagacgggcagcggcagctagggatggagccacattcaaactttacaacccactgaaaccagacagacctgacctggcctcagagctagccaaagcctcagggcctgtcttctgggccccatgcctgtgagccgggcaggacgaccaggcagctgctgccacagcccatttcccagtggcctgaggactgcgcctgttctcagccatgtcgctggccagctgctgaggccggacaggtggtgagacatgcaggcgtggggccaggaaggatggtaaggctgacacgcccgtccagagcagggggggttcctgtgagcccagcctgcagttttggggtttccggcctggcttatggttgaagctgcctctctccacttcctgttttctttctttcctttttttctttttgagattgagatggagtttcactcttgtcaacccaggctggagtgcaatgccatgatctcgctcactgcaacctctgcctgccaggttcaagcgattctc

SEQ ID NO: 945 - DNA, 2390 bp, Homo Sapiens
ccagcgggggccaagtggagccagcctggtgctgtcttaagggggctcggctgggaccgcctccaggagggtgacgggtcccaataagaatgaacagccaggaactggggctgcaggaggagtgaggggggaccacctgtgagaagcagcctgcaggtgagacagcgccactgatggggtggggaggggcatctcagaggcgcccatggggcaccagccggatccacccagcaggtgtggagtgggccacgacagaccccagcaaacacgctgcactcctggctccggtctctccctcccgaagactgtgagaggaggtgccactttaaatcaagttcagaattttgacaatcacccagggctgggcactttaatacctgaaatcgtgaatatctttgtgactaaaggagcccaaaagaatttttgttacctgagagagaaaagagaagttcaggaacttgccctagattttatctaagcggtggaaaaaacgggcccctccagggtgcacagggacaggctggagggcaaaggaaatggcgccctctctcttaacagccactctcactctgttgggtgcacgtgtgcattcaaaaactttctcagaaaaaagttggcagaaaaaggaatgtactactttcaagacagcagctcaagctatgaatgcactaagaacctgttttgagacgatccctggcagctggcaaaagtgcaaccttgagaagaggccgtgaaatatccccaacgaaacagaaggatttccaaactgaagaacgttgcagaaggcatcaagcgcggtgccttcgcttcacagatgagtagtttggggcccagcgggtgaagcggcccagctggttggtgcagagcccagcccagcatccagattctctgatttgggaagagctacctttcctcgaggccagctgggatgtgcgaaggaaaccaggtcccgtggagaaagttacctggactttctagcaagggaaagcctaagtaaagaaaacagttggccaagaggaaagacagtggtggcaatgctgagagagtgccgaggaaagagtggagagtttgtagccaagacgaacatttatagtaagctcccaacagccaaggacttgaaagccatcaccgtccagctggacacgagagcaagaattcagtacatcctgccgggccctgctagttgtgcagagcacaaggtcctaggcaagccagtgtcggggtaaaacactgcttccgtcgaaagtagagttaagaatggaatggaaaaagactgaggcctgcatagcgcacgcacggggatttcaaaatggattcgaaaacactccacaatgcaatcttgggagatcgcaacataaaaaggaaggaattcaatgcaggtgagcctcaatagacaccacggcgtgcttctgaaatagatgaaaattgaactgttttccaaatactttgagagggttaccaatgacaggaatcctttcgtctgatcactaatcatcatctcgcttacacagtcaggacagctgtggagtaggtcggcttagagggattctcagggcaggttcaggctagtgttcagtctggccttgaattgtgttctgcagagtcccacagcaggctccgcaggaggccagggtaccccttctagaaaacccaagttttccagctggacaggcctgactcctagtcctgtttctagccctcgtttaactatgcaaccagggcaagctacacaacctttctgagtctgtcatctatacaacacaggagtgttaccttgtagggctgttatgaagcctaaacaaataatgtgtgcaaaacacctagcacacagtaggccctcatcaaacgttacttccccactcctcgcttgcctgggagggcagtgatcagcgcggattgttcttgcacttgtttgtagggacctcctttgggtaggcaggatggtcactgcggtgtttaggcagaagagaggaggagatgagcttggcgccagcccttggctgcgtctcaagctgcgtttgcttatatttcctttttaattacagctttcttaaccgagctgccagcggtgcttctgtgagcctcaactcaggggggactagttaacttgcacagataatagcaagtgcttactgcagcctcttcaagagtagttcacacccacccacccacttcaacacctcaacagagtttaacccgtagcccactggcctttggtgactcctgttttggaggttggggtgggttttaatttctgagttctatcaagcgttctagggaatatggaatattggggtgcagggacaatttcacaaatgaatggaggaagggagaatactgaaatcctgtttgctagggcactaccgcctactgctttgcacaaaggtgtg

SEQ ID NO: 946 - DNA, 2444 bp, Homo Sapiens
tgaggccatgaacacaaacccagtcccacatgccccggaactgcacttgaagatgtggccccaaggcagcttcacacccagtgctctgggcggggcgggggggcagcttcacacccagtgctcggggttgggggggcagcttcacacccagtgctctggggtggggggggcagcttcacgcccagcgctctgggaggggcagcttcgtgcccagtgctctgggagaggctgccccagccagtgctcccaaagctgccgccagctgggagaggatggcaggctcccctctgggtcccgggaggctgaaccagccaaatgggagaatggggagatgggggagaagggggagatgggggagatgggggagaagggggagatgggggagatgggggagatgggagcaatgggagcaataggagcaatgggagggtcccaccaccctgaccccacccccaaccggcctgctctggacacactgtctaatcctcagcagccatcccatcagtccaccctaccagggggtcccagggagataccctttaacagacacagaagcgtaggaggagaacgagggcccccgcctcaaccccaggcttaaggccactttgctcaggcactgggtcacggcaccctaagggtgcccctgctgacacatcagcctcgaagggccagccaccctccagaaacaacgcccccgaggtggggagggccccaagtcagcatcgcatctgtcagatacggaacagagcaggaaccgaagcagggaacgcaggctcaagttatgccagagacaggccctttgcctcagactgtggcctcggtcaggaaaggaggcgcgagcgtgtggctggagaactctacaccaaacaccctggtttcctgagtggaaatcacactggctcaggaaaaggaagggggtgagaaggttggttggctggatggctgcttcaagtaatgcgaaaagtaaacccacgaaaccaccttttgaaaacaaagtgcgagggctgtgccatcctggctgcagcagggtcgtacctgcttccctaaccaatgtaccaccttttccagaaatagaacaaagacaaaagcggatgcataataaatcatttcagcctgccagcgctctgagagatgaaaaacctcgcccagagataggattgtgggtttacaaaaaaaccataaagcccaggcactctgccaagcccctagaacgctgccgggtcgccctttccttctccatgctcagccgtgcgtggctgccgggacagcgctcactccggcaggcgacgagtcagtgtgggaacccaggggccgcctcagtttcgctggggtgttgagttgcagggagtggcctgcaccgactcccctctcccccattcacgccactcaaaagcacactagaggggttttgagatgaaatccgcacacttctcagagccttcccagaccaatgcgcggatgagaacgtgcccattgcggggatgcgcccggctgcggatgtgaagaaacccctccgcaggagcagcgaccctgccatatgggccccgcacacggagcccccgccagcccggggcctcggcctcgggaagcacctgggaggcggcggggaaggttggccctggctggtctgacacacgcctcggggctcgtccttcatgggccaggcctggtgctccacctaccactgctgggaagccatggaggcttctcaagggtgacctgcgaggtgggggtgcctgccttccctcttgaggtaagaggggtctggtcccaccgcttgccgtaaaaaaggaggagcagctcaggtctgcacgtggccctgagcagctcgccggaaggttccagcctggtctttttattccgtttcccttcccagggccggtccagccccacagacaccgtctccacccacgagttggaggcggcctccctggctcatgcgccacaccttccttggcctctgcaggtgtcccatctcacccagaccctgcctctcaatgggtggtaccttcaactactcattctcccttctggagacgtcaaactcccctgactcctccttcctgcctgctccataaccggttggtcctgtccctcctttctccccgtgcccagtgccctggcttcagttctgggtctccaccccacctcccaggcctgcgcattatcagactgctctgatcttctgcccgtcgtccacctgctgccaggctcttttttttttttttttttttttgagacagggtctcactctattgtccaggccagagtgcagtggcaccatctcagctcactgcaacctctgcctcccgggttcaagcgattctcatgtttcagcctcccaagtagctgggattacaggtgcgtaccactatgcccagctaatctttgtatttttagtaaagacagggtttcaccatgttggccaggttggcctcgaactc

SEQ ID NO: 947 - DNA, 2346 bp, Homo Sapiens
ttcttcttcccacagtaggatctgagccacatgtgagctgggaagaggactgttttgttagtggcatggaagtgagaggggtcaaccctccagactaccagtcccaccactacaggtcccaccggcctcagcattcagccccatcacccaacctgccagccccaaaaccaacctcctcagcatctcctgagcacctatttgccccaatgccaagccaaggacagacttggtctccggccctccaggatcctgtcttcactgggaaggctggatagtggggagccggtagtccccagtaggtggggcccggaattcttcttgcaaccccaaaggaggtctaagagaggctgtttctgggaaacttgaaatccagccacatggggccaagctatcaggttgctttcttctactgtggcttcctgattcacctgccagagcctggaccttctcccagggccaaagctctttctccagcccctccctccactgctccccagggggtcttactctgagccagaaaaggtgctcgagacagaggccaccttcctttcacctgctcctgagcatggcctcttctgagaggccctgggtctgtgtgacacctctatggacatattgggaaagccagctgtccctccgcccctacccaggaggctggggctacagcagctggggcttcagctctctggctttctggttcccttcccacctgtcttcctggtaggacccagcatgctctgggacagagtccacctgacatgggacagcaggaggctgtttctgccaaaactgggtgaaagtggtgtcctcggtatggcttccccagccagaggggctatggtggtctctgtccttggtggagtctccggagtttgaaagagatggaagtttgggggcaaggatggagcccagagagaggcaggcaaacacactactcagaaaaggcaaagtttattccagtgttgacagagagagggtgagccttgcacagcaattctaaaaacatgtcatctccttcacctaagaggtaagaaccggctgtaagtcatggggtcactaaaccggccgcagttacagtaagcagaagaggtcacggctcaggccttctcagactttccctgggacacacggctctctgggggggcccggcgaaaccactcggaccaggagccatcgtacacggccacatcaggcttgccgcagaggtaggcagccaaggccacgtggcaggcggtgactcccttgcggcacgtggcaatgagaggctgcgagagatccaccttcttggtctggaacagagcacggagctcttctgggcccttctcgaagccatcctcagtcaggaagtccatgaaaggcatgttgacggcaccacggatatggcccgagtccagtcctgggcagggcagaggacacagcttaggggatgtatgaggggtggggactaatggggcctggaggattccatcagctatagctggaaggatagatagctttgcaaataaaaataacatctttgctctgcttggagctcaatttattcccagccccacctattatcatttctcatgacttaagatgcctgcaactcctctcctaacacctgtcttgaagtagagatgcccaaaatcacacctgcttgagaagacagcggcatgagtctcagctccactaacctttaccttgggcaaatcatttcacttctctgaacctcagttttctcatctgtaaaatgggctcagtggtacatacctatctcacagccatgttgagaagagcaaatgggacaacttattgcaaatgctatgtgctgagaacacagcggtgaaaggcagagacacagccaggccctctgggagattccagtctaacaagaaaggcagatgctaaacagataaccacataactaatcagatatgtccccattttacagatgaatccgctgagtcttggcaaaacaacacggctcacctaaggccacacagaaagatgaaggcagacccaggattacatcggggcctctggttttctgttaagcacacagttgcagaaagagcaagtgacctggtgtcagatgtgaggtcaaatcccactggagcaagttatgtcagctctctgagcctcagtttctccataggaaaaatggaaatgagagtatccactgtgtattggctgctgcacgaagcgggtggcacaaggaaagcgctggctttggaggctggcccacccaccctgccatgctgcgcccccagccacttcaccacccatggagggggtagggggagaatagggacagtgtgggcctttttggtcccctccaagaacttggatggaagcagagtggag

SEQ ID NO: 948 - DNA, 2400 bp, Homo Sapiens
tcacctcaaacctatgtttcagctgcttcctactcaaaatggaaataataatatccaccaaataataacatgtacaaaacacttagcagatagaagatacttaacaaatagtaggcttgctttcattatttcctgcaagagtttcctgttaatcacctggtttatttgcatgtgcaggccaaaccttttatgataaattggaccgtgtcttgtccttattgttattgttccacatagtttcattttgcctgatattatttggggtttagaaattttttttggctgggcgcgatggctcatgcctgtaatgccaacgctttgggaggctgaggtgggcggatcatctgaggtcaggagtttgagaccagcctggctaacatggtgaaaccctgttcctactaaaaatacaaaaaaaaaattagccgggtgtggtggtgcgtgcctgtaatcccagctactcaggaggctgaggcagcagaatcgcttgaacctaggaggtggaggttgcagtgagccgagatcgtgccattgcactccagcctgggcaacaagagcaaaactccacctcaaaaagaaaaaaaaaaaaaaaggccaggcatggtggctcatgcctgtaatcccagcacttttggaggctgaggcaggcggatcacaaggtcaggagttcgagaccagcctgaccaacatggtgaaaccccgtctctactaaaaatacaaaaattagccaggcttggtggcgcacacctgtaatcccagctacttaggaggctgaggcaggagaatcgcttgaacctgggaagcggaggttgcagtgagctgagatcgtgccactgcactctagcctgggcaacagagcgagactacatttcaaaaaaaaaaaaaagaaatctttttgtgtgtaggattctgatgttgtaaagagataaagattgatgctgtcaacttctggcctgagtgggcagtgtgcatagctgcagtgttctaatagcctgttttctcctttctgtctctccagctgtccctgggacaccccagtatgtggacgagcagttcctgtcacgcctcttcctatttgtggccctggtgatcatgttctggctcctgattgcctaatgctgggctcctgcctacatccgtggcagggctctggactggtgacgtgccaccccaactcctggtgtttggcttcctggctaatcttgactcctggaatcagtgggatcagtaacacatcaaggagtcttgtttcttcatcagagctttggaactcgagaccagttggcgatgacccctgaatatcgccaccgctgtaaacactctataacttcaggccttggcattgagtcatctctcatgggtgacaccatgaaatcttgtttcagccagttctgcaggtcctgactctgcagagggaagaggcagaaagagagaaactgtcagagtataatttcacctgagtttaatattacagaaacaaagggatgcaccaaatggtatttctggaaattttcatgtctttaaataccccttggtaagttgcttctgaagccagtgggggctcctcagatagagaggttcccctttcaaatcccagtgccgctctgttctctttccttcccctcccactccccctcttcttcctctgtagagatgcaagaaattgctgtcccataaaaatcataattgcagtagctaaagctggggtcacttcgtgaattcaccagagactcaaagatcttttattggctctgggctgtgctcagtgtctttggcctcagagaacaacttgaatgacttcctggtttcctggcataaattattcctggtgagacatgtggcttaactcacaggtttcccatcagctttctccctaaaactatgttcatctgcctctctctgccagagaacatacagccgagaatactgccgaagctgagactgactactgtgcattaggaaagacctggagtcaggactttggtgggatttggagctccgaggcagtaataactgaacaagcagccctgtcccctaggctgcagaagcttgaatgcatcctctcccagaacctgccacaggaaactgggggctttgtcaggtcagcccaactgcatgcaaaagaccaccatcctcagaagccaagttgtcttttatgaagaggcaaggaaaggggaaacccacatgtgaccctgattttggtatggcttgatagagttccctgaaaactccttgtatgtgtgctaaaaccagggaagcatgtgactgccaagcaggcaacccctgatgatttgtaaagccaggtggcagggccttggggagccccagcacaatgatattgtgtggtcttccctcctgtggaatcgaggggaaattattcttcccaataccttgatttgattt

SEQ ID NO: 949 - DNA, 2500 bp, Homo Sapiens
aataggggtccctgggcctctcaacaggaagtaccagatcaggcagctagcagacaatcatcggtggaccacagggccactagagtgagacctatccatagataaagattggccagtgatgaagcccatctgggtgcaaaggccgagctgagaggcttctaccaactggagtgtgccagtgagggtgagcagaaggtggtctccagggagaacatgggcagggtttggagccagcacctccccagggttggaggaagcagacccaggacctgcctgactgggatggggctctcttctgccatctccgcctccacctgcctagctctgctcccccgccccgagagatgcctccaggcttgggtagatgaagccaggggcttcctgccttcctggaaggcttttccctgtctggagtttatgaaagaccagcaggcaatgcggcaataaaaaagaccttggggtagaggggcgccacgagaggcgggtctggcgctgacatccaaccccgtgccccctccctgcaggatgctggtggactgtgtgcccctggtggaggtggacgacatgatgatcatgggcaagaagcctgaccccaagtgtgtcttcacctatgtgcagtcgctctacaaccacctgcgacgccacgaactgcgcctgcgcggcaagaatgtctagcctgcccgcccgcatggccagccagtggcaagctgccgcccccactctccgggcaccgtctcctgcctgtgcgtccgcccaccgctgccctgtctgttgcgacaccctcccccccacatacacacgcagcgttttgataaattattggttttcaacgatcctgactcctctctgcgtctcctgggggtggggagggggtttgaaccgaaggcagctccgcaaggtctccaactccagcagggatcctcagaggttcttcttccgacctcccaccccacccgcccgcagcaacgaaggagtcgagcctcagttaaggcaggagggaatttagtggagctggggaaggaagaaagtggggttgggagaacctccccaaccccatccctgctggcccggggacgggcatcggctctcagcaagagaagtattcccgggatgctgagcgcttcattctgtctccaggactcaggcaggtaggtcccagctccgccgcgcccccggacctacaggtcagcgtggtccgaagtttcctctgggggcttcgcgggcgcccacacgtactcggggggcacctgcgcgtcgggcgccgccttgcggtagaagccgagctcctgcactagcgcattgatctcttcgcgggtcatttcactgagtgggatgcgctgaggcggaggaggggcggggtcagcaggctgggcctcgcctctggcctcgcccccagcccacctcccacggcctcacctctagttcctcgtagcggcggcccagcagcacgagctcagggtcggccccagggaggtgtttcatcaccaggttgtgactggaggtggtgttaaggagcggggtggtgggcagagggaggtggtggtttccgcagccttactgatgggaacagcattgcctcctttgctcagagcttactctgtgcccgggaggggccagggtctccgcttatacgtgagaaaattagggttcaaagaagtaaagggccctcctctccattctgtggcagtcatcactagtcaatctctcttgcccacccaacatggagaccacctcagaatcctctgggagccactaccaatcaattcaacttgtcagttgaaaaccatctgccacccctttctgaagttacgtggagattctcccaggtgcccatcccatttcccctcccccagaacagaaggatactagaatggaatgtcctgcgtgacgaaagccttcacctggggaggaaccagagcatcagagaccatgacctcagtctactcgaggtacagacgagacactgaagcccagtgaggtcataaagcaagtcaggtgcaggctagactctcagcctaggctagactctcagcctagggatccttcccccctccccgccccagtcattgggaccatgttgcccactccccaagaggctcagggggaacagagctagggacctcttccttcaaactcacctcctttaggcggttcagctgtcatcccccgcaggtctggagggggataaaatgggataggtcaggagtccttcacgtttattccagtcacatccccaaagccatacttccttatccctgagttgggtcgggctgtgagttatccccggatcagcagttcccaaggtctgaaggaaatgctggacccttgtgggcagaagggggaactgtgtatacaggtggggagactcaggcctagagacaccaggggaaaagagcaaggccagagacccacagtgtgcctgccagccttggggcctgtacatcctactggctgtggactgactcccaatgcccaggggaaatgatcaccctgctcctct

SEQ ID NO: 950 - DNA, 2470 bp, Homo Sapiens
gtcccctgtcccacgaatgttagaagcaagcaaaaatgctttcatccaaattaccttcctcttcataaaaataagaaaatcatgtaatcaaaataatcttctgccttctcaatgagtttaccacctgattcagcaattttctaacaccttcatttgcctcattgtaagtagtcccagtgcatgctggttagatggcctctgggtctacatcagtccaactgaatcaggagaggagctccagaaggtgcactggacagtcatgccagaggccgtgtgcaattttaggttagatcagtggttctctgccctatctgaattttaaaataactgcgaaacttctaaaaaatatattgctgctggggttttatctatatagatcaaatcatctctaggggtaggtcctgggctcgagtttttttgtttttgtttttgtgttttttaatctccccagttgcctcctccgtgagcgaaggttgagaagcatagctgcccctgtgaggaactcagccttcagagagagcctgcccgccgcctctcatcctccagagaggctgtagggtgtccagactttgcaggcactgttgttcctcgttaagcctgatgctgccacctaattaacacttgtttatattaattagttgccatatgcattgaaggggagtggtcctttttgaagtttctagttgctgactatataagatttggcctgaagtgggacttctggaaactcaaccaagataacgacttccaggttcttccaaaagcttatcttccaggcataggcaggtaatgaaacaacccaactgcggttttttccataacatctttcaccccacagtatcgatggagcaggagggtgtggacaggctttcctgggtttttggtgctccttgtcaggtgttaaaacaaagaggatcattgtgtttcttggaactggcctaaacgtctatgtttaagattaagatctagggaaatgcatttccgtttgacacccactagtttctgattgtgaaaagggtaccaacctgtgcaatggcgccgcgacccggccgcggactccagcctctaaagtcgggtacctttaattaggagaaattaagtggggctgctacatattttgagaataagtaacactatttaaacttaggcagccttaaccactaacttaaccgctgaattctcgctgctacatgtctcctaaatagatcagcataatcttaactaggacttaaaatgcatcatcttcgttccggaactcagaacctgcagccgacgggagcctttggaggcttaatgactttaattatggcgagaaatatcttctcccggtggggaggggcgcggccggtggcgaggagggcactttcccgggtcggagaaggccggatggcagcccgccccgaaagtcccggcccgctggattgggggttcgggggtggggggaacatagagaagcagggctggtggaggggaggagggaccctgcagggcggtacacgacgggtgggagtggggaggaggagggctcctggcgcggggaggagccgcgggaggggggatgttggccgcagggcctcggagttctgagctgtgtttgtggcttcagcgctttgatctcctgccagggaaacctggaaggtcaggccgggctgcagccaagccctggagcgaggagccggcgggtggagctggcagcactgcgccacccaccctcacctcccaaccccccaagcagtgaagcccgcctggccgccctggcctctcgcccccgctcctgccgctgcccctgcccctgcccctctttacctcctgtgtgttggtctcctgtaggccgtagattaaggggctccaagtcttgaaagtaagctagccaaatgccctgcaagtttggcttagtaaaatcatgtatgttgtatatactttaaaagaaaccagatatttttttaaagctgtgtgcgtccctttcctccaccctcctcatccccaccctagtacaaattacccaagaaccacaggtgattccccctgctggttcgtgagtgttagggtctagtttgcctctcctcttctaccaccaccaccacccccgttcctggcaccaggattttctcaccggttacccgtgtgctcttggtgtgtgacctcatttcctatggaatgaaaagtttctgtcggaaaacagggcccttggtgaggcaggccttgggagcccccttgcccagcgagaatgtcctgtgtcatgcagtgactcatgcttcagagaacagcagctgaccagaatgttcaagagcctggtgcctgggtggtcactactaagtgaagaactcgaggaggaggaaaggaaaaagtgaggagtaaggatttaaaatccacttagtggcctccagagggagggggataacaggactcaaagagcctgggctctctggcctggggtaggacccgccaagagggacctgtgggcgtcagg

SEQ ID NO: 951 - DNA, 2491 bp, Homo Sapiens
aatgcaaaaatgctttgaagaaagagacattgagcattggaaccaagtattctacgtcctcttccctgcaacactggggactaaggattattatctgcatttctggtgaagaaactgaggcacagagaagataaactatggttctccggctacaaagtaagcagcagagcctagagtttgaagccaggtctgacacctaagtcccgtagtaaacctcccactgaggtaggcaagcctcgccttgcagagagtggcaaattagggaaaaaagaatcaaatgtgcttgagtttaacagaacatatacattatacttaaagagaaagatacttttcttacaaaaagtttgaggacaaatgagacttcatgtgatgcgtcttgcactaaaaaaaaaaagttagattatataagccagactggcgttgattaaagaagagcaaggtaataaatacgcataagaagaaggaagtggctggctctaccttgggcatcacccaagttacaggcaggggaggggataggccctgcatggggacagtctcctgacttgtcttcttccttctctacttccctcccttcactacccctccctccaaaacccaaaaaaccttaagcaggaaaaaagggagctaattaaaaaagagaaaaacatccttgagaccaatgaagtctccataatccacagtgacagacagggacctgcagaacagcaatttgattaaataaggatataagggatttaaaaggactctccagttgtgtaaagtgtgtccatacgtctgaaaaataccgtatttatttggctcccaaacctgaaaaccttctgacgggggagattgttcccatttggaaactaggaagaaatcacaaggcaaggccatggggttctggcagggctggggatcccatgttgggtggaaaccccaagaagccagccaagggtctgcaggaggggccctggcagagagaagcattagaatgcaagggcaggtaaagccaccctcacagaaggtgactgtgggctgagcctgaggcccttcccagatggggaagagagaacagcacacctctcctgcccacgcctcggtatctcactcaagaatcagctgcccgttagtcacctgtcatcggagacagctctgttggcggctttcagaaaaagcgaagcagccagaggatgaatcgttattcggggaacacacctgcacacaggacaggaatggatgggagtggggagcgccctggggctactgttcaaacgccatcctcatggtctccaagacttgcatcagcagctcagccgctgatgaattataattctcggacaagctgcagaggcccccctcgttccatgtgttcacccctgccgctcatactgggggatttatgcttcctggggctaggaggagaaaataatgagtcactggggacaagagaaaaacaaaaatgccctgtatgtgcaaaaccacctaaaatggaggcttttagaggacactcaaatcccagccaactagccagaaagggttttgctgggggtatattttatgtgtctttgctatctttggatgcagtaaagccagaaatgtttatatctcttggagggatcacctgtgcaaacaggacaggtcctcttgagaaggctgtttgttctcctgggatctcgaacctgagaagaaatggtcctggcctggcgcggtggctcgcgcctgtaatcccagcactttgggaggccgaggcaggcagatcacaaggtcaggagatcgagaccatcctggccaacacggtgaaaccccatctctactaaaaatacaaaaaattagccgggcgtggtggcaggcgcctgtagtcccagctactcaggaggctgaggcaggagaatagcatgaacccgggagctggagcttgcagtgagtggagatcttgccactgcactccagcctgggggacagagtgagactccgtctcaaaaaaaaaaaaaaaaaaaaagaaatggtcctgcatctctgacttgggaggtccaattaagcagaggaactgttggctgtaaaccttctaaagcagaggatcctttgggaggctgaggcaggtgatcatctgaggtcaggagttcaagaccagcctggccagcatggcgaaaccccatctctactaaaaatataaaaattagcggaccgtggtgggctgtacctgtaatctcagctactcgggaagctgaggcatgagaattgcttgagcctgggaggtggaggttgcagtgagctgagattgtgccactgccctccagcctgggtgacagggcaactccatctcaaagtaaataagtaaagcagaggaccctgatggccacccccaagttcatagctacctgcacactttatgtggtgaagcactggtggggggcccaggaagccctgcatgagttggttgtagctgccatgattccaactcccacgccaccctctgcacctagccacagagccgcatctccagaga

SEQ ID NO: 952 - DNA, 2478 bp, Homo Sapiens
ctcttgcagctaggtatgttctggcctgagaagctaagtaagaatgttatgtagaacatccaggaagcctcctttaaaggagaggggcatgcccttttctctcctgtttttccacctgctgcctggaatatggctgtgatgctggggctccagcagccaccttggatcatgaggtggcctagaggaaggaagccaggagttgagaacagcagagcaaaaatgtggtccctgatgattgtccagccaccacaccagctctgaccttcctacctctggacttcttttatgtgggagtgaaataaactttcaccttaagctgctattttccccgccccattatgtgaagctgaaacaaatcctgacagaccctcatagtatataaagatgaggccatacatttcctatccacatttgcgttataacttgtttctaggaggagactggaaagcagggctagatggcccagaggtcctatggggctgaggtcagcaggcctggccattgggccccatgggatgaaggcagaaaaggaagctgagcctggtgtctgagacggcccctcaattacgccatctgatctgtgactctgtggagggcaaggtttcttttgccaccttcccagcaccacgcccgaattcctgggaagttgccggaagggaataacagaacctgccctacttccttcctttctttgcatgagggatagggagaatccctgactgagatttatacttaaccccgaaggaaagaggaacgtgaatgtggattggaaaaccactgcggggtgtttgttaggctctgggggtgggacatggagggcacccagggacatcagggcagatgcccaatggtggagccccgctgtgtactgcaggggcagggctcactttgcaggccccttggaaggtccaacataggtcagagatgctcttcagagcctgcaggagagcccaggtgtggggagagggctcggagcagcagcagcagtgatggcagtgccttaaggaacctgggctcaggcactgaccctgaggagctggcgatgcaggtatggggcatccacgcagggctccagcaacctttgggaaggagaacccggggtctgaaggtgaggcgagtggacccaggactggataacttgggggtcccagggaagtgagatctgaagcagccaggtcacaccgggccttcggcagcaggtagagggctccccgtgggaagtttctggccgctggcatttggcagctgctccctgcagaggcactgggcgcagagctgtgctcaccgtcctgaaatctgcgacgcttagcagccctgttccagcctcatcatagcttttgaacgtgcgccgcattggcctccagcagtgcacaattttgggctgaatacgcagcagagcagagtaaaaagatggcgtctccgcgccggcttctttctagacacaagacaagaaggggtgaggagggagcttttgaacacgagggttggggtgggctcctcctcgcctcgcccccgcctcgcccagccctgctccggcttcacctcccaacctgctccgctggctctgaatcgaggagggagcctgccagaactcgtcacaaagatgcgcacccgccccctgaccattgtgtgggctgtttaaaaacgtgtattacatcagccatctcatttacacctccccactggcaacccggaaagaaggcaggtctctatccccacttcacagattaggaagtggagactcggggaggtaaagtgacttgggctttgaccccaacacacttcaggccacaccacctcccagggaatgcaacgagatggccgggcagatatgggccaatttgaaaatagtttgaggaaaaaaagagatttcagtctgtgttttctagtaagttattataatgaacagtgttaaaaaaaattcacaaggttgtaattatatctagtaattagaacactacactgtgattacttcatttaggtgctattagattgaaaacaagacatttgaacatgatttagccccaatgtgtttgaatatcacaaaggtgaacggtaggcaacaatgcgtaacacatcttgggaaagttgaattttaacataacactatgtaagacagatgagcacagggttaagctgctttcattttttttttacatcatttggcacgtatgatgtgtgctccccaggtacccaagacttcatgagctgccaatttgcccaatcagctgatccacaggtggggaagagagggtgtggggctcacatgacctcccacaccacacatcacagggcaggaccaccagcccggccagagcccccacctctgacccaccttgcagggaggggcggcacccaagctgccttcccccgaggacatctttctgctgcctaatggggtggagaaagctcccaaatcaccagaaaatgaagtcccctttttagctcctctgcagggagacatttgacctgacctcc

SEQ ID NO: 953 - DNA, 2292 bp, Homo Sapiens
aaggggctgcagtcctggcttctggtgagaggactgcagtgccggggctggttaataagcacccttcatcctgcaggaggccggcgcagcatttgtgagtatctgtgttgaatctcttcgtggatcagatattgtgtcttcttgctcagagtcaggttggaaaaggaaaacttgccgccggtgtgcatgtgctccaaatcctcagcttgggcaagggcacgggcgtcgtgaataaaggagccattcttgctggccttttctagaaattgcccacagcttgcaaaaaggctgtgttccctggccccggctgcggctgtgtaggagtctgaatatcattttccccagaagttgaggtccctaggttaggcccaccttgtcccaaatgggcagcattggccttgccccatgcacaggctccaggcggacagagctgctgcaggcatgctgtcagggggacaggctgccccccagctgtgcatggcagtgtgtcggaaagaacaaggcctgtgggtgcccctgagccgggtctggagtcctgtcctgccacttctcagccgtgtgactggagcctctttgctcctctctgaaaatgggtctggtggtttgttcccaggttcttaaccactgtgtggagtcacacctgcagaaggtcagctcataacagatatggcaaccaatgtgacctttgcatccttccttcctggggtcaggagcaggtctaagaggtggtcaggctaaacccctgtagggctgtgggtactgctggtttcctaagccccgggaccttctgggggccgggcggaccttaagttctgtccacctgcctctcctccatcctcactacccaccttgtccttccggctccttccctccctgctccgcctctcatcggccctctgtcctctccgtccggagaggggaacgtgaaggaggtgaggagggagtagtgcaggaggatttgggtctctccttctttcccttttccattctccgagggcttaaccagctggtgaaggttcttaaccagcaaaggaggaagcagccggggccggtgagggtgaggccggcagccaggcaggaaggcagcaggaggaggaggaagcggaggcggcaccttctgagaggcgcatgctcagtgagtcgtgaagatggcagggctggcggagcggccgccgcatctgatctctcccctttttttaggatatgtgatggcgtccagtttggagctgggataaggttcctgtagccgacacccctacaggagaagctctgggactggggcagcagcaaggcgcccatgccacacaccgtctctcgaggaaacgcggttcagcgattctttgactgcggaccctgtgggaaaccccgtcaataaatgttaaagacacactccgaggcagcgtggatgtggtttgctttcactcaacagtatggcccgcgtggcctttccccgggaccacccgtgttctcacacacccgcccagtgtctgcgagtctccgtgtttggttcccgtgtaccagacatgatgtattcagagccaggcagcaggagggagctttgccccagaggaagctcagccatgctgttacggagagggcgcgctcccctcgatgcaccagccgttgtcagaggaggcccacggcagcgggcgcttggagccacagtgctcgagccatttgagtgtgtgagtggcaagggagaaatacccaaaccgtgtaacattagggacactgaagcaaagacggagcctggtgtctacagacgaatggcagcatgaatgagtgtgcgttttctggggctgctctaagtcaccacaaacgtgggggcttaaaacaacacacattaatcctcttgtagtctggagatcagagtccagaatgggtcttgctgggctgcgtcctcctggaggcgctaaggggaaatccccctcctttgccagcagtgagaggcaccacattccttggccgacgtcacctgcatctttaaagccagccatgtggtgtcccccatctctccctcttgcctcctctgcgtctctgctgtctttgaaggacccctgtggtgacctcggatctgcccggggaatccaggggtcttatttctaggtcagcagatgagcgtccttaattccgtctgcagacttagcgcccccttgtcatgttatcgtcacgtttacacgatccagggattaggaggtgtgcgtcttcggctgggtgggagtgcgggacattattctgtctcacacaactagtatctctctaatatttgggggataatcttaaattggtcac

SEQ ID NO: 954 - DNA, 3056 bp, Homo Sapiens
gaagcgcacacatggggccatccccaccccacagggctgccctcctgccacccagcagccgtgatgaggacatcgtgatccctgcggacaagtctggcaaaggcccccgaggcactcacgtcttgagccatcccagccctcccgccttcggcacgccttgaaggcctgaccatgggggtgacagcctctgagaaggtggtccctgtggtacctggcagtggaccgcaacagtgcccgttactttatccgcttaacaagtggtcaccaggaagccctggaacaaagcccagaagaactgggacaggggccgctagggttgctagtggggacagggtggggtataggaagctgtaggacagatccagaacacggggccctgctgggcaagagggcgacaggcagtagcctcagtaaatcgaggaactctccatgggacctgaaagctgaagacgggcagggagtcctgtcctgacctccaagaggccggcactcccgcacccacaccgcggccctgtgcttcccgcgcccccaccgcgtccctgtgcttcccgcgcccccaccgcggccctgagcttcccgcgcccccaccgcggccctgagcttcccgcgcccccaccgctgccctgagcttcccgcagccacaccgcggccctgtgcttcccgcgcccccaccgcgtccctgtgcttcccgcgcccccaccgcggccctgagcttcccacgcccccaccgcggccctgagcttcccgcgcccccaccgctgccctgagcttcccgcagccacaccgcggccctgagcttcccgcgcccccaccgcgtccctgtgcttcccgcgcccccaccgcgtccctgtgcttcccgcgcccccaccgcggccctgagcttcccgcgcccccaccgcggccctgagcttcccgcgcccccaccgctgccctgagcttcccgcacccacaccgcgtccctgtgcttcccgcgcccccaccgcgtccctgtgcttcccgcgcccccaccgcggccctgagcttcccgcgcccccaccgctgccctgagcttcccgcagccacaccgcggccctgagcttcccgcgcccccaccgcgtccctgtgcttcccgcgcccccaccgcgtccctgtgcttcccgcgcccccaccgcggccctgagcttcccgcgcccccaccgcggccctgagcttcccgcgcccccaccgctgccctgagcttcccgcacccacaccgcggccctgtgcttcccgcgcccccaccgcgtccctgtgcttcccgcgcccccaccgcggccctgagcttcccgcgcccccaccgctgccctgagcttcccgcagccacaccgcagccctgagcttcccgcgcccccaccgcagccctgagcttcctgcgtggcctgcgctgcctcagagcccttggtgtggggtggggcacacaggcagggaccaactcatggagtctccagcctgctttgcagtgttctttataaaagctatggatcctcccctgcctgccacatgccgtgcccaccactgtgacggtttcttccacggggacctccatacgacagagagcaaggcgtcagttaaggatcactgggcagtcgggggctggcggtgctaagcagcaggaagcagcccagctggatgaggagcgctggctgtagagactcctctgctgggccctgccacccggcaggattcccacggaggagctgcacccacatcccaccaaaacctccaatttctgcagaataaagctgagtcccagagaagggaagagacttgcccaagtcaccaacaggtcaataatcatgggggcccagacagggaagcccaagtggcccgactgcagcccatcatcggtagctaagtccaagcagatgagtccctggggcagaaggaagagtcaaatggccctgtgaacacggaaggtaaagaaaaaccccacttcattccaaggaagcatgtagcaagatgtcaaaaacagacatcccggtgacatggagttgcagggggaaatagtgtgaggactctggaaggagcaaggcatgaaggactgcacgtgtggtcctgcgctgatgtgaggagcaagtgcacggagtccccacagcaggaggggggacgggaatgagctgtaggttgctgggtggagagccttcccaccggaatgcctgagaggaggcgaggacgccgggcccctccacgcttttccctgggctccacgctgctctgtgaaagggaagggaatcatccatctggaatatgaaggaagaataacaaaacctcactgtccaccccagagaagacacggtcacagaggctgcatgccacactgcgggtgccacagggagcctgtctacacagcgtcctcacactgcaggtgccacagggaccctgtctacacagcgtcctccgactgcaggtgccacagggaccctgtccacacagcgtcctccaactgcaggtgccacagggagcctgtctacacagcgtcctccaactgcaggtgccacagggaccctgtctacacagcgtcctcacactgcaggtgccacagggaccctgtctacacagcgtcctccaactgcaggtgccacagggaccctgtctacacagcgtcctcacactgcaggtgccacagggaccctgtctacacagcgtcctcacactgcaggtgccacagggatcctgtctacacagcgtcctccaactgcaggtgccacagggagcctgcctacacagcgtcctcacactgcaggtgccacagggatcctgtctacacagcgtcctccaactgcaggtgccacagggaccctgtctacacagcgtcctcacactgcaggtgccacagggatcctgtctacacagcgtcctccaactgcaggtgccacagggagcctgtctacacatcaaactgaaggctccacagggacccagtctacacagcatcctcacactgcaggtgccacagggaccctgtctacacagcgtcctcacactgcaggtgccacagggacccagtctacacagcgtcctcacactgcaggtgccac

SEQ ID NO: 955 - DNA, 2500 bp, Homo Sapiens
ttgaggcaactcatgctgtcaatgtagagtgaaggccagacatttcataagaaatatgcaaatgtccccagactcagaaacttcttttttactttatttgtcccttcactccaagggaagctaacatcttggaactttgtgtagatgctaccaagaagaagaagaggggcccagaggcatgcagaacccagctgaaaaagaacaacccacttatgtctgaagttctaaaccagctttaactactcttgttaagagctgaggaagggacttaggagaaaggggaccaaactcattcctcctctccttacgaatttcagtataacttgttctaagctaacttttattgaatgttgtgggctgactgctattctaagtcatttgcttctctcaaacaccctaagaagtgctttgacccattttacagatgaagaaactgagacccaaagaggttaagtaactttccaagtggcgaacacaggtggcagagaagattgaagattcaaactctggctgtcagcctccaaaacctgaatttaccactgatctccatggcattggtttggattagattacctttaacatcttttccaactctgagattctaggattctctgatgtcaggacattataaacctattataactctcctaaatttgtcaaaccaattctagatctctatgattacagacatgatacttttagaatcaatatttaaatcaaggtaggattattacacagaaaacacaactgagtagaatctacctttgccatgttgttcttttcagaattgaccctaaaacacagcgctatgtttgtcagagccagtcatttgtaatgtgtcagaatttcgactctaggcaagtgctaggagctaaaatgcaggttccttcaaacttccaagtagctgcggtgccaagctgatttcgatgagttgagttcttactgagcagttcaaatgaccagactgtaaccaggggcttcattctctcacccacgaagcactagggcagtcaaggggaaagactgacgcagaaggaatgaggttcccatgggctgggtccaaaagacctagagcgagtgcttagttgaaacatttgccaaaacctcaaggaacacccacacaaaaataagaagttgctcggcacagaagtcagggtaggggatgttcttcgaaggccacactccatggcaggcatacagcagcacgcttaaacatggttcctgttaaggctagagaggcaccattcacatagaagaagtcatcatcgtgactctacccaccccgcgcccccaccgcgtaattgaatgctgagtgtggacggcacttcttccagcacttggctgcgttaccgtgctcagttggcaagccttgggggagaagagaggttcagaaggaagaccatctgagtccatcagaacaatgtgtgcttttaacaaggcaggggcgcccaaactcagtaggtccaacagaccaagttatgctatgaaggtcttgtggaccacctacccccgccaaccagtcaccacttaaaagatgagaaaacgccagctcacaggccaaatgggaggcatttagaagagacaccaatgaagagatgtctggctttgtattaattactgtaggtaaattaataccaaatgccaggaagtaaagtagaggcattttcctattataaacccttgggacaagcccagagaccaccagcagtccagggcttgtgtacgctgagaactgaggggataacagaattgtgcaacaccttggtgccccaccgcccccgttaccaaatctcacagttcacagtatcgccttggcacactgggcttgtgtaatactcatggacttgacctggaatcacaaagcggactcagcttctgttacattcattcaccccagtgactctgggcacacactgtgcctctgaaggaggcacagtggccataaatggaaatagcatttgcctgcttctggggaccttggtcatagacttctgaggctttcctgggagccagtctaagataatgggtaagagtatggactctgaaggcagagtcctctgcttggaatcctagccctgccatttcccaactgtgtggccttaacaagctacttagcctgcctgtgactcaggctcctcatctataaaatgggcataatagttcctacctcatagggttgtcatggtgattcgtgggctaatattaaaggagatttctcaacctcagtaccattgacatttggggccggataattctttgttctgggggctgtcctgagtattatgggatgtttagcaacctccctaccctctacgaactgttgtgacaaccaaaattgtctccagacattgccacatgtcccaaatatttcctaggggggcaaaattgcctccagttgagaaccactgtattagattatgtcgtagatacaaatagccaaatatcagcaatttcacgtggttcaatctaacaattataaagtatttaacagttaaaactc

SEQ ID NO: 956 - DNA, 2780 bp, Homo Sapiens
cacgcagctcaagattgccagcaatcccttcgcgaaaggcttccgggactgtgaccctgaggactggtgagtgtcctcccccgagagagtgagcgccgggcgcctggcgcaggcgccgccctgatccgcctcccgcccgcaggccccggaaccaccggcccggcgcactgccgctcatgagcgccttcgcgcgctcgcggaaccccgtggcttccccgacgcagcccagcggcacggagaaaggtagggccggggtcgtgggatccgggttccggccctgtgcgcgctctaccccgggccggcggcctcgcccgacctcgcctgcgcccccggggcgctccaggctttcgcgccggttgcacaacggccgcggcggcgggcaagcgcgcactcgcccgcccggcccgacggctgcgccccgcccgccgccgccgccgcccgcagaggggcgcgggccccggggagggctcggggcgccggcgacttggggtctcgggcacgctggcaccgactggtcggggaacaccgagggcggccaagagccttctctccgccagggcctcgcatggggcgtcggagctcctcggcggccccggccggccgcgctcactcctcggccctctccgcagacgcggctgaggcccggcgagaattccagcgcgacgcgggcgggccagcagtgctcggggacccggcgcatcctccgcagctgctggcccgggtgctaagcccctcgctgcccggggccggcggcgccggcggcttagtcccgctgcccggcgcgcccggaggccggcccagtcccccgaaccccgagctgcgcctggaggcgcccggcgcatcggagccgctgcaccaccacccctacaaatatccggccgccgcctacgaccactatctcggggccaagagccggccggcgccctacccgctgcccggcctgcgtggccacggctaccacccgcacgcgcatccgcaccaccaccaccaccccgtgagtccagccgccgcggccgccgccgccgctgccgcagctgccgcggccgccaacatgtactcgtcggccggagccgcgccgcccggctcctacgactattgccccagataacacgggccctgtcgcgctcccgccccggtcctgcacagccccgaagttcgccgggcccggccaccctgccccaagggcaagcaaggaatacgttcccccagccccaggggccaccgcggctctccccttccccagcctcgaagccatgggggccccctcgccacccccagccccttgggctatcgaagtatccggttccccagtccctggagccaccgcgggtccttccccggccccgagggccaagggggtccccgcccgccagtgccaaagcgcccggtcggaggcggaaggaagtgatatttattgttctccccgagaccgcgtcgcccgcggcccggccggcagttgcagtgtagacagcccgagagccccgcctgcaggcggtgtagatacatgtagatactgtagatactgtagataccgccccggcgccgacttgataaacggtttcgcctcttttggaagccgcctgcgtgtccatttatttgtgcccagttagatcgcgttgggaatcttcgggacagcgagcccggggtagctcagggccctcagggcctccccagccccaatccctgccgactgtaggtcggtcccggtcccacagcgccctgtccgccacgcctcctgccctctgcccgccccataggggctcccactgcccctcccctctccgaggcccctcctgccaggcctgtgcactccccccaccttcccaccgtcccgtctcatcccaacctccccagggctggtggtaccgcccaggtgtgcatcctgcctttttacttaaattcctcccacctgcagttgtccctattctgggacttgggcctgcgccctggcctgttttcgggacagatgcttgtgcttttccatggaagctgggaagaagggtcatgacagacactgccggtcggtgctgggagggggagaagcccctgaccgggatggggtcatggaaagacaaaaacaggcagcactgttctgctagcatttcccctgccggcctagcccaggcccgcatgttccctccttagtgactttatttgctgtgagtgtccctacggagtgacctggccagggggcacaatgacagtagccatgagtcatcttgagacctgtgtatgaagcatttttcccaggccaggtggctaagggacctctccccgttaactcaacaccagggatggggcgagaggaactctttgatccctcccttcctgagcgcaagcaggaagggctgacagccggtcagcgccaaggctgctgacttggacacaagatgaacgggaagtgcacgtggccgaggctctgtcccccacctcccgtgcctgtcccagtgtgtttgtggcaactgctgccttctaggccactcggctcatcaccccacgtggtagcggcagcctgagtgccacctctccgagggcacagccaggagtttccagatgtccaccctcgcggacctgtttttcgtatacatgtttgctctggcggcgtgaagtgagtggggtcttagtaattgaatggcaggaaccattcccagaggccagtctagggtgggagggggtctccaggggccatccaaagcctcaaagggcatctagcaccagagagtgaggacctctgcagcatctgcccaggctccgtgagcacggctttggagatgcatttg

SEQ ID NO: 957 - DNA, 2333 bp, Homo Sapiens
gcgcaaaaggaatcgttggagggtcttaatgacccaaactgaaaacaacgacaaaaagtcttcaaggcatttcccatttacacagtttaaaaaataattatgaaaaggaacaagacaactcaatggtctgactaacgaggcgtcggccattgtgctgtgtgttggggtaggatggggcctcacctggggcctgcatttccaagtttctacagagttctacactgaccccaaggtggggtcggttggagggatatttaagtccagtaaatataaatgcaaactgcacttccccgtgaaaaagatttgaaaaatattgcagcattctcaagctgcaattcaaagattgacggggcacattagggttcccgagatccttacgagagagatggtagtgaggcatcggaggaggtttttgcaaaaggttcctcctccctcaccatctctgcccctacctgcactaccacccctgagccagtgggtatgtgaccatctatgtctgggaaaatcccttctcagggcaccactaaaagatatctttagatgaaatcgatgtcgagggaggaattttcgcccgtgctgtctccacctgctcaggcttgcaggggtgtgggcgtggggccatgtgggtgtgtttgggggtctgtggaggatgggggagggttgtaggagaatccttcctgttccccaattctgaaaagtaaaacttaactcacctgtttacaaaataccagccattgtcttaccccagctcactgtcaccctgtaggctcgggaggattttgttgaaggaaaaaaaaaatgtcttaagtatttaaacacgttgagccatgcatgcatccgtccacagtgctgtgggttgttttttttttcttttttttcttgtcccctccctcccttcccttttctttttaccaaagtatattcatcaaactgctgagttggaaagatttgtaatgagtttttgagctgtacgactgtgtttttttttcctctccccccgccctctccctctttctaaatcttcatctgacattaaataaagcaaatcccaaacagattaactgtcgcacggttctgctccgtctcctcagtctgtttccaggtctggcggggggccgggctgcggtggcggcagcggtgggagatgccggggcggccggcggaggtccatgtggcgctctaggtgggatgccagcgtcctgaaggcggaggccctggccctcctcccctgcggcctgggcatggcattctcccagtcccacgtgatggccgctcggcggcaccagcacagccggctcatcatcgaggtggacgagtacagctccaaccccacccaggccttcaccttctacaacatcaaccagggccgcttccagccaccgcatgtgcagatgtaagtgggaccggtggggtgggggtgggggcggtgacggccccctggggtgggtgcatggtctcgggtgcctcctggttctgggggcactgtaacaagcattgaatgtttgttgactgcaacaattctggaattctaggatcatcggggctctgagttgggagggaccggcaagaagttgcagatggatggcctgtgggccgattctggccgcagtcctgtttcacttggccaggagcatgttttacaaatatttaaagatgaggtggatgcacagaaaactccagacttctggcttcactttataaaacccaaaggcctggaaaccccaggcccacatgtcctcctggcagcgtctggcgggggccacattcccgatccctttcttggcatttgggtggcgacccctggtctgatttacgctcctcattgtacacatggggagaccgagccccagagaggggaaggggctcgccacaagccccatggcaggttaggacaccagtcttgggctctttgtttcccctccctgcccttccttttgtccagaccctgtgcttctcttgtgaaagcagagatgcttttccaaaaggactgggggattctgttgtctgcccctcggggcattgggggtgctcaagcagtgaggccctggggagcacacagactcaaggcccccgtgagcagcaggaggacttgtcctgatgcctgtgtgcggggccagcctttccctctctggatttcccgaggacctggaaagctgtgggtagcttggggtggctccagaggtggtcgagctcctggccctgctctgggtggttccctgagttcctggagcccccctcctcctttatccccattgcttctcccatgagccctgcacgacagagcttacctggtgaggaaccaggggcccaggcccgtgaggtgccccaccctg

SEQ ID NO: 958 - DNA, 2567 bp, Homo Sapiens
attactcttgtgccaaaatgtccttgtaattagcagttctggaagataaattgaaatatgtgatttttcagggtccagccggcctcgggactgaaccccagtgtgtgtgtgtttcagggcacaagcatgtgtgtttcaggacacgcggggtgcaagtgtttcggggcatacgcgtgtgtttcagggcacaccgggtgcaggtgtttcggggcacacgtgtttcaggacacacggaatgcaggtatttcggggcacatgtgtgtgcttcagggcacaccgggtgcaggtgttttggggcacacgtgtatttcaggacacacagtgtgcaggtgttttggggcacacgcgtgtttcagggcacgccgggtgcaggtgtttcagggcacacatgtgtttcaggacacacggagtgcaggtatttcagggcacacacgtgtgtttcagggcacgccgggtgcaggtgtttcggggcacacgtatttcaggacacacagcgtgcaggtgttttggggcacacgcgtttcagggcacgccgggtgcaggtgttttggggcacacatgtgtttcaggacacacggaatgcaggtatttcggggcacacgcgtgtgtttcagggcacgccgggtgcaggtgttttggggcacacacgtatttcaggacacacagcgtgcaggtgttttggggcacacgcatgtttcggggcacgccgggtgcaggtgtttcggggcacacgtgtttcaggacacacggagtgcaggtatttcagggcacacgcgtgtttcagggcacgccaggtgcaggtgttttggggcacacgcgtgtttcggggcacaccaggatgcagatctcttactgggtgcaaagcccccaactccttccccgagccaccagagtacggctcccagatcggagcagcccctcctcgggccaggcagggtgtggaccctgccctgaatgcactcagcttccagccgattctgcccctccctccattcactgcacaggcaggcgctgcaggccgtagggagggcgtgcgtctcggtcctcccgctccgtgtccagtctgggaagtgtctcaagaccaccctgggagaggcctgggctgcggcgccttcgtccctctgctccgcgcaaggccggggatcctgctctcccggagcgagggtgtccggcaggcaccagcggccagcagcagccggggccgggcctcacccgaggaccgaggtgccgatgaacgctcatgttcggaagacactggctccctggtttatgtatttacttaattttaagttaggctccccagatccctaaatcaacagtggattctgtaaattgttgcgtcagaggaaaatctaagcgagcccgatcgcgggaagcaccgtcgccatgaaaggcggtggctcagcgccacctgccgggacgcggcagccaagggagccggtgtcgggggaggcctgaggcctcgggtcctcgggaggaaacagagctgtttgcaggaacaaaggaggaaaggagggccacggctgttcgaagaattcttacacgaaaggcatgaaattagttggaatcatttcaaggaaaaaatcttcctccaaataggcgctcctgcgtttagcagaagtgggtttcattgccattgagcacggcctggggtctgcggggctgttttcagaaccggagggaagcaatccagctgcacacaagaggtcctggggagaggaatcctccagggcctggagtccccgctcgagctgcgtcacacctgctgggttggaagcctccactcagcgggagaaacacaatccctggctctggtgtttgtggcagtaaaatccccatccctgcaaagccactgggcggaggccaggccttgcaagaggcctccctttgctggaggaagccctgggccctcggggaccccgcaggaggcagacgctggggacagggtccggcccacgggcagctgcgtccctccccagtcctggcctccctgcctcctctgctctttctgatccccccaccggctcccactgcccacagggcgctgagccagcagcagaaactgaggtggagacagccttcggccctcaaaatctgtgaaggagtctggaccctgggaaggcaccgaggactgcccaggatctcagaaaaggatgacagccaggtcccttccttccttccttcgtttttcaagttgttgggttttttggggggggggggttttgttgctgttttgagacagagtctcgctctgtctcccaggctggcgtgcagtggtgcgatctcggctcactgcaacctccatctcctagtttcaagcgatcctcctgcctcagcctcctgagtagctgggattacaggcgcccgccatcacgcctggctaatttttgtattttcagtagattcaggtttcaccatgttggccagtctggtctcaaactcctgacctcaagtgacccacccacctcagcctcccaaagtgctgggattacaggcatgagccactgcgccccaccgtgtttttcaaatgttgatggcagctcagttgccccccatttcaataaatg

SEQ ID NO: 959 - DNA, 2312 bp, Homo Sapiens
agtgaatgagtgcttctattttttcctgatacatggcttaagtgtatagctcaatgaattatttgtcccctattcagtcagtacctgctcagaggctgccatcattctgattgctaatagcatcaattggttttgcctgttactgaacttccttgtttttttttttttttttttttttttttttgagacggaatgttgctcttgttgccgaggctggagtgccgtgatgtgatcttggctcactgcaacctctgcctccaaggttcaagtgattctcctgccacagcttcctgggtagctgggattacaggtgcgcaccaccacgtccggctaagttttgtatttttagtagagacggggtttctctatgttggccaggctggtctcgaactcctgacctcaggtgagccacccacctcaacctcccgaagtgctgggattaccagcatgagccaccgcacccggctgtgttcttgaactttctatacacagactcacttgggtccccgtgtgcctagcttctgccccgcgtcagttggaggcctccatccgtgtagttgggtgtgatcatctatcctcttcagctgctaatgtttggaccccggatttcctcctctgtcgcgggcctgccgtcaccgcccattctgtcttccttccaggtctccacctctgggcaggagagttgccgaccacctcgggggtgctttctctgcgcttgaacatctatagctgcttctgaggggctgggagccgggcccctgggagagacgagccatgaaccccccacagcctctgcatttggggacctcaccttaggagagtgccatttacagcttccgccagggcaaaggagctgagcagccatcccaagcccagcccacctccctcccccggcccctggtaggcatggactagcagctgtgagcagccagagctgatgcccggcccccaggggggcagaggcgccgccaccatgagcctgggcaagctctcgcctgtgggctgggtgtccagttcacagggaaagaggcggctgactgcagacatgatcagccacccactcggggacttccgccacaccatgcatgtgggccgtggcggggatgtcttcggggacacgtccttcctcagcaaccacggtggcagctccgggagcacccatcgctcaccccgcagcttcctggccaagaagctgcagctggtgcggagggtgggggcgcccccccggaggatggcatctccccctgcaccctccccggctccaccggccatctcccccatcatcaagaacgccatctccctgccccagctcaaccaggccgcctacgacagcctcgtggttggcaagctcagcttcgacagcagccccaccagctccacggacggccactccagctacggtgagggcctgggccatcttggcccacttttcagaggctgaggctgaggcccagaggggttcagtggctcctccaagctccaagtgagctccaagtgaccacagaggtcaggcccagaccccacatcatggatggggagggggtgcagtggtgggaacaagctgactccccaaaacacctgaggttgagagtgaggaggtggagtttgaattctagctgcccctcacttgctgtgtgacctgggcaagcacatccccctctctgggccttagctgaaccagtcacccacccattcttgcccccttcaaccaaagccttcccctcatgtcggaatgatatcatggagaggtgaagggcctgggctctagattccaatccagttctgcctgaatttcaggaagtcagttgacctctataagttcaagtcctcgcctggataatgagtctctcggggtcattgctaagattcagtgccaggagaggcgcaggggggctgatacttagtaggtgctcaggacactggagctgttgttatctgaacttggtttcctgtaactcgacaaatttgggaaaccactcacaggaaccgcaagccacaggccttcctgcccagccagaagtgccaccttggccgttcggtcagagctcacctgagaaccatgggcccctgctgccacctggtggccactccctgccttgcgggagtggctctaacacccctgccccaggcggctgctcagaaccgcactgaggactggtccacagaaacccgattctgtctcaggtctgtagtcctggaagcaggggctggacatgtctgtccttcatttctatacagtcagaccctgattgctggtcccatcctgtgtccacaaaccagctcacgtgctatgggttcacctgcagccatcg

SEQ ID NO: 960 - DNA, 2439 bp, Homo Sapiens
cattacttaccagagggttgatgctcttgtcagataggtcatagtcagtggaggcattgttcttgatcagcttgccgtccttgataaggtagccctggccaatcttataaatctgaatgaacaagaagggtgtaaggctggggcattagggacaaataacccagacatgccagtgtgctgacctgcaaagcacgctagaaggcagctgaggcctcagtcccagtcacagcgtatcccaaggtcagagcaaaaagctggctggccctccaggttcctttctgtaaggcggctgggctaaaactaaagatcctgctgtacaacacaggcctgtcacccccctggtggtggcatcagggaccaataagactagtatccccagccacaccagtcagccccaccacagccactctacaggatggcaccttacaaatcatcaagatgggccagaactgaccatgagaagcaagccactgatgtccacgtgatgcataagctacagtcagtgaagcagcactgacaggcacagaaaccccactccccatcacgggggcctcttcccacccccagggagccactctcagaacctcaccttcttgttgatctcagtgcggtgatggtagcctttctgcccagcgcgtgccacagagaaggctacacgagcaggatgccatgccccaatacaggccaccttgcgcaggcctcggtgggtcttgcggggcagcttcttggtgtgccaacgactggtgacccctggaatggatacacattacttcacctcagcgcccagcacctcccactgaccccttcctgctactcagcaattaccaaccatggctgggtcatctgagggagtgataagattatttcatgtgcattacccacaggtctcccctgtcaagctggataggctctgggggtgtcaccctgaactcaattctgaatgggtgctttttaaggcatccattagtttaagctcccccattcacagggactgactaacataattccaagctcccctttgcagttatcagtaggctacaaagagcaaagggtccaggaacgtgttaagaagttgtcccctggccctccgctatcccagccacttctgaccacaaggctgttctcagaaggaaggcagtagagaatggttctacactgtccgattcgggcgctgtacccagcgctcactctgagcctcatcaacgaacagctgggcctgaaaccacttctcccccaggtttgcacagcaactcaagccaccgcaaagctcacctttgtagcctttgcccttggtcaccccgatgacgtcgatcatctcatcctgcccaaacacttggttcacaggtacctgctgctcaagcctctcgcgggcccagtccagcttctcggccacagtgcctccgttcacctggatctccatcaggtgggccttcttctggcgcagaggaagcaggcgcatctaggagaaggtagacacagctcagctccagctgccagcgctcctcccacagcagaggaactgcagctccatgcggcctgattgatgtcaagcacacggcaaaaagccagtaactctgaacaagtcactgaacctcaccaagaggaaggaactttcatttttgccaacagcaacaacttaactttggatactggtgcctgagttactgtcaggatgagcggacaagacccacaccacaggcaaacaaccagatcccagcccctaccagcccaatgttcctgtggctgtcctttgggtcagttccttttggggtactgcagtggttttacctcagccacctacacttgccctagtgacaagcctgcttttgagagagcacaagctctaagtaagaaaatgcatcaccgggagcggtggctcacacctgtaatcccagcactttgggaggccgaggcaggtggatcacctgaggtcaggagttcaaaaccagcctgaccaacatggagaaaccccgtctctactaaaaatacaaaattagtagggcgtggtggcgcatgcctgtaatcccagctactcaggaggctgaggcaggagaatagcttgaacctagaaagtggaggttgcagtgagctgagatagggctattgcactctagcctgggcaacaagaacgaaattctgtctctaaaaaaaaaaaaatgcatttaagcataaagctttcactcaaggacagcctggcaatgtcctgacaaaatttcaacggtggacatgcactctcatccgtggtggccctcaccacatggggttgcactcagcacttgagatcagccaggataaccagtaacaggacagcaagaggcacccactctaaccaagtcaataaaaagcctgctcagctcatcaactaggtttccaggagagcagccagtacctcacaaccgactttcaggcaggcatttcagtgttactggtgagtcacca

SEQ ID NO: 961 - DNA, 2453 bp, Homo Sapiens
atacacccccagaaggacaagggagagtggatgctggaaagacagagcgagagaccatcaccagggaaagactttattcttggaaggacatcaaacctgggggggggtcggtagtggagctgctgtttcttctcctgtatccaacagttctaactctggttttctccattttcagctctttcttttcctggccttctcattgctggttcctgcaagctccccctctattcttcgcccaatatattctttagtccaaagtaaactacttcttcccattccccacactctccagtcctctctcctcccttattgcaggctccagtgttcctgccttctccttggtgcacttgccatctgcattaacccctcccttgctgtgctcagctacacaaatgccaaagtcactaacactcagttccataagctttaccttgccctccttatccccctaataaaatgtctgcattttggccaggcgcggtggctcacgcctgtaatcccagcactttgggaggccgaggtgggcagatcacgaggtcaggagatggagaccatcgtggctaacacagtgaaaccccgtctccagtgaaaatacaaaaaaattagccgggcgtggtggcaggtgcctgtagtcccagctactcgggagactgaggccggagaatggtgtgaacccgggaggcggagtttgcagtgagccgagattgagccactgcactccatcctgggcgatagagcgagactccatctcaaaaaaaaaaaaaaaaaaaaaaaaaagtctgcattttgtcctggcctgtgcccggcatttctgccctggtggctgcactgctctggggtcattggtcttggcctggctgcagcatctcatggatcttggtgagaaagttgagcttcccctccagctcctgagcccgcttcttcagctcctcagctgactctgactttgccccctcaagcaagtgctttgactcatatgcaaggctgaccacatccagcagaagcaagatgcctccagtggctgcacccacgatcatggttcctctgctcattgcctgggcggggccttcaacaaccctctcaacctgttcaccgccttcagctgagattcgcccaatgatatgcgggggtggggcatacgctcctaactgagggttggctctggctcgtctgatggcacggatgttcctcccaatcccttgtgtgacttggtaccaattgtcaactaaggtaagaacattgggtgtgttcccacccacaaactccttcatcacctttgctacattggtgccgctttggtccaagttgcgggcttgggctcgtgcccgcaatttgtttactagttctaccacactgcaggtaatcccagccacagcagctgctgctcccagacccatgccagtgtccaagagcacaaaactgattccttctgtgaagggtgccagacccaggccgaggagggtcaggatgccagaggtagtgccaacagagttggacaccacattggcaatggtggtgcctctgtggacctgctcaacctcctctgcaagggcacggagcttccttatgtgatcctcaagctcccttttcaaccgaggaaactctttcaaaaaccactgcctgtgctgctggtctttatcgtggcggtttttgtccttcatgaccatgtgacttgcaagcttgttcagagctttacggagctcatctgcctcatccctgcacaaggaaaggttaaaggattaagaaatgcagtttccctatctgtgaaatgagctccatgcgatctctatcctgtgtaaattgcagagctttcactatcaatcaaatagaaacaaattttacaaatggaattaattatctttcaaactcaaacacattttgttcatcatagatattcctcagtacttattccatatggaaataaatatcttaaaggcacctcagatgctctttcatggtaggtgtttgataaagatgcctcctcactcaagggcaggtcaacaccgtgactgccaaagtgtttggagagggaaaactctgcagatgaacaaagagcagtgagagtgagacaaagagaccttattaccaggatggcaggaaagtgaagcatgaactttacccaaagagaggccttccctttgtcctcagctcctgggaagtgatctccaggcccctggaatgtcctgcctggtaggaacatctttctttgcctggtgatttggccacgggacagtatagcgatgtgatggatgatagggtttggggctatttggtgtctttcctgacttccagaggacttggggactaaaggtgtgagatctcagggaagggctggagactctagccatgagggcagcttgtgatccagccccagcagatactctggacactaaggcatgggttgagaaagaaggactttctccttgaccaactccagctgggctcttcagagc

SEQ ID NO: 962 - DNA, 2305 bp, Homo Sapiens
aggcagctccactgggctggaggctgtgggtgcccacacagggtctggcccacaggaagtgcctgaaaggggggtcgacttggtgacggtctctcccctcctcccaccaccccacatatccccaggaactcacacggtggggatgtactctccgggaaaggcgttggtggtgtagctgatgagaaggcaggtcttgcccacggccctgaaagacaggaagtgcaagagggcggcggtcatgggctctgccggagacgtggggaggtttctgcctggtcctctgcaaagacctcagcatccacccagcctagccctctgggcctccgtctccccatgtgagatgccccctgtctgtgttctcacacccgagagcctgcaagtcatgtggatgtttgttaaagtggagacttcagggtccagccccagagattctgatccacaggtgtgcgcagagctggcaatccgcttttcccacaggcttctccaggggccagtgatgtgggacagagggtgcccagcagacccaggcaatgccgaggggcccccgacgcctgacctgggcttcaaatcccagctgtaccacctaccagtggtatgatcttggacaagtcacttaacctgcctctgcctcagtttctccatctagaaaatagagatgagcccatcctcataggagtgtgctgaggagtaaatccaacgaggcctatcaaagcactgagcacagggcctgatgcatggcagcagccgatggctgctagggaagacctgaccctgctcttccctctcacctcccccgtggagcagagcagttaccaggtcagggtttgagtcagagtggtctgggttcaaatcctgtgaggctttgggcaaattacttagcttccctgaactttcattttcccacctgtaaaatggacctattaggtttggtgagaggataaatagagaaggctagattaaccccagagctggtacataggaaggaagtgataacgcgcgcctcctccaccctcagcatgcgaggctgggagcgggtgcaggtagctcagccgaagcccagaggccaagggacagctctgggccttcccctgccctgcgtggttttgtcacttcctgctcagagaagacagctcatcctctcctcctaccatcgccctcccctgggcctgccaccgaggtaattttgaatgactggaacgttaacccttgacttccgcccgcccctcctccgatcagatacaaagcagaagtgaacagggctggggcaggcgagggcagataaggagccatgcatcagaatcagctgaggctggtggacaaatgggcccgcccccacctagatgggtcacagccaaagtcggggccacagggcccaggccaggagagctgagtctctcaaagccttgggctgctcctctgtagaatgggaaggctggacaggaggcccccttccagctagaacatgctccagggtgagcctgtaggctggaccctaagatgtggctgctggcaggcatgacagattgacaaattggacctgtccttttattttgtgtttttttaagagacagcgtcttgctctgtcacccaggctgactgcagtggcaccattatagctcactgcagcctcaaactcccgggctcaggcgattctcccacctcagcctccccagtagctgggactgcaggcgcatatgccaccactcctggcttaaaaaaatttttttatagacataggttctcgctatgatgcttaggctggtctcaagctcctggcctcaagcaatcctcccatcttggcctctcaaaatgctaggactacaggcatgagccactgcacctggcctggacctgtcattttacagatgaggaaactgaggcccccaggggacaagacagcctgaagtcactgggatctgacaactgagaagggtctcagcccagcctgcccctcccctgccgaccccacaatcaccctcccatcctttagcctcctccttccctctctgtctctcaatgtccccttgcctcttctgctcctcacccacatcccccacacatcctccccaacccggtaggctgaggggaggggagagaaagtggagggggtgctagaaggcacatactacaagcaagacagccactcagcttatctcaagcgaccccacagcatccccagggcataggcctcctcccagatgaataagctgaggttcagagaggtgctgtgacttgcccaaggccacacagcggcaccaagccagtgacgacagcccaggtcagcctggggacaaaggctgaattt

SEQ ID NO: 963 - DNA, 3096 bp, Homo Sapiens
tccaggccactgctgttcaggaagaggtgctgcagcgacctgcccacaggctggaaggctccgtcacgcaaggccctgagtgggttgcccgagagctgcagctccaggagggcaggcagcccctccaaggccccagtgggcacctctcgcagctgattcctgtccaggtgcagcttctccagctcccgagctgggcccagcgccccaagggacacttcggtgatgcggtttccactcaggtagacccagcgcaaggcccgtgttctccccaggtccccaggtgccaggcggtccacagcgttgtcctgcaggtgcagggagaagaggctgggcagggcgcgcagggcagcccctggcacctgcaggaaacggttgcgttctaggtacaggtagccgaggcggggagccccttcaagggcagcagcgctgaggcctgcgagctggttgtcggagaggtacaggtagatcaggcggcccagcccggccagggcgcccgcttccagctccgcgatgccgcagtgctgcaggtgcagcgacaccaggtggcccaggccggggaaggccgctcggggcaccgaggggaagtggttccgcctcaggtccaggagctgggtgtcgctggggaagccgcggggcaccgcctgcaggccgcagccctcgcagctgctgtgccgggactcggggacgcacacgcaggcgcgagggcaaggcgcgactgcccgctcctccccggggccgcgcggagggccgcgcggaggggcgcggggcccggccacagcccgctcttccagctcttcctcttcctgcgccgcgtccccagggcagcgcaggtcccagggccgcagggcgtccagagcctcgccccgcaggcgccgcggcccctggcacgcgccgtccgagcgcacgcgcgcccgcgccagccactcgagtaggggccgcgcctggcagccgcaccacagcggattcccctgcagccgcagccggcgcagctggcccgggccctgcagcgggggcagggtgtctagctggttcccgcggaggtcgagggtgtgcaggcgcggacagtgtgcgaaggccctgggacccagggcctgcagggccccgccgtccagcagcagctcccgcaggccgggcagcgccagcccgtcctcctcgcccgcgtaggtgagcgggttgtggcccagctccagacgggccaggccgcgggcctgggacaagacaggcccgggcagagcctggagctcgttgtggtgtaggctgagccgtctcagggcgggcaggccagccagggcctcgggggccagcacgctgagcgcgttgtgcgacagccgcagccagcggacgcgcagtagcccctggaaggccatggcgggcaggtaaaccagggcgttgtgggccaggtttagcgtggccagcgcacccagtgccccgaacgtccccggccgcagctcctccagtgcgttcccctccagctccagccgccgcaacgagcccagcccgtccagcgcctcctggggcagctcacgcaggtggttggaggccaggttgagcaggagcaggcggcccaggccacggaaggcgccctcggccaccagctccacctcgcagtggcgcaggtccaggtgtgtgaggtgaggcacgccctggaaggcggctgcggggatcaccttcagcaaattgccctgcaggtccagccgctgggtcagctggggacagcgaggagaaagtggggctgagccaggcagggaccccgcctttgcaagtgctgcttcttccccggaacactcttttctcctgtcacctttcccatatttctcttcatccgacccctgacacctcctccaggaagccttcctctccagtgccctgggcatcacccactgtggcatttttcacactgtgctgtccctgcctcctcgctctctctcctccactagctgatgactctgcagagcagagaccacacctcaccctgccacagcccgcctctccaccacagggtctgcagtgaattcagtatcgatctatgggtcacctacttattccattcacacagtaaggattttaaatagatcatctccctgttactggtttttattattcccattttacagaagtgtaaactgaggctcaaagagaagtaatttgccaaggtctcccgggcaggcggtggcagatcaactggtgcccagcccaggctcctccctctgggtccccaccttgccccactgccactctgtgcctgtgctcctgccctgctgacctcagggatggcgtctggcacctcagtgaggttctggtaccggcaggcaacgtgtcgcctggagttgtcacagatgcaggcctgtgggcagcgctgggcggcggcctgcctagccggggccagcagcagaagtacaagaagcggcagcaccaaggggacatgggtggagctccggggcctgggacggggagggagagtctgttgtgcacaagggccgaggccacatgctgtccctcacttagtcccagccatggtgcagctcctgccccaaaaacccctcagagcctcctcctttgggcccaggaaagtgccaatcaccctgagcctccctgccccccaccccccacgcagtggaggtcctatgattagtcctgttttacatgggaggaaaccgaggctcagaaaagtgacctggttagtccctttgcctctgcccaatggctcagtgaggacttgctgactgtgagaatgactccagttcagagcatgttctcaggctgtggtgaggctctggtccagggtaggctcggaagcagcctgtcctcagactgatatgatgccagctcccaggtggcaggagcataatggtaccccccagaaaggagggaggcatccagtccgggtccttgagtctttttttgtttgtttgtttaaatagagacaagccttgctctgttgcccaggctggagtctggagtgcagtggaatgactatggcttactgcagccttcacctcctgggctaaagtgatcctctcacctcagcctcttgagtagctgggactacaggcacacaccaccacgcctggctaattttttaattacttctggtag

SEQ ID NO: 964 - DNA, 2400 bp, Homo Sapiens
gcctcgttgtaatgaaaatcacagtaacaatgatgacatctaactttgatgggcacctggtatatgcctggtgttgttctaaggattctgcatgtatttactcatttaattctcacacaatcccacgagggagaggctattattgtccccattttattaatgaccatctggagccaggtttgcccaaagccacccagctggtgacaggcagagctgggattcgatcccaggagcccctggctccttaaacacctcccaggctgtccccatatgacagccttttccgggctctgcatccccagttcctctcggacaaagttccccgaccccacctcatcctgctgcccccatgggatcctctgcagggctctgggtgcctctggagcctcagcacccaaagccaaccctcagtgtccccagacctgtgcgcttggagtttggtgagatgaccccgccaggctctgggtgctcgcgtcctcacagcttcaaagtctttgcatcgtggtgggtgtaaccagcttggatgaaacaaggacactagggctcaagtccgggccctgtcacttagctcggctcctctgggccaggtactttccctctccaagcatcagtttcctcaactatgatatgagataaagtatcaggaagcattttgtaggctataatgccaccaactgttgttaatttgggttattttgggagccccccacccccgccaactgttgtctcaccttaagctttgggtagcctttagtggcagatggctctgggtgccccagctctgtcccttgctaggctttgtggccttgagcatatcccttcacctctctgatcctaactcaagggatgtcatgagatggagcaagggcgcgcatgtgatacccacctggtaaagtcaccgccgggtcatgttagttgtcatcaccattactgctgtttctggagaactttaagtcttttccaaatggactcttctcaagcccctggtccctctcctgaccttggacccaggagcagagcttgtgaagtgttaccttcagcatgctgagttttcttattcttttaaacaacgcatttctgttatcaggcatcatgcattagtaaagagaggagggctgatgtcagggctcggggacgggacatctaggctggggtgtccagatctttctgctgactaccccaccggttctgctgtctcacccacacagagcctgctcagcctgccggtctgggtgctgatggatgaggacgtccggatcttcttttaccagtcgccctatgactcagagcaggtgccccaggcactccgccggctccgcccgcgcacccggaaagtgtaagtgaccagcccctgggcttccacatggccagagccctgggtccctgctggaaaagcatctcttttccctgaaaggagagaaggaaaatacagatcagccatatccctggacactccaggatgatttgatttattagatgggtttagaaagtcatgttcaggcttggagggacagagggtgtgtgcctttcaatgtgataataaggattggaagacgaggactgggatattgactccagagagtttggtgccacagcaactactggggatagcccagaagctctgggtgcctggaaagaattgggggcagagaggagggaaaagctgccccatccacaaacattctctgagcatctctgggaatgccttctccctggtgtgttggagctccatggggccagctatggctctagttgtatcatgctggcctccagagcacactgttcctcccttattccaaaaagcccatccttcccaccaaaaattcaagccactcgtagactgctgggcttccaaagcccaggttgctgctactaagaattctgggaaaagcaggacggagctcctgagctccccaccagctcctccctctgcttcctcccaccaatgtctccaagggtcctctccatgcctggcatctcccctgtgcacacaggcaggtgtgtcttaattccagctgtgccatgtggcagccgcaggccccagagcaaggcacttcacctctccaaccttcagtttccctcagctgaaaaattagaaacagtcacatttacatcagagcttggttgtagggagcagaggaacaaacacatctgaacactttggcaagtgaaaggcaccgaatgagcgtgtatccccttccccacctgctttctgagcctggcttcctggtccataaagaagggagaacaatcccacctccaaagaggttgtgaggatttggggacaagtgtgcccgcccagaggagcaattgcagccacatttcagcatcttctgtctcctctgccttccctgctccttgcaaggggctcctctggacacaggagcaggaagctgggcc

SEQ ID NO: 965 - DNA, 2495 bp, Homo Sapiens
acacacctgtgaatgtctgttgggtttatacctaagaggggaattgctgcatcatcaggtatgcatatattaagctttaaaagatactgtcaaagttttccaaagtaattttaccaatttacactcaatgaaaatttcaattctgcacatcctctacaacatttagtattgtcaatttgtaaaattttaagcattctcataggtggttagctggagctccttgtggtattaatttgcatttccctaatggctgttgatgttgagcaactttttatattatatgcctgttggctatggaggtactcccttttaaaatgtgccagtttgagtctcttgtccacttttaactgattttttcttatttgtaggaaatttttaaataaattctggatgctagtcctttgtctgatatttataatgtaaatattttcttctgtctaatgtaaatatcttcctctgttgcttgccattttattctccttaaagtaagaaaagattcttggccgggcacagtggctcacacctgtaatcccagcactttgggaggccaaggcaggtggatcacctgaggtcaggagttcgcaaccatcctagccaacaaggtgaaaccctgtctctactaaaactacaaaaattagccaggtgtggtggcaggcacctgtaatttgtacttgggaggctgaggcaggagaatcacttgaacccgggaggaggaggttgcagtgagccaagaccgtgccattgcactccatcctggcccacaggagtgaaactctgtttcaaaaaaaaaaaaagagtttgttgctcccaccgagttctgaagaacgccagcagctcgctgcttaaaattaaaccacagggttccatgatgggtcaacttgatgggaaagtcatcatcctgacagccgctgctcaggggattggccaagcagctgccttagcttttgtaagagaaggtgccaaagtcatagccacagacattaatgtgtccaaacttcaggaactggaaaagtacctgggtattcaaactcgtgtccttgatgtcacaaagaagaaacaaattgatcagttcgccaatgaagttgagagacttgatgttctctttaatgttgctggttttgtccatcatggaactgtcctggattgtgaggagaaagactgggacttctcgatgaatctcaatgtgcgcagcacgtacctgatgatcaaggcattccttcctaaaatgcttgctcaaaaatctggcaatattatcaccatgttttctgtggtttccagcatcaaaggagttgtgaacagatgtgtgtacagcacaaccaaggcagccgtgattggcctcacaaaatctgtggctgcagatttcatccagcagggcatcaggtgcaactgtgtgtgcccaggaacggttgatacgccatctctacaagaaagaatacaagccagaggaaatcctgaagaggcacggaatgatttcctgaagagacaaaagatgggacgatttgcaactgcagaagaaatagccatgctctgcgtgtatgtggcttctgatgaatctgcttatgtaactggtaaccctgtcatcattgatggaggatggagcttgtgattttaggatctccatggtgggaaggaaggcaggctcttcctatccacagtgaacctggctatgaagaaaactcaccaatcatctccttcctgctaatcacatgttaatgaaactaagccctttttaacaatgtcactgtttgcaagagtctgattctttaagtatattaatctctttgtaatctcttctgaaatcattgtaaagaaataaaaatattgaactcacagcaagagaatagtttttaaaataaatctcaatttgtaagcatctgtgttagtcactttgggctgctataacaaattaccatagatggagtgtcatagacaacaaacatttatttttcagtctggaggctaggaagtgcaagatcaaggtgccagcagatatggtatctggttagggcccacttcctagtttgcagatggtcctcttcttgctacatcctcacatagcaagagcagagaaaaaaagcaagctcttatgtgtctttttataaggacactaatcctgttcatgggggcactacccttatgacctaattacctcccaaaggccccacctcctaatgtatcatattgggggttaggatgtcaacacatgactttggggtgatacaaatagcccattgcagcatatacaattaaaatgtaaatatgaagaaaaaaggaagtttttgttttttttgtggggggtggggttaaggaagaagatagtaatttcaggactaggcattgtagctcatgcctataattcctgcactttgggaggccaaggcaagaggatcacttgctgccaggagttcaggaccagcctagttaatagagagaggctaaggtaggaggattatttgagcccaagagtttgaggctgcagtgagctgtaatcatgc

SEQ ID NO: 966 - DNA, 2452 bp, Homo Sapiens
tatcagtcaagtgagaatagcaccacacccctcacaggttgctgtgagaattctgccccaggtcagtgctttgcacacagtgcatgctcaactcatgcttccttttcccacatgctggggcctcccagttcccccaatggaacccagagctgtgacagtcaagggcccagaatccaggacatctgtcccaccagaatccaggatatccgtcccaagtcccagccagcagccactagagctgaggctctgtgtgaagcagcaccctctctaagcatccctctgtcccttgcaaactaaacagaatgatccaacttcattatttggtggatgagcccaggatttcttagcacaagagagacccctttctgccctggcagtgggaagctgtttctctaccctctgggaggtgcagagttgggtgaccttgggatgggtctccagggcaatgtcttcatgtgtgcctacacctcccacccctctcacaggcagtggtgagttttgccaacccccaccatgcccagaactgaacaggaagtggtaacttggttgccatggcagcgagaggggcaggaatgggtgaggttcctcaaggagcattggtatctgtgaggtgggaaaggcattcacacactggtcccttcaggacagaggcagggacaggatgtggcatcagcatttcaagaaaaatgttcaaattcagttcaaaacacacatgatgcaatgattgctgtcataactaagcagggcttcctgacagaggccaagcagagaaagctatttgtgtgaggaaattgagggctctgctttaaagcctgaggaagcctagcagataaaggagccaatgcagagagggtccagagctttatcttggcttgggaggcctgggttagcttcgcctggggcctgatattagggtaaagagctaagtcagccctaatctcctccttccccaacccacaaaacactaaacaagaaaactgctggtaaggagggtaagaaaaaggccctgagctcctgcctctgtacccactccctcctccacaagtcagccccttctcccctcacctgagacgcaaccctgtggccacagcagcagcagcagcaggaaggctggggccatggttccatccagctgggcagtgtcaggcctggagatccaaggtgagggcccacccgacacaggatgtgccacctgggcctgccagggaaggacccggggttctaaaagtgaagctgcccatttagggaagtgaggcagtgtgggacccactgcccccagccaaccgcagggattcattgagcctattatgagggcggtgctggcagctgtttccgcccttttcctcggaacttcaggcaggtgtggctgctccacccagtctggggccccaagccgggaggactcacagtcagagggctccccgccctccccaacctcccccagaaactggtccctaggatccagcaagggggctggggtgaggcttctggaacgtcaggtatagaccttcctggaatcttctgggctcagagacccaggggtgcgggctcttaggctgagatggagcatctcagaccctagtttcttacatatatacattcacagggaagttcttataaactctcattcattcattcattgcagattctttctgttccttcctctctctctctcccaggctcctggctgctcagaacagtcacttgtgttcactgttgcaaataacctcttacaggctcacttgaaatcttacttttgtcaagcgggaaaaatgcaaattgttaagactcagggcataaattttgggttgagggaggggttcctgtactctcacacacaggtgtgcatgcacatgcactcacactcacagtctcactttgtcttttattcactttcacacacacacacacacgcccatgcacacagtctcacacacaccccagcagcctctccttttccctatccatacgtctcctctctctgtccctctccctgcctctcctcctgtcgactctactcaccatcagctccctctagactcctagtccctcgtgcaggcttcctacagcctccgcagtacttcccctcacccacctcatctcaagacccccttcctcccctgcctccagcctacgtcagcacgcaggcaagtgccctccacttcctcctgctcaatgctatctcgcctgtacagccaccagctccagtggaaatgacccagcactaggcccaagaccacacccttcacttaccccaaggcctagaatcagaagcatcaatttttgatgtccggtacctgtgtcatctgctccttcagtgtgtggggacccagctggactcccgtgattatgtatgctccccctactcactagtgccatgtttctactccttagatgggactgtcaaaaggtaaactgaggcacaataaaattttaaacagattatttcagc

SEQ ID NO: 967 - DNA, 2374 bp, Homo Sapiens
aagaccagcctggccaacatgataaaaccccgtctctactaaaaatacaaaaattagctgggcatggtggtgggcacctgtagtcccagttacttgggaggctgagacacaagaatcacttgaacccgagaggccaaggttgcagtgagccgatagtgccactgcactccagcttgagcaacagagtgagaccctgtctcaaacaaaacaaaaaacaagggaagggaaaatgctctacttaattttattatttgggggttgggcataaaatatgagaaaaggaagacctaaaggtgaaaaaatggccagtatccataaaagaaaaggagtggctgtctgtgcttcaggtagctgaccattttttatttttagaacatcctatctttcttaaaaaaaaaaacccaagtttttaatattttaaaattttcttttaacaaatgcttatatactagaaaagttatgggctgtgggaatgaaacctgcaaaaacagtgtctttaatactgaaaatagggtcaagaatattggcttaaaatattaatgacatttttccatttttaaaacgaaaggagttgaagttgttcaggcactgaatgtacctacttgtaggtgagacatactagatggcctgtgaagacttataaaattaattaaggtatgaattccataattcttaagccatcaagcccgctattacaggaataaaacactggaagctacaaaaattaattctggttttatacactcagattcaacattgtttaaaatatttctaattaaaaaataagttagcatcaagtatgttgaaaatgctggaagaagaggccaagtccctggagtgggaaggacatgccttcctgtggggaagcgcagtagtgtggaagggggaaagggatggttttcagctgatttatctcagacttcccacccagtttggtttccgctccctgcagagctgtcaagaggatatctccttggaatgcctcctccccaggggcccccactcctcaagaacccatgagccctggcaataggcgggggtggggagggtaggtctaaggggtggtagctggcctaggataactcacctgggggcagtatgttcagagagactctgtgcaaaatctggggccccctggccccatccaccatgcagccatactcgccagcatcctcttcctgcagggtaaccatttccacctgcagcaggcccccacccaggtctgtgagaaacgtacgcctgcccgctggagctctgcgatccacagctgaggacaccaggggctggcacccctccggcaagaaccggcaccacaccttctgagctttgacatcctggagcctgtagtggcactgcaccagaatggagcttcccacgggtgcctgcagcacctcagggaggctgccaactatgccctgacctggggaaggaaaggaggtgggaattttgggcaggagctgggagcatctcccagcccagctgctggtatgggtgtggcattcacaataacacgttactcctggacatggggctgagcatatggggcccagagctgcagctcctcctgaaccttaccttctagtcccaggagcagcagcaagagcagggtgaggcccatggctgggcagagaaatgtcaactcctgggcttgcctgggcactgatgcagcattcgcctgagggcaggaaacatctgcctcagaaagtcacttggggtgggagaaaggaaatgatgggcacctccaggggtggggaaagggagttcttccaagccctggttggctcagtgctcaggaactgccctgagggtaagggtgggcaagacaggatgagaagacccgaagaaagctagaagcctgcaggggctggggcccggctaaggggtgagatgggaggattgtgacaattggaggacaggagaggaagaggaaagatgatcttcaggatcttcctaatacagaatctgagggtgcacagctatgaaggaggaaggtagagtgccctgcacctcactcaatgccattcttgctctcaattctttgggagtgccccacgaccacccaagcttttaggaggttgtatgcagtacaacctcaaacaggaagtttcaccttgatcctgtgccctggactgggtctttcttcatttattgtcctggacactatagaacccttccatctggatccacattcttcagttctgggaaacaaattcttactttgataattacatgtccattttcttctccccttccatttttctgcaattccttaactagttggttattgaatgtcgtgtgttcatctcattttcatatcttttctatctcattttccatctttttgtctcttttgttctgccttcaaggagatttc

SEQ ID NO: 968 - DNA, 2465 bp, Homo Sapiens
tctcaataaatatgatgattctaggcagctcttaggagtggaactgtacagtatttgtccttttgtcaccggcttattttgctcagcattatatcttcaatacaaactcccgggctcaagcaatcctcctacctcagcctcctgagcagctggaactacaggcacacactcccatggctggcagggttttttttattttttgtagagatgggggtctcactaagttgcccaggctggtctcaaactcctggcctcaagggatcctccctccctggccccacaaagtgctgggattacaggtgtgagccaccactcccagccaatttctctcgtttttaaggcgaaataacattcctctgtatgtatacaccacatcacgtttatctattcacccttcagtggacacttgggttgcctctgcctctgggcctctgtgaacgatgttgctgtgaacataagtgtgccggcctggccttttcctttctcaaacttgtcccctgctcttctgcattgtgatggtttctctaaggcggacacacaagcatttaagccccgatccacatcccggagcaactctactgtagtccacaccccagcctgttcacgagtcagggatgggcaccccacgattggcattgcctggccttagagaaaagctcataatcttgggggccatagctgaggtttcttatggctgcagggaatttgtcttcactgcagtcagattaacatttagttcagtttcctcattagcctttgggaagcccacagaggcatcctctataagagatgctaccaaaagttcctgactgcattcagcctggaaactaggcttcccatagatgataactagtctagaagatgctctcatgagcatggtgacagggctcaaatgtgcctgggagttctactctttctgatttcctaatacgtaaatatcttcaaaggccacagcaggaggttttactgaaactgaagagctccctctggttaatctttcccccaaaaatgtcatctggaaattaagcacaattttgctaaaatgagcaaggatttcacctaaatgaaattaaagagggttatcttattttttttatttagcacttaaaataatttagagtgtgagaaatcagattgttcagggtcacacgcccccaaggactgctctctaacagccctcctcctgcctctgccccggggttccagtctctctcctccacccctggactcaagtctgcgtggtgttggccacactgactgacagccaggggacatgcactcaccagcagggtgtgtccctccggtcttcacaatgaatgctggcccagtcgccagcagccttcacgccaatgttctcccgtcagtgaggccaggcccccaggtgccactggagtcagaggagggcagctggcgtgcgccaagcagccactaggagccacttcatgccaatgctccacttcctgcacgccacagtcacgttcagctgcaaaagtagttatgctttgggtttttttggtttttttttttttaagaaaaaaaaaaaggaaaggaagaaagcaattaaaggggcgggggggacttaaagtttgcacctcagcatgagtcaccgaatcaaagttcagcaaccacatgcaaaacaaaccctccgtgagggcagcaagtctccgtgaggacggctgggattggctgcacagcaaagccaggagaggctccatgaggagaacagcattcagagtccaagggggagaacccctgttccaagtgggaacttggaacagaagttctcctgcctccagctgagaagatgatcagattctagctgctcctggggaaagtcggtactcacagctggacacaaacatagcttgcaggaggaagagtgtcagagcaagagacagagcagagatggctacggagatatgggtgcatatggggacatggcacagggaggactctgtccctgccttcacgaaggggaattccaaacgagtcacgaagtccttctgactagggaccaaggcactagcctgtgtcagagataacatggccctgtggctccctactgccgccctgcgtggcgtgggtggtggcttctctcccactgtggcaggggaagtctgaacccacctgaccacagcattctgcagactgcctggtctccagcctcaccaggtacaggcaacagacccagaactctgaaattatttcctaaatttggtgatgcccatcaggggtcagaagaagaggaaagaacacaatcaacccacacagtagcccacctcccaacaaacctccctgtctcaggcagcaacttgctccaggacacacagtcaaccagttggccaaggtgggtttagaacccaggtgttggtgctagggaggtaagaatggcacatggtaactggaatgtgtagctctttttatttattcaccaccggtctcccaaagaaaatgtgaagcagtgt

SEQ ID NO: 969 - DNA, 2459 bp, Homo Sapiens
tccggctaaggcggggcccaggtgcttgcttcctccgagcttgcttaaggttttcatgttgcaagtactagatgttgaacccaggtggcttcttactgttctggaggagaaggctgctaggactggttttttttcttcgtcctccttccctcctacaaaaagaatgggcggtgtttcgggaaaaagtccgccttaggatactttagtgtgtttactgctgccccatggtcacatgcacggctgtttataaattgcatctttattgaggaagaaggtaaaaaacctagagagggcaaggaactatttattttgtatatgtgattatttggaccgttcaaattttcctttaaaaaacaagaattataattcaaagaaaatgctattctgactactgccagaaacttaaggtgtttaagcaaaattcaaaagtaaaaccagagtttattttgttggaatgaatgtaacataaacataactttatcattttcaattagaaactctggtctgttatcattttggctggtggttctgtaatgtacgtctaaggggaaaaacaccagattctcatatgttccctcctcatcccttttatttttcagtccagagcacaacctccagaagacaacagaaggaagccagttttggggaaacttggcactctattcactgcaggaaggagaagaaacagtagaaacgggttagagagtcccaccagatcaaatgccaaaccactctctcccaaagatgtggtagcctctcctaagctcccagagagagagagtgagaggagcagatctcagagcagccaactgaagcaaacggacacaagcgaggagggctccccgcgggagaatccccgagaggcagagggcgagctccccgagagcggtggccccgcagccccccctgacgccgagctgtcacctcgctggagcagcagtgcagcggctgtggctgtgcagcagtgccatgaaaatgattcaccccaattagaacctctggaggcagagggagagcctttcccagatgccaccaccactgccaagcagctgcattcctcgccgggaaattcctccaggcaagagaacgcagagacgcccgcccgcagtccgggggaggacgcttcaccaggtgctggccacgaacaggaggctttcctgggtgtgaggggtgcgccagggtcgcccacccaggagcggcccgcgggaggactaggcgaggcccctaacggagcccccagtgtgtgtgccgaagaaggctccctggggccccgcaacgcccgcagccagccccccaagggcgcgtctgatttgccaggtgagcctccggccgagggcgcagcgcacacggccagctccgcgcaggcagactgcacagcccgccccaagggtcacgcccaccctgctaaggtgctaactttggacatctacttgagtaagactgagggggcacaagtggacgagccggtcgtgattactcccagagcggaagattgcggtgactgggacgacatggagaagaggtccagcggccgtaggtcggggaggcggagggggtcgcagaaatccaccgactcccccggcgcggacgccgagctccctgagagcgctgccagggacgacgcggtgttcgacgacgaggtggcgccaaacgcggccagcgataacgcctcggcggaaaagaaagtgaaatctccgcgggcagccctcgacgggggcgttgcctccgctgcgagcccagagtccaagcccagccccggtaccaaagggcagctccgaggggagtcggaccggagcaaacagccacccccggcttcgtcccccacgaagaggaagggcaggagccgtgccctcgaggccgtgcccgccccgcccgccagcggcccccgggctcccgccaaggagtccccacccaagagggtgcccgatcccagcccagtcaccaagggcactgcggccgagagcggggaggaggcggcgcgggccatcccccgcgagctcccggtcaagagcagctcgctgctgccggagatcaagcccgagcacaagaggggcccgctccccaaccacttcaacggccgggcagagggaggtcgaagcagagagctgggcagagcggccggagcgcctggagcttctgacgccgacggcttgaagcccaggaaccatttcggcgtgggcaggtcgacagtgaccactaaagtgaccctgtaagtagccgcgcaagtcccggccgagttgctgtccgcacacgtgctgggggtccgctctgagaggctcggggtatctgcattgtggaagaaacgtctggtcactgaactttcccctccatgctgaacttaagatagtgaagggccagtttacacagtcaagatttaagatgacacctgtggcagcctcctcagttaattccctttttaacacaagatttaagtttaacgaatgtaaaaataggatatc

SEQ ID NO: 970 - DNA, 2382 bp, Homo Sapiens
acaaagccatcatcctccactctttgagaagtccatcatcctccaataggtcaagtgtttctctgcacatttaggggtctgtattctttctgcccagacttgccctttcctgcccattgggtcccatgtgcctctatggttgggccaatgatcaatacacagatatacctaaagcccctccccatctgtgttcttccctcccctctcttactgcctgcctctgtttgcccaccccattccacacttaccactggtctttatctggggtttgatgtcacaaaggagcatcctgaggtctcgccccacttctcccagcgtttgggtcaattctccccaagtgctggtggcatataccttcttccccaggaggcccagaggtttgaccatgttgttgtcactgttgtactgaaggaaaagatttttattcaagaagacctgcgcttcacaccagggctgtccaggtctggacaatgattttatagtgaagttgaagcaaagagagtgaccacctgtgagacaaagatgcaggtgaggtccaggacaggggaagaggcccattagaacctgcgcttctgtgacccaagactccctggactgggccaggctagcagaggcggggcagctccatcccagactccctcaaccttctggatccctgttcccatctctccctgactgtctgggatgagatacttgatggtaccagggacccctggggtgcacttagtgttaatggtgttaacaggaggattcatgtcacaagtacttttagcaacatctaccaagttctgaggcacaaaacagacaagccagtgtatgacctcctgagacttaaactctagctgaacacacatgacattcaatagaaaggaaaaagaggcatttatcacaggacacacgctgaattcctgtggggtcccagatgttcaggaaagtgacctggagtagaaggcggggggtagcattgtagaactgccctctgtgagccagtgccttgcctagggcctcaggctgtggtctcccatgaactgggtgtaacatcccagggatcctcttcctcacgtcatccttaagagcaggcacccacttgtctgaagcctgcatgaagccccattcgcctaccccctacctttctccctcctccttgtcctcagccagttcttgtgctcaggacactcaccaaccatgatctccaaggctattagtagcaacagcagaaacaaaagaaggcgcacagggctagaagtcagggatattcttcgcatactgtggagagtaacaggcaggaagctgggcgtgtacacattcaccctcactggtatggtgaagaaatgttatccaacagcgtgggtgtgggcactgcccaaattctttaccctggaacaactgaggtcaggcctgtagagacccaattaaagaacaattttgtgaagagagtgttttccaagtattcagaatataatcatttattgaaaaataaaagaagacatttaaaaacaaaattaactttgaataaactctctctcctctcctgtccctgctgcccctgcaaaaaaaaccccctctggtgtgagcaggatggttggaggttatgtgagctccttctcctttcctccagtttcctcttcccttctcctccctgcctcttttgcttttccctttcttcctggtaccccctgcccattcctgtattttctcccatcgccattctcccctctcccactgtccctaacccgttcaaactctttcctcttaaatggttgagattttctctcaccaagcacaccccagtattaattaaactagctgcaaacaggcagcaagtggtctaccatgacagatgggttttgtgtgtgtgtgtgtgtgtgtaattgtaataaaacatattgagtcactcaataaacacagagtgtctactacatgtatcaggcactatcatagatgctaattaacgaaactgaaatggccaggccctcacagtggctcatgcctataatcccagcactttgggaggatgaggcaggaggatcacttgaggccgggagttcaagaccagcctgggcaacatagtaagactccatctctacaaaaaaaaatttttttttattatactttaagttttgggttacatgtgcagaacgtgtagttttgttacataggtatatacgtgccctggtagtttgctgcacccatcaacccatcacctacattaggtatttctcctaatgttacccctctcctagccccccaccccgtgacaggccctggtgtgtgatgttcccctccctgtgtccatgtgttctcattggtcaactctcacctatgagtgagaacatgtggtatttggttttctgatcttgtgatagcttgctgagaatgttg

SEQ ID NO: 971 - DNA, 2498 bp, Homo Sapiens
gattaccatgcctctatctgcttctcacactaacgtgtccatagacctcatgtatgggggtcttattaaaacatggattctcatttaggaggcctggggtctgagattctgcatttctaacaggaggtgaatctgctgctagtccatgaagcacacttttgagtagtgagatctttcttagaggatactgagtgagttgaattaacaatggtagctctcagtaactcagaacagtgcctggcctatataaatatagccactgttttatagccaccaactcatctaaccccccaacaccactatgatgtagattctattattcccatttgacagtggaggaagctgaggcacagaggggttattaacataactagaggatctttgaagttctgagttctgccagcctcttcctgacctcaggaagggcttcccaaggtctatacccctgacctcatgcctaccccttacaggcccaggggtggctctaaggtggactgagtgagcccaactctttacctgcctctccttagccttgtctctgatcctgatgatgatgggggtgtcttctcacctcttccagccctgccccctgtgccaacagtccccagccttgcgctgggctctgctctggctagaacccagctaacctcaggggctgagcccagcatgctccagggcactctccaccaatcctgttctgtcccttgacagttcgccaaggccttgatgcacttcggggagcatgacagcaagatgcagccagacgaattctttggcatctttgataccttcttgcaggccttctcagaggcccggcaggatctagaggccatgaggaggaggaaggaggaggaggagcggcgggcgcgcatggaagccatggtgaggggcagtgccaggcctgggactgaggggagacgggtgctacttggggagaacacccccaaactggggtgtgtgggaggagggcagagactgaggaactgaggaacaccataggggttggatgtcagccccaggagagagaaacttcttcccagcctgagggaagagagtggtgtgaagctgggggcctgtatgtcctaggcaggaagaaagtggggccaacagatacaggcaggcagcatgaccatggcctaggagttagcccagggttggggggctgccctggcctcagcgcctctccctgagagggttcctatctttggccccccgcccgcagctgaaggagcagagggaacgtgagcggtggcagcggcagcggaaggtcctggctgcaggcagctcgctggaggagggaggagagttcgatgacctggtgtcggccctgcgctctggggaggtcttcgacaaggacttatgcaagctcaagcgcagccgcaagcgatcagggagccaggccctggaagttacccgggagcgggcaataaaccggctaaattattgacctggggaactagccacacaggaggccgggagacagggactggtgagaatggggctgagtggaggaggtggtgatatttaaaccatttggtgcttggtttagagccttgggctgggtcctgggatggggggctgtgtgtggctggaccaggtgtctccccacgcttaccttaaggggctcctcttatctccccttcacatgattccttctgtgccctggccccaggtattattctgaggctgccttggatggcctcaggccaggtaaccccaggctgaaggggccctgctccccatcccctaccatgggcacccatgtgctggcacagaacagttccagatctagactggagaggtccacagccttgtccagagttcctgtgtagcacggggagcaatgatggagggagcccctgagagggaatctggtgagggaatccagactcccttctctcaaggggaggctcaacagaacattgacctgggggcaaactttcctcttgaatgggaacagaggaggcattatatattctagttagatcagctctggtaggttccagagaacagtcaatgttggaaggatgatgcagggaccaaagccatcaggacagagtagcagtgtctgtttcccatgtcacaagtcctctggcctctccctgcatgtcttaagtatctttcccttccttctctaccctcacctccatcctgtctactaatccacagtcctagaagactcaccttgggtttccacagctatggctcactaccaggtgcttgatgaatctggcgaggggctcaagacagacctcatgcatcaccacacctcatgccttttgggcatctcccatgtccccatctcctggacacctggccattgttgtgaagccagacagtgacctcaaatgttgccttggagtcccctacagcccctcagcagagggcagcacttgaatgcttagctccatcccatagttctctacttcatataaattgctcaggccctcccaccccttctctaacactagcttcaaggcagaagccacagcagcctc

SEQ ID NO: 972 - DNA, 2351 bp, Homo Sapiens
ggccttgcccccccatgcctcagtttcctcaccgataaaagaggtgataattatacccaccttatagggttgctgcgaagattgaaataataagggcatggggtgttagctattactattttccagaattactatcttctagatcgagatccccttgcagtagatggttgacattttaaagttttgcttgtttttcatgttataatatggtcataagttccttgatagcagggagcatattagtctttgttcctcaatacttaagactggtacctagcacatagtagatacccaataagaacgtgctgaatagagccagacagagctgaattctttcctcttctgaggagcatcttccattctctctcccatctccctctctcccttcttccctctctttgtctgacactctctctgtctgtctttccctccaccacctctctctctaattattatactccctcttactctttctttcaaccattttccccactctcttcggggcttcacactgacatgtgcgcccctttccctggctgccccatctccagagcacgctcctattctgctccaaatttgcctccaggctcagtcctcctgggaggcctcccatggctcagctttgaggacactgaagcatcagggctggatgggagcttcactacctgttctattccagtctgctcacttttcagatgaagatgccaaggtccaaagtaccaagaaggctgcttcacggtcatgtggccaacttgtcccagagctaggattagaacctgggctttcccactcttggcccaatgctctttacattacggcattcacagaggcagtggcagaaacatagtaggagaccactgaatgcttgttagataaatgaatgaatgaatgaatgaatgctattggaagaggagagctactcagacaacactacttgtttttctgcagctccttttgacctgctctacccctgccccaccctccacatgcctggggtccccagaggaggtctttggcactgttagtcttgcctgtgacccttccaccacccctggggagtcagcggcctttctccctcctctcactcctgtgtgcataaaggccatttttattgttctctgtggaaatatctttagaggaccgagggcattctctgagaacaaagcctcttcctggggagtgttggccagggctcttgtcattgcggcttgctgtctgctcagagccttgtgttttgacaagaacaaagtgattccgattggaaccctgtagcttgttgctggctctgcctgttttcctgcagatgtgtagccccattctggcctcctctcctctcaaggaaaggggagttgtcttcaactgatggcccctccccaaagcctagccccctccttctccatgcctttctcctgtatcccacctggcacctcccaaacactatctgccgctgcagttccttgttgaactgttctggttttaattccattccctgcaattggagcctgaataatgagttatttcacaggaagattgatctgggtattagggcatcatttagtttgccattacaacagccaattttggttacatgctcagctgtgaaggggaaatgggccagcctgctggagctttctaaagcatggagctggtgagtagggggatggggtactgggctgaggggcagaggtggcagatgggcaggaggaggggttctggcttgcttcagcaaaaatgtctttatgctcacaacatgacactgtgaaagaaattgtaaggattgaaaatggacattacccttcctcaaagggacaagaagagcagagttttcaggctgtagatgccaggagtggaaaggtctctcttaaataactgagtgagtgagccccaaattaaagagcattccagactcaccaatatttcaggatgacaaaatagtggtgcatccttactcgccactcccataccagacccagctgcagaaatttcagtggctcccccatttatttccctcatagcacttctcacaacccaacacttccctttccatttactttaagtgaaatctcgcctatctcttcctcaactagattgaaaactacatgagggcaagaaccatgtctatgctgctcatctgtttccccagggcctgagacagtgcctggcacttcatgacactcaatagacattcgttgaatgaagtgaatgagcatcagagggcactggtttcatggatctgggtgtgggggacaaggcataccatgcgcagtggtctctgactcccctgcacacgcacggtggtctctgactcccctcatgctcacggtggtctctgactcctctgcatgtgcaca

SEQ ID NO: 973 - DNA, 2487 bp, Homo Sapiens
gaggcgggaggattgcttgagcccaggagttctaggctatagtgtacaatgatgattttactggcatacagatgaaaaagaaaaagatatttgaaataaaaataaaaatatagtgcacaatgaccaggcctgtgaatagccactgcactccagcctaggcagcatagcaagatcacatttctcatatgaaactttactagaatgaaacttatggtttattacatagatgttgcttattcgttgtaggaaaaattgaattacagatgatttttaaaactaccagagcaaaccatttaacctatttgtgtacatactcccagatttcttacacacgttgcaaaaaaaatagatcgtaccattctgctggttttctaagctgctttttgtaagtaatgtactgtgagcatcttttcatggccataactattacatacaaaagaaaaaaacaggcttcacaataaatagttaaaagacattttgacctgaaactaatgaagaagggttttttggttttgtttttgtacctcctgtataatgctgaaattggtaattctgcagtaaatattaacattttctgaggatctgctgaagatgaatgtgacaaaaaataagaaactccactttcctcatcacacagccttaattaacatcgctggctttgtttgagatcaagcaaacgttggcttcagtgtccaagtctcttcttggggtcccacggccttgggtctggcacctctgctgggcacctcgcagggcttccgagacgtgccgcgacccacgggaccccacggaagctttctcccaccgcaagctccctggaggcagggaaaggagccgggacccgagcctagctggcctcaagagaagggcggtggctcgcacggcgcgggcggctttgctcactgcagctggggagatgcaggttggccgtccgggcgcggcggcgggaggggctgcgggcctgtggggcggggtggtggctccgtgttgttggatccctatggagatgaccctgtccctgccccacccctctccggagctgcggcccgagttggcgcactcgattttcactgcgcggttccaagaggagacagccgccactgtaccgggcctcatagccacttcctagaggtaaagcccgtggcttctgagccgctagtctttttcttggggccgcccggggcacatcgcctgggccggcttagtttcccagtgcagtcgcccaggaagaccctaagcagcgctgaggggcgcagggccctccctccgcgaccctggagtcccttagcagctctggaattaaccaagattctgaagaggctctggggagaaacaaaatccacgcgtagggtagggtttgcatcgggccatgccaagtaaactcttacctcctccagagaactgatttgggatcgaagtaaagttcttgaacactttggaaaacgctgattttcataggttcacaccaactgccttcttccttctgacagttctctccctctttcctcctatggggtccaaaaatgtagggagtagggtgggggctgggttgggggaatgagggaggaatacaaaaaatctactgtgaatataggtcttggttataaggatagctctaagagttaatatgctaagatttgatgagcaggacaaataaaacagtggtactttaaaatatcgatttaaaaataccgatgctgtgcttattaataaactttgcatatgtatcagaacacaatatcctgacatcattggtgttaaagttcactgcaacccatgcaattgtatccaagcctgttaaagtctgttctgcaggaactgacatttgtgctccacagaaacctcaaaaatcatgctctacaaacacttatttcagtgggaggaagaagggttaaggacttggaagttttatagcaacagttgcatcttgtttgttacagctttagttttatagctttaaacttataaatcagtgagcacatccaccatttgaaaataccagcacaagtatggtattttctatcaccgcctgtaagatcaatagcccaggtttcctcaaaacacgccattattttcattatccattgcttagtgtgtacttaataaaaattatatactggcatgtagttttacatgccctaaatgtgggacatttaactcaactggaattgtctttcatttctgttttttcaccaatcacacttacttttcttctactcccgttcttttgtgcgatctttagaaccagatacctttttggaggcatatttaaggaagtaaatttttgataaataaaggaatcattgcacaatttgcatgtgtgaattgcagaagtacgcgcatgtaggtacatacctctgccgaggagcagtgttttaatttctaagccactctgtctactgtagtggagaaggaccagactaacttgcatttctccagctgtataacagataacctgtggaaacacagttaattgacatcattgct

SEQ ID NO: 974 - DNA, 2392 bp, Homo Sapiens
gagcacccgccctgtgacagcgtaatgctgggtgcccgcggccgcgctgggaaaacagacgcgcacacacattctccatgtggtgggtccagagcgatacgaaagctcccgagggcgccgcgtggggtcctgcgggggcttcctagaggcggcgggagtgggaagggaaggatagccggagggatgagggcctggcctggccgtggggtgggagagaggacgggtgggacgggcagtggggctgcaggcatctgagatgagatgccctgttggagagcgaggcccctctcagccagaaaatgggagccactgaaagtttaaaaacaaagaaatcacatgggcagcctccaacttcggcgagtccgacttcggcgagtcctgtgtggcaggagatgggctggcaggagcgggaggaaggtctccgtgagtgaccatcaggacacgaaggcaggaagctcagacacgctgatccttccacatgaagcagaaaggagggaggaccccacttttaacagagcagtgattctgaagccacggacccgataaggacctcagcagagccgagggaggggggaactcagctgtggcctagacgagcaccgcaggtggttgagaggggccggggtgcaaccaggggacgccctgggacggaacccagcagacagtctgggctggagacagggtttgggaacgggggcaggaaacggtcaggcattgcccagggagagtttgtggcgggagaagaggcgaatccctgcggtgcggggagctggtgttgaagagaaaggtggagttgggggactcctacagaagatatgggcctggtgggcaggagggcatcccggaaccagggggcagagctgctgggaagaaggagggcccgtgccgtgggaggaggacgaggcgcaaagttcaggaaggaaggacctggagccgggccggagccttggagggaggagagaggggaggccggagttggagcgtccaccacggtgaccgctgttcccaccaggcactgcccaggggctgcccattttccttcagtccccacgggggatgttgtgatttgacaggtgaggagagcaagtctcctagacaggtcgttttcccaaggccgtgcagttcccacaagttcaaatgtgacctgcgtcgggcaactccaaaacactgccgccgtcagctccaggtggccctgcagggaggggtccccggtgtcctctgtgaattggaatcggaggctgactcctcagagtgtgagaagctggcgggcctggcggctggggacgtgctgcggtgtgcgtgtatcgggctgaagacctgccaggttggacgtccctgccgtgagtggtgtcctcagaggccgcggttctctgcagcagccctgggcagtctgcagcagggaaacctctggtcgagtgggtccagggggagccttggtggccaagtctgctgtgtggccgcagtagaatcctgagcctgggtgagggggaagagcagaagtttccttcccacatttctggaggctgggggtgcaagatcaaggcgccggcgtccccggggcctcctggctgtgttcttggaggctagagggcgctggaggccgcaggaagcctcttgtgtgacggccttgatccccttcactgggaggagacctggagctagtcatcctccaacactatcacgtcggcaacgcctgggtcttggaggggacacattcgaacctcagccaggtacaagcaggtaaggcagagaaatgggggtgcagcttctgggggctcgagagcctcagaggagctttccacacctcagtgcccagttcccacctgccatggcatcctcaggatgggaagggtccctgccgatgagtcccccttgctggcacagcctctccctttccccggaagccgacttgagcaagcagtcggctcacaccacattcctcactacccccttcctgggcctcctccttgattgcctggcacatctgccccgacacccacctgtaaaccgcaaggccaggcaccctggggcctcttcctgaccgtgcccccgacacctcacagagtgtttgcacgtgagatgtttggtggcttgtgactccatgatggcctcgccccatccctgtcatgcagtgtctctgcaaatccaccatgaccccaccctgccatgtggcatccctgcagccccctggagctgctccccttgaggtcctcagtgacctcctgagggttggttaacgtaaggtgaattccagccctaaacccccctggggtcagaatctcctgttagacacgctcatagctcctgcaacttttccttgatgtcacttgttaaccggcttgcataatgagttacttagtaaatggtgatgtgtcccgtctttgctacagtc

SEQ ID NO: 975 - DNA, 2475 bp, Homo Sapiens
tggttctggcaacccaacccgcatgggttgttcagagcagggcctctgagggttttgatctgtttgccttccgctgagtaggactaggctccagagagagtaattataggctgggtgtggtggcttctgcctgtaatcctagcactttgggaggccaaggtgggtggatcacttgaggtcagaagtttgagaccagcctggccaacatggtgaaaccctgtctctactaaaaatacaaaaattagccaggcatgctggtgcacgcctgtaatcccagctactcgggaggctgaggcaggagaatcgcttgaacccgggaggtggaggttgcagtgagccaagattgcgccactgcactccagcctgggtgacagagagtccatctcaaaaaacaaacaaacaaataaacaaaagagagtaataacctctcccagagcagcagttgccactgggatactggaagtagaggctgtaactcttatttatattcagggttttttttttttttttctaaaaataagaaatcaattaaactttaacatacatatttataacagcacatgtatgtgatttgtaagtaaatatgcatgtattagaggtacagtttcaaaaacttgtcattgacagcagcgcatgttcaaaaatgtttggggactgacctagaaaatgtgcctcaagatattaatttatattcaaaaccactagtttatctgatgcttagtagaatggaaaataaatgtgtaacatgccacacatggtgtttatatcttagctgcttgttcttttcttatctccatgtctaacagtccttatgtctacttcaggcctggagtatgatgcttcgtatgtcaattcaaaataaacttcctaaggaacttagatttgtaatgtaatgattttgaatgcagatcctgggctattatttcttgggaatgtctccattacatcatgaaattgcattcactgttgttcacacatatatttctgataattaagcaaatttctgaacacctcttctaagattcaaaacagtaaaatgaaacccaatatcattataaagttattctctggcaaataatttaaggaagacaactcccgtatgcatttttttcttaatagttcaggctaggttcctatatacagttctccccaaaatacttgagtgtaattatttagcaggtcatcggttgtaaccctgagaaacaaagcagcacaatgtgatttgtacagagaatgattttacccactacgtctccaactatttatatctgcctcaaatcaaaatgctttggctgaacgcaggcatccgaaggaaggctcatcccagtctagttctgctctcaatgcttgtgacacatagagtatgtgtgcccagggagaggctgcgttcagtgaagtagctgggttctcattctcatagggcgatatctcaataggaccttagccccctggggagccatcccactgtgccactgctgctgctactatgcagggtaacctccctcctttcccacctatgactttaccttggcttgggcatttccacctgccctgtccatcgcttcctcttgggttttctgctctccacgagaaccatcaagcaaaacaagaacaaaatgagtcttgtaaaataaggcattttgtggacatctgtgaggcaaaaagctgctttccagtagcctgtggcagagcaaatcccccctggcttgaccattgatccatctgctgcctcctgacgggctgctctgaggggctgtgagggcaaggctggccaggctagttgtcccgatttactatttgatactgacgccccactcaccccctccactccgggccatgacacaaacaccaggctttgccctccctgctgattagtgattggccattagtcgagaagtttgtcctcatgaaattctgcttccactgaatcctagaatagctttggctaaagctgttatataaaaaattaaatctcttgaacatgccagctttgtgctgagattattggtccatcttctggctgcataaaaccagtctgtcccatccaccagggggtcagctcggattccaagtagatttgcagagaggacttggtggacatttagatgggtacataaatgtgttcaggaaatgctgagtaaacatgaatgacctgtttccttagggttgatttatttatggagctaagagaatatgctttgcctatgagcaaggatacttcctttctcacaaatatagatcaactttttccagtgaaaacatcaaagcataaaatacatttttagtttcaaggatgacattaatcatagaattcatgattatgtaagcttttcttcctaccataagcattaaattaactttggcctttaaccctaaaatgtataaaatcaatcataaattaggctttattcctatcctgggatatggaattaagcacattagaattgtagagatacatgtggttatgtctaacct

SEQ ID NO: 976 - DNA, 2437 bp, Homo Sapiens
cttctaggtattgaagaagtggctgtgaatgaaaatagacaaaaccagactgagataatggtatgtaaagtgtgatatgaatatgggggtcaggctcgctcaatgcttttgccatttccatatgggatgattccaacaagatacttatagtcaagctgttagaaataaaggcttcctttcccctctccagctaccccaataaatctgggtcattcatcattgttgttcagtttgtactgagcagccccagttaagtgagctatggttatattgaaatatccacttggccacgaattgagtgaaggtgggaggttcctcctgctaattctcctcccctcccaatacacttcctggcaacccccacgcggaaaacctcaccctactataggcccccttcctcccactcttcagaaggcggtggccccacccaggagagggctgcagatcggggccagccccagggcctccgcggtgccacctctctctcgcgagggtccctgccgtgccccggctcgccgctgggaggcgctgcggcaccggcgtaggagccgccggcaggggtggggcggggccggcgggacggggcagagggccctgcggcggcggacgcggcgggctcggccacaggtaacccgcaggagccgagagcgctgcctggcgcgcgggcggctggaggcacggcgctgggcggcgccgaggccctggggccgccggagccagcgggagccagtccccgtcttcgcccctcgccccccaccgtgtcgccggccttggtccctgcggcgcggacgtccggcgcgggagagaaaggtaccaggcgacctcgccggctccctgggacccccgcttacaccggggtgggcgcctcaggtcggggaggacgctgtcgggggaagggggcgctgctccctcggcaccccaggatcgccgactgcccgcggaggagacccggacaccgcgcctcgccccctggcctgcggcctccgaaaacgcccggcgcgagggggtccccccggggcgcctccctcttcgcctggcatcagttgcctccctggaatatggaacttcgggcgagggaggtggagaactttcttctggggctcgtccctcgttctcctgctcgcttgcagtttgaaggaagggcggtgggggcgggggtccgagtaccccgcggtctgcggcgcgtaggagggtaggtccctggcctgcggccgcctccgaatgaccccgtccctccccgccctggacgacagcactagggtgcagtcgcaggagaggggccgatacccctcaggagccccatcggcgaagcctcagcaagtggcatctcccggggtccagagagtcggcgtgctgtctggtttgggtccagacatcagctcacccaagcttatcttgggcttttaagtgtgttgcttccggtagatctcggggactggaggggaagtgcagcattatttgtgacccaagagggacttgaatgtctcaaagctggtcaagaatgtttcccccgcgaggtagcatgagatgggtcacgtggtagtaaagagccacttcgggcccgtgagatggagttctgactccaccacttgttaggtgtgtgactttggaaaacccacttctttaaaccttagtttttagaactctaaactgcaggtattgtacataacctcgtagtattgtgttcatgcagtgaagtgatgggaatgaaatgcttggcattgtactcttgtgtgttagacaccttttgcgaacctgttggatgttgaattcattcatgcttaggttctgttaggccagtgtaagtggaaagaacttgggcaatgaagacaaacacacctgggtccaaggtggtcccatccatggtatactgattgggggtttctcatccccaaaacaccaatagcagccttggcggggtttttgttgttgttgttttgagacagagtttcgctctgttgcccaggctgtaagctttgacctccttagctcaaccgatcttcccacctcagcctgggaccaccacacctggctaattttgaatttttttattttactagagacagagtctcactgtgttgcctaagctggtctcgaactcctcctgtctcagcctcccaaagtgttgggattacaggtgtgagccactgtactggtctgcagccttgttcttgagtgtagtaggtgtgtctataccgatacatgttacactttgtcatctttagtatttgtttagcatatggtaacaaaaaattttttaaaaattagggatacaaattaaaattggggagtattttctgccctctaggtcatactggacatgggggaagggtagaagagggatgaagaggaattaaagagaccagaaaacaactagtcgcagtgttgggaggtataaaccaatggtaatttttaaaaatgtgaatttattaactcc

SEQ ID NO: 977 - DNA, 2308 bp, Homo Sapiens
gaggcgggtggatccttgaggccaggagaccagcctggccaacatggtgaaaccctgtctctactaaaaatacaaaaattagccaggtgtggtggcgggcaccggtagtcccagctacttgggaggctgaggtatgagaattgcttgaacttgggaggcggaggctgtagtgagccaagatcgtgccactgcactccagcctgggtgacagagcaagacttcgtctcaaaaactaaacaaaacaaaagcatgatgatacttataacaacaattccttaaatttctataatactcttttattccaatatataaaccaattttttaaaagagaaaaacagattacaactttctcttctaagtcaggaagctctagaaaaacttaatgatttttaagaagtagcaatgtttcataaacaaggaggagaccaactcgagaaataattcagcaataataagggcccttaggaaagggtgagagatggtactgagtcagagattccagggtttctgactattaccacttctagagttgcaatagatttggtttaggcctttaagttatggtgcattttatttgtaaataatatttaacagtgatgctgctaaatagcagcataaaaatgtggcaagatcctcataattcacaggttttgctgttgtggtaacatgaaagtgaaaacaaaagcatactgttctacaactgcacagcttccttttcctgttctcagggcagtagatgtcaattgaatgctcagacaccaacaagaacagaaaattcaacacacagatgttgccactgacttgtgatgctcaccaaacactcataacttagaggaagtactttttttctttcactggtttgaattcaccaacttgattatcaaataatgcagcagtttcattattttcatcactgggatttcttttcctgacctcacttgttgattgcactcatctatatataacttaggcctcccctgaacacggagaaagacacacggcacctgctgtccagccagaagttattttaagctattctaaaatgagtcatgccgtttagcacttcatccttgaaaatcaagagaatcgtttttcagtcaaattgaaaacagtaaacatttagtggcttaaatccatacatgggttttaaagtcggggagactatcttaggatgaaataaaatctcaagtaaaatgaacttcaaaataattaatttaagataagctgtccataggagttttacttcggttagtctaaatgcaagtggctgtttgtatttgatttattcttcatgagatgccacaatcattgattttttaaattcttaattccatggctattctttaaactcctgttccacatttactttaaaacagaacagtcattataaagcccaggacaattcaattcccaaaagtagcctcaagacaagttaacaagagggaaaaaaacaaagtcagagaactttgttacttttcaatcatccattttatattatgtggcaaagaaattatttctaacttttatcttatataaactttattgccttattttcccctccccagggagagaacttttcacttgtgttggctattccagatgactatcacagacacatccctccctaagcaacacattttatttataaatacaacaatgaaaagttctccaacagttcactggcaatctcaaagttgcaagtttcgaacaccacaaaccgcaccctataccttctcacagggcttgggggagtgtttgtcatacttaccagaaggcaagaagctaagcaagaagagagaggagaggaaggaggcaggaaaaagcaagtcagagctgcagcaacagcaggagagggcgggctggctgtgttcttacaagggagagagaaacccaatacacacacacacacatacacacgtgcacgcacgcgcgcgcacacacacacacacacacacacgccacaggcactgatggaggcagcagtctggaggaggtgggggtagggaaaggaacatcatatgacacagcaaggggaaaatacacccaagcttccctagctgttgccaggggaaataccttagcagagagaagcagctggaagatctcattagactctccatgttttgtttgtcctttcggaaatttaaactctgagtatattacccccgttgcaaatgcagtctttcaccattgttgtcctttttgggtagagatcagtttttcttacttcttgggttatctccagtgtggtggaagattcatcttctttttcttcttcttcttgcactagcttaattagtgtcaggtt

SEQ ID NO: 978 - DNA, 2324 bp, Homo Sapiens
ttcatcaagaggacataataatcataaatgtatatacacctaatattaatgcttcaaagtacataaagcagaaattgacataattaaaataagcggacaattccacaattatatgaagagatttttaactctcatttctcagcaattgataaaaaaattcaaaaaaggcataaatgatttaaagctaattgttacttatagaacactacacccaacatctgaaaaacattgttttgaagtacatatggtatcaagataagaccatgtatgatcggctataaaaattaaataacacttctaaataatccctgggtcaaagaaaaaattagaaagaaaatttgaaaatattttgaatttgaattcaaatttcaaatattgattttgacatttaaatatgcttgatcttggacaaccaatttggattgctgagtgtcagtttcttcaccaataaagtggagatattaaccttcactgggttatcatgaagattaaatgaaataatgtatataaagcacttagcataacttctggcataataataatacttaatgtcattgttcataatgagaagccattactgagggcatatgggcacacttacagggtctcctgctactttgatcattctgtctttgtttttttggtgggggagaatctctagccagttggatggtattaataagatctctctctctctctctttattttctgagacattgctctctgtcactcaggttggagtgtagtggcgcaatcataacttactgcaggctcgaacttctgggctcaaatgatcctcctgcttcagcctcccaagtagctggcactgcaggaacgtgccacactcagctaattttcctgatttttggtagagacaatgtcttgctctcataaatgttgcccaggctggtctcgaattcccaagctgaagtgatcctccggccttgggcttccaaaatgctaggattacagatgtgacccactgtgaccagctgaacattctgtctttcaatactacccaagaagaccacgctgtatcattctactctttatatctctttgttgataaatgatcccaccctatctgatttaattttatctccttactgtgtaacattactgacagacagtggatttacgcaggcacacaagagatttatgcatcctttgaatccaaaccttgagttgaggacgatgcttccatcctcaggcccccattcggcctgggagtctgtcttcagtactattgttgacaagacgccagtagcacatctaaaacctgccatttgagactttgacttcatcacactggttctccatttcccaaatatcaaaaaacaatttgggaaaatgaggaaccatgattctcttctatttttcttcctaactcaattgtacaaattcagcagtgattttcatgtactctgtttcttgaagtatctccttttaaacgcttataataataactaccttacaggaacactggtgtctgattaattattatttgtcaaaagatttaggatcttcagctggaaaggggattggggatgcacacagtatcatcttggagagctctgcatcttgctatattgaatggagctagtgtctctgtgtaatcaaattaaccacactgctagggcttacgctgtaattaatgaaacccgtgcagaccaaatgaagtgatcagtctattatttttagattgaataattaaacctgaagagcttcagtgctttttccaatagcttcctttttttcagatgactattgacattttggttctcaatctcacttcactgtgtcaattcggtgtgtgtccatttgtctcatgtcatgcagaattcattataacaccaaaaatgctgaatctttacaaatgtatttttttaaaagaactaaggcccaccttagaaacaaactcaacataatagaaaggtaaggggaatggtatgcattttatcaagggcctgcactgtgtcaggtactgtgcgggtaccttacctattcaacttcatctaattttttcccagccacacagtgaagctggtctaatctccattttacggatgaagaaagtagctcaaggaggtaaaattatttaaggttacaagcaagcaaggggcagaggcagtatttgaacccaagcctctctgattctaaaattcacactctttccatgagtagcagaggcctgtctctgtgccccattcaagaaattatgttattctgaggcatggggacataccttcagagtcttgttgtgtctctgcagctcccggcacagactctccaatttgcttcgagcgaggatagctctgctgtgt

SEQ ID NO: 979 - DNA, 2389 bp, Homo Sapiens
agcccacaggcaaatgccctatactccatcattagttggtctaatctttctgcaaattcttgcctgaaggaatatattaagtcataaattacctagtgggaattcattttgttaaagcagattatattctctgaagcagggatgttggatcaatcaagtcttgggcacttggaaagtgaaggaaccctgggagagtgactgtgttgaagaaatgacaggatgaagagcaaagacaattttgaaaattttgaacctctatagtgacttcactatctgtgacttcttttcatttttcttttcttttctttttttcttttttttttttttttgagacagagtctcactctgttgccaggctggagtgcagttgtgtgatcttggctcactgcaacctctgcctcccaggttcaagcgattctcctgcttcagcctcctgagtagctgggattacaggcacgtgccaccatgcccagctaatttttgtattttttagtagagacggggtttcacaatgttggccaggatggtctcgatctcttgaccttgttatctgcccgcctcagcctcccaaagcgctgggattacaggtgtgcgccaccgcacccggccattatctgtgacttcttacccaattcctgtaaaccagtattactgagtcttcaaagaaagagtaccctatgaaggaggcaggttgaggtagggcgccagagaatcgaagaatgggcattttcgtagaccattaagtgcaattagataagaacagataaatctgaacatttctaacaaattctaacatgcaatcatgcaaatgtatgttagaaaaaaaatctaggtaacatgcctttgagtattatcaccttccagaagatgcaggtgggcttgggagaacactggggcaggctaagtcacacagcctaatttctttctaagtccacttgaatacttacttagcatcctttgcatataaagtccaagtaaaattcatttagtttctgtattgccactttgtcattaaatctctcttttgggtcaaatttttctctcagatttgcagccactgcttctcttgacctccataaagcaggaaatgtccatgtactgccaagttttcagagtcctcgctgcccatagcaatcaaatgagatgattgcctcagtcctaagcattggtctcagagaagggtagagcatactttgaaccggaaaaccaaaccaaacaaaaacaaacagccacgtgaggtatgtgagatgtcagtttctctttggagaaatgtaagatagaaatctgactgtaaagctctatctttgaatgaaggtttctgcgacttgcttttagggtcacactgtcccttccttggactactgggaatcatagccctagcaaactcagttttccctgatctggtgataaaggacgcaaattaaaattgcattaagttctttttgattctccaaagttacttcaaaatagtttgtaaataacaaagctattttttaaaacacccccttcaaaccaattacaaactattttgaatagcttgaatatttgcttcaaatgatgttcaggatgttttacaacacctggaggacagcgctatacttgagagttgactaccttaaattggctttttcaagcaattctttacgtgacttgtctgctgtgcttgcccacacgtagtagcttctgaattgttgctttaaccacattgactgatttaacaaaagagttaaaacatcatttaattctgttgtatatttcagttaattctgagtttttccaactaaaacagaatgggtggttgagtatttttcttttgcagattagtgcccaaccttaaaatttacagagattcactggattgacttggaagaccaccagtaatctcagaagtggctaaataaccgggacaaaagcatttacccagaagtggctaaataactgagacaaaagcatttatgccttagacatgtttacaggatgatgggtctatgctgttttttttttttatttcctgccccctttctaggaaaatgcaaaaagtgcttttctttacaccattggacaaattacttcaggataaattgaatcctgtttacagtccagtagttttatgtaatcagttttttaaaacctgagtttcaaacagaaacgcctcaatcatgtcaaaaacctgagtagttctaagagtcctccttcttctaaatggtacagctgtaaagagcagtgtgacttttgtgggtccaagctcgggctctactctttactcaaatgtggtcttgaacaagtccctaacactctctcaatgtcaagccttcattgggcataattatatttaccttggttttttgtttgtttgttttctgaaagtcaaatggcacaatatgaatgt

SEQ ID NO: 980 - DNA, 2380 bp, Homo Sapiens
gtgctgagattgcaccactgtactccaggctgggcgacagagtgagacacagtctcagaaaaaaaaaattatatatatatagatatatgtgtatatatatatatatatatatatatatatatatatatatctcactgacagtggcattattagaattgcatattcccaagacccctgtagcagggtatggaagatagaatggagggagactgtattgaggtaaaatacataagtggtaagaaattatgagcatcggaactaaataagctagaaaagaatagtaaatgttcaataaataggtatgaattgtttgatattccatgaagtctgtataaattatttctcttagagtaaaggctggttgtgaagacaaaatgaaacaataaaaacataagatgacaaaaaaatccagagaaatttatagtggtacttaaataagacctggctcctctctgagtctcagtgacctatcatcttgagcctcaatggtgaccaacaagagcacccagctaaggagtgagcaccatccctgcagacaaccaccaccacaagcctccgagacatccctggatattcgttgtcactactggtattgaatttcaggaaacctcgggaataacaactgtttaaccacaaattctagaaaataatgtggaagtccaccagatccctgaacaaagtactcttttttttttcttatagcacataggcactctaaattaggaacacccgttcctatttctgttagcaaattctctgtcaaatctactatttaactgaaaacctcagaaaggagtaataaagaaatcatggtagaggtctatactattaaaaagaaaaggcagttagtaaaaattaccccttatgcagaagccaaaaaaaaaaaaaaactacttctaatgagatttgcactccaaagaaaataagaatcgacaccatgatctatatactggctggcattctttatccaaagatgtacagatttgaaaaatccatatgtcatatcccatctcactatttgcccctcacagtcttgtaaatcagtaaatctccacaagacacacaggttgagagcgtgaagccagctagaaaagccacgtggaaatgcacatctattccagagcagccggattcacatttaacatggcaaatcaaaacgatgcaggtacctacctttctcttctggagttttcaggcttctaaaatttaacaccttactgctgatctgcccaaaaccctctcaggtgaggtgaacctcgagggcatcccattcaatcacacagccagaggagggtggggtttcacaagaccagacttcaaatgctggggctcttgcgggttcccaggctgtcgggagcagaggtgaactgccttctgttctctgctgcaggaagaagacgggagacactgactgactggaggtggggggcgggggcttgggggagggaagtaatatggggactgtaataaataagagatcctctccacatgatttcctatatttggtgcctgatgcctctctccaggctccctagaggaaacaggaaacttgtcctctggccactggaaagaagagaataaacatactgagaactgtgaaaagaagcagcaggaccccaggcaaggagctgatgggccagccaactttaccttttaccaagtgctttcttcctgaagttcctctaagtgtttaactctgtaaaagtcaagaatgtcctcatcttcttccactgagctggagcatattctggccccagtccagatgtcatattacagagcagctgatgacaggcaggttagaacaggccctggaagaatccattcccagcctcaggcaagaccccctaagctctgtctttggaaagtctgatctttcttaatcttggactgactccaaagccctcaggccattttgccttagagtttaaagaattatcaggaggccaccatccgtggagtgaagtaggaccctctacattatttatggggtttcatgtaaaatgaaaatgtgatgccactcatttgaaaattaagaatttcaagatggtgacaatagaacattaaagcaagtgtggggactctctggagcacagggctctatgcaactgtaccaggccgtagactcaccaagccagtcctggctgtagaaagaacgtgggaactctgggccatgtggattttcacaagctgagttgttgagagacctggactacctccattgtgttcagcagggtgacagtcagtcctccaacagcagcacacttggaagctgctgcaaggcagcagagggggaggagggtggatgctgggttgcgggtgtgagcaggcaaagaccacaaacacatcactgagtaaaaatcacacagtggtctccttgccc

SEQ ID NO: 981 - DNA, 2378 bp, Homo Sapiens
cttaagaataaaacgtttttctcctcttttaatacagaatacctttcttatgagttttctaaaagtacgttaagcaaaccaaaacaaaaggaggtgggtaatgtacctgaagaaacttagccaattcaatttttgcaacctcagaagcatgttccatttacttcttggaactaactgtggtcccaccataaattgaaccagatacacttgttctaatgttatctcaactttgcaggcagattgtaacccagggttggtttagttcatctatttcctagtccattaatccactgctcttgctgtctcagccgtgtgggcattctttcagttggaacatacagaggctgctttctcctccaaaagcttaaaagcaacaaagcaagaaagagagaaaaagcaagaaagcaagaaactgagaaaaagcaagaaagcaaaaaagcaagaaagggaaagcaagcaaacacagcttctacctcttcccttatagaatcagagccccttgagagtgcctacaggatctacttagaaaggttattttgcaaatgtcccattagctacggcataatacagctctcctccagcagaaaagctctgctttctgggagtctgttccctcctcagcctaatggattctgtcaggggcaggatgtggcttttgccatcacgggccataaaacccaggagtaatggctgcagtgatggcggcctcctgccggcccatcagcacgggagtttgacggtgaggaggagagaaaggaaaactgggaaaagttctgaatgctcaataacttttcagaggtaagatgagggagagagagacctagagccataattgcagaagcctcttgcaaaatttaattaaaacttgggcagaaacaaacaccagaaacaagtgtcattcatcaacttaaaccgccaactaaggtaaacactgccacaaactcaggaaaagaaagggaggagaatggaacgaggggtgatcactctagatatcaagcaaatcaaattaccctgaaggccctgccagacacatgcattaatcattggttatcccagctgcacacctgtatggagaggagaacttggcgtcctcaaattgactctggctggcaaagtgggaaagcagaaggacagggtggcaggccaaggggaacccaatccagaagtggccacgtggcacccacggctctgcactggccaggtggaagaaggaggaaccacgtaagattcaggcgagggcgtacaatcatccccagctttccagtcttgcttcttgttttctggagcctatgtagctggacaaacctgctgagctgcaacgtgaagcaactttccccgggagggggaaggcttcagggtgaatccaagccaactccagggataacagagtgggaaagcaagttgagctttcaaatcctttatgtggctggttttcttctctcgtgagattcagcatttagtaggagggagacggggtagggtggggtggggacaaagtgagccgttgactttgtttcctgggtcacaggctttgtacacccacaagtcccgagggcaggtcacaagctgaaatcttcttactccagagagaggaggctggagagcagctcagccatccaggctgggagctatttgcacttgatgagcaatttcaagtgggaaccatcagagtgtgtgcctgtgtgaatgccagagtgcatttagagggaacaaatgatttattatcggggcctcaacaaagttacattcgaaaagggagggagcctcttattcccctccttatcattaaaaccttaaagaggtagaatccatttggtctcttaagccaggctggaagggagtcacagctaatcaagcagcccgctcagctccttcagcccttctttgagtacaacaatatgtataaactggcaaaagggactacagactgctttgatgttaaacaaagaggaaaacctccaaaacacggtaaaaattgtatctctgtttaactcttccgcgtcctttcttcagcacaaatttaagacacgtacagctaggctccagggagaggtacataatgaaaaattatcatttcagatacttagatccaagtattttgtagcaagagaaaatgtccagtctcctcttctgaattactttctctgcttacgtttttttgtttgttttgttgttgttgttgtttttgagatggagtttcactcttgttacccaggctggaatgcagcggcatgatctcggctcactgcaacctccatctcccggattcaagcaattatcctgcctcagcctcccgagtagctgtgattacaggcacctgccaccaagcccggctatgattaaatattacttcactaataacaaatactgtgctctgg

SEQ ID NO: 982 - DNA, 2469 bp, Homo Sapiens
tcaacattaggggtatcagccagcaaaatctgttgagcttaccattgaaaaatcctttcattcattactgtggtcataatacacagttacctggccaggaaagagtacacatcacagggatctgctcactgcacgtgtgcctgagctctccctcactttctgccttcttcaagaattcttccctgattggtccaaccagaagcgctgattctccccacctgatttcctgtaattttataatctatgtccttcacttttgtgttatattgtttatttccttttggtctttttgtgtgcatatgtatatgttttggggaatggggtattcacttttgttactcactgtgttactcacttttgtatgcccatagtgcagagcatggtgccttgtacatagagtatgttcggtaaatatgtgcaataaaaagtcctttgattacacaatggcttgatattggcttttccacttcccaaatgagccatttcttaactactgacctaaatggagctgacccatttccataaacagcacctccttgaccttcattgctataaaacccataacaaaactgcctcctcacttacctctccttattgtccacatttctcctggaaatatctaaatgagggtttgctttagatctttggggaaggaaggcctgtgagtagacaacagtagaactaggatgtgtgggactgtttggtggttagcagaacaatgcaaactggctcccctgtccaaagtcaaaccgtgtgcattccccacaagtggacacagtgtcttctgtgtctgaattaccacagtcatgtagtggctcagtgagaactccttgtcccggtcattacaaaaataaaacagaaatctctctgttgctaggttaggaattagatcacaattgatgcaccagtttatcagccaatttcctccaagttcaacatcagaacaggcaaaaaaaaaaagtatcagcctttaaaaatcatcaacaatagtggcataaccttgcattttatcaccctccttccaattatcccagtgcagcagatgcaagcagagtctcatgcaatcatctgagataaggatgaagaactgaaagacaaacaagtgactcactttaatggatttgcttcagacaggagaaacctgtaatttctcttaggcgtgcttcatggacccatagtggagtgaatcacagacttgcacaagccttgaaactgtgggtaactttacagttctcagatcggcttctcgcaacaggcagtcagttctcactgggccccttggactcccatttcaaaaatggagaagacagatcacagccactgaccagggaccgtgggaggtgccacgtgatggtgaggcatcatgctagggagctgagctctgaccttcctgctgggtgattctccacctctgggctgctagatctacttcctggatgccgtgagtagatgtcctacaccagcaccattttcctgttgaagaaaggcttgtttttgcacatattccaggagggggaaatgcgtgatatatgatggtattttctggaatgcttgattcttctggaaacttctctaacatgatttagaaattggctagctcaaggttggagtatttcctaagcctcttttacgtttgtttttctttaagagttgtttgtcaggctttaatggctcactcctaggagtgaaaatgcaaagtatcctgtcaggcaaataaactcactgtccctgcattgtccccttgcttgataaatttcaatacctgtcttttagactgaatgtaaagctggatgttgttttaaaagtgttcttgattagtttcttcttttagtgagcctgaaaaagctatcattgtatcaatttaaaaaaacatttctccagttactgccaaacacgtttttgcaaaggcatcttcccttgtttcaagtggccaattctatgctacttgaaggtctatattccttatactctgaagacagttgtgagaggtctaaagtgttgcatcattaggtgctgtttatttgtttgtttgtttgtttttcagtgtcagcacatcatgagctttcttcatggaccagaggcaattgctgggcgtataaatttctttaaaattttataagtatcaagatagttggtgagatatctagatgtcttctaactctgaaattgtcttccaactctgaaattatgtgattcttgaaacctatcagaatctgaatccagattccaatttttagaagagatgctgggctacaaacagattggctggaagccatctaaagtagctaaagatgagatgtttctgattctaatagttcttttctatctttctttcccccaaggctctatgtgaagcatttcttccatggcaagggagaactctaagggtaactaaatagattctgctatgagggcaagagatactgggtcttaaacacataaacaactcgtttatccatctgatgttat

SEQ ID NO: 983 - DNA, 2231 bp, Homo Sapiens
tgacaaatggtagtttatctatgactggagaaccctaggaggaccagcactggctctgtcctcataggctgtgaaagcccagcaccactctgtccatatatttagacatttaatttataccatttaatttaaattatccgttttattgtttttctgcaaatgaatctgtggataagcgcttctaccaatggaaaaataaaaggctaaaacctaacagttttaaagttcacagtatacatgggaaagttatttgaattttcagttggtgatgacagtacttgttcccagaaaactgatataactcactaatgctcagtactgaaatacaagagtttattgttgttgttgacgtattgctgttactttgatatcctttaaaatgtagaatctgaatcattgatgtcatgaggcttacttagagagtcgtcaaacaaaaagtcagatgatgtgaggataaagaagtctgagagtttgttggtttgcaggtgacttcctgtgtcccccttagttagcttccaggcaggagaggctatcagagcagctggaacattttctataaaatagccacacaactcaaagaagacactattgaggcatcatttctaggctttcccctttgaaaaaaatcaaattacattttgaatttttcaggattgttttccttctctgtagggtttatttctttgaataaaactagtatctgctaatgattagaatgataatgtatgtttcatgtttatacttacataactgtgttttttacttaaggttttgtccaatgtaatgatttttggatttgaagtgtattaaatgttaatgttttttctaacttctaatttttttttttacaaattctgaagataaacactaatattttggtattacattaaagaaatacctaattaccagcattgtcattttgctttcatcctgcatctctaatctctaactttaaaaaataggtgaatatttctcatgctggttcttatgttcatataggtcattgtcttgccatggaggaacccaaaggctactactggccatctatccaaccttctgaatacgttcttccttgtccagacaagcctggcttttctgcttctcggatatggtaatattttcactgactcttgccagcaaagctacatgttatcagccttcccagggttatacgtgcagcacggtagttcttaggcattatattgattgcaaagaagggcaggaatctctgtgtatgcctgtatcattcactcctggggaataaagataacataagtggatgactcagaaaggcagtgttttcctcccagccacatgctaatcaagccctttcacagaaaaactgaagagtttagaagccagtgggtagcaccagagcaaagtaccttgtatgtggatgaacctagcctacccttggaacatgcgtctggaattccgaaactttttaactattttgactgattattgctggaatggggagaggaggcaaagaggaaatgaagacaagatccagattgggatagtctgctgatggaaactgtcagggtgtagattttctctaaatgtttaacagaaacctcagagactagataattgcagggattcatggaatagcaagtcaaatccatttctctacccacctcactcccaattagagttttcctgggggaaattcagaaatggaaactgcctaagcataaatactttgcatactataaatattgctgggtttgacactttgtagggagcaaagaaggggactgtagagatgtatggacttgagtttgaaatgtggctccatctcttcctggctgtgagaacttggaaaattcgttgatttaccaaattccatttaatcttctataagatgtgaattataatctgctttgcagagttatgtgaactcaaaatcagattttacctgtaaagttcttaaagcagtacttggccaatgtatcctaggttaggatactgctggtattttgtttccaagatgcatgctactgatttttttcccataagaatttttagcatgaaatttatttcagtgcattacagttttattttcaaaggaaacttaacctagaaatcaaggcaaatcccaaaagttattaactaatcttttcagttctaatatcatttataggaaaacaggaaaagaaaacttgtagaaggaaatagtgcaaatggagaaacaaactggggtgagagaggagagaataaggaagggt

SEQ ID NO: 984 - DNA, 2334 bp, Homo Sapiens
tcagatcctgggaacaaaactaacaatttcccaaacacttccaaaacatagctctgacctctactccatcaaaaattctgatttaatttgaggagattctgctctatttcttaaatcaaatgtccctatctctcttgcaccgtgaatgctctgaatcgaccagtaagacaagaacaacattaaaaccaacagtgagggcagtttcagcatcatcttgctctcctccaagacttcccctggttaccttgctcctttctccctgccagaccttgagttctcttttccaaaacatggcttgagcacctccttgaagaagtcttcctcatgtctcttatcttgttctaatcatcccatggctagcgtaagtagcacagatcccatctgcattccagctatatgtgttcctgttgtttcttcctgtcttctcattagcctataagctctattgtacaaggtctacacactcacatccactgtagtacccataaccatgttgcacaatattctgcatacagagggaacttaataatttttgcagtttgacttttgggtctctattctggctcctgggtaatcatttatcagcaaacaaattagttatcagtgaaacagccatggtttccagagttaatcatttgtatttccactgctggaaaaaacaacacataccactttccttgcagagaggcatgcggtcagaacgtcactggcagatctcgcctgagagttttgacgcttgtaactctgccctggaaaggtgaatcaacttttattttgattcatgtgtttttccaggttcctttagcctaaatgcataaaagtcagagaaagtcatcaccataatactgataacaacaatgacaaagatatacacatacagtcagtggctgaacacccaccagcaagattgctggaaaccaagccgcaccacacctgccggagcatccaggaccatctactcagtgcaggctcagcagccatgcctacctttgtccatcccaggtatggctcccccaggtgccagggctacttctctctcttctagtggctgctcttcctgctggcacgcagcacctgcctcccagctctaagcctgtggggcagccaggagagtcttgcctctggcctccgttggtcccatacttcctggcgagtggctttgcacggcagcccagccctggggaacttttcaagggagagggcttctttccctccctaactcccctaccctcacccaaccccactccatactggccctttaccatcgccagttgttgccttgccaggtactgtggaacacctacatctttccctatcacagggcttggacacacaggcgttggagtcagatacgctgtgtttcaattttcaaccccctacaccaattgcttctcttttctgaacctcaattttgtcatccacaaaatagagatagtataataatacctgccttatggtggtgttgttagaattaagcagtaacgtcactcgtaatgataacagctgtactgaccaagggacttgtacgtgctgggtgccatgcagtgttttgtacctcttcttggagcccagcatggcgtctagcccagaacaagtagtctgcagcttccttccccctcttcttctttcttttctcctccctccttcattccctaaatcaaataggacctgggggtgcagcatctggtcccttatgggggctttttcctctctgcagcatcttcccttcttctacaggccatctgagagaacccagacccctacccccagactctccgcccactagaaacaggagccttttcactctcctgcccaagtcccccacctaacagggtagctccatttctgtttccagccaggtttccaagctccatccccatgttggggctctgcacctggtgttctgttgctccagggaacacagatggccaatagctagagataaggtcagctctgtgtcctcctggaccacagaatgtgcccctaagagccctttccttccacttcagcacacaggcaggccatttgcaccaggaatgctgcaaaacactgactggacacagataatcaatgcttaagcataatggtctccaacggagcaggagaaggtcaggaaccagcagggcatagccatccccctatcctgggggaggcagtcaagaggaagggcccctggggaaagagggagctgcacctcgcatcaggggagggggtgagtggaacaccaagatttactggacttcaggggccatcctattgtgggctagcctctgaagaacctttagtagattttgccacacttggccctggctctggtgcacatgcctccattgc

SEQ ID NO: 985 - DNA, 2500 bp, Homo Sapiens
taccaagcaacacaaaaaatgctccacacaaatattataccccccagatagtttaacacactaagaattcctttgtagttatttttatgctttcactccagatattctattttgctttaaaaaaaaaaaagtggagaaaaaaagcagctatatccctcattcttcaaaaatggttcctctggttgaaaagaaagaaaaacagcatataacaaataccctgattctgaagtgcctggattactttctcaagtactgtagtgtctgagatcagtaaaaaaccactttctcagaaagccactgattgtctaaccctcatgagtaccgtcatggaatctagagacaacacgaggagacacctctcgttcacgatcacagatagtggaaagaactttgactcaagcacctcaactcagcaaaacagctcagcagcctgcaccctggcctcatccaccgctcctgtccagccagcaatcaacctggagaggacccctcatgctttgggaggagcacgtggaagctggttcaagtcacagtgctccacctgggaaggaggtgattttgagcttgggaaaactgccgctaatactccatagtcaccagtttttttcccaaaaaacgaattaaaaccagaaactagcagtaaatattattcttatttatgcctcataaattaggaaaaaccagcacaaagacatgtgaaatattctacctgggatatttgaaataaaattaaatgggaaaaaaaacacttttacatgttcataacataccaattttaataaccaaattttaggtaaatatttttatcccaagacatagtacaatttttttaaaattaaaaagcaaaacaaagcaaaattatcgtgaagggaaaaaataactaaccggttacttgagttcacatttggaaaaaaataactttctaggtatttaaatgcagagttaaagagtaatgaacatgtatatagcccaaatttataaactatataattcaatgttacattttcccctctgagatctggttaataaattaaatgctgtactttgcatatgaggaactaaagtttacctactggactcagtggttttagtgcaggacactcttgtgcgttgccatagaggtaggcatgcaacccagaaaaaactgaaacaggtaacctgtcatgctgacagttacaagagaaagatcccgtgtcaacggcacgcctccaattgtgcatctcccttacctacagcttgttcaccagagccctgagcaggttgtttaccaggtcgggagtgttgactcagaagacagatgactttcagcacatgcaaaccgagtattgcaaaagctatcttccacccgtgttagtagctcacagttagtctccagcagccctgcgctccagctgcaaacatctcattagactaatgcattcagcacaggcagaaaactcgatttaccatagctacagcaatgaatttccattacgatgacagcttcaaccacatcatgtccggaaaaccagccaaccactggcttttaaagaacacacacattttacatgcagaaaacgaggcctctgtgtgtgtgtgtgtgtgtgtgtgtgtgtgtgtgtgtgtgtgtgtgtgtgtgtgttttgtgtttccttcctcttagcagcctaagagaaatgtgcagtgtagctttttgtcgacatgagctgcaaggtaatgacacttctgcttctttggtagttacatccttgtaataacctgaattatgtcacaatggttagaatgggtgtttccaacatttcagttttcattacccctcctctgttgccatagaaaccagactgtaacatcgtctctttgtcccaatcctgcagcagtgtgggccaacaccaggcttataagacactggtgatctgacagagtgaatgtttgactttggacaaataaaacaaaaagaaatattacaatagcatcattgttcaggagaccctgtgtgattcccagagcagtgtgcctatccaggtgtgtgcacacaccatggttgtacatattaaatcagcggctgcccacaacatatgtgtacagttcattaaagccggccctgactttggctccaggcctgtatgtgtgtgtgtgtaagcatctctacccacctcaacgtggtgggacctgcacaggatagaaacagggcaagagtgactattcattcccatgccccattgcattttctgcagcaaatcaatatatatcggcgaagggatcttttcttttcctttctttttgtaaagtggagcagggctccccattgcccatttcatccactctgggatattggcatattcacaggtatttcctacaagatgaaacatccattctacaaacatgtggcttactcctagggatgagcagcaaacaaatttagccgggactaaatatcaaccagggctaacgaaggcttaggccacaacctggccagttactgagagtgaaaaaaactgcaatggacaacttgaggtttctc

SEQ ID NO: 986 - DNA, 2442 bp, Homo Sapiens
tgctcttctctctcataacctcaaccatctaacctatactcatcttcattgagtcaatgaaagcaatgtcactgttggtgagagtatattcaaggaaaaatatttttttctattccatataattacattttattcctttaaacccatattgatatatagttgaaaagttggctaccattttttttctttgctacttactaatggtgaagtactgtgctctttcttgcaggtgttttaagatcaggatgacatggttttcctagagtgtctttaggagggccatggtgtataattttataaccctagaacaaggaaacaaaatatttaaaataaagatgtgaagaatacccttatagatggtatctataatctttgtcacaaacttaaattttgactcaattgtttagtattgtttctaataatttactgtatttatttgatttcagcgttaagaccatattgtccttctgaggtcagattgtatttcaacgccctgatatttccttcaaacactaacaaaaaagtggacttcttgaagttcagtaactactagttggctaacttgcttggaaaattgcaaccttttttcaagactcccaaccccttatctaggacttcaacccattctttaaaagatcatttccataagcagtgtcccacatggtaagtattaactacgtggatttgggggtaacagctttgtctcttcattttttttttaaattctggaagccaatagatgatataaagtccagcagagtcaatgaccccaactctaattgttattacagtttctaataactgtacattcaaaacatcaattagaaactaagagtcttaatttgacttcgtaaaaagcagattgagaaatgacttcaggcttctactatgattcaatgggtcttatgtacttagaatgatttctcttttaaggtaggtaaagagtttcaatagactaaacatagagaagcatgttgaaagttatggtaggtcggcgctaagcaacaaaattgaactctcagtctgcccggcattagctatgtgccctccagatgccggaagaggagcgaaggaggatcagaaaccccctcacctcaacgatggttctctcccctgtgcttcaccccacctccccgtccctagccatttctagtctccaatccgggtcttacatttaccctggctccagagcacagaccttcctgcagttgggccggcgcgttgcggcgttgaggagctgcggcgcgcccctctcaccgcgattgttcacttgccaggcgccacgtgtgggcgacgtcactgggctttatgctttcatcgccgctatctgcctacgtgagctgctctcctcccatcgcccccgcctcccctactacggagaaaatcttgcacgttttcccttgtgaaaagcagagttctctttttctcattaccaccagttgatgaggaaagaaaatgtctgttcgcatacctgcgccgtactaggaggaggagggaggtcatataaggattcgggttgcccagggggtggcttgaaaaaggaggcgttcgcattcaaacaagaatgcctgaattaatgtagttcaatttaaagagctaattaggagtccacaggtgcttaagtttgcagtgcgctgccagtgtcatgccaacgacgcactccagttacacaggttgtcagtttcaggctccctcataaacacttcatgttcttgtccctcttccccgttggcaacagttttatggtgagaaaattcacgaagagtaacaggaacaactcttatgaaaatacgcagaactcctgacccaaggctactggctgcaagtttagcatacgtatcaagcatgggttaaagacatgttttctctctcagaaggcggatgagtaataggtgcattttcttctattcacagttgttttcaaagcgaaaaggagtgaattcgcttatgacctagaggaagagagatgggtcaaaagatgtcaagccaaggattaatatccgtcataccttggttctctgtaagccatgcaataagaggcttgagatttcaccaactctggagactcacttgggcacaactgaaactataacaaacttggtgctcagtgccattttcctttggcagtgttacaaggtaatttcaagggatcagcacacagacattgttttagttttcttttgctgcttatttcagttcatgcagcactgactaaaaattttggaatttagactgcttaacgcttatatctacatccaatatcaaaattcattactgacagtttgcctttctaaatatttatgaaatctagtcctcaatctgtccctcacttctatattcatgttttcaccatatcttgcttaagttattaattggacatttcaaatacctatatgcacaaaatctctgcctacctatttgttctttctttctagtgccgaa

SEQ ID NO: 987 - DNA, 2386 bp, Homo Sapiens
acaatttaactaccttctagtaatctgagcattgtgtctcattaaaaaatatttcaaaaaatgagccacctgtagaatttataaaggacgttcctttaaaaaatgaatatactttaaactgctcacataaatagtttctaacacatatatcagaattagcaagttaaggctatccctgtaatagtccacttttgacaaaatcacttgtgaaataaaaaaaagaaaaagaaaaaactctacttgctgagttcctgcaaaagatactgtttaacttgtcagattgattttttaatcaaaattcaaaataatggaataaaaatttaacagcttaaaggtcaaagttagttaatgcatatcttcaaatttgcaactgatttacttataagtaaaaacatccacaaagtttaattgattttccacctcgtacactgagaaatagtattttgtacctcttgaataattcacaagtttgaatcctaaggcatacatatatatgtgtgtgtgtgtatatatgtgtgtgtgtgtgtgtgtgtatatatttatatatatgctgtatttatgcctaattattctggctacaaaggtcaaaaggacaaagtggccacaagttataatgggttggagaatttggatggaatgtggatctaaattactgtgttacgttaacttgttgaaatcttattgctaaaattttgcactgctaggcagtaaaacagaagaaaaaaaaataaattgagaaagtgttaatttttaagcaagtttgacaaagattgagtttcatatgacaaatattgtcagcaagacaggattctgtcagtggaagaagtttaaacattaacaatttctgtcaggctgttgacacaatcatggcagacatttcccaagatgccgagatgactgctggcatttgtcaacaatcctgtcatagtgacagcaataaggccatgtctggaaatgtgacagttttggctttgtgctcccctgagcaatagcccaggtgttcagagaaagtgtgggaaaacccatatttctgcattgtcattcgaacacagaaaacacaggaggaaaatgagctgtcactccaattcccatgatgccttgctgcttagcataactctacagtgcggccctgggtccactggtccatattctgacagataattaagaaagcagcagctttttctagacggctcttcctcatgatttgcattttagccagaggcgaccagttataaaaaaaacatgatggaaagatggtaagaagccaattagatggatggatggctgactgacagctctctggtattacgactccagatttcagactacatagcctggcagttttctacaagaaccaacttttttgcaggttggtaaagctgttaaatgtgggactatatatagctctatataatttttgcaaagttgtacattttccttaaataagcatgtattcttttcaatcagggtttgcattaaacaagtttcaacaatttaatcacaacttgcatcactaaatttagcaatattaaaattctagacaacttgtaggcacattagctgtgccagtagagaagtgattaaaaagctgagaagtactttgagccagcagagataaagtgagctaataattacaatgtctgtgcaaatatgctttggaactttgaattgtacattgtttgcttttaagcaaataaaaacatagaccctaaatttcctctccgtctttagatcttgcacacatatatttggttattatccctgttcagggtataatatatgcttgtgtgtctgttattttagctaattttgaaatttttaaaaaataaactgttagtgtcaagcttccagtttggccatgatattctatagcttctagccaataggagtcaactcttcacaatattttacagtttggaagcttcaccaatgtttcctgtgtactgcatgccgtgtgtgtgtgtgttgtgtgtgtgtgtgtatatatatatatatatacttgtcatatatatattaatatatattatatatcagatacacacatattaatatatatatcagacacacacaacacacacattgttaaaagcaaacaatttgctattagttcggcatgtcttcatttgtagtttgaaataagaaatttttctttcaaattgtaaagatacctcagatttgattttaatcttgaaatatgaagggtaggcaattatttcactatacattgaagttccagtaaggaatattaacccaaggcagaaacgtgagcatattttcttactgtgggtaatgaatcttctacaaactgaggataatcattaaactaatggtaggtctgaatgtttttagttgcttaaaactaaacaatatacattttaaagttcca

SEQ ID NO: 988 - DNA, 2300 bp, Homo Sapiens
accaccgtttattggatttaaaagtcctatctcaccccttactcccacttctttgggaagctctaggatacatttctttttttttttttaataggtacggatatttttattttatttttattttttcctattttttattatactttaagttctagggtacatgtgcacaacgtgcaggtttgttacatatgtatacatgtgccatgttggtgtgctgcacccattagctcatcatttacattaggtatatctcctaatgctatccctccccactcccctcatcctatgacaggccctggtgtgtgaagttccccaccctgtgtccaagtgttctcattgttcaattcccacctacgagtgagaacatgcagtgtttggttttctgtccttgcgatagtttgctcagaatgacggtttctagcttcatccatgtccctacaaatgacatgaactcatctagatgcatttctattcttttactcatcaccttgaaacttttaaaatagttactcagtatttcttttctaaacgtgtctgctttatccccatccaagcctgctgtaaccacacattgaacacccccaaaccttgctcaagctgatcttactatttttgtcttaaattttaaccacgttttaaatgcataaaaattatgtattatacataattatgaattacaaataattaaatgtacttatttttaaaaacatgattgaagaaattctcttttctcgcaatctcttttctaagactaaatgagttcccagtgcttgcctgacacacggtaggttctcaataaatgaagcacacctcccatacccctccaaataaacagttgtctctttaaacctagacatgagtgctcagcaggcatgtatttctctgggttggattcatttcatggacagttgtcaaagactgacccctttatgttaattttctgaatactgtgcttgactgtgttgcaagctaaacagtacaggattaaatgttctcatttctgagctgtgaagtgttgaaactgatcaagaaatgaaggcagaatgtccgtcctttgggagaataatcagccagtctatgttgctgccactcttggctgccgattggaatgcagctgttaaggcagctgtttaactgtttgcccaacttgaaaggacactgccaaatggcaaatattttctataacaacattttacttttgctaagaacaataacagtgcattttattgagctccaatggcgtgccaaacacgacagatttattactaggcaggttcacaacctggactgaacatggatgctcatttccatttttcatatatttagaaaaagaataaatgggctcccaaaggaagcctctacacaaaacatctctacagcttaattatttgttgaaatgacagcatattaacttgagaaaatgaaatatctcaaaaggaaagatgagagtctagaaatatcacaggaaaaaaataaggtttaagtattttaaatctctctaatgtggcctaagagagacttaactcatacttgtccaggacaggtgagggcagcagtaacacaaggaaatacatcatctgttgaatcccctgcaacttatgggtcccaggacttctgagtcatgcagttaatctacattgttaattagaatgttgatactaagtacttaacaaacaattatgttgaatttgacagactgtgaaccaggtgaggtggggtgggaggttatcagctgttatttaatggtaaaaccggtatgctaaatgtaggcagtcaaaattaagaaaacacattcaaatgcggaagtacaattttctattagaagtcagcaataactgccattcacagaagttactgtgtaatccccacaaacatttatcaagactgcagaggtgaggggtggtggggggtgcattctcacttattaaaccccacagccaaagctgaagcagagatgtttttgaaggtgaactgggctaatcaaaggcatggccagtggagattctaacctactttttctctactgtttactagatgttaattaaatcacaaatgacaacagtctaatagcaaaatgcatgcatttctacaaagttgacatgatttcttggacaaagatagacaaagttcaacatgctggataatggtcactgagggcatcaagatttgtgatcctctttttcagggatacagaaaaacagcaaatacaaatcatggatgaaatttataagatcacttccacagaaagggtccagctgttggagaaaaaactggctgtgcaactgactgaactgaagtct

SEQ ID NO: 989 - DNA, 2441 bp, Homo Sapiens
gctttattctggtacataaatctaaaggacaggaaatggaacagaataacaaaaacaaacccccaaacctagaatcattataaatagagtagcataaagaggtagaaagctttattttatggcatgctgcatttgtttcaaatacttgatttaaaaccagacactgctggaaatactacatgactttcttactggcaggagctattttgaaatgattgtaatataaataggagcagagaagtttactaaatttccttttaaggacatccatgaatcagggcattataaaactggaaatattgaaaaggctttcaaagatactgtttaacagtgaaagaaacgaagaagaggttacactcttgctcattcttcggtctcccttgtaggcttccctttctcacattctaaagaagctgccattagcttcaaaaaaaaaaaaaaagtctcgggaaggtgaccagggagggtgacgtagagttctgttaacaggctaattcaagaacagctgtcaaaaccacacagaggagagctaatcggggagataactatttgctgtgctgtaggagattaccaagtgagtcttttaaggctataaattcaatcatttagttgtatgaaatagttaactggcaagaaaacagctatgactctctgtctatttatgcccctgcccacaggccatttttcagactgaatggctgaatacagtattacagactcttacaccataggaatgaaagtaaaatgtctccactaacaacaaatgtttcctaccgcaaataataacccaaatctttatttttacaaaagtttgatatataagaaaaggaaacaaatcagactttgcttatttaatgagataaatacttcttccaagtgtgcatgttgcgtgtttttagttagcaagattttttttttaaggaatgatgaaagtcaaaacattttttaaagcataaccaccaatagaaaacaggaagccaacttacttgtcctttgtgccagcattccactatctcctcatccgtgttcttgccttccaggagggttaactgctgagcccaggttttcagaagggcactgaactgttccagggcctgctccagttgagccacttggcctgagaattcctgctccgaaagggccatctggctgaccaggttctccaaacagctctgcgtttggaatacactgtcttcccactgcttccagtcggcacgcagggcctgcatctccgtgtgcatgagctcacacccactggcagttgtgttctgtttcacttcgggagccagcgactccactctgctgagacggcttgcaccaatctctctggaatctatcagctcctgtaatggaatatcaccatggtaactgaagagcctgtgagtcacttggactgcaagttttcaactgtgtacacagggggaccctgtcctgccaggaagttttaacaagtgtgccacaaggacccagaatcaattcatctgtccactcttaaattataatagcgggagttgtcatcacgagtgcctaaggcttatggcaaaaaaatcccgagaatcctcaatatcctgaaacagactaaacagagaccctgaaatcaggcattattcgcacacgtgaaaatgtttagtgactcaagtgtttgcctgtggtggattgctcctgtgaatgattaaacccatatttccctcaaagtggatgctcaagtaaataaagatcgtggcagaactgtgttctgctcacggtctctatactcaattcatcttcttcaacagggtggtggcttaaatcacacttccattctactaggaatcaagcagactcatcacagcaaaagaatgagccctactcgattccaaatacctcaatactaagtaaacatttttgtagcatataaaatgaataattcattcatagactgacttactcaaaagtttaaagtaacctctagactgagtacatttattagtatttttttaccttaaaaaagtcactagaaatttaacagtttagctatagccaagttaacaatttagctcgatcttaaagcacacaaatactgtaaaggaaaacaagataaaattaaatcacattgttaaattgatataattgcagcatttctgagaatagattctcttactaaaatttttcttggtgaaataatcatccgatgtttatatatttacatatctattgctaaaggcaggattttgttaatattattacaaaattatgactttactaccggattaaatagaaataaaagataatcaggcacaaaaatgttcaagaagaaaatcaatgaccaattagcaagtaaagaaacattggaatgttaagtatgaagcatgcttaataaattatgttaagcataaagtatgtcttaactagtctatataatatagtttgcatctcattaaattaacttgaaataaatatat

SEQ ID NO: 990 - DNA, 2311 bp, Homo Sapiens
acatttgtgctcattcatttttttctgtcttccataagaataatcattactgtgacttctttctacattctattacttatttctttaaaagaacaccctttattgcccaaacgtcatataattacaaaagtagagagattatacctatttccagcctcagaaattatgaactgatagccaacctctttcatctatattcctacccatcctttcctcaactcctttgccaaaccatgttattcagatgccgggcattacattacaggattttctaacacatcatggaaattgatcatcacaaagttctcattgttagtttctctccctttcaggtcatggttgctttcttctttttggaacaccctgatgtcaaatgatgcttcaggaatcacaaaaccaaagcaagaagggaggtacaagtttatttattttattattttaaataatgtaactgtaacaaaaagcattttattttttccttcctcacacttccttgaacttgcctgtattaactgaagttcaccttccactttgactctgtctgcagaaatgtccatttctggggaactggctttagcttcaccccgctctaaccaggtcaaaaaggatgatagttctttctctagcctaaaggaagcagagagcagaaacaaatttattgaaaattatcatgctagcagattaaacctttgtgaagttggagggtccaacacaaaccatagtaaatacagcctcagttatctcagtcttagatatgccagcacaaaaatccctccttttattttcatttgtgtccctgcactcacatttatattggataatatgtaaagacccatatatatcctctccactctcaggaatctttgccttataacaaagatcaagagtttcctacagtagacccacaagttcacgtcttttgcatctgggataactactccccatcactttaagaactgctaatccagaatttcctatttagtagtgcagcaactcaaggaaaagtgctgctcacctctgccagtgggccagcagattctccagcgccgtctgtctctccttcgccctccttaggatgtcctcgtattgctgctgtagagccgcagcctcctgaacacaggaatctctgttcacaaccttcctggcactggctgagaaggcagtgatcgcgctgctcagtgactccagggcctggcagagatcctaagaagagtgcgagaagaatgcagtgaaagcacaggagccaacgaggcctgcatttttctttgacaccgatcatcgcaaaatattttccctcagtcataataaacaggaatagcactaagaatgggtacaaatatacagtttgatagaagaaatgagacttagtgttcaatagattagtagggggactataggttacaataatctatcctatatttcaaaatagctagaaaatagtttgaatgtttcttgaataaataaaacacaaatattttaggtgatgaaggtcccaattccactgattttacttttacaaattatatgaatatattaaattatcacatgtgcacccccaaaaacaaataagagttatatctattttaaaaggtctgtgcccatgatttgcagcaagacatagtgaaaatgagaagaaagtgacttcataaatacagaaatcaaaaacgaaaatggagacacttcttcaaataagaatgcactgctatttatctaaaaactttcaactttcccttaacaatttaggtaacttgtgaagattattagtcattttatgctaaatacgtatttaaaaaccctattcttaacttacaaaacccacatgtaacatgctataatcactccaaaaaatacatataaaaagaattatggctgaagaagctactgtctatctcaatagtaataataataataataataataataataataatgacacagtgcctcagaatgtggcaggccctgcattacctgcttcccatgtattgactcttttcatcttcctgagaaccctaagaggtatgttatttcattaccttcattttacagattaggaaatcaagacacagaaaaacaacttgctttaggaaatctaaatatcggaaaagtagaatattagcctctttggtcctccattattaacttagttgtctataaaaataatttcatcacactgaattctcctacttttcctcattttttgtattaagaaattacaaataagtaacgcaaaagtgtattctcattatcaatatttaaacaatagaaatctcactccctcttccagatggcctttgtcaatggcttgttttct

SEQ ID NO: 991 - DNA, 2454 bp, Homo Sapiens
ctctgggatcaagggattgtcccacctcagccttccgagtagctgggactacaggtgcgtgccacctagtccagctaatttttgtattttttgtagggatagggttttatcattttgcccaggccagaaggattgcttgagaccagcttgggcaacataacgaacccttgtcagaaagggaaggggaaaagaaaggaaaggaaaagggaaaggaaaaaagaaaggaaggaagaaagagacaaatataattgtgttatttagagaacagaggcatcactgggcatggtgtcgggagcttgtagtcccagctactgggggagctgaggagggaggatctcttgagcccaggagatggaggctgcagtgagctataatcacaccaccgccccctagcctgggtgacacagagagaccctgcagcaaattttaaaaattaaaaataaaaaagagaatagagatgtcaaaaattttcaaggaatctcatcttgtgtccaaaccacgagaactatctgtggttaggtgtgttcatggctgcattaattaaaagcgtgctatagtcccactactggggaggctaaagagggaggatttttttgagccctggagttcgaagccaacctgggcaacatagccaggccccataactttttttctatccattttttttttttactatgcaaatctcactacacagaccctataacagaaaaaaaaaagaaaaagaaagaaaaaaggcgggcgcttattctgctctgtactcagcagtctcaggcaagtgacagaataatctgaaaacctggtccagagggaggaaacgtagtggccagggatcagaagcgcgtgagggacctatgaagtattcattctgcaagtattagttctttcctctgggagagatactgggcttgcccacgccttcctgagtccatggttaagactcccgctgggcaccagcggattcctggtgcccagagcccggttcctcctaccgggtgcgctgggaaaagggctgctcctgacagaagggacactctaagagcagcccaggaaccggtgcacttgggcggcctcggaagaagccggggctcctggaggcggaggcgaggcctgggacccaataagaagggcgcggctagagaggaggggctggccaaaagcccttgaaataaggcccaggcagaaccgcggttctagtctcccagctccagctcggcctttgggtttgctgtggtgtccttgtctcctgcaggaccggccgcagcatggacgctcccaggcggtttccgacgctcgtgcaactgatgcagccaaaagcaatgccagtggaggtgctcggtcacctccctaagcggttctcctggttccactctgagttcctgaagaatccgaaggtagttcgccttgaggtttggctggtggaaaagatcttcggtgagtggaccaagaaggggcagcccccatgcggcttctttctgccacccatacccacagcccacatattctggctgcgttccagggcgatcctcaccagtagccaatgccctctggctgtctcctccttccaccttcccctcccaagacccccgggagccaccggtccctcacagcctctctgctacccgcgcaggccggggcggagaacgcatcccgcacgtccagggtatgtcccaaatcttgattcacgtgaatcgattggaccctaacggcgaggctgagatcttggtatttgggaggccttcttaccaggaggacacaatcaagatgatcatgaacctggctgactatcaccgccagctccaggcgaaaggtacggggctgggaatagggctacctggagcaaaccctggctccgtaggagtgatcctggggtttcctggctgctggggcggcagtctcgccctcccagtcggcctgcggttggtgggtgggggagggggcggttctcgctgccacggatccagaaggccaaattgaaccctcgttctgggatttctggctcctactcccgcaggccgcttgggtgactgtccttttttggagaggatatagagacacagctgtggcctctgcacactgctcttcttccaggctcaggaaaggccctcgcccaggatgtcgccactcagaaggccgagacccagcggtcttcaatagaagtccgggaggccgggacgcagcgttcggtggaggtccgggaggccgggacccagcgttcggtggaagtccaggaggtcgggacacagggttctccggtggaggtgcaggaggccgggacccagcagtctctccaggctgccaacaagtcggggacccagcgatcccccgaagctgccagcaaggcagtgacccagcggtttcgcgaggatgcccgggacccagttactagattatgaaggcatctcaggccctggagccagagccagtcaggggttaaagtgaaagcccgtatttccg

SEQ ID NO: 992 - DNA, 4898 bp, Homo Sapiens
aatttatgcatccctcttccgggagggtcccattctcccagtgtcctgaccccattctccaggcactgagaccacagttgtggtccagctgcagaagccagcccagcagactggccctctgccagagacaggaagtgggggaagagctgtgcgttctgctggccaccaaggaggggtgggcgccagaggctggagctgggccagaccttgtggtcttgcggaatgaactgcaagggaggagttgtgagctggcctgctccactttgaagggtattgtgaggggcagagcccgtgcaaggcagttctgtcccctttgttgcctggaaggctctggggtggagagtggggaataagccctggaaggcaggaaagaatactgaggtgggagtctggaaagttgggatttggtaaggttttgccactaactcactacatgacttgcattagctctttcccctctctggcctctgttttccaacctctgaaattggaaaatgtattgcactctctgtggcagacacatctctagggaatacactagtagacaagccagtccctgctctcagggcctttcactctaccaacagatgagcaaatatagaataggccaagtgctgaaaaagtctgggtagaataataaaatggtgttgggggcagagagtgagaagtctgggacggcctctcttagaagctgacataagcagaagaaacgaggaaagggccaatgtgggtatctaggggatgcacattctgggcagaggaaagagcaagggcaaaggccctgaggcgagaaggtgcctggcaaattaaccgagaaaaggaagtagcatggctggcagggaataagtaaggggagatgagggccaaggcaggtggggcccagttcatggagactgagggactttgcgctttattctgaactgatcggtgggccccggggaagctgggcctgggcttgggtgcagagcccacttggtgctgtgcatatgtgtgtgtgtgacagtgttgggtgggggaacacctttgatctcccctcatttaccctggcttcctggacaggtccttcaggaagagacaataacagggccgggtctagggtgaggcatgtgaaacctggagtgaatgaggcacttggctcaggttcaaaacttaagggggcatcaaaaaactcagtaattaagataaaacaatattttcctgcaatatgtataaaaatccaaattaatgccaaaaagtctatgataaacaaaatgccaacattttagataaagacaggatctgaccctgaacttgcgtgattaattaccttaatcctggtcctgtttccaatacaactttatttaaaaaaaacaaggcagctggcccaaagaactgtagtttgcccatttggtatattaaaatattgccttaaaatattcctcatcagtctgggcacggtggctcatgcctgtaatctcagcactttgagaggccaaggcaggcagatcacttgaggtcaggagttccagaccagcctggccaacacggtaaaaccccgtctctactaaaaaaaattagccaggtgtggtggcaagcacctgtagtcccagctgctttaacttgggaagtggagattgtaatgagctgagatctcaccaccacactccagcctggcggacagagcaaaatcctgcctccaaaaaaaaaattccttatcttggcatccccgaaatcttgcacaccaggtgagtgtctcacttacctcaccccagtcctggtcctgggccccagtgctcatccctcctgaggctgagaggcaaagggatttccccaaagaaatatagtagatggtgggtctggaaactgggctcccatgccaggcctccagcctggccatcatatcctatcatgctctgaactggaatgttgattttaatgtgttgatttttaaaaactttttattcaagtataatagtcatacaaacaagtgcctgcatcataaatgttcagcttgctgcatccttacaaaatgagcacacctgtataaccagcatgcgtgattaaatttaaagcataatttacatttccaacaaaacagacattagtactgggccagattcagaggacttttgagatcaagcaggcgacttggaatagtaaggctccgggactgagctgatgcagagtttaggggccctggattgagacgagaaagcagggggaggggtgcagcactgaggtctggggttcgggagggggccctatacgcgggaggaaacggagagagacggtgaggattgccttcggaggtgggtgaggcccagcgtgcgcgcccaggtaagcaggtaagaatgcagcagccgccaggcccaggcgcgggcgcgtcccgtccgggtgactcagcccgtgccaggaagcgggagttggctcagctctccagagctcccggacagcagccggatcccggccggctcctggggcactaggacagacccccgcggctagcagcccggcctggggggcggaacactctcttcttgtcccgccccaccttcctccgggccgcaaccaccccagcccatcgctgggacgtggccgcgggtgccgagagcgctgccggcgccgtgggggccatcccggtcctggccccgacggcgccccaggacctgcgatagccgtaagtagcgactatgggggctaggagagtccaagaagtggggagctgggacgcccggcctcctgcgtcccagctctccacttccagacccggctggactcgggactagaaaaggtggcctggtgccgccgctgccttccagtgtgctcactggccctcgtggcggggagcccagacgcggctcctaggcggccctagacaagtacggccgagacgctgtcaccccagggggctgccccacctgagcatcatcccacgggcccgcccagccccacctggagagccgcaggctccaaagtcttccccattctcggggaccaggttccggggtcgcgctgagggcccctgaaccctcttggactgcctggcagcggcttcttcctaccaccacggctcaccatccagacgcgccgcccggctggccccaccgggagaggctccctccctcccctttctccccgaaccctcatcttagaagccctcggattcagtctggatcccaaagaagggctgaattcggaggacctctctttgcccccaaagtcggttttctgacacacattcccacgcacagctggtaggggcaggagggtcgaggatgctctgggctgctgcggcacagggcaggctggttggtcactaaccggatttcccggacagacaactctggcgctgtgggcgggtggcctgggagcccagatccctgtccctggcttaggaccccgggaggagaccgagggggtgggtaaaacgtgactgagaaacttgatcgcgcccatctttggggcaaagagatttggaggccgcaattattcagacagttccacgaagtggttgaggtttctctctttctcctgattttccagaaacttttgcagagtttggacaggcaaaggaaaacgtgcagcccgcggatctccgggcctcagagagcagggagtcggggagactgaggccccgctccgagagcgcggaggaagcgcgcccagccggcttcctgtgggggctcgggcctcgggcgccccgcggacagacgtgtccggctcctggctgggccaagcccggcgcgggggaggggacccgcagaggggcgactgagaaggcgaggagggggcggggagagggtgggccagggaagaggggaggggagaggcgagtaggggaggagcgaggggggctggagggagagaaggaagaaggaaggggcgaacggcgtgagctggcgccgaaatgggagaaagcagcgagtgagaggggaaggggcgccaggcgagcacccgggagccagcgggacctgggcaggggcgcccggagcaggcgcgcatggcgggccccgcgcggggatccggctggaagagagcgtagcacggctcgcacgagtgagtggacgtgggaggcgcgcatctgcgggggaatcgccccttgcccgcctccggcgccgcccgctgagccctgttttccgcaggtccggggccgatgtaccaggtgagcggccagcgcccctctggctgcgacgcgccctatggagcccccagcgcagccccgggcccaggtaggaccgggagtggcgagcgaagctggacaggggcgggtgggcggctgaaggggccagttattagttctcctctccgtccccagacgcggggagaccgttccagggagcttggtgggggtagggacgaaaagtctgggtttgaggacttggtccaaggagagtagggggctgggcgagggaggcagggccctgaacagaggctgcggctgcgccaagttggctccaactccccgcaactcccgacaccagacacacacacacacacacacaaacacacacacatacactccgcggtgtctgtccgtctgggatttgtgtctcaactgtttctgcccagtgtgtaaatatttgtgggggcctggtgtgggggagggggcgttgtctgaatctttctctacttcccttcccccagcccaaccagagcccagcgcttcccgaaaacttttgtctgccgcgagcggctgcaggacccagcccctcccctctttcttgccatcccttctccctcgccttccttccctctcgtgccggccagtccccgccgcccctgccctgtgcacacacacgcaccccaacccagtgtcttcagcccaagtgaaatgccccgtcccgcgcctggcgccgtctgtaacctacccgcgattcctgggggagcctctcacgccaagtacggtttgtgactccctg

SEQ ID NO: 993 - DNA, 2417 bp, Homo Sapiens
ggccgagacgggcagatcacgaggtcaggggatcgagaccatcctggctaacacggtgaaaccccatctctactaaaaatacaaaaaaattaggcaggcttggtggcaggcgcctatagtcccagctactcggtaggctgaggcaggagaatggcgtgaacgcgggaggcagagcttgcagcgagccgagatcgcgccactgcactccagcctgagtgagagagcgaggctccatctcaaaaaaaaaaaaaaaaaagacacccgactccacccccacctaatgccaaatgaggttggaggtgaatgtctctctcaccatacccaatttattcctccctcgaactgaccatttctcaattgcgtatctccttccctgctcaggaaaccactgtactcaggccaacccaacccatggggaaggtggtaaggagggcagaaagtgtgtgggcttaacaccagagcccaaatctcctcctcactgctcaccagctgtgtaaccctggacagatctcttagcctctctaagcctcagttttttttgtttgtttgtttgtttgtttttgagacaagagttttgctcttgttgtccaggctggagggcaatggctcaatctcagctcacggcaacctccgcctcctgggttcaagcaattctcctgcctcagcctcccaagtagctgggattacaggctcctgccaccacacccggctaattttgtacttttagtagagacggggtttttccacgttggtcaggctggtctcaaactcccgacctcaggtgatccgcccaccttggcctcccaaagtgctgggattacaggcgtgagacaccacgcccggccgcccgttatgaaatgggggtaaaaattgcttacaggtttgtggagagaagattacaaacttgtaaagtccctagcactgtgcctagcatgtggtaggtgctcactaaatcgtggctgctcttactatgatgctaagcatgggaatacggaggacacagctggagaggagacctgatgacctccctggtggagggtggccagggaaggagtggaagagagagctggggagaggaaactgtggccataaagaggaagagagaggcagagctggaggtgacatcaggggagagagaggagtgggttcggcgatggccatgctgggcgaggtgtggagagcacagctgtgctatctatcagctgcctccagctcagacaattcctgtgcccatctcatttttgtctgcccatcgcctctgccgggttggacacccttaccaccacggtcaccgttgccacactgtcggctgctatttcttgcctcatcttccttcctgctcatgatatggcagaaggtggcaagggaagcagctgccctccgccagcagcctccctgccactgaaggctgaagctgtccacaggcatgggtaaagagctcaggctccaaagacagatgagctgggttccgttcccagctctagcacttaggagcgggatgacctcagcaagggagatgactcagctaaagcttcagtttccttatctgcacagtagggataacagggctgttgagaagaaggaatgagattatgcgtggtaagcacccagcccagcacaatgtctggcacacagcaagtgttcaatacacgttcgtgttcgctattttcaaggccaaataggtttgtgacctgtgcagccacacagggtcccatgctcaggacgggtcccaaacttggttaatgctctgtcaccaccaccttgaaacggtttttttttttttttcctaagagacagggtctcactctgttgccaagactgtaggattgcagtggcatgatcatagctcactgcagcctcgaactcctgagttcaagtgattgtctcacctcagcctgctgagtagctaggaatacaagcaggcaccaccagctattttattttttaattttttttttttttattattttttagagacagggtctcactatgttgcccaggctggtctcgagttcctggcctgaagagatcctcccgcctttgcctcctaaagtgttgggattacaggcatgagccactgcacgcagccttgaaattcttaatagtttttgaacaagggctctgcaaactatgtagctagtcctggctattattaacatatatttattgagtctgctggctggcagtggctatagaaggggacacctgtccagtagtttgttaaagatgtgggacattagacggccttgggagcctcaaaggagggatttaaatacagtgatgtggcaccatgccaggttgccagcaattagagactaagagggcagtgagacccccacacatactctcactggggccgggcacagtggttcatgcctgtaatcccagcactttgggaggccgagatgagcagatca

SEQ ID NO: 994 - DNA, 2464 bp, Homo Sapiens
atctctgttataaaaatccagtcttccaagcatggcacacttcttctctaagggccagaaatgaatttcaaactatcttgttgtatcttttcattagaggaagaactgcttcttttttttttcttttttctttttctttttctttttttttttttttttttttttttttgagacagagtctcgctctgttgccccagctggagtgcattggcaaaatctcggctcactgcaacctccacctcctgagttcaagtgattatcctgcctcagcctcctgagtagctgggattacaggcgcatgccaccatgcccagctaatttttgtatttttaatagagacagggtttcaccatgttggccaggttggtctcgagctcctgacctcaagtgatctactcacctcagcctcccaaagtgctgggattacaggcatgagccaccgggccaggcaggaactgcttcttttctcttttgctatctagaaaccagcaaactccatgatggctatttatctataatttatttttaagaacattctgccaatgacatctcaagcaagatgtgacaacagttacacaaagcagtctacagcatgcagtgtgtctcaatgcctctgagaagtagcaacaacttttgttctcagatggccctcagtccttccccgtgtcatctttctgtcctagactgtggcctaactgctcacaaggattcaacggcatgcaaacagctgttagttggttttcttaaaagaggtattgttgattggaaagactggctcatatttaaactctgccctttttgcaaatgccagattttctcaatagtattccagaggaaattttgttttgaacacagttactgaatttgaccagactacagacatagcaccacccatattgctcaatgctaagacacagcatctttgattttctgtatgtcataacgttctgaagattgagttattgatgagaaatttttgcagctacacatcctcctatagttcttgctctccattcaagcaggccctagggctcatggcaagatgatttccttggggagaaagagcctgagacttagaaatttaatttgtataatgaatcctggctttttccctcctttagggatctgattcttctttctcttcctcctcctcttctgtcacaggactctatgctccactccagcgtagtttggttgactgatgcttcattctctatatgcactgacatgacgtgtgactgttcaggcacagttggagaagttggagaagacagcacctcatcccctctcccagaactaatcattgattggagggccaatgcttcaaccttgatgtgattcagcaggtcatgcgagggctgccttcaacaggagcagtgtctcctcctccttgcgcagttcctgacccagctcggcatgtttcctggtgacactgctgctcgccacatggcccagtgctgcaaatatttttatataattacatttgttcattcaatttttaagtgtctttttaatagagaaaacaatcactttatgagctcaaaatctgcaaatcccttgtattttctaaaagactttcttcaattacaaaaattccccttatgttttattctaatactttataaattttgtttagcttgttgattttgcatctgaaatttacattacaataaaataaagataaaatttaatattttccctcagatgcattgccaagtatcccaacatagtttgttgaatatttcttttttctctgctgatttgaaatgccaattttctcatacaccaaatttccatacagatacatggctgtggctctgtccaatattcttttccactgatctgttggcatattcccatgccaccatctatgttcaattactgtaggatgaatatatatagatatatgtatatctatctgtctatatcagagcagttctctctcattgttcttgtcttttaaaattattatagttatccttgctcatttactgttcagcatattttgcttccagtaatcgattgtaagaaatgaatgtaataatttttttaaatggctctgatgttgaaaagactgtaaaaaaatgaagtacacattggccaacttagcataccttttgaaagatattgtttaagattccatattgatcttgcaagatcattccagggaaataagtgtgttattgtggtggatacacccaccacaatctcaccatttgaggatgtatctcatcattttgatgatggctccaaatccaccttattctaacacaaagtggactttgcaatcatagttcttgtccactaattgtgacacgtggattccatcaccctgttgtttctgaggcattctttgcacttgcttccattaggtttatgaaatttgtgaattgggcatttttactgaacttttaatctttcatcatcttcaaacgatcgaataggctaaaaatgctgcagactg

SEQ ID NO: 995 - DNA, 2443 bp, Homo Sapiens
agaggttgcagtgagctgagatcgccccaccgcactccagcctgggtgacagtgcgagactccatctcaaaacaatcaaacaaacaaacatatatatatatatatatatatatatatgggtcgggcactgtagctcatacctgtaatcccagctctttgggaggccaaggtgggtggatcccttgagcccaggagttcaagaccagcctggccaaaccccatccctacaaaaaatacaaaaattaacccagcgtggtggtgtgtgcctgtggtcccagctacttgagaagttgaggtgagagaatcactagagcctgggaggttgaggctgtagtgagctgtgttcatgccactgcactccagcctgggcaacagaatgaaaccctgtttcaaaaaaaaatactttatagcaacagaagggaaccctcatggaaactatggactttgggtgataatgacaaatctgtgtagattcattgattgtaagaaatgtgccattctggtgagggttgttgataaggggtgcggggcaggggcagggggcagtaagcgggggcagggaactctctcttccttcctcttaattcttctgtgaacttaaaattgctcttaaaaattaagtctttaatagaaataaacacataataaactctaaaaatactaagatctgaatgtcgaaaaaatttgtaattgttctaataaccatagataacaacagcacatagaccacattacaatcggcggttttcccgcatgcagctcgtcccattcgtagtgtgaaagtctcattagcttcgattttaagcagtgcgttttttttaatcttcccctacgttctggttcccatcttatttttgaggcccatagctgtctaagtcatggtatgtgcagagagagattttttcctgctgattgtatgaaaaattgtgcaaaaggggttgtcatctaaaaaagcgtgtgacactgggagagaccttgtatagtgagcagggcttcccatgagttcatcctggatctttcactgagaacaggatgttttgtcaaggatgggcaaagaggggcacagcagaaagacaaaaggatgtgccagctacaaaaaccacgtgggccaaggacagggggctgcaatgcaaagactggaacttgcagcacggcaaactagagcgtggcaagattagcgtttcagactccagacaaggccacttccctctccaggaaagacgatctcctcaccaacacaagcgcttggcgcttcccttttccgtccaggcgtcctggctggaacgaggaaactcaaaagtgctacgaaagaacaaaagtggcccaaattctgaaaattcttaaaattaaaagattgtaactcaaaggaagataaagagcatgacttttaatttctccaagctacttcattcattttcagtgccaaaaacccaatgccagtcttacatagtaatccacttactgtagttgaaacctgaggtgtgaaaagttccgtgttgacaaagatttgcatcagctgctgccgctaaacaacatgtaaaaacttgcagtttaattttagcttcagaacaaataagcgcttttccaaacccacccaggagcgcaggctgtcactaggtctacaggtgtgctctgaaatcagacactatcaagaaattctatcgtgctaaaatgaacaaggagccgggacggcacaatccatcattttttaatgtgttttgggaactgtcttaacaagtgtggaagtgtcccagcgagatgttgtattcagcttccactgtgcatatattaagccagcgtgcgtgtgtgtgcatgcacacatgttcgtgtctgcattctatattagaaggtctcaggaaaagagtgataaataagatgaagcggtaagagggcaccaaagaccataattaaaggcgcttgagagcagttagctggccttagcttactccttcaaccagccccatttattttgctgctccggtgtagcagatactgtgcagggccccggcagagacacaggggtcacggagatacaagccactctcggggaacccccagtctaattaacatacaaatagcagtgacacccggcagaagcgctacaaggcagggcaggctacaaggcagggcaggtgaagtgctttggtggctctgggtgacagttattgccacatatcatcttccaggagtcctggggccatctgaaaaaaaaagagatttgatgaactagtttttcttccaggggtgaaagttgttcagtttcttgtggcaaagaaatataaaatgaatggaaaaaagaagaggttatatgggtgaattattaaatgtaaggagtggaaagatattacatctgtgtaaggaacacacaaagatttttctaatttttagtcataacatttataatgacaaattacacactagccttgtgaatcctatgtgtaac

SEQ ID NO: 996 - DNA, 2189 bp, Homo Sapiens
tgccactgtactccagcctgggtgacagagcgagattctgcctcaaacaacaacaaaaaccaaagtatccactagagctcttggaacatatcacctgtggataaggggaaccactgtatacacagatctttgtgaagaatactgctaacaacccaagagcaatcacttattcagggctcacaatgagcccagcactggagttccctgctcatccttggaaatttcctgctcagatgcaaacatagctgaactctcaccttttcctgctgacagccactcacccacatctcccttactagagatagaaagaaaagaataaagaccaaaaaaccctgttgactattttttcctttcactttttgagaagtgttaatagaactgaaaataccagcaaggaaaaacgccctcgaggaatagagttaattggatctccaaaatgttgtcatgaaaggtgcattcctgggatatgaatttgatttccttcctttcttcctctctatttctttcctctctctccctttcctttcctgtctttcaaaaccattcgcactccttttatgaggcatgcagatcttggattattcttccactttccagccaactgcacttcaaaacagccttaataaggctgggcacggtggctcagcctgtaatcccaacacttggggaggccgaggcgggcggatcacctgaggtcaggagtttgagaccagcctgaccaacatggacctcgtctctactaaaaatacaaaattatcccggcgtggtggcgcatgcctgtaatcgcagctactagggaggctgaggcaggagaatcgcttgaacccgggaggcagaggttgcggtgagcggagatcgcgccattgcacaccagccagggaaacgagagtgaaactccgtctcaaaaacaaacaaacaaacaaacaaaaaacgccttagtaacagtgccctcaagaacctggccttccagttctctggcagagaagacctactgctgccgctagtcctcaagatggcatttgctggaggcggtaggcagaggccctaagtgtggattctaacccccgtggggactgaatctctgcggctgttgcttgcccaggcacgtttgcctcccatgaacttccttcatccacagggccccaaacctcatgccggcgggaggaggaaggagactgggcataactcatcagactttcgactgtaagagctggaggccgcctgcgggcttatctgtacccgggcctgtccccacccttccagaatgtaaatcctctgagggaatgtgtcgtcgccatctttcagtcctttgagtgcacccagtctctctccaacccaaaaccctttatccacggcaattgtgagaatgataagaatccccctcacccctcacaccgcaaacagttgcaatgcttagtgggattcacccttgtcgtcaccaaccctgctactccagccacgtgagttttccgcctgtcagccaagcaaaatggccttcctgcagtcgcacggccctttggtctctgctcagggcttcggggaccctttccagccattgccctgcacctacccaccagatcgccgccctggtgggcgctcctggccctgtcccccgcgcttagtttgtcattgcgcgcccagatccggaaccccagcctcgaagcttccggtggccgggaacaaagccggttttgctcactgttgcctggcaaagcaggcgcttgttagcacccactgaatacgcttatgtgctcagaaacggtcccattggttgggactaccttccccgatgcccatctgcccagaatcttccttctgggatgccgactttttcaacacgtgccaggagcccttcctcggcccggaatccccagagtgcccacagtggacagggcacctggatacaccccagactaacccacgtttccccggaggaccccagaggttggaagcccctccaagattaggggcgcagtgctcccctggcctgcggaagagtcagaggagtggggacaacattcaacatcagcctctactaccgctagcgcgactccccgccgccgctctactcacctgacgcgcgcagtggaccgcgatttaggggcacagggtctcccggggaccagcggctggagcgctccggccgagcacccgcagtcccggcgccgcggccccgccccggccccgcc

SEQ ID NO: 997 - DNA, 2367 bp, Homo Sapiens
tggctcacagttctgcaggctgtacaggaagtatggtgctggcgtctgcttctggtgaggcctcaggaagcttccaattgtggtggtgggtgaagggggccaaagcatcacatggcaagagtgggagcaggagaggagggggttcccagacgtttaaacacccagagctcaggtgaactgactgagtgagaactaactcatatcaaggggttggtgctgaactgttcatgacatgactgattcacttctgtgatctagtacctcccaccaggcctcccctctaacactggggatcacatttcacatacgttttggagggacacacatccaaaccacatcagcacacatggtctccaaatgtcatttagcccctcctcatgcgatgtcagaaggctgacgcctgggggtgtgcagctttccaggacatccttcctgaagggttgcagcaatactttaagtgttacatacccatgtgctatgccagtgtcagctttaaggatgtgtaatagccaagggttgagccatctgggaccaaatatccgctttgcatagacagtgtccatggtgtggattaacctgctcctgtctgctgctgggactgggtgccggctgctgccgttttcatttcccgggagcccttgctggcctcatagggtagcatcacatgaaggctgcctcccgatgcccagcgctgaggtgtgaagactgcactgtgttcgagacacgagttccacgtggttgctgcctccttcacacgtcctgtgatggatttctttttatcaggtggtctcttgtctgtggttagcatatacacataggacatgaaagacacagggcatgactacaagccatgcattttcccagggatcaggacacacagagagagttctccctgctgccctccgcccacatcataacgaacactcagctggagagctaagagaggggtcagggttgagaggtcaagagttctggggtccctgattatcttccgtcgtcgggagaaagaggaatctgtaaggcctaagcggatggcatggatgcatgtaatgaagaccgggaagcagatcctgggtgggagagctgctctaagcagaaaaacagccaactcaaatctacctctggctgagcctgagcgtcagagcaaggcagggaagagtgcccggaatgctgagccagcccaggctgctgcaggctgcactgcatggaccttagcaccagcaatgtgtgcacagaaaagccggtcctttccgttgtcaccgattgcttaccaaagtgaatctgggtagcgtcgactctgctgttgaaagtatctgattttctgctgcatggattccttccctagggccaactgtgattgcagacttaatcaccgagaaaacttgtaccctataggataattttcttggtttcatgcccataccaactgaaacaccagacagacttttgtaagtaccacaggcatgtctggtttttaagcttcagcagagatttttttttccattaacaatatgaaacagacttaaaagaaatacaacaaagtaatgttctcctgattttttttgtgctgattttgcatttccctaaactgacattaatttttaagcatacttaattttaagctttttaataaataatatattcagtagaaatccactcacatgctattcataatttggagaatttttgcttatgttgcttttgttgcaatggggagtcacagtactttgactatagaaacacacaccaaaattatgattagaatgtaagtaaaaaaacaatgtggtatgtagctgtctaacagcactggatgtaaaagaattaaacagcacaatacataacaatacaaaagacaactcccaagtatgtgccaggtttcttctgatgaattgcaaagaagggataacaatatatattattattatttgctactatcccattaaagaagtctggttctggcctccagtggacagaggcacagacaggtggagctgtacctgtggatgtacacgtatgcacacatacaagtccgtatgtctagaccggcagccttgagcactcaggccagttaatatcatcccattttttatgtttcagctgatactatttttgaactataaaataaaatgtctaaacatcagaaaacaagcattctatgtctctcttggaggcaggaatatcttttcattggttgacaaagtgcacttcatatctgaagttagatttttattcttccatgatgaggattgtgactcaatacgtcagttggtcctggctctcttgatctaaggacacacaatatttcaagagtatttggaatgcttagcttaactaagatggtttcagtatgaatgggaaatcgggaca

SEQ ID NO: 998 - DNA, 2309 bp, Homo Sapiens
atacaatctgctggccctgctgccagctctaacccattgatcctatcactgttttggggtcagtctcccatcctccagctgtccaaactctccaccttacatatttgaattccatgacaaatcatttttaacactgccttgcctgcaatctcaccatttttggatttctgtttattgaacttgcttggttaaatcttattctcttccatctctgtgtgcaattacacaactggtcatcactggtaaaaatctcaaaaccacccacagagacagtccagcaggccgcatcatgccaccagccagcctcatgcgcctccctcatggtctcctacccatctcctggctgacactggtgccttctccctctcctcaacctgcaccagctcgggcctcaccctcccgctgagcaccagccttgctctctcctggtccctggcaaggtgggggtgatctgaaggaagtctcggtctcctccccctgccctgtccacgggtgccccggcccctgtatccagggccctgccctccacactggggaccacgatgcacatccccgccccgcagagccagtccgtggcctggcctgcccgccccgtgtgcagctttctgccagcacagctctgctcaccctcaacttcactgtttttctcctggattctccccatcagcaaacacacatgctgttatttgtcccattttaaaacacaatcaaaacaaaacagagtactttggactgcactttctgccagccaccaccctcgagctcctggcctgtgcagctgaccccacggccaggtcctccttcacgttctcgccaccccaaatgcgggcaccgcggcgccaaacctgctcttcccactgttgtcaataaccgcagcctggccgaatccagtgattcatttctgtcttaatctctcctggcctttcggcagcgtttaacgtgtgcgacccctcccttctcctgtcttcagccttcctcgggatccgcgaggcgccctctctcccatctccctctcaggagtgtgtctccagccccgcacctgccctctctattctcagtgcatccccgccgcaggcatcaccctctgacttgtcatgccatccgccccctccctcactgtatctacgctttattacctgccttggctcgtacaatgtcagctttgcaaggggttcttccaaggtcttattttcaattgatcaatgccgaggatggggagcaatgcgtgtaccagagggggctgggcacacgcaggcttgttgttggatggaggagaggcagcatcccctgcatgcctgggtggtccccatctccaggcctgcgacaagcacttctcatcttcccatcctctgacggagccagtcccacccaccacgtggacgtgggtgttgtctgtggaccaaggtcagtgttttgttggtttttcttattgtttggcaccagcattacatagaccaatagaccttgttgttctccgcccggaggggctggtgctgtggctggggcaccgccctgggtaggccccgccccaggccatgcagttcccaggctcctttctgggaggggttggttctcacaaagggggaaaatcatgaaatggcaaacctgagtcacggcagcacagaggacagcccctgaaggcataagcaggaagggcataatgctttccaaaagagaaaactacatggactttactgactcatcactgagttctgagatcactgacacttacacatgtgtccacgctgttgtgagtcatggggaaaaatggaggagcaaaatgaccaagtggcagggtctgtaagagtctctcactgtagggatgggctgccctgaggagacactgcccaggcctgggtgccccgggccaaagtcctgacccttgcagggctgtgtcctgtggatgacatgtggcactggactgctcactgacaggtaggaactatgcactgagaggtgggaactgctggccggggggtgggaactgctggccgaggggtgggaaccgcctgctgaggggtgggaactactggctggggagtgggaactgggcactgagaggtgggaactgctgaccaggaggtgggaactgctggcccgggggtgggaactatgcactgagaggtgggaactgctgaccaggggatgggaactgcctgctgaggggtgggaactgtgcactgagaggtgggaactgtgcactgagaggtaggaattgctggccagggggttggaactgcctgctgaggggtgggaactgcccactgagaggcaggaactgggctgagtgctcagttttcctgttctgc

SEQ ID NO: 999 - DNA, 2697 bp, Homo Sapiens
gttggcggggcccgcctcttcccctgcccccacctggagaattctgggggaactgttggccagagcctccaggtatgcccagaatggaccattctccccagggtccacggaatcgcacaagtcacttaggttctcccggatccctgcagagtcggtggtgggtacagcaaatactcaggtcccctgcacttccctgagccttgctctctctattctccatccctctccagacccctccccctactgagctcctccccgcctcggcgaggagggggcgtcgagggggcggggcgccgtgcgggggccggaggggagggggcgtcgtggggcggggcttggcggcggcggcggcggcgcgcggggactcggaggtactgggcgcgcgcggctccggctcgggacgcctcgggacgcctcggggtcgggctccggctgcggctgctgctgcggcgcccgcgctccggtgcgctccgcctcctgtgcccgccgcggagcgcagtctgcgcgcccgccgtgcgccctcagctccttttcctgagcccgccgcgatgggagctgcgcggggatccccggccagaccccgccggttgcctctgctcagcgtcctgctgctgccgctgctgggcggtgagtacccgagagttgggggcacagagcttgggaagcgcgggagtcccgtgggcaaaaggctgcgcccggggcggtgggtttgggcggctggaacggccctggagtagtggagaggctcgctgggggtgcaggcttgcggcggaagggcgcaaggagcccgggtgtcgggaggctggcgaagcctccagggacgcggtcagggtacccctcccactcgcgccgcggggacgcatttccagcctccctgagtttttctggtctgagccgagagtttgctcgagaactgccgagagttgctggctctcgggcccagatggggagtttcttgtcgggggagaaaagaccatccgcacccaccgtggggagcgcgatggagaaaaaggaattccccaccccacccggcagggtcggcccaggtaagagttgctggtttggggcccgatgccggacagacctgcggcgcgcaaagcgcggagctttgttacctacgccgacccgacgttcccggcttccctcctccgagttcctgggcaaagctgagaccccagatggccctgcgggtgagggcggaagaagggaagagttaggggccgcccccatccatggcctctagctactggtctggaaccctgcgcccactccgtgccagggccgaatccggggatccgagggtcccaggctgtcgcggtgactaatgtgtgaaggccgctgccaaaatcgggcatggcctggctgcaaaggtgcggacggggtttgttctgctccttcctggatttccatcctgactgtcctcacagaggaaaggaagtatttctaagggaagaaaggcaaaaagagctcattctggcttttcttgggggggggccttagcattttaacgagggtgtggccctcatcaccagggcagacagcaccgcccccccaactcccgcagcttttatttcctggcttggtcacacctaagagtcatcactgaggtgttgaagtgccttacaggaaagcaccaagccacccgcacatcccaaatagcccggactggaaataaagcccccgaccctccacaacactccttggtggtcctcgaagcagctttctcttggggagctctgtcgaggagacctgtcctaggtgatcaccttccatctcctttgaaggtggcaatgggaagggcatgggtaaggaattgcctttctaatatctttctggcctgccagctgtggaggggttttggtgctggtggaatcaacatctcccctgcccccagttgtaaaaggagaggtaaatgtaacccaggaaagagaccaatctccagggatttggaggaggtgtttctggagttgccccgtttttcttgtgatgtgtgtggtggttattgctcgtggcagaatccacatctgctcccagaggaagtatggaagtttttttgcacagccaggatgggggcccagccatctgggcgagcagcccaagctcacaggccccctggctgtcctggttgggttttggtgtgtgggtctgcccaatgaggctgccttcactgctgctgttcagggtactagagtcaaggggagtttctggtgaagatggggctcttgctcaacaaatgctgaattcctaaattccttccatgagaagatgactctgatgttaattgacttaatctggtgactggttggtgtttagtgtgtgtgcgcgcgtgtgtgtgggggatcctgttgggggaagttagggcaggctgagggcttaggacaggaggtctgtagtctcctcaggggtggggggatgtcttgtgctcaacaaaggaacattttaatgagagccttaaatcaattccaccaaatgtgccttgttgtggaacctgtccatgtgctgtaaacaatttcagtggaggccgaggcgcctgctgtcttctagtgaaatcctgggactcaacccacccccagacgcatgacttcaggggcaacggttttttaatagatcacagtagatgtttgcatctcattgtttaattgtgtaattaactggagttgtagtgagatcccactgttaataaggctggagtaagga

SEQ ID NO: 1000 - DNA, 2405 bp, Homo Sapiens
tgtgtaagccccgactaaatatagagcccccattctttgtgtaagctacttaagagaaaggattttatcttctaatttttatctcttcagcagaagttattattgctagttcaatcccaaatctatacataaattacgaagtttaataaccccttaaaaataagctttttaaaaatatttttcctgaaataatgttttactgaccttgaaaatttttcttagctgttgtcatgctcaacatttctcactgatgacatatgtggtgatgatggtagtgtaaagaaaaagcttgaggaaatacacacggtgctgatattttactaaaatgaatgtagcactcactcataattgtaatttaatttttaagtaaaaatctgattttccactatcattcccttaagtctggctcattataggcctaaagcctgtatgaatttacacagctgctttgaggctttgcatatttccttgttttcgattgtttgatttttttttaaaggggtatttttgcactgaagtaaaacacaactattaacactagcctcgggggaaaaagaaactaacaaacctacagcttgaaatgtttcaacactttgcatttaaaattttgcgcaccctttagaagttacaaaaataaaagccactccctgcaaaaaaaaaaaagaaaaaaagattgagaacaaactgtcatgatttcagaaaacgatagcagacgtgcaggtgctaataccagagagcttacctccgaataaaatggtgccttctaaacagcgactatttacatgttttagaatcctttcttgggcatgggtgcctttatattgccctattaccacaagatgcaagccgtgcagcagaatgttttctgtatggtacccagccaaaagtgaaacaagttgcccactgacagagaggccatttatagaacatattcatttacaccagtgctaggcagcaactgaaaggcaatgcaaagaagtaatttctctttaccttgcttggagcaactctgacctggagagccatgtacacatcctacgtcaaggaggtgatgaaagccccactccttatagcgatgacatctggaagaagacacaattgtcaccgtgagcttttcaattactcctggagactaagtgtgagacgcagtagtgcaggatgattggattacgcaaaacgagacagatgccatctgtgagccacgcgtaagctgctaagtgccaaaatgaacatccttattaaacgatggagttctcataccatttgtagtttggtcagatttgaaagatgagttgattgtttttagatagtgcggcaaataggcagggacttggaatcctctctggctgtatgagtaattactgtctcatacttaaattagaaacatgggttttcagttaggtcttgagattgtttccaaaggatgctgctgcattcatgttgaagcgtggcctgtcctctctgtttcactcacaagggccacagagttctgagaaagaaatcatcagttcctttcacatcatggcaaagaaatgtaaaacttatgactttttgttaggaaacaaaagggttcccatactctaaaataatggccacaatattgtgggtagaatgttttcaagaactgccaggaggcagtattggagctctgtctctctgcgtcctgaggctccagaaccaatccttcatttacaattcattctcccatctttttactggcaccaactctattattatttttattttaatttttaattgctgtgattacatagtaatatagtaatataccccatagagtttatggggtacatgatatattttgatataggcatctaatatgtaatgatcacatcaaggtaagtgggatttccatcacctcaagcatttattctttgtgttacaagcaatccaattatacccttttagttatttttaaatgtacaattaaattattattgactatagtcactctgttgtgctatcaaatactagatcttatacattctctctcttttttgtatgcattaaccatccccacactcccccttttctcccactacccttcccagcttctggtaaccattcttttactttccatctcaatgagttcaattgtttccatttttagttcccacaaataagtaggaacatatgaagtttgtctttctgtgcctggtttatttcacttaacataaggacctccagttccatccatattgttgcaaatgacaggatttcattctttcctttggctgaattctattctgtacctgtaccacatttctttatccacttgtctgttgatggacatttaggttgtttcttaatcttggatattgtgaaacatgctgcaatatacatgggcatgcagatacctctccgatagactgatttccattctttgg

SEQ ID NO: 1001 - DNA, 2393 bp, Homo Sapiens
accaacattaccagatgtgggatcttccaacagcagagaccaaagctgagtctccaatatagcaccattcccccgggaacatcagccaaccacctggtgacagattgattacatcaggccccttacatcatagaaggagaactgatttgtcctccttggaatagacactattctgaatatggattagctctccctgccagaatatgtactagccagcaccatctgcactcacaaaactgatggactgattccctagaaattcactggccttaccaggtaacccatgaccacgaaacatgtgggtcatggtaacaagctggtaagaggcttaccaaaaactcagctacagatggtaccaattaggggacaacaccctaaaaggatagattctatcttacagaatgccagagggagagagggagacagggagagagggattgatacatgggtactgtttcttccaccagcccaggatcaaggaatggttgtgaggtgattccccttattattccatagctaacaactcaattgcaggacttttgcttcccgtcccaactctgagccctgctggctgtgtgtcttagtgccaacaacaatggagcccttgaattggcagctgaaacaagcacctggccttttggggcttctcctgccactgaaacaaagaacagtactcaattgctgcagccatagatcctgattacaaaagggaaattagattgctactaaacaacagggctagggaagtctgtgtctaaacccaggagattctctgagatgccgcttaatatctccatgtcccatactaaaagtcaatggaacatgcagggggcggcctgagaatccagaacatgtcctgctccccaccacccccaccccactccctcccagggaggtagcggacgctggagcttcttaggccagaagtccaggggcaggggcatggtgggggcgcctttctcaccccgagaaaacgcagcggtggtcacggggaggggcgccaccatgcagcacccaggcctggattccagctagcagtatcagccttctctcactttcgggcagcgacaccgctggtgtagaccgtctcaggtgcgtcttcgttcagctctactgtcctcagccccagcttgggctcgccctcagcctgctggagctgttggatgtgttcaggcctccaggcaccctggcctccccccacccgccccgcgaagaccgagggaaagcagacgcgtctccgcggcaacccggagcctgcagcccgcagggaccccaccgccccaggtgcaggcgtgtacatgccagttgcagaaaatatcacaccaaaccagtctgagggagtcaaagcaaactataatatttcaggcgtcagagactctcctattacagaatttgcctgtttggatagcatgacaccttttccacaagattttattaataagctgcacaaacagtttataggctcagtatcacacacctgagaaaagagttttcttaacgttacattaaaatccttcccagctaacagaaatagaggccagaataccatagagcaaaactcagaaagcctgaacacggaaggaaacttcacatatcaggctccgaatggcttggtgttagttatccctataaatcttttgtgtttctactatacaatattctccggcgtttctgcttctgatgtcaacatcagagatgtatgaactgaaccgcgccaaagtcagaactcggcttcggccacactaggcatggcccaggtaatcccagctactcaggaggctaaggcaggagaatcgcttgaacccgggaggtggaggttgcagtgagcagagattgtgccattgcactgtagcctgggcaacaagagcaaaactccgtctcaaacaaacaagaaaacaaaaaacacctttcaagtgcactgtcttccaacagaactaatggagctgctagcttcctccagaaactcttcttttatggaaatgtgcttcctctgccaattaggaagtctgctgaatagacttcctggccataaattcccaagagtggttaaagtatcctaatggacagacaagaaaggcaaagatgaatcttccacttcccttggcttttgtacagtagttgatccagccatacctaaacctccattcatattgaaacctacaccaaaaacaaacaaacaaaaaacaaacaaaaaacaaacaaaaaacaaacaaacaaaaaacaaacaaacaaaaaacaactctaaaactaaacacaaactagattttacacctacagtttgggatgccaaaaagaaaagttgttctgggatatgctgaagcaaaattgtgtgcatgggggatctggctgctaatacactttgttgagtcaaaaactgtgttcagatgagtaag

SEQ ID NO: 1002 - DNA, 2378 bp, Homo Sapiens
actggtcttgaactcctggcctcaagtgatctccctgcctcagcctcccaaagtgctgggattacaggcatgaaccaccacacctggccatttaatttatatttttaagaaaacactgagattagcagaagtagttacatcatttctgaaaatataaaagctacaatatactccccccctcaaaaaaaaaatctgcaaaaactttgcaataaactcaccttacgggcatgttctgattgagacagctggaaatctataatcatttctatttaattcaacactgcaaacatttattgtatgcccactacgtgctaagcactatactaaaagttgggaaaacaaacaatctatgtacctgcccccgagtcattaccagatagggtaagtgtggaggctacttggatttaagaaaggaattctagtattttcaagtggattcagcaagtgttccttttcgttgcaaaattcccaaacttttacgtctatttgaaatagaattcaacttataaatatacaactttcagaatacatctaccacatagggaaaagtacccaagcgtatttgctgcttagtccaaaagcatgagatctgacttgcttgttacacagacaaaatatactcagcacaggagagtctattttcaatctggctacgtgattttaacatttcttcttaatgcctactcccaagctcagaacaatagaaataaacattcgcacactggttttcttaaaaccctacatttggaactgcatctttttcatgtcaattataaatgtaattttttattagtctatccactaattcttcctaaaaataaactcagactctctttatttctcataactaaaatttttcaaccacagaggagagctgtgtgcatttatttagtcatgtttttgttctcctctctctctctcctctctctgctctcactccctcttcccttcttcctcccttccctctcagcttctcctttgggacatcgagggacaaagttgcaaggcactactatagatctcccatttcttccttttgttcaccagaacgttaacaagagatacaacacctagaaaacagagagcagagacttttctggatcaaacagtaccttttttttctgtttctgtctccttgtgactcaagggagaaatgatcctttctttctaagtgatcttatttctctctgtcaagaatccgtggacatgttatctggttagagctcagcctgcagccaccacgcaggtaactcactcacgttagactataactcacctaactcgtttgtgtcccagccaaatgtgtaccagagtaaaagttcagacctgaccatgggtaagtttaatgattaacataagccactcaggctttttcctcagggcttgttagtaatgaccaaaggaaaagtgtcttacatttttctccacttactgcatgtgccccagataagaattttaagtaaaagtccacccagtgagacaaacaggcattcaacattgaaagaatttgccagcaaatcagcgattgaacagagggctcaagagaaaggaccactagagggcagatccccattcatgaacagtctctcactcttcatcccgaagagtgactcgtaaataccaggttatgggctgttattcatatacccactgtaggggtatgggtctaaagaagtacagaagggaagtaacttggtccaagtcttgctgagaaagggttgattgattctcttcatttttctactcctcatcctccctcttgaccttgcttttttaaccaagaggaggtccttgacttgtactcatcaccctccagtcgtacccagaccatgggcctcagtcatcggttgaactggtgggcctaggaaggtcaacaacaccttcttacttggtccatgtctgacttctctgttcctgtcccactgcccattctgattcacatcccccaattcctgatcatgtttgtctacgtctggcgatacctgaccagaagacgtccttatcttctatcctctccctttcctttgagggagaagtcattttggtaaaatttgatagccctgagtctccaccttcaaggaccagcagtagacctggagaagcatctccagcaaaaccagattaaagccatggaaatacgaccacaactctgatgacagtagtaaaactatcctctagaaagtgtggaagtttacatcaactctgctgtatatcacagtttggcaacccgtgacaagctgaaaaatttttgtagccctgaagctagtggtgtagagagagggtgcttggccagattggggcaggtagggggtcagtcaccccaccaccctgcctgcctgctgaacctctctcagtttccactctggatctcttccatg

SEQ ID NO: 1003 - DNA, 2351 bp, Homo Sapiens
gactccttactgtgcctctgacacctgggcttaggcccctctcatcattccttcaaccttcccttctttcaaggcatttccaatcatctcattctgttcaaaactctgcaacaccctcccattgcccacagggtacaattcaacagctttacacagcaaacaaagctgttcgcaaaccagatgcttcttatgtgtcaggtctcaccatttcttctaccaacatttttatcccgttttgactacttaagggtttcaaaagtaccatactgtctctcacctctctcttttttccacatttcctctgcccaaaatgtcccagcctcctttgtagggctcctccagcattatctctgctctttagaccttgattttaggaatcctaatgttgcatcacatgatttgtttgtttgcttttgtgtccatctctccgctggattgtaagctccttgagagcgagtttagtaccttttattttggaatctctacatctgtgatattgtataagccaaaacagatacccagtgagccagcagctatgttttacaaagcttttttcacattcattaccttatttgatatgcctagaaatggcgccttttagaaaccaggtgtaactggtagagcaggtttgaggcatttttacattgtcaaatgataaaaccaaaattaagaaatattcagaagtggtagactagggttacataaagaaaaatagcagaagattttcctcaaactcttgcattatcttcacattatctctcctgctagactatgtgacctctgagtataggattaaaagcaaaagaaactggaaaataaaggtaaatcatatagcaagaaagcagaaggattttcagatgcaacacaataaatgaatctatctcatcactcccttgttagtcactcctcaaaaaatttactcccacaaaagaattttctgaagtgtcttctatcttcaaaccaaacaaaaaaactttcaaaatttatgacctatttatttttttgctctttacagccctcagcttcaaatttccaaaatgttatcaagtattacatttaatcttataacaaacttacatcccaggtaggatgttgcccataggactcatgctgggtgatgcctgggtgatccaaacagggaaacaatattcctttaagccacattagctctcaacggtgtcactggtcacgcgtagagaggcaaattcatgagcagcattggggagttaatgaacggctggccagatggtgcctgtcagaaggtgttgactttttagacaactgggactgtttcctgggagtaaatgagaggtgcagcagggacggattgcatctcaatcacacagaaacagacagattcactgctaatgaaaataatcacatagccaggcatatttttcctcttttgattttgtttgttttacctggtagacatagacgaggatctagctgaaactataacatcatattaaacgacgcaatggagtaaatatgaaaagctacctataaactattagtattcttaattaggaaaaatcaaatagaataaggaaaaataatgcaaattagtggtaaactaacctggaattaataagggtattttgattgctatagcatgaactacttgaaaataaataaaatttgaaatacaatagtgacctgcagatgttattgaaatattcaaactggtggagtccattaaggatattctggcacttttgactttccagcataatacatctgaaatgaaccacttttactaatttgaccattttcacttgctgctttgctgaactgcggaagttttcctattacatgcttagtgacatctttggcaggtaaaccttgatactcaatgcccacatttcagcagatataataagtagaaaacttcattgacttttttgttgctatcagagaatattacctaaacatttgtctgcctgttgtggttactcttaggtattgcataaaatcagttaaataaatgccatcacaaaactatggatagcctgtttggtcacagtaacagactcagcagattgggcaactctatttcttaccagctatgtgacctcaggcaagttgtttagcctctccttgccttggcgccctggttaaagtgaagattctatgaaatgaatgcaaagagtttgacacagtagctagcatgtagtcaactctcgtaatgcttctctttcctgactacaaagagctctcagtccaggtcattcattcatttccttcttatgtttccatcctccttgattgcacacactgggtttgtcttcaaccttgtgtccatcctaaacaggcttctagaaattcagagcgatgtatttgaaaatttg

SEQ ID NO: 1004 - DNA, 2435 bp, Homo Sapiens
atttccccaaacacatttggggtagaggcattggaaaaaagcgaaaatgtgaaccaaaggaaagaaatattgtaacctaggagaatgttctttgctaggcattcacagttaaggtagcagggtgtgcgtgcacatacacacatacacacacacacacacgatgccacttttgttccagtgcgagatagcttcacgggtgccgggcatggtgacatacaatggatatcaaaaccgtacagtcagtcttagcaaattaggtaaattagagatcatttgatggtattctattgttgctattgtaatcaccgtaattttccctggtaatggtgcttcgtgatgaagtgctgttctcataggataattgtgaaagataccgaaagattcagggatgcagcatctggttttaaaagctcttcagattcaaattggcattttactttatcttgaaaatttatgagagattcagatcatgccggcttaaatggaaaggtgaaagcagggtaatttcaatctatgaattattcaatctcagcctggtgaaattgccatccatgaactgatgctctgacagtcccttcgcagagcctccattacgcttgtcatttttatttctttatctacgatctcttcctcagttaccgagcttgtcccttagggctcagcttcacaaaccaagtatttcaaattggcaataacctaaatgtgccgctgtttcgaatcgctgtctccacaggctgtctttttttgttttttccaaattattaaaaatcacatccatgatgatatttgttgggctcttcgattagatgaattaaaacacacacacacacacacacacatacaccacacacaagggcatcactgcgaagaagagttatgttccgctaacatcacaagagaagagaaagtgatgctttctgcttccttctttgttgtcagcatgacccatcctagctgcatagcatcacgcagaaaggagccagggctaaaggcggcttgcctggcaccctgatttccagccagagttgatgaggactgcatggcaggcaggctaatccagacaactgtatacttagcgagcacgattatttaggaaaataaggaaaagccgttggatgaccgaaattagactgtcattctcccgggctccacctgcacacagactgcagtcgcaacgattctccacttgatggctggttgtgtcactgctagtcgacagctgtcccgcatccagagaggactgggagtgatttaggtcagggagtctggtttctcctttaaaccgtgcgctaactgaggagtggggatctgcgccagccccgtgaccagccttaaatgtgagctggggagtcacacagcatcagtgcggtgagtcgctcgcacaggccccagccagacaaaccatagcaagcatcctctcctttgtcctagcctttattcctgcaggtagagcagcgtggcataagaagcccccaaactattcacacacatggtgggagaccagccgtgctccatcagaggcggtttggttacaagtctccgagcagtacctgctcagctgaaaattcacgctgccaagttagaagccatcgtgtacattcaggatgcatctctgctcctggctaaacaaaggtaaatactcctcatgtaagacatgctaagtagtagcaggagaagaaaactttaaaactctgttgctttgtgcctagttgtctgcttctgctttgctgcattgcgactgggaaactgcaggagctggagctggcagttgcgataatgcagaaagcagcagctctgacacagcagtcagctgacttgcggggtgttatcattcaatgtcctctgcagaatcagaccagtttctaaggtggcaccagacagatgaccttcaatggaaagagaggcttaaggagtgcagtttttctccatccacacctggcagggacatcttacattgcttttctctcaagcagagtttttaattcatagcctttaggacttaactatttctgtcctgcttgctaagatggcaggtaattcttagggtgaccaccccaatgtgaacataagttaaagccatcgctgcccctctcgctttggctggtttcagcgttgtgagaatgattgcgggagaattcctgcccacattttgtttgaaaaacacacttcttttttaacaggtagaaatggccttaagctacttgtatgctgtaatgaactagtcaattgtacctaacagaatggcaagagcaagagggaaaactcgaaggtaaattagttcagcactagccttaaatcatggtccagttgctgtaaggcagtgtgcatgctctatcgtgaaacgcaggttgtacaacccaattaatctgacaatggagcaaaagccttatatggtattaccccagtggtttgaggaattgctaaaataagaaggc

SEQ ID NO: 1005 - DNA, 2423 bp, Homo Sapiens
gtacttgccactatctattcacaatagcaaagacatggaatcaacctaaatgcccaccaataatagactagataaaatatggtacatatgcaccatggaatactatgcagtcataaaaaaaaacaagatcatgtcctttgcagggacatggatggagctagagggcattatccttagcaaactaatgaaggaacagaaaaccaaataccacatgttctcacttataagtggaggataaatgatgagagcacctggacacatagaggggaacaacacacactggggcctattagagggtggagggtggaaggagggaggggatcaggaaaaataactactgggcactaggcttaatacctgggtgatgaaataatttgtagaacaaacccctatgacacaagtttacctatataacacacctgcacatgtacccctgaacttaaaataaaagttaaaaaaaatagaaaaaaaagaggaatgcttgcaatttttgtaaatatattattttttaaaagttatttacttttttaaagcactgcattcagaatgtcagattattgtccagaaagttggcaacattagtattcgccattcccccacccatcgtgtaagagactcctataccagacggagcccaggctgggaatcaccattccttttaacttttgccaatctgataagtgtggaatgtgtcttttcgtatttatacttctttgattattggtgagagagaacactgtatcctaccacagatgccatttgattttctgcctcatgcccatttttttctgttggtctggtagttttttcttactgatatataagcacttgaaatcatttctaaggatttgtattaatttgctgtccttcgcatacattgtgactatttcccctcctcgagccagtttcctcctaactctttttgagagatcctagatggccggcccattctttgatttatttttaagctcaaataatattagaaataacatttgaaatgtctagaccaacccttttgcagtgactttactgggaggttgcatcagcatctagacacttccatacattgaggaaaaacagacagccgtgtttaaggacctcagagggcttgctatcacccatttataattttcccagaacttatgagtcccaggtcctcattgcagtggtaagcgctgagtgctcacgggggtgtgtgtgggacaggatgtggtttgagttctgtgatcctcaccccgacctcatgcgtcgggaatccttgcagccctgtgactggcctgtgggggcttgggctaagtccctgccaagataccaaaagactgcagaggtgggcaaagacctcaggcccccagactagcaatctacaaacactagtcatgactacacagttaagggtcgtccatctgcttccccttctcctagcctgctttgtgcaaacaagtcccaagcaggagaagatgaaggtgagtgagcttcagagagggcatggtagttactcttctgtcctacttctagaccctgccctccactccttcttgtaagactccaactcctgctttcttcttctttgccagttcccctaaaccttgcttttttttctccttgaatcttcttcattcctatggatgggtattccttgcgttgaatatgactagggaagaaagggtctccatatgactagggaagaaagggtctccataccttcttcaggtggaggtcccctggagacctctctggccacatcagtctctgcttcagagctgggtctgaggctgggacagcgatgggctttagagtaggtggggactggggtttggaggagaagctgagtggacttgtctcagacacagctcagcaacaaccccttgaagaggaggaaaaaacgaatgtggaagttttaaggatggataaaatcagagagttatcagagaaacataaaacatgaaaaaaaaaatcagagccctaaaacaactggatttggagtcaggcatcttggattctggcctcagttctatgcccaattcatggctcgttaccttattgataagacacatgtgtctggcagcagaaggggcagtttaggaaaggataataatgaatgcgataacttggaggcagaaaataatcatgaagttaggtaaaggcaaactttcatttacataatgggttaccacttttgactttggacaaattaacctctgttatctcattgtaaatttatgggtaacagtaactaccttatgggtgggtgaataacaattattatgcatataatacattctacaaaatgcagttctaataacatctccccatccctcgcctctaaaattaactagataacatcctgggtgaacttctattttgagaattgatatggtttttatgttacctgtggtgcttaattgagtgtggagactctgggc

SEQ ID NO: 1006 - DNA, 2464 bp, Homo Sapiens
cactgtctcccatcacccccagatgaggccatcaagttgcaggaaaacaagctcagggttcccactgattctacattatgatgacttgtataattgttttattacatattataatgtaataacaatagaaataaagtgcatgataagtgtaatgcacttaaatcatcctgaagccaccctccctcactggtccatggaaaaatcattttccatgaaactggtccctggtgccaaaaagatttggaacagctgctctaaccctcccaccaccttcactcacttcttgtatgttgtcctgggctaagggctgtggaaatgttcatggggtctttgttctaccatctcaaactatgtgcaaatcctaagaaacttgtgagataaagtatttggctagtgggaaaaaaaaaattgataacgtttttaacattaactggagtgacagtttggtaattggctctctgagaaagcttcagcatattctgaaaattggcaggtagctccagagtgagctaattagttaggaatgacttttaatactcactacctttaatagcctacccttggagaaaagacagataatgaacactgggaaatctatggtgctgcaacttgacctttgtgccatttgggggaaatgaggaagatgagtcataatttattatttaaagtcctccttttataatgtgttgttgtgaaagatttgacaaataatgattgctcctttagggactaatttaatcaaagaagcagaaaacaggaagaatagaaaacttgtgtgactaagcaatgtttaattttatttgaaactggctccaccaccctggtgataggaacagaaggtcctatggagtcttcccatagcaagaaaccaggcttgtaacagggtgtaatagagtgacaccccacacctgatgccctgtaaatgcagagtctgcaaatgcctctcttttgatgctttctcaaggtaagtcataaatgaagtcttactgctttaaaaaagtagcttgccaacagttgcccaggctccccatgggactgcgcttcactgagcacctgaagaaagtattcactggaaatgggctctcctgggagactgtctggatcccgagtgtctggcgttcatgttcccacacctggctgctgcttcttgcccttccttggctgcaggtgtgagtgcttgtttgtttaaacctcgctcagcactgcttggaaaaacaaaacaacatggttacttgtctgggcattgaatgttcttcctgaattttggtcctgcccattggcccagaggcggaatgggtggggcaagtttcggtgtgagtttgggaagtttcgagaagacgctatgggctgggtctgttaggttggggttgctcttggttttaatccttttggaatgtcttgagggtcaggagcgttgccattgatggctatgggagttgtcaggctgtggctctctttctcacagagaatgccagaggcactcgggaaggcatttgccagggctctgacagatgtaaagtaagccttatccatgttgtgttctcacctggacacctggaaggtgctcagtatagaaaagtcacgagctagatgagataccagcttgatgtcgactccctccccaacaatggctgcctgtcttcgtcttgatgcctgccagcaggtaaagggggtgtgcccctgggacctgggtagcagcagtccttgggaaacccagggtttgtcacctgtggtcacttgacccttggtaaattacctaaccttttcattccacatctcaaggacagcaaatccatgtagcagttaggttgttagaagaaatgatgttgacaaccaaatgtgaagctctgatatggttcttttccggtatcatagctacttgctctttaaagaactggtacaatgttgggggcagaaaaaccacatcatgcagtgatgttgctcagtcaggcatacaggtagagaagagctgtctctatccttagctccttaggtttgtccagggctgctcagtgtggctgaccctgtcttgctcactgtcatgtaacctggaacctacaacatcactgcatgatgtgtagacctggaacctactgtagtatctttttcttgaaggctgtattgtgcagtagtttccaaacttgagcatgcatcagaaccccctggtggcagtgttaaagcagattgctggaccccactctcagagtctgattccataggtctggggtggggcctaagaatttgcacctctaacatgttctgaggtgctgctgctgctactggttcagggaacatacttagagaaccactgctctagtgtgctggaaggagcaggagctttggagttaagcagatttaaatccagctatggcacttacttaatgttgtgaccttgagaggtttttcttaatttccccaagtcttagtgaactcgtctgtaaaatgggaataatacttacttcaa

SEQ ID NO: 1007 - DNA, 2499 bp, Homo Sapiens
atgatctcatattctgcctctttaggaaaaagaatgttcaaaaaaccaaaatacgaagaaatttgggcataaattattgaaggctttagagtttgctgcacccattcaaacatcattgtttttatatatgcacaattattttctttgagcttaaaaaatgggtggaaaatttaacttctccattttaatttgagatttctcccataaaagttcactgaagaaatttctcctacttctgggtagcaatcaaggaataccccagtcaagtttttaaagagtgggtttacctctccaattgcattccaatctatattcattcctggtcaaaataaaagtataaataagactctttcaatctaaccacaagttagatttgcagtaaattcctccgtcttagatcactttcttttttacagttcccagacaaactgactttgatttagctagtaatttaatgaaattcatcagttgattgtaagaagtccgcttacatacaccagtcattctctcagcaaatactcatggaaaataaaagcaatgttctccccataaataaatcctacttctttcttgcaactcaaggcgggctgtcagatcggttgcataatagatattggggagctcactggccgggagccttaagaggagagcagctatctcagtctttctcacttaatcttggcttcacgtcagaagctgtgcagcagtgcagtagaatagggcctggcaaaacctttgctagcaaagcgccttttgtgccgggctgtggctcgctatcgacatctcgtccgttaccaaggctgggtttcctactgatttccctcctcctctgctttcacaggctcgcgcggccggacattgtgggtgtgcgtgctggatttctcccggatgctctccgactaacatggatgtcccaccattccttgcagtggaaggttgttccttggcgcagtgagtgaagaacatgcagcgattgctaatgggtttgggaagcggagactccttcctctctctatgaccatgccgtgatcgtgtctgcggtcaccactcgacgcatcctcatttctacccgaacccaggagccgaacgctagatcggggaagtgggtgccgtgcgtgtgggcacagaaacaccatgaagattattttcccgattctaagtaatccagtcttcaggcgcaccgttaaactcctgctctgtttactgtggattggatattctcaaggaaccacacatgtattaagatttggtaagattccccatctctcttggttgcctggtatccgctcccaggcagccggatgtaaacaggcggttcgctctgcctggcggtgggctccgtggattctgatctgctcactgctctgtcgtctcctggggcttttaaagaactccttgtgctttcatttcttctcttctttatttttatttttagccgcgggagggtgaagggagggccaatgtgtggtagtggtctctgcattacctccccacagtagcttgccacggagatgatgatgacgatggaggcacggtcagccgccactcccgcctgtctcccccggcgccctgcgagcttggaggggtgcgcggtccgcgcaaaagtgcgcgccggggctgcacgcctctcagcttgcggggctggtgagttaacacctggtaactctttggcgagttgcgcctgtccgcttccgccagtgaccagggcagttctcacgtgcaaatgaaaggtactaacccttttgatttctttttccagagagccttttcgattgttttcaccgcttttccagtccctggtgcccttactgggatgcagagctttaaaaaatgttctaagattcgaggttctacttaacacagggaggctgctacttagctggaacgaaatagcgtcaaaattagaacggcattttgtttgtttttaacttgctgagtccccctctcacagctttctggacgttatggactaattaatgaaggatagtatctggggcggtggggaagagtagttgtttaaggagggttgactaagtctgcatctttcactttggcaagacgaaagacgttaggtagttacatttttttatggaaatgtattgcttttctaagaatcagggtttctttggagcttgaaggaaaatctaaacgtgggattccagtggaaaccctggtcagagggtcagagtgattgcttggagaaaatgaagcgtgggcgatgctcaggttctctggatggccaaaggagttttagtaggagcagaactagtcagggaaagttccctaaagcagataagaggaagaaaggagaaagccaacaggataaatgctcccattgtaggcacttcctctgacagttcaagtggattcagaccaaagagtgcaggacaccatgtaatcctgagcatctgtctttgagataaaagcagacacattaagtcactcggtcaaatttaaactgaagagtgattgcctgcatcttctatcatgccaacagca

SEQ ID NO: 1008 - DNA, 2422 bp, Homo Sapiens
tatggtgtttctgaatttatcatcctgaaggataggtttattgcctactcagtgtttcacttctggagtcttcaaaccttccatcatgatgcagaataaattctggagcaaccctgcctgacaacagaggattgactgcaatcgtttgaaaggacagagctccacaacacattttctgaaatgttttcttatgaaggaaaagctgatagggaatttgagttaaagtagacaaaacagaacaaaacaaaaccaaaaccaaaaaacaggtgttaaaaggatgttttaaacaggctgaagtattaaatcaccatagagagcagtcttagtttactctgaaatccgtttctattcttctattaccttccacatattttgttttgctgcaaaacacagggagaactatttaccattaagttgcccaattaattttctttaaggcatgtaacattttctaaagaaatctgaaagtacttgttccactgaaaaaaatgagatttatcttctatatcataactttgctcccagtgaaaaagccaggataatgaagaacaaaatccatttttgtgaaggaaaacacttttatttcatggtatttttaaacatcattttgtcaactctccatggaataaagttgacaacaccccttgaatatatatttgcatgtctttatagttttaatttgttatacttttgctcttcctctttaagcaacattttgaaaaatctacaaagtaatacaaacatatctacagtactaggttgcaaattggaatttggaagcgctagatctgctgattttatttgctatctgactatcacatttgttctttttaactgatttattaggtctgtattctagagtatattttattctgttgcaacagctattaatgaattctttgatcgtggatttttgtcacatacatctgtattggttcagggagcctaacctgttggaacattctgctgaagagtttgcttttatatctagggacatttatcattatctaaggccagctgcctgacttctcttcagtgctctgtttatagggtttgaacatctataaatggaaacactagctaaccagaaattatcgctagggctctctgatagtgtcctaggctctcacaacttggaatgtcctgcaatatctaacatgtaagcacgtcgaatcattttctagacagaatctgaacctctgtgtctctcagtctttctctctttctcattctctttcaatatggaacttgaaaagcgtgaaaaaagaagcttattaaacaagaatttagaggagaaactgacggtaagacatgagatttagcacacacagatttataatgaaattgacagggtagtagagcaactgtcatagactggaaaagttgtgctagccggcctctgtttccatgttttgctggtcaataactttaaaattaatgagttccatgggctttcctgaaaataatgtaataaagttatatataaaatgccattacacaaatgagggcaaatttgatttagttaaatgatgtggtttatcgtcattttaaaaactggaatccatttattttgacctctcattgtgattgcctcagcactggaagattgttttatttacgtatgcgaagcttagcgagtgttcaaatccattttttctcagagataccaggaatatatgccaagaaaaataagtattatagaatatattaatgttttattaagtttaatgaacttctggtataaggataaagttttttgccatagaagttatacaagtaattttgccttgatactaagcaattaaatgtcaatgattaatatggtgacttacatttgctcaaatacaaaatagactataaccttgagttaaatgtgctgtccatggctcatctgatgagcataggtcactaattatgtttgtaaatttactgtggttatagagttaacattggaacaggtcataactaatgttaatatcagcataaataacaaaaagtaagataatatagcccataataagaccaaattcatgggaatacattgttctagatgtatgaagttgaggtttatggactattcaagatattaaaactagaaaaatggaaaaaagaaccatactgggttgaaaactcttgaagtgtattagaatttcaaggtcttaaagtaatatatttaataaaatacacaaccttttcttaaaggaatcaggtcatcattttcagtacccactttgtacctctgccctaggtgattgtccagacatgtaatggccacagagtattttcctttctgactatttggaaaggccatgtgtccttgtagagctaaccagggattttgaatcagaaagggcttggtgaaaattcttgcccacaactaccaaatataagaccatggttttgtttaatctttctgagtctc

SEQ ID NO: 1009 - DNA, 2662 bp, Homo Sapiens
tacagcatacttacctgaaaaataatggccacatatagcaatatctctgcttacagaaattccaaattccttcctattatgggctccatagctacctattatttcctattttcttctacagccactaaacatttctagttttctagcactttccctgtaaaactgagaggagggaacttgtcatattcatctttgtagcaggatgttgatttgtaaacgaagtgttgatgcattgttgatgttacttatttaataaaggtataatagatattagcagggcagataggcattctaagaaaatggcttgacataagagctgaaagaacttgtttagaattttagaattatcaaagggcttcatgttcatttcaccttgttagggagaggatatctccttttgcctagagcatgtctcaaccattcagagttaaaatggctgttccagcccagcaaatgggaaacaaatttgagttttactgaaatgggttaagggctctaattctcgtctagtgtgttggttacactgggaaggaacatctgtctagttataatagtcaagagtaccggtatgataaatttgggtaggtttcagagtgcttgctcacagctagcaaggaggatccaaaaaagatgcagaaagttgtgtaaacaactgcaattgcactgacactttcattcatatgtttagaagagacatatctgaagaaaattctttttaaaatagtttctcagctgagattatacttttttagtgtgtagctcacaggaagttctagttgccaagagcatgttcgatatgagtagatctctacctaattcttatgcataatgaacccaattttcatctcttctagaaagatactgaaaacatgtgtcgtgatctcaatgttacaaccatgtagcctcatctttcacaatacggtacaatcaccaacgaagtttaaacttcatgtctggcatccaaggtgaacatttccatagaaagtaggaaatatttagatgtctgtttgccgtggtggtggtgttcctatatactttttgtgaccctaaagatataataatgtttgacatttttgttagccagtaatgtggacttaagacatcctaaccacactgctgactctaaccctttaatagactttcacgtagttcttgagcctcactgcaggctccagtgctagtcccggaggaaatcagaaaagggttgaaaccactgacacagccatctctttagctcctcctaacgcaggtgtacagtttcctgtagtgagcagatcggggcctacagggacactgcatgcttgcactgggctgttactagtttcatggaaatatgtactaattgtgtcactgtgttttcttgtcacactgccccctttctaggccgctctggcaccgtttatttaaactgtgcaaccatctggcccaggtgccgtagagattgatcagtagcacaaggccaccacaagcacaaccgccacccggccatcccagctatttcctccagcattctagacatcatggcgtccgagggtgggtccaacgggcttcgagtgttcgggagataatgcacacttcgcagtggatcttctcggggccccgagcgttgcccgcccattaggtggcgccggtcccctcgaacaggtcgctcaacaactcccgcccagcagccgcccttactgcgcgcgcgcagacttcggcgtctacttccggtgtggcccaggcggggtccgcagaaccagctatgtcggcctacggcatgcccatgtacaagagcggggacctggtgtttgccaagttaaagggctatgcccactggccggcgaggatagagcacatgacccagcccaaccgctaccaggtgtttttcttcgggacccacgagacggccttcctgagtcccaaacgcctgttcccgtacaaggagtgcaaggagaagttcggcaagcccaacaagaggcgcggcttcagcgcggggctgtgggaaatcgagaacaaccccacggtccaggcctccgactgcccattagcctcagagaagggcagcggagacgggccttggccggagcccgaggccgcagagggcgacgaggacaagccgacccacgctggtggcggcggcgacgaattggggaagccggacgacgacaagcccactgaggaggagaaggggccgctgaagaggagcgcgggggacccgccggaggacgcccccaaacgacccaaggaggcagcccccgaccaagaggaggaggcggaggcggagagggcggcggaagcggagagggcggcggcggcggcggcggcgacggccgtcgacgaggagagtccgttcctcgtggcggtggagaacggcagcgcccctagcgagccgggcctggtctgcgagccgcctcagccagaggaggaggagctccgggaggaagaagtcgcggacgaggaggcctcccaggagtggcatgccgaggcaccgggcggcggagatcgcgacagcctgtagttaccagcgtttccagaagagcccctgccccgttcctgctgcggcctggccgttcttggggaatctgaccacggcgtgcaaactgggactgcctttccctctcctcagcccgtcctcctccaacccgcgctcctttgccctgccgggccccaggatggcagg

SEQ ID NO: 1010 - DNA, 5352 bp, Homo Sapiens
aacacaagaagccctgagtcttttgaagccgggcaccaaagttaaagattcacttcccgcattccccatggccccctcttgcagcttagctcggctctgagcccccgaaacgcccttcgaggcgggggctttcctgccaaggggcgataggtgggccatcccgaggcgggaacgatcaggtaggtgttggctggctttctcctgggtgagtagttaggggaaccgcccctccaggggacttagatgacattaaattatcccatcacacaaacttcccgtggaggtctgcccccaggagggcaactatcggattaatccaaccatgtagacaggcaatatggatcactttgtctttaaaacaatcgaaaaccaaacgctcttttcgtttattgtagaaatttttctactaaggacggggctgaattggagggactgtgctgacaaatcctctacttgaaaatcccccagctaaggagtatctgcccaaggtcgcggccacccagatgttcggtccccactccttcctccgctgaaaagtcgcaccgatgactaacgttgcctgccggcctggtggtttgaaaacgaatgccgggcattgatgcaaggatatcctcccctacccctgggattctggtctaagcaaaggaggccgaatggagaactaagacaattatctaagtaatctaaaaagctcaaagacatccccaagcggaccttgctccagtggtctgtgatggcagcctagtggacagttttctagtggccctctggggttaattgccttaatcttccactctgtctgccccagcaaagggaaagatgctaaagcagctgtggacttgcagcctccctcctgtgtgtgcagagcccccaggaatcactgccccagtgcagcaggagaagcgccttccctcatgccctaagcctgccttttctgttgtcccccagctcctgggccaggtggagccccccctgaagctggtttctacctgccctcgcctccccactgcagcccacagttcggctttcagggctgaacccagagcccagaggatggagaagccagaaagcggggaggtaagggagagggcgtctaggcacaccacagaggtgattgggctgtgacggggacaatccgcacaacacgagctaagctcacacccctagggagtgatttttccggactgcccccatcccaatctccacctcctctgctttacttgaaaaagaaaaagaaaaaagagagctccttctggctcctggtgacccatatttaggacaccatcccatcccccagcacacacattcctacagtgtcacctggtccccaatccgagcatttcctggagtgctcgccacattccccttcctggtgcttttctatggtggggccaggggaggccttgttttgaacatcgctgtgacgtcactccccctcctccgagctaagcacccctcggtgggccctgggaattgttgcccggcctgctggggaggggcggagtgtgggcccagggagggttccaccaaacatccattaccgctgtcgcctgcggggccttcaggctgcaagtacgtgaggtgtcagaaaagaagccgaagggttcccgtgggggctcttctgccaaatgagtcaagagatgtgcggaagcggatgattgaagtaccccgtggagtagcagaaaggggcatcaaaaactgtaacctgaaaataaaagctttaacctgttccccaaaagacttcatgcctgcgtcttaatgttcaaataacaccactaacaacaaaaatgaaataagaaaagtgcttgaaatacaatcaagccgcttactggaggcttgcttccgagtaagtttataaaacacaaatgcaaatatcttttcctggcgaatatccagagctaaaccagtggaaagttgatcttgataaaactacgtccctccattttttctcgcacgccagacactaatttcacaacggcgacttttatacccaaaacggagagctgagaacaccgctgcaggtcgatttgcaatttacataacaagctgtttacacttcactgggccgatggagggaggaggcagggaagagcaggaggcgacaggctggtgggggagggggcagcggggcaccattgcctgttgcaaaactcggggccgaaggcgtttcccgcattcggaaaacaaagcatccgtaatcgctgcgttcatctccgcgcaccgctagcagtgtaaaaggcagcttcaagaccgaactcaccacttgctgaggtgttcagggagaccacttaaatctcctccaggctgaagccacagcactccttaaagcctcgaccaggcgggctgataagaccttcagggtgccgggctgggggctgaacaggaattaagtgttcaggtcctggggcttcaccaccaccctcgcccctgtctagtgtccttggcaaccagcaagtgctgagcctcctgttggtgcttctccaacccaccagtgacttggcccgcaaaccacctggaaaaggagtctccagagaccccggcgcacagcaggccaggaggcagctgccccgggattcagagcaacctcggggcaaccctccctcctccaaaggctaattctagaagaggcaggtcctctttccttcgatgtcaatgtccattatgaaacagtaatttttaaatattcaggtgacacggagatgcgcctgctacacgtcagcgtccttcacatgtaacagccgaagctgcaatttgaattttcctgccaacgtgaggaagccgggattcgaaccggggagacaaaaggggtcccgaacatgtccttggatttaatagatggtcggaaatcaggggcagcggagctgttaaatgcgtcacgcacgcttcttcgcagtctcctgagctcgccacttcccccagcttctagtgaacgacttgggattcagcctccgggagggtctctcctcaagtcgctaaaatgcagaatcgccgtgccgggggagggaggcctggctctttcccgctccttcgtttctttccctcatttctcttcttcctgtcccattccaaccacccagcgacggcgaatctcaggcgtgtgcacaacgagcgggggcccttccgtgcgtgtccccccagaatccttgaaccgccctctaggtgcgaccctggacgttcccccagacacacccgttgtctctgcgagccggcagccccgcgcatgtggagatggagactggcctggggaagcgttaagctcttagacatatttatttgcttcttgtcatcacacctgctaatgtcaccgagcccgcagcctgacccctcatctgagccgaaacgggcctgacgggatcagagggggcggcggcgcggcgagccggtgggaccctcgcgggcgggcaggggagcgcggggcagcagccgggctccggcagccctcgccgcccgcaccctcaggccgccaagggccggccccccggggaggggggcgagaagcagggcggcccgcagcggggcgggctcatccttcgcgggtgaacggccgtcggaaactcccagcagggccccgcaccccttgccttcatttcggctggggaggggtcatggaggggggccagatgggcgacgaaccttcttccccaccgcgagcagggcctggctgtgaccgagccctcaaaatcatgtcctttgtagccgagttcaggacaggagaacctccaagtggagaaaagccggagacgtcagtgacccgagtgagactggcgttggagaagggagggaaggggctgcgggaggggagaggcggcggggaggagaggctggggcaaccccagcgctggcgtcggcggggctggcgaaggaatgagagcgagccagcacgaggcggggcggagacgccagggccactcgggagccgtgggcgaaggaagggtctgcacggggtcccgggaggacccaggaagtctgcgcgaacggcgggcgtgggtccggagggcccggggtgggaggtctgccgggcgccggcggcaggcaggtggactgcggggggcgaaccgacggcgggccgggcgccggcgcgggcgcagggccggggcccgggccagggcggccggcgcgcgtgtggtcagccccgcggtcctccggcctccgggagcgggccggcagggctcggcctccggctcattcggaggcggttctcacctcccattggctgccgccgctggcggggcggggctccgctgcccggaaaaaagtgtaactgcgtaaaaaagtcctcgcctgggtgacggatgctcaaaagttcagaagttttcccaatgcttccttaagcggctggcgcgcgagagaccgagaaaaggtgacgcggggcccgggcaggcggccggcgcgcggccccccccccccccgccctggttatttggccgccttcgccggcagctcagggcagagtctcctggaaggcgcaggcagtgtggcgagaagggcgcctgcttgttctttctttttgtctgctttcccccgtttgcgcctggaagctgcgccgcgagttcctgcaaggcggtctgccgcggccgggcccggccttctcccctcgcagcgaccccgcctcgcggccgcgcgggccccgaggtagcccgaggcgccggaggagccagccccagcgagcgccgggagaggcggcagcgcagccggacgcacagcgcagcgggccggcaccagctcggccgggcccggactcggactcggcggccggcgcggcgcggcccggcccgagcgagggtggggggcggcgggcggcgcggggcggcggcgagcgggggccatgcaggcgcgctactccgtgtccagccccaactccctgggagtggtgccctacctcggcggcgagcagagctactaccgcgcggcggccgcggcggccgggggcggctacaccgccatgccggcccccatgagcgtgtactcgcaccctgcgcacgccgagcagtacccgggcggcatggcccgcgcctacgggccctacacgccgcagccgcagcccaaggacatggtgaagccgccctatagctacatcgcgctcatcaccatggccatccagaacgccccggacaagaagatcaccctgaacggcatctaccagttcatcatggaccgcttccccttctaccgggacaacaagcagggctggcagaacagcatccgccacaacctctcgctcaacgagtgcttcgtcaaggtgccgcgcgacgacaagaagccgggcaagggcagctactggacgctggacccggactcctacaacatgttcgagaacggcagcttcctgcggcggcggcggcgcttcaagaa

SEQ ID NO: 1011 - DNA, 2428 bp, Homo Sapiens
catggaatactactcagtcataaaaaagaatgaaataatgtcttttgcagcaacttgatggagctagaggcgttattccaagcgaagtaactcggaaatagaaaaccaaaaactgtagttctcacttataagtggaaattaagctatgggtacgtaaaggcatatggagtggtataatggactttggagactcagaaagagggagagtgggaagggggtgagggataaaaaaatacatattgggtacacatacatatccggtgatgggtgcactaaaatctcatatatatatgtatatatatatatatgtatatttatatgtatatttcatccatgtaaccaaaacccacttgtgctccaaaagctattgatatatatatatatatataattttcatatgtttttatatatatgaaaaaagacagcaaatccctgtcttccaaatctcaagtcataggaagagaaaaacattcataaaattctaggtttggagatttgatttgtcggctgaaacctctttctgttaatgttgattccttacactggaaaattcctagactattatttgtatgagtgagaatttcttttctgattttcaatccaaaccacatggaaagaaggttaaaatggagcccgtgcactttgaatttattctcagcatttaggctgcagtatcacagcccaatttccaccagtaggaggcattatctaaacatgttgagaaatattcattcctaaggaatgacattgtttccttatctggctcaattcagtctgagaaggactgttgtttctgatgaagaaagagctccaccctcggccactgccacagctgctctgccaataacaaaggcacagcattttccctctgtgcatctccaacatggatgcttttcagggcattttaaaattcttccttaatcagaaaactgttattggctacagcttcatggctctgctgaccgtgggaagtgagcgtctcttttctgttgtggcttttaagtgcccctgcagcactgagaatatgacctatgggctggttttcctctttgctcctgcctgggtgttactgatcctgggattctttctgaacaataggtcgtggagactcttcacaggctgctgtgtgaatcccaggaaaatctttcccagaggccacagctgccgtttcttctacgtcctcggccagatcactctgagctcattggtggctccagtgatgtggctttctgtggctctgctcaatggaactttctatgaatgtgccatgagcgggacgagaagttcaggactcctggaactgatttgcaagggtaagcccaaagagtgctgggaagaacttcacaaagtatcttgtggcaaaactagcatgctacctaccgtcaatgaagaactgaaactctcccttcaggcccagtctcaggtaagaaaagacaaactcgcctttttctctcagcatgagctcgaagtattctctctgtgctcctttcagccagggctgtctgtgtcctgtcagaatattttgaaactaaatggaaactgaaacatgatgcagcattgagactatctcaggaaaagcttttgaaaggctgggtggctcaataaagttgctgactggattatctcttttccggttctgaaaagaaaatatccactggattgtccacatataaatacttaagtactttaaaacagtctctctgggtctgtaaataaataatgcctaacactaaatcataaattgagtgttaatggcagagctgtaattagaaattactgccttctatcaattatttacattcaagttgttttctcaaacacacacatgtattattcatctattaaaatgtagctgaatgaaatgagttattacttttcaaagttgcatgtaatataattagtgtggagattctcttgaatgatttctggcaactgctatctctgtgtataaatattgtcaagattgagaagaattttccttgtatggtaggaatcagcagtttttaaatagccttctgtgaaaaagtgactgtactctctagggagattatgttttatactctttgtgctgtacagctaaaggggttcttaattacttcagaagctcaagatttgggcattgttttatttaacagaaggaaatcatatctttacctaattgatgcagggaagtagcctgtcattcctccaggcacatgaacacaaatccagatgtacagccttaggaaggactaacttcccatttataggtagtaagaattgcattcccaaaagcaaaacaagtggtaagagttgataagcagatccacaaattgtcaggaatgctatctgtttcagaataaaggcacagaaatagcattattttactttttcgacaaggatttgccttggtaacaacaaatcaaggcaaaatctgtttttaaaatca

SEQ ID NO: 1012 - DNA, 2443 bp, Homo Sapiens
acgtgatctgaaggcactcagtacacgtttctgtctgggcaggaccagttgagccacttctcgccttatcaacttccaataattgccacactgtgtgtgcaaccagtaagtgagtggcacatggagtctgacctggcactccattcacacactttgtctgatactactttcattgtctgggctcttgtttttggagaagagctgccgaaaagtatcaccttttcctctatcactaacctttacctttacctctatccctaacatgggatgccgaggtgcagaggcaccagcactgccctgccatcactctagtggatacggacccgattaggcgtccttcttccttctgcccacaccaaggccccccaggccgcggccgctcaccgggaaccttcccaggggagcggcggaggggcgaggccatggtgcggggacctgcaagagggccctgaccctgatagagaggggccgatgggcggccaggtgggcctgcgggtttaccttgttgaggtgagggttccgtgtcagcaggtagccgcgctgatgggtgtggcggcgacggggggcttcgggctccatggctggcgccgggttcggcggcggggtcaggccggggcgggccgcacgcgcggtgcaggcggcggatgctgctggggtgacggtgctgactgcagctgtggcggcggcggccgcactgggaaaggcccagcggctgggggcgggcgtgggtggcgagagggggtggacgcgtcgggaggggcccgagcgaagccggtgtccccagcagggcagcctgcgagaagcgctgagtcatggcaggagatcatccgagccggcgtgtgaggaggaggaggaagagcgagtcctggcagcgctgctggtggcggagcgggggtggcggccggagcccttggctccatagggcctctgcccaccatgggcttatgatcaccgctgtggtcgcctctctccatgtgggcatgcctaaacgcagtgcactgggtggctctgctgaccccagagacccagggcgggggcagggagcggggagcgtcaggccaggatccccctgcccgggaaggctggagaaagtgcgagaagatgccagaaggtgcgaacctgagcggttcaggcagagccggcggtcgctcagacacctagggggattacaggacggaaggactcgtgaggggtccccagaactgttgacagaacacctcgacaggctgaggagaatcagactcgtctctcctgtcttgttagcgtcttggaagccctctttctacagatccacaaccttcgccgtgccatccaggatgccggccatgcccggggccctgaggccggagggaaccaaccttgacccagaatgccgaggcccaagggaactgggaggaagcccagagaggagagctcaggcgccacacctgtcagtttctacagattttccaccggaattgtatttgaatgtcaataagataagagtcaaggtgttagggtgcaaaggcccaatgaacagtcctgtttatcttgtatattatttctctgggagttctagaaacctgatgttcaagaaccactgctctctctgaataatgatgagtaagcagtctttcaggccttcctcccaacctcaggtgatccgcccgcctccgccttccaaagtgctgggattataggtgtgagccaccgcgccgggccatttttttattgttttattgatatttatgcttggaggttcatggactggaggaatagtcagatcatagccaaaaggagtgcctgtctgataaaaataaattaatagcaacagacactaaagccttctgtgccccagtttccttttcagttaaataggattgctagtttctgtcccatttgtctctgcatactgatattacaaaggatagtgtttgagattatttgctgattttatatctccatatactagacacacatccaatcacagtgttttcatttctagttatgttaactttgccttatcagaaagatttcttacagtaattgtattttgtccgtatttacatttagaagcttctttgacctcgcctgaattatctagaattcgttgtttttatagagaatattttctaggcatcacaaagttctttttgaaaaaaatccttgaagttaaatgacacctttcattgttaattctatactccataaatactcaatcctacaacatctaagaaaaaggtgtactttacacaactcactctcctgaattaactgagacacattacagttagggtgttttatgtgagaggaaacagtttaacagctggcatgggagccaattcaagctgcttaagaagaaacaaaaatgttagtacaacagacccttattataataaagtacttattacatgaatttagatatactacctacctgttcctgtttctgagatttaatatctac

SEQ ID NO: 1013 - DNA, 2489 bp, Homo Sapiens
atttccagcatagctagggcaggccctaccaaactgcaaagcaggaaagttgaacaattttcaaaagccaaagcagtttatgaccttaaagcatttagtcaacctagtttctgacttgcataatttagaccatgtctatattttgaagacatttctattttcattttactgataatttaaaagacagcctatttagcaaagtcatacttaagtgaatttgaaaattgcttagacttatttacttaatttatgaacactcttttacttataagccaatttggtagacacaacatataacagtaagtgtacatacaagtaaacacatctagacatgtatacacacacacaaatgaagaggtggagcttaaaacacccaaattgggtgcagtgtatactgcttgggagatggatgcaccaaaatctcacaaatcaccactaaagaacctgctcatgtaaccaaataatacctgttccctcaaaacctatgggaaaaaaaaactaaaaaaaatacttaaatggtatcacagaactaattagccgaatacagtatctagtacctggctgtcacccaatacttgcctcataccatcacatctagaaaacaagtagatattctttttggaagagccctgagggagctactaggaggtttgcacggcctgctctcctgccctcttcttgctctgtggctgaacttcaattctcttcgggcttagaccccactgactcgctcccgggcaaagcaaacgatttgatcagatggccacgtgcattcttccttttcctgaaaccagcaccatagggtaaaagattatttctacttggttgccttccagatgtttcacacttggacagcaaactgatttcaaaccactccttttcaaagatctctgagggagacattgcacctggccactgcagcccagagcaggtctggccacggccatgagcatgctgagccatcatgcccaccgtggatgacattctggagcaggttggggagtctggctggttccagaagcaagccttcctcatcttatgcctgctgtcggctgcctttgcgcccatctgtgtgggcatcgtcttcctgggtttcacacctgaccaccactgccagagtcctggggtggctgagctgagccagcgctgtggctggagccctgcggaggagctgaactatacagtgccaggcctggggcccgcgggcgaggccttccttggccagtgcaggcgctatgaagtggactggaaccagagcgccctcagctgtgtagaccccctggctagcctggccaccaacaggagccacctgccgctgggtccctgccaggatggctgggtgtatgacacgcccggctcttccatcgtcactgaggtaaaaaagcctctgtaacatgggagttcctgggacagggagaaatataaagcaaatcctatgaagttcagttccatatcaggaaagaggtagggggctatgtttattgtgcagttcgtgggtgtctggctgtgtcccaggcacggggcattctcttctctagtttaatccaccacaaactctgggtctttgaggaggaagctgaggcaggagagaacagctagcacaagtcgggggccaggttgccaggttgcttgaatgggagttgactgggagaccaggagcctctctgcctgccccactggcttctcccagaactatcaacttgctctgggtcccgcttccccaccaatagtactgtgggccccctccttctgctcaagagtgatgacgattgacctcaatgatggtgttgaggtggcctggaattgccctggcttggaagtgagaatatttggtggaatcccagctgtgccccttattagctgagcatcactgggtaagtcactgcctctctaagcctcatttcctcatcagtcaaccagggatgatgacggctgcctcataggggtgtgagcttcagctgggatctgtgaaagcactgagcaaatccaaactgagtcacaccgtgcagtccgatggggcccatgggatagggcgatggcctcaaaagggccttgcttgagtagtttacttggttatttgagcattttgctttgagaatcctttagtaaaaagtgtcaccacatttttttcccatcatgagcccttttgaaactattgcacggtaacaagtgtggatgcttggtgggttggagaagctgtgggccaaagcccgtcaggggccttctgttagtaacgagcagtggcgtggttttggtgcaggcactgcttccctgaaataagaggtaactgggccctccctgcctctggtcctgcccacttgtctgcccccactaccctcgcccaagctctccggacttcttgggtctctgttcttcctcttttccctttcctgagtggtatcagcggtgacacatttagggctattactggaggaaagcttagggtccctcccctctgggcctgagcattgctctacctgcttgcctgg

SEQ ID NO: 1014 - DNA, 2388 bp, Homo Sapiens
ataaacacaacaagttacaaatatagtactgagaggtccttgtatggccccgcctccctcaggcagtatcttacataactatagttcatgattacaactggaaagttgccattggcaccacatcagaaactagtctgcagaccttgctcagatttcaccaggttttttgtgcactcatttgctttcctgaaaatattttaatgtttttctacatgacttatctccccgacatactgtgagataaggtttttttttctccgaataagcttagagaacaatgaatgtgagaggtgggaaggatgatttggtgcatctctgttttatccatggtgagtctggacctcagagcagaaggaccctcgtctctcctctggggagtcctggtgccaactcagtgcaggctgctaagttatccgggtctgactgtcttcttctctgctaaaatttgtcttaagcatgtaacacagccatgcttattaatgatgaggagacagccaatgaaaattaattttttcaaagatgaatagatatctagattttttcaagcacaactcatttaagaaaatatcacctcactgagccccaaatgagttaggtctcacttagaaagtgtcccctagtgccaggtaaagtgcctcatatttgcaatcccagcacttctggagacggagataggaggatctcatgagcccaggagttcaagaccagcctgggtaacatggcaaaaccctgtctctacagaaaatacaaaaaaaaaaaaaatagctgggcgtggtggcgtgcacctgtggtcccagctactctggagtctgaggtgggagaatcgcttgaatccaggaggttaaggctacagtgagctgtgtttgcaccaccgcactccagcctgggtgacagagccagcctctgtttccaaaaaaaaaaaagaaagaaaggaaaagaaaatgcccccgagttgattacattttaaccactgtgctaacttgagagatagtctgctatctctttacaggacatgagggctgataatcacctcattgcatggtcctggggactgatgaacaaaggctaacatgtggaaaagggcaactaaagaaagaagagccacctccaggttaattagtacaagtctcctcgctggtatgccctaatacactaaaacagcagtaaaaacaatctgcacattggcatcgaaggcacagataaacttgccgaggacccttaccacggcagagggatgctttatatgagtccttagtagattaattaagttcttgctagttccatttggaaatgatgctgtcctcttggggctatgcagagaagttcatgttgatgaaatgagctgtcctagaatggcagttcccgggcagcagagcctgggctcaaggaaggttgaaagaaggggtggcgtggagctgccaggtgcaaatgtcaggccagcaatgcagtccagcttgcatggacgtgcttcgcctaggaagttgtgacttggctgcattttccacttcaggtgagatggaaggttgaactctacctcacctcctggtgaggttgatgtttcctggtgtttataactttctttgtaaatacttgaaaggaatttaccattttaatgctggaagagacgtctattccttcttaagaggacctgagtggatcttgattgcaggccttatgctgggcagagctaaggagaattcaatttgtctccaatcttatttgaatgttctttttttttttttttttttttttttttttgagacagagtcttgctctctcacccaggctggagtgcaatggcacgatctcggctcactgcaacctctgcctgctgggttcaagcaattctcccacctcagcctccccagtatctgggacgacaggagcatgccaccatgccctgctaatttttggtatttttagtagagatggggtttcaccatgctggccaggctggtctcaaactcctgacctcgtgatccacctgccttggcctcccaaagtactgggattacaggcatgagccaccgcgcccagcctatttgaacgttcctatgcctgctacaagtgcagcagcagaatctccacacatcttgcgtgcgaaagtttcctgtagttcctttagcatagagaggctggggaaggttagagactgacttgtactctttagacatatagttgatcattgaacaacacacgtctgaactgttacacacagatttttttcaataaatgtgttagaaaatgttttggagttttgcaacaatttgaaaaaactcaaagacaaaccatccagctagaaatatcaacaaaaatagaaaaagttaagtatgtcatgaatgcataaaatatatgtagatacctagtctattttattctttactacca

SEQ ID NO: 1015 - DNA, 2433 bp, Homo Sapiens
tgaagacgcaataaaattccccatttgaaaaacttctctgtgatttaagtaagtttatatttgtcctactgttgacaatttacaatcgttacttcaggcttttaaggagtccattgatgtatttaaaacaaatttaataaaatcagtgctttttaattaaatgacaccaaacatatatatttgtacaatttgttttgtagtttcaactcgactttttgttaggattaacaaatatatatatatatgtttggtataaatagagcaaatctcttgtggaataaaattaatcgtgcatattactccatcttttgtataaaatacacggcaggccgggcgcggtggctcacgcctgtattcccagcactttgagaggcctacgcgggcggatcacgaggtcaagagatcgagaccatcctggccaacatggtgaaacccccgtctctactaaataaataaataaatacaaatagtagctgggcgtggtggtgcacgcctgtagtcccagctactcgggaggctgaggcaggagaatcgcttgaactcgggaggcggaggttgcagtgagcccagatcgcgctactgtactccagcctggcgacgcagcaagactccgtctctgtctctctctctgtctccatatgtgtgtgtgtgtatatatatatatatatatatgacaaaggaattttttcctctccctcgtccctcgtttaattcaatctccgcaaccgttggctgcccttttatctctgacttctctgtaaactttcagtagagtagcatttgggggtagatccgccactgagactgatccttttattgtagaagagaacgcgcggttcctggaggccggacaccacagcgggagtaggaacctggcaggcgatgagcagaggcacgagcaagccgcccagccaaacctggcagccttgaggtcaaaaatgattttgtaatatccttgcggaggaagcctcttttagacgcctgagaaacaaactcagttgggaggaggtgttttgcattttacaaaatgaaggctttgcgaccggtttagagctgtgtggtccctagtgggtctccaagctccggggtaccctaggccggtattacatcattaaaaagaagcgcaaatcccatttctgaagcttagccgaaggcaggcgccggcagggagagctaagaggccgcctagagagtttgggccgggagtgggagtgggacaaggcgggagctaacttagctggagtagacgccagaagaagttccgttcagctgaggtgccccgccccaatcccaggctctcggggaccccaagaagggagctacccggtgcttctccgagcggtccttacagctttggagactctgctgctgcccaggggtgtagtcgtcggagccctcgggcctgctggggctcagcaggggtagtgggagcccctaccctgggagaaactgccagggacaaacactgtttgctgacgcaaagcctgttccgcaaaggagttctccctgtatatgtcctgcagctcaaactgatttagaaagggatacacaggcctgcaaggcgctctcgggatcatacagcctcacgccctcttcttttcctctgccatttctttatgtctttcgccttcaccctgggcagcagaccccagcaggcggggaaacccggggactggtgtccgcattgccgaaaggctggaaagcagagcctcgtctacatccacgatgtttctagaacgtggcccttagaaataattcaagtgtgagtagggcgccgaggacaggacaaggcgtttgccccctagtcctgctactggctaaggagaatcatagcagtagagccgcaccactgctgccgccgcctccaacttgcgttaagttcggctcaggctactggattgggcaggaccagctaacccaggtcccgaggggcagtgtgtcacagactgcagcccactccaacctcggctcctggagaaggggcgtcgaatctctcttgggcatgggagggaaagacattccgagttggctgggcggagtggcagccttgagagtgacgagtgacagcaaagcctcgtcctagcaaggccttttaccaacagcgcggcatgccctttcgaggagagcgccaggccctcgcactttgcaagtcaagagagcaaagaaagcggggacagggcgcgtaatcgcaatgtccggtcgcgcgtgtgcacgtgtctgtgtttgcatgtgtgcgtgagcatgtgcacctgctcaagtgtaaatgtgtctgttggcagttggggtctaagtacctgagaatgtgtgtcttctgttgctttaggagattaaaatgtcttttcccagtattgagctacattgaggaaacaaaactgaaataaactgtcaggcctctctcaagaccagccggattctatgttaaataaaagtcag

SEQ ID NO: 1016 - DNA, 2281 bp, Homo Sapiens
gactattatgcagcaattagaataaataagctgcatatttactgacttggaaagttgtccgtgatatcaacataagtgaaaaaacaaggttgcagagtaatgtatgtagaataatgctggttttgctttaaaaataatacaggtgaatactgtgtatgtgtccatagcttgaatatacttgtatgaacatggaaatagatgtggaagactatctacctaacagcattaattattttaaatatataaaatggggcagaggtgggagatgattattttatattcagtgcctttttacgatgagcagtattggctcagcaatttttttaaagtaggaaaaataaagaaaaaagttgtagggtaggccagggctgaaagtatatccttgtaaccaccttattgttatattaatcagcatttattcatggagcacttattgtttgcaaagatgagaacacaagtattggacttaacagtctaccagagggccaataatttgactggggagataaaacctcttcacaggaaaataaaagtattttcatgatgagaacagagctggctaatttatattcattttttgaaatgaatgtagtggaagtggtgtaacgagtacaactcagacctggcaatcttttcactctgctacatacttgtataaacttaagacaaggcttttaacatctgcaccaccatctctcaggccctctacctctgaagttgagaaaggaaacatctggatatgatgcaattagcaatacattaatgggcatgaaaggattccctcccttccccactccagcccctgtgtcccacccctatcccccaaccccttcccagagcttggaattcattggggctatttctccaaaacattctttgaagttaagcctttagctccacagtcattagggagacctctgagaaccaagtcagccccaacagccagttcagaatcttggctaaacatgagtccttttactcaatggtcaaaatgcaaaaccaggcaacttttgctcatggtgctaagttgcaaactatctgtctctagtctttagcgaatgctattgggaagcatcaggacaaaagtcgtcatccaaaaattccaattctagttttctcttggtctgggcttaaagccagaggcgattctccataggtggcatgccagtgccatctgactgctgacatattctgtgtggtggttgagaaaactggagaagaaagagccagggtagtcaaaggactgctcgttaattttaagatgtgcaggatgaagaggagaacaatgcaagggtaggcactctgaacaatttgtgttattgacagcatcagcaaaaaataaccagctggctctcagccagggagttccccatccagctgctgtgtgtgcatcacaggtctaaagagcgcccacggcctataacactgatcagtctgagtctcagtccatcctgccatgggttgcagaccagaccgtgtttcatgggcctcctattttagaagaaaggttgaggagaaagaaagttacatccagtccttctgtgtcacctgatatatttaacagcaaggaagggagggagggagggagggaagggaagggaaggaaggatcccagtactttgggagtccaaagcacaagtattgcttgaggccaggagtttcagaccagctgagccatataatgagaccctgattctacaaaaaaaaaattttttttttaattagccaggtatggtgatacatgcctctaataccagctacttaggaggctgaagtaggaggatagtttgagttcaggagttcaaagttacagtgatcaagccactgcactccagcctgggagacagagtaagactttgtctctaaaaatcataatactaataacaaaatggaaagagcaaattttgatgctttactgttttgtgggcctgtgttgtctactttcccttcatcctcagctttgtatttcacagtgttggtgatatatggaaaaaaaactaagacacagtcctttaggaattgccaaaactcctatctaaatgtgagtgagcaatgaaaaataagatacatgaaatatgagggctgagaaagtgtgttttagggatgggagtgagagctcctcgtactgtgtgggtagactaaagcaagctgccaatcaagatctccttaagattatttagcagggggaaggagagaagagggggcgatcacttagtgagctgagcacaagaggaatacctcgcagctttagagaatgtttagaggtagaagtgcgagtggg

SEQ ID NO: 1017 - DNA, 2313 bp, Homo Sapiens
ccactgggaggagaagggaaggtgtcctgcttcccagggctggggaccacaggcaaggccatgggcttgagggcacttctccaaactctagcagataaattatgcccaaatcccacatcttactgagaaagcaggtgtctgcaattagtcacagaagggaggtgggtggtcgtgggcagagaagaaaaaattttttaataaaaaaataaaaattaggcaaaatagaacttgacagtcaccatgcaaacagaagaaacactacgaaagtgacatcattagcatggctgtgggcctgtcttatcctttggtctctaaagcaggagacaatgagagctacttactgactcatttttagtatttgataaaagaaaaaaagtcaatcaatcaggcttaccttattgacttactaatgtccttgtcactaagggataattttaaaaaggatttttctatcaaaagaagagaaatcaattcatagacctctttgggctccaacccacaattcgtataggataaaatcaagtttaaaatagagagtgcacccataaggttgagaagacatcttgtggtgactcctttgcataacatgaaacaaggttggttggcctttctctgtaaagagcaagatagtaaatatttcaggctttctgggccaagaaatacaatcaaggatattatgtagttacttgtataacaagagcaaaaccatttttccccacaacttttaaaatagatcaatttcaaaattttatgaccagtacagtttgcattttatattgttttcatgtgtcatgaaataatattctcattaaattttcctgcaagcatttgaaaatggaaaaagcattcttagcttgtgggtcacataaaaacaggttgtggcctggatttggccctggggccatcatttgctgacccccaacatagaacacttctgagtcatgtcagggtccttaatcagttaggtcatccaagctcagattgaactgggacatggtttcagaatccttctcaacactgcatgcctgccataatgtgggtagggagaggctgttggctctgcagtagccacctgatggctgcttaaaggaccgtgaactcagttatcaccagcattttccctactctttcagatctgggtgcagttggctcagtcctccatccccagcctcgggaaagtctctctcccagatttccgctcctcctcaacaagcttgcatgttgtgccaaggagcaatcgcttctgctgctacgaattcacttgcccttgtgaattcacgtgcccttcatccttgcctcatccagaacagagaatacaattattttaatattttatgtattttttataagcctacagagttttaatggaagtttggagagacaatggcagtttacacagcagaagtaacagcatctgctcagtgtcattgtttaagtcatcatcatagctaacacttccaggaaatttatttcttttgccaggaggttttcacatgttatttaatcctgcaataatcagtagaaataggctttttctttttaacagttattatcctgttttacaaaaaagaaatgaagcttaagagattgagcagcttgctaatcacagagcaagttaatgatagagatgaattttgaacagtcaagtcaggcagtgacttatgcctgtaatcccagcactttgggaggccaaggcaggcggatcatttgaagtcaggagttcaagaccagcctggttaacgtagtgaaactccgtatgtcttaaaaatacaaaaattagtcgggcatggtggcaaacgcctatagtcatagctactagctaggctgaggtgggaggatcgctcaaacctgggaggtgtaggttgcagtgagctgagattgcttcatctcactctagcctgggcggtagagtgagattccatctcaaacaaacaaacaaaaaccacaatcaatgacccagaatgcaatcaatgacccagagcccatgcacctaaacacaacacagttatccctctacagcactttaagtgaacatcagactttgttgttgttgttgttgttgttgttgaaagttcttctatcacctccctgggaattctcactggcctgaccacctcataaaatgtcctggcttctacccacgctcctggctcctctccttgcccatgtctttctcacctcttctcccagattgttttcatgaactcttaataccttgatccaattctttagagtaatttagctcttgctagctcatgttcccaaactgagctctagcagaagccttctgagggacataatgtcattttacag

SEQ ID NO: 1018 - DNA, 2339 bp, Homo Sapiens
tcgtcatccttccttccacccatcccaagagccactactgggtagtggtaacttactcatggggttgttgtctagattaaatgagttaatacagataaagaataatgactggcacatgggaagtgctaagtaaagatcagttatcatggtttattcactctttctgaaaaaattttacccaaagacatatactggccaggcgtggtggctcacacctgtaattccagcactttgggaggccgaggcagaaggatcccctgaggtcaggagttccagacaagcctggccaaccaacatggtgaaaacccatctctactaaaaatgcaaaaattagctgggcatgctggtgcatgcctgtagtcccagctactcaagaggctgaggcaggagaatcacttgaacccaggaagtggaggtcatagtgagctgagattgcgccactgcactccagcctgggtgacagaatgagactgtcttaaaaataaataaataagtaagacagataccattatctagtctatagagatgcaatcaaactaaagaattctagaagggcaactatatatacacacaaacataaatatttcctaaatgaaaaaccaaataataaaactagaaaaacatagttaagtatattttaatgcagttatacaatttaattaaaatataagctaattattgaaatagaagatctataatatacattagagaattatctaagtctaaaattccaaattatttgacaacctggaagtacataaaatggtgggacaagagaaactaaaaagtttttaagtttctcacttcacatttttgacaattagaaataaataggttcaaatacaaattttagaaaaataagatgtactccatccataaagaaagagatgtaccttcaataatcatagtatttgcctcccataaatgagataaattaatatatagtccttctctaacatagatgtttcccagatgtctaacagtggtctaaccttttttatttttacagtgctcccaaagcttgctggcacataaacatgaatgaatgaacaatgtagaattcactcaagaaatttcaaggagagagaggaggagatttacatcacacagcaaacaacctaataaatctgttaaacgccatgcatgtgaataggcgttttcctctttttgaccctttctttccacatagaactcagtgctccttcctcgtcctccgttacagtatttatcgccttccttcttccacgccggggagcagtcgaggcttgtgttcttcagcggacttgccaaatcatcccctccagcatgctgctctctcccttccacagatcatctgttaagaaaatacatttttcatgtcgttaatttacatatacatgtgcattatatatatgtttatacaatgagagattgttaggaaaatcactaccacatatacatgcattatatatattacatatacatacatatgcattatatatatacctgcacacacatgcatatggaaaattgttaggaaaaacagcacagtggtagtgttagtgctggttgtctttcggtggtgagattatacatttttttctataattttctgtattttcctaattttctgtgatccatatatgtttttaatcatcaaaagatgttgaaatttaaaccatgttctacgtacattttacatccccatttaaagctttctcatggttctccatggcctgcaggatgatgcttgatgttcagcttaagagcttcctctcctcacttcccacccctctgtcacttgtagctcatgccctaataataccagagtgtttcctgtgcacacccagctgattcacgtctctttgtctttgctcacatgtctacctccacctggaagataatttcccttcccctggcgaccttcacaccacccttctctcctcagagcaggcacagctgcccaggaaacatttctggttgagccttccatgggccctaactgcattttaccctgaagatgaaatgatctgtgcttctgtctaccctcctttctggacggtaagttcccaaagggcagaagccacattttactatcttcatatcatagcttctagaaggttctgccaacatgatacaagctgcaaaaatcgaactaaactcaagtgacactagaagtaaaagacctctggtccacagcgaatatataaagtggataaagaagctttctctctattctatgcatgttcacaacactactttgactaaatattcaaattgggactgccaagcaccaagacctaaaaatatctgtcttttgagagacaaaacagatactactagttgaaaataatgtcccc

SEQ ID NO: 1019 - DNA, 2463 bp, Homo Sapiens
gacccccttgcgagggggcgcactcacaagagggactggatggagcggttggtccgcagagcctcagccagctgcttgatgcggctggggctggacacgacgcccaggttaaggttgagctgcgccagggacgtggccccggccagggcccggcagatgcggccaaagtcgcggtcgcagaggcggcagccgcgcagtgagagcaggcgcacggcgttgtcgcgaaggccgcggcagatgtcccgcacctcggcgccggacagcggctcccccgaaatctggatggagctgggcagcatcgtgcccacggctgggcctccgggtacggggccggaacggaggttggtggggccgcgggcggggccggggatagggccggggtcggggccccggcaggggtcgcgggcggagtggggccgggggtggaggcggcggctgtggcggaggctgcggctgcggcggaggctgcggcgggggcggagaagagctaccgggactgagccggagccggccagaggtgcggaggcgtccagggcgcgggccgggctgaagtggggcggcgctggggcgggggcggcccgcacggtccgtgtctgggcgttggggcgggtgcgcgttccgggggttgggcaggcgctgctcggcgcttgtccttgtccctcgcggtcgcggcggcggcggcggcagcggcagcgagcggctcaagggcttcggcttaccggtctcggctaggaggccgtacccgctccctccttctctgccgcccggctccccccgaccaccccgcgggcctggccgcacggctggcagagagagcctgaggcgggcggctggcggcagctccggctccagctccagagagcgagcgggcggcgagttcccatggcaacggccgcgtcaccggcgctcgccccgccccctgcccggccaaggccacgccggcccgcgaggttcgcgtacactgggtggttcggggcaaggagctgggagcgataggccgctcttcccttgggagtggggtcagccaactggcaggcggcaggcggcagggctgagtgggtagggctgacggggagcggaatggaggcacgccccgtggagatggcgttgggcacggttactgctgcttctgcccattcttccatccttccccgttcctaaggtccatacccccgccggaatccagggcactgttccctcctatttggaaggccccagggccctttcatccgcgccgcgcctcgctcccgcccccgtgactcgaggcgcagcgtgcgtggtgatcccggcccatggggacttccccgcttgctcctcgccaagatggcggcctcatcagggaggccccaggggccacggctgggcagagccagcttgagctgctggggagaagggtaccccatagggtccctagggcaggggagcctcagatagatgcaaggtcctggtgccacaccttctcaggtacgcagggcactgttgacatctgagggtgtgtccgtgccgcgagactggggcagccaatacaaagaaggtgccagggccagggccctggagcactggtgaggacgtgaaggcggctgagccacactgcacggtgcaggcggtgctgtctcaactttgtcctctggccagggtggtgggggactcacttgtgtaacgcaggacaaatgaagggcacctctgtttgtccctttgttaggagggatagatgctgctgacccagatttactagtgttaagatgattattttacataaaatataatattcaatatagtgaagggaggtcaaaggccctattcccactcttagccacctgaattaacttattaagtggagcatattaaagaggtggtgggggtggatggtgctatgttaggagtggtggttggttttaagaggaaagacagaaaaactaaaaggagctggccccagtaccaccaaggcaaagccaaatttggcttcaattaagagctccacaggaaaattatcaacacaatgcccaggtgcagaagatccttgttttgacacggggtttaagtcgggatgttttgttcaattgtcactgcttccttggcttcccaagagagcagctgagcccagactcaagctggctgcagtgttccatcaggcttatggcttttgtgcttgaggcctccctgccgcttcatgggtcaggtgtgatattcaatcactgccttctatgtagtctggcctgtcccacctttatcttgcctgggtgaggatatgaagaagggaacatatgacattaccactgttgactgagtaggaaagtatataggaagcgggatgacagggaggaccactggatcagccgctgcagttccagacttcaatcaacattttaattaccaagtctatatttagcaagacaatgtgggagagataaagaggaaggaaggggtaggtggggaggggttctcaaaggagctgacccattt

SEQ ID NO: 1020 - DNA, 2458 bp, Homo Sapiens
acatgaaactgttgctcaataggtgaagacgttcatgattctgtgtcacttctggcttctaggtttagtctcctcccatcgtagagagaaagagagaaactctacacatacatacacacactcacacacactctctcttacacactcagacttagcacttctgtacaaaggtccacccccttcttcctactttcacagttcccttcccctctcccactcctctatggcttccagcgctttatcttttccatttagaactttttaaaggaagaatgggggcgttggtggctctgggatgggcaactgaggtttggtttagggtttgctttcccatgacagataaaatcactgaagtgatttcaccgctgcttctaattagaggggagctttaaaagaagccacgggatttggggctcccggagccgcacctggccaggagggaggtgagggtgaggagattggcctcgggccacactctcccagagacggtgccagtcccattccgcggctatgagatcgaattgtcctgggtctaggcctgggacgcctgggccaggcccagttaccctcccgggctgctgtcgccgggacttggagacgaacaaagaaccagttttaaatcgtcttctctgacatgtcaggcaaatatgtgtaaaaggtcagctccacgctgtggagcagagacctgtcccccaggcaccaaaacctcccctttctaaccgtgcccgagagcctccgacccctgggccctgtccaggcggctttgcacctctcggccttcccaggggtggggtggaggtgcctctccctggagtccccttatcggttccgcattttattcatccctgggctacaggactttcatcccaatgcccatcctttagttgatttaaaactttctgggacctgccttagaatcttggtcaaggctgggggtttctgtgggtagtttttttggtttgttttgttttgctgagaatttaaataaattagatgaagtttttaactcctaagtgcatcttccctggctttttccagacggtggaaatagggcggtgactaacttttcagagtggaagacacgcacgaagggcgcacctgcagctctccgggattcaggcgggggtcgctgtgctctcttaaaagtgagcggcggtttcagcctgccaccgcttcgcctcgccagctcggaggaaactctggctggaggcgacctcgggcccagccggacgggccgggccgagcctaggaggggctggcagacgtgtcccagggccagggtggggcgtagggagcgccgtctccaccctcagtacttttggggtgggggacctgagcgtgcggagagcgggaggcagagctgagagcggggttaagcgcgaagctaaggcgccgcatagggttgggtgggaatggacagggtgagctggaagcgaagcaccccagccaggccttaggagagaggaccgtcggcatctgtgcacatcctagcgggcggatgatgtgggagagaggcggagggaggtgaaatgcgggagctagaatttagctttgcagtgaggtcacttggggtctgcattcagctccgatatatacatgtaggggctgtgtgatcctggggaagttaccgaccttgtctgaactcctgtttcctggtttgtaaagtggctaattggtgggaattcaataggagaatgtgcgcaaaacgcttagcacagcgcctggccaacaatgcgctctcaagaaaggctgctgagccttgtccaggacggtctacaccgccccacgtccaagatgagttcacagcgcccaagacctgttcaatttaagatgatgtaaactgcattgcccttcttagacacgcagcagccaggagctggtcatctgcacctcccgcgatttcctcctcagaaccccagtcctgccagatttgcgtccttccctggctcctcaaacacctgctgcaccgctcagagcctttccccaccccgacctcctccgcagctccgcaccagcgagactgcgccccgtggcacctcgggggtgccacgattggcgggggatgggggatgcctcccagcttcatccgctctccgggttccagacaaccattccggagagccagctgctctcagtgcgggcaggcccaaggccactaactgcacttggcgacccacctccgttcccaagaggcctcggaaagtgcggcctcgggtctcttttgaaacagagacccgcggcaccccgcttctccccctgggataggagagggagagccgcgggagttccgcagccactcctggcgctgccaccacgaagcaggttcactagctaacagggcctgggacactgagccgtgtcgcaaacttttctgtgccccactcaatgagggaagcctgagctgcggtgaggggcgggatgacctggtgttgggttgagcggagctcccagcttcagg

SEQ ID NO: 1021 - DNA, 2656 bp, Homo Sapiens
actatattgaatttaactttttctttaactaccaaggactccagattcaccgtcaactttcttcctgcattcactcttactgttcagttctgggttaaaagacagcggggcctgaacgaagtgtctacaaagcacagtatttggagaagctttgttgttgttttttaaaataatttttttaaaaagggatcccggatatcttttttgtttttttaaaaaatctttttctcatgtacgagaaatacagggaaaaaaagcaatcaggttaatgaatcattctggtttactggattccaattggtagagaatttaaacttaaaaaccaaacaaaacgaaagagctcttcagttaccttatgtcgtaaacgagttaaaagttttgttatttctgaaaaatcaaagagcactatctgtacatggtcataactgcaaaggaaacaacggcgtacccaggacagggggagcttactttaagaagctgcgtctttctggatcatgttccttcggggctgaccctttcggggagtttggcttttaaagcgcggatctcgcgacgcgcggcttgcaggactgcggggcccggcggccgagacgcggcatccacaggggcccctccgcgcggccgcggcggtggtggcgggaacctgggactggccggcgaggggccccgcatggtaaccgtccccgaccgcaagtcataggctgtgggcaccgcgcagagcgcaccccccaccgaactccccccaccccacctcaattctcgagaccgaaagtgcggagcgcggagtcctgcaaacttgaccccgagccaaggtgcgcgaggcgacggcgagtgtcccccgggctccctgcagccccggggctggaagctccggcctccgcgcacctcgtcctctgcccgcccgaaagcgaaacctggccggcgggcaggaggggagagctcggcctcgagctctgcctggcggggccccggcctggaggcatccccgacccgcacctggcggcgcgacccacctacctgcccgtccccaaggcgccgccaggagcaacagcagcagcggcggcagcggcagcggccgcagggccgggcggccgggagcccgcatgggcggcggggctgggtcacatgtcggggggcagcagactgctcagtcccacgcccgctggggccaagcgcggccgcgcggcctcagctccgcgcctggggctctgcgtgccacgctccaggcgacctgagtcccagggcgcctccgccacagccgcgtcccccaggcttccccagaaaccaagggcgagcgactcgcggagcccccacgcgcgctcccccggctacccagctggatggcagcgcgagggcagttctcgcggatttatagtccccagccactcggctgtcagtcctgagagtctgagagtttccacctctcggggttcatgcccagaccaaccaggtcactaggcaggtaaaacctccttctggtaatgagcgaggcgagtgcattgcaaagagattctggtattcaggccggtctgatggtcagttaaagttcaatatcggaagacggatgaaatagagcgttatttctcgatatacagttaggcactcagccgtagatcttacagtcatgcatcatttaagatgacaggattacctcctgagaaatgtcttaggcgagtttcttgtgtgaacatcttagagtgtactcacacctatatggtatagcctcttacacgcctacgctatatggtacaggctgttgtttgctcctaggctacaaacctgtacggcaagtgaccatactgaatactgcaagcaattgtaacacaatggtaaatatttgtgtatctaaacatgtctgaacgtagaaaaggtacagcaaaagtacagtatgaaagattttaaaaatggtacacctgtatagggcactttccatgaatggagcttgcaggactggaagtcgctctggctgagtctgtgagtggtgagtcaatgtgaaggcctaggacatcactgtgtactactataggctgtataaacactgtattacacttaggctatgctaaatttattaaaaaattatttcttcaataataataaattaaccttagcttactatgattttttactttctacttttaaatcttttaaactttatttatttatttatttttgagatggagcattgctctgtagcccaggctggagtgcagtggtgcgatctcggctcactgcaacctctgccttccggttttgatgattgtcctgtctcaccctccagagtagctgggattacatgtgtgtgcccccacgcccggctaatttgtttgtatttttagtacagactgggtttcgccatgttggccaggccggtctcgagctcctgacctccggtgatctaccctccttggcctcccaaagtgctgggattacaggcgtgaaccacgacacccgacctaaactttttgacttgtaataacgtttgacttaaaacacaaacacattgtgcagcagtatgaaaatattttttctttgtattctttctataagctttttctatttttaaatttttctttttctttattttttctttactttttaaacttttttgttataaactaaggcacaaccacacacattagcctaggcctgcacaggg

SEQ ID NO: 1022 - DNA, 2242 bp, Homo Sapiens
ttatatatattatatattttatatatcatatatattatatatcatatatttttatatattatatattttatatattatatattatatatattatatattttatatatattatatattttatatattttatatattttatatatattttatatattttatatattatatatattttatatattatatattttatatattttatatattttatatattatatataatatatattttatattttatatatattatatattttatattttttatatatattatatattttatatttttatatatattatatattatatatattttatgtatattatatattatatatattttatatattatatattatatatattttatatattatatattatatatatttatatatactatatagtatatatatttatatatactatataatatatattttatatataatatattatatatattttatatattatatatattttatatatattttttatatattttatatatattatatatttttatatatatattttatatatattatatatattcagagagagaaagagagaatccgggtaccgtgactcatgcctgtaaccccagcactttgggaaactgaggcaggaggctcacttgagcccgggagtttgagaccaacctgagcagcacagcaagaccccatcccggaaggagggagggaaggaaggaagggaaaaataacatttaagtgaatgaatgaatgaatgagaaacagagcgaagactcgcgtgtctaggacccctaaccccctccccgatgatcagcgccgcctggcggcgaagctcgggtgcgcatcacgtgaagacagcaggcagcgcgcaagcggggccctggttggggaggcgggcccaggaggtgccctccgccgtagtacctaccgacactcgcgtgctggagaggggaggggagctcgggcgccggccgcgcgggggcggggcggtgcggctcgggtggcacagtggtgaactctgcggcggctgcgcgccgctcacgctgttcctccagctgctgttacctctgcgggcctctctcacccaaggggaacggagttgttatttcccgctgtttccatagcaaccgcagcctcgcgcggggagcgagtcagtgaaccaggcctggcttgcgcctggctccttgggatatgctggctgcgtggggcagaggcggaagaacaggggtttggaggaagagggagaaacaggtgacatgatcatgcgctcattcatcatgcgctcattcagtaaatggacgcctgctgtgtgcaaggccctgtgctagttggggccacggcggtgaaaaggaaaacctacaaaattttgagtgcctaccctgtgccaagctttacgccagggaaaggattttttcactgccgcaagaaggctaaatgtctgactggctgtccaagagcccacatctgtgctatttgtgtagattgttagctctgtctgaggaataacagggagaggagttgtgagaatagtaacagccccagtaaagagtcgctttgtccagtccagtctgggacatacatattgtggcaccaggaaaatgtttaaagagttgaaattttgcagctcatctctgccagtgtttccttcattcctcctaagacttttctaccatgtgtcatgtccaaattactgggtgttcctaactcatcatgtacgaataaaaagaactgccattaattgaacactataaccatggaccaggcattatgtaaggcactttatgtagattatctaatattcacaataaccttcagaggtaaatattattctttcctcagatgaggaaactgaagggtagagaaatcaaagacatttacctcaggtcacacacacaggaattcaaacccattctaaggattagaaaacgaaagagagagagagagttcaaacccagttctgtcttattccacaagctccataaccagtcatatcactgtgaaagatgaatgtgtgggacattgcaatctggagagaaactttttttttccttcgagatttctgttctgaagaaatatttttattaaagccatgtaatacattaatgctttgaaagttaacagttttcaaacgcaggaacaaaaaaccaaatacccgcatgttctcacatataagtaggagttaaatgaggagaactcacggacacaaagaagggaacaacagatactggggcctacttgagg

SEQ ID NO: 1023 - DNA, 2371 bp, Homo Sapiens
atatataaacagatagttccagtgcagtggatacatacggtaatagaggttctaagatgtacaaaaggctgtaggggcctaaaggacggagaaaggacactgatttctctttttcaattttccaagccacctgcctattccgtcttctctttctcgagatcaaacattctcacttctctctaaagacccaaccttgtcatcatggtgctcaatcttccttccacactgtgatgctggggaaagccttggggcatttctgttctctcgtgaatccttgaagcctcactttaaaaaatatatactcactcctttgtccatcgtaaaccttgatatttgtaaatatcgataataggaactttgaaaaaacatacgcccttagaaacaagcaagcaaacaaaaacacgtagaatgtcagagcttctccccactccacaccctttctttaaactgatgtcaaggtgggcccagtgagggtcagtgacggaacctgcagtctgagaaagacatggcagaagcataaggttagaggctgttcctgctgcctcattaaaaacaacaattttcccccaaatctggactgaaactgacattcaacgccaagtgtgatctcagtttaacctgccctggtagatatgcatacacttcccatgcgcaccatctcatgtgatcgtgtccacagctttgtgagttgagaggggtgggagtgattatccccaaccacaagcaaggcttccgggcttcaagggttggagaccacccagggctcggccagcatcagaaccaacggcttctaattccaaatcaaatgatggtttatgccacactacaaccctaaacaaatgaactgtgatgtgtctcacttccctgtgcaagtggaagatgctaatacatgtgtatcatgagaaaggacctcacaattttcttcttctgggttctgctgagacgtttctttgattcagagagaacttcccaggatcagcaagaaaagcatgtcatcatttcctaaaccctacaatccaggaaatagtccatcattttataaaattataaaagcgaactatttgagtttctttattatctgcccccttctccccaagctggtcttgtacaaacatgatgcacgtccattgggtgacaagtctgtcgtaagtgaaacgtttacaggcactacaggaatgacctggtgcctcgcccacttcattagaattctaattggggtgtgtaggagaggattctataaatggtaaggcaatccttggcagcctgtctgtcagcactgtccgtgccattcccagaggagcctgagaagaggcagaggaaggcgaaacatggctggtgagtgcatggcatcttctccatcaggtccttgccagaagcctgtgcttcccctgggccagcctgccaagccagagtgtccggccaggacagctgcctgccttgggggctctgaaggccagacttcctattttagggtgctagccagaggcggctctttctcagtggtggttgggtccctctagcatattcttggggtagaacatcattggaatgtagctctgaataatgggcagggtgttcagtgcagctggacatcgcatctccttaggcagaggacaagctttgccttgtttgtgtttgcgtttcttttacacatccgtcgccacccgtaaagccaaagcagacaggactcgggtctcgtgtttctcagtgtagctgtatccagctgtcagcagtgtcagcaaagaagcacatctcagaactaccagggagtgagagtggtaacatgtaagttgatttgaaagaaaccattgtttatttcaaatcaacttacttaggagcattaggaatgctcctaagtaagctacacatcagaagcatcagacaggctctgtgtaagtgacttgatgagctgaagcctccccgtagcaggagcaggtgtgccacaagatgtcctggtccacaggagagcaccagggaacaggggttacaaagaacaacaggaagtgcaggttcccccactctatgcttactgtcgaggatatgggcctttgttaatcagcacccctgctaagcagcatgctaattattatctgtcttgtgtgctcagcctagtaggttgacagggacgccaaatccaaacaagatatgagtcaaacttgtaaaatattgtgaatggcgattagggctgctggaagattggccaaagacatcactgagccaaatgcaacaggcaaatgctggctacttcagaagccacaaaaactgggacaggtgattgcacattaggccccctcccctgtctcccattccttgctgtaatgtacagcatggctgggatgctaagaagaggagctctggaccctacacactg

SEQ ID NO: 1024 - DNA, 2419 bp, Homo Sapiens
ccagggctgtcaggccctccccagccctgcacctgccgcgccgccccacctcgccaggaagtctcagagaccccggggatggggtgggagcgccttcccatcgcgggctcaaaaagaaggaaggacgcccccaggggtcgtagaaggaggactagctccaagccacaactttcttcggacccaaggcaggccggctggggctccgcgcctacacggcccctggcgggggtccgcgcgccccgggagccccgcggctcggggaggaaagaggagacaagagacaggcgaggattacggggctgacccagccggggtagggaccatcgtggaaaaactttggcgaggtggggggacgcggaaagagagcggcccgcgccctgcaccttgcgccgggcatcccgcgccagtgcctcgctcccagtgccccgcgccccgcgccccgcgccttgccttcaccccgggccagctgcatcgcgcccgcgccgcaggaaccgtggagttggaaagtgggggcgccgcggctggggggctgcttcagctgcgcctcggccagcgatcggcgggccgggctcaaatccagccaggctgggcaggcggtggccgcgcgactggggaccgggcgccccgccctcctcgctcccctcctccttcctctccctccctccagccccttggcctttttcagcccctaccggatctgctcgtccgctgtcctctcttttctctcgctcttcatatcactctccaccccttcgccttgccttcgcctttcttcctccccttgtctcctgccccctcctcttctcccctcccctctaggggcggagcttctcccctccctcccagacaatgctgtggctgcgtccccttccccgccagctcgtccaggctcccgccgccagcgattcttccgggctgggggtggggaggtggggggggagtgcagggttggggaggatgagctggctcccctcacctccttgctgctgccctctccaagagggatggagacttggcccaagctcctcggttcacccggagctgtgacagccactcccagggaacagtcacgctgccctaccaagcccacctccagcggcctggattccccaggcagaggttgtgggattttgttttttctaacatcccagcttattcccaaaagggtttgagccggacaggggctaaacaggccccttcgacttggcgggccggccagacgtgacagcaatgccaaggaggccaagtttctttgtccatttctcacctcccccttttccatccctggacctcctggcgcccccagtacacagaggcccttgagcagcccggctgcaggttccctatctactcagagttctccccctcacgtgcctatccccaaccctgcagtgtctgcggaccaaaggggaagggagcctcaggccaacccccaaggtacagccagaccagctcatccagcctggaagccaagcattctttactaaattcattgtttggatcttggaatgtgtctcccttagaaacaatgttataaatggtgatctgcttcccaggccagccacaaaagtctgttgaacccaaaatgcagctgtagggtggtgctgagaactgtgtcagctaccctgaaaaaggaggccactgatcagctttatttgtagaaaaaatatgtatatatcttctggttctttcttcttgggctataaacactataaattaaataagttaaagttctcccattaagtttccccatatggacccactactctatgtgttaagcttctttcctttgcaggtaatagaaataaccttgggggaatgcatttgcagacgcagtggtttctcgataatctcatctaatctcagtgtcagaactgcatggagagctcagtataagaggcaaatccagagcctaaagggcttcccgtaacccagaaagtcttccctgaggggttctttcttctccttcatcacagactggccctccctgcaccccagacacttggtgaaaggtggccatgacttctatctccggggcttggagctctgctgctcaggaaagcagccagatgctgctagaatcccttattctctaatctaatctcccaaaagagcagctcatcctcctgtgacagtggggctagggatgagctcaggttgtacatactgggctaccagaaaccctgaacctaggccctatttaaaactaaacccattacttttgtttttgtttttgttttgttttgtaattttgagatggggtctcactctgtcacccaggctggagtgcagtggcatgatcatagctcactgcagcctcaatctcctgggctcaagagatcctcctgcctcagcctcccgagtagctgggattacagccatgtgccactatggccagctaatttttgtatcttttgta

SEQ ID NO: 1025 - DNA, 2480 bp, Homo Sapiens
cagtatgaaacataaggtccagcatatattattattcaaatgtttcttgcttgaataaatacatgattgtcagtgaacatctgttgaatgaacaaaggggttacatttaacagctaattgcagtgtttatgctacttaaacatggtggctttttaggtgttcttgtctcagtttttgagagctttgctccttcttcactgggatttagacatgtagttataaggagttaaattctacagaggtgtgcaaagatgataagctacaggcagcagggcggtaattaatatttctctgcttggatactgagatttccacacctgctggataacagtgaattcataagggattatatacttaatggtaacatttatatataacaaacatttatttaaaaaactcatatgaattaactaatctctagaacgttcctatatgggatcctctatcagtctttgtatttataagcatttattgaacaccttttgtataccaagaaccagttatttcccaaaactttggtgagaccaacagactttatatcattagctagtgagtttttctaaaagtgttggcttacttataaccagtgagttgtatctcttttgtggcattggccagattttataaactgtagcttcttgtttatttataatggacttagatccttggatgagatgtattacatatgtgtgaaggattagagggcactttttaataacaacaggaataatactgctttgtgctgctaaactgtagatcttttcttctaaagatttaaagcccattatagacataatttgattgttgctgtattgcaacagtgtttttccttctctcctcatccaggcagatttttttcttgattaaagatggcatgaatactttctcatgttatgacctatttgataaacagctcaggatgttacaaaagcaaagcaggagatgtcttaaataattagtggcagaaagcttgctgctgctcgggtgttaatcttgccagaaagctcagatatttgtgggttgcactgtaaatttctgtacagatgtgtgtgaggttgagtttcagccatacgcctgtaacagcatcaggaaacattttgtcatgctacttccttgggtgatcttctatgaccaaaagaaaaaaaaagtcatatttctgtcttgtgaaattgagctcgaattctgggtagtttagtagtaatcagtatatgcctgaatcacagctgcgcgggatggtttgtattatataccaatggcaactactgctttaaatatggaaattaaatactttaggttcaggctgattccaatctgcgggtaggaaacgtctgatctatcccaagataagtttaaaagtgtgtggagttttctctggggctacaaatcctgttcacattcatatgtatttcttttgagacagtcccttgaggtctcttggcagccaccttcttgaacgtgggaagagattgggatccctaggaatgcaaaaaaggagaaatcaaaatgtcctcagaaaattccagggtgtggttggtccagagacccaatccaacagttccaagactcaaaagatgagtatcaaactatacttggcttccctctcttcaggcatgagacatccacatttacccagaatcagttcctaatttggaagcttcttgtgttcccagcattctcagatcttgtaccaaattttttgtaaactctcctaataatgagtagttatgtatagcattatagttgtggtcttgatgcttctattatcagttgatcattctggctctgtttctttgtggctctgtggccatgaaacaacactttaataggtacaagatgactggtgaaactcacctagtaagctctgggctttccttaatgtgtataattagtgtatattatagctcacttaaaaatgtgttaacgggtgaaattaacatgatacctcagaagttgttgattatttatttatttttttgagacagggtctcactctgtcatccaggctgcagtgcagtggtgtgatcatggctcactgcagccttgacctccccaggctcaggtgatcctcccagcctcttgagtagctggttccacaggcatgcgccaccacatgtggctaatttttgtattttttgtagagacagggtctcatcatgttgcccaggagggtcttgaactcctgggctcaagcaatccacctgccttggcctcctaaggtgctgggattacaaacatgagccattgtgcctggaaagaagttatctattattatcttgctagacaatctgtctgtgacctcctaaatacctaacagaatatgctgagccctgcccttacccctccatctattttggaggtcacctgtaatgttggtggatgctttcagtcacaccaacagcttcccacctcaggcatttgtgtccctctgtctgagggctttcattggtctgagggctctctcagcctggctcggggcaggt

SEQ ID NO: 1026 - DNA, 2464 bp, Homo Sapiens
ttgcagtgagctgagatagtgccactgcactccagcctgggtgacagagtgagactccatcttaaaaaaaaattaacttggaaactcatgcctcagaaagcatgactccagccaccctgaatacccttagtgtacagatatgctttgagtggtcacatagagagggcacaggggcaccaaaggaagggaggaatcaggagtccccatggaggttctatagaggaatccaaattatgtctccaggagcttcttctataaccagttgctgtctcttccccctgccccaaatttagtaagatataattgacaaaaattatatatatttatggtgtacaagctaattattatataacatatgcatcgtctcacgtacttatcatttttggtggtgagaacatttaagctctactctcttagcagtttttaagtatacaatacattattattactacagtcagtatgctgtacaataggtgtccagaacttatttatcctgcataactgacactttgtaccaattgactgatatctcctaattccatcgccttcccccaaccccttgacaaccaccattcccctcttcttcggtgcatttggcttttttagattccacatataaatgagatcatgtaatacttgtctttctgtgcttggcttatttcatttagcataatgtcctcaggttcatctatgttgttaaaaatataagattttaatctttttaaggcttagtagtattccattgtgtatatggactgcattttctttattcacctattgagggacacttgggttgattccatgtcttggctcttgtgaatagtgctgtagtgagcatgggagtgctgatatctctttgacatactgacttcatttcctttggatatatacccagaagtgggattgccagatcatatggtacttccatttttaattttttgaggaacctccatactgttcttcataatggccttactaacttacatttcaatgagcaggaaccagtctttctcttgtacagtttcagtcatcgccctcactgtcccatctcttgcctcctccctttaggatgtctgtgggcactgaagttttctcttcagactggatatgagccagcatcccagcactttgtgagttgagtgtcaggacaaggtgcgacttgattctcccagaaatctttcttgttttagagatagcctcctgggccagggactcttaaggaccaaagttcaattcccaccactccccattacactgggaacttcagaatgtgtgagttccacgtttcccggtgctgacagatcagaggaggaccagacgcgacaacatggctgctgctggaggggctgagaggtgactgattagcttaagcctgcacagcccgtggaggaagcacctcgttcctgccttctcaagtgataaagtctatgctggaatacagagctccctgctctgagcacctaaagtcttgatttttctgggggaaaactctctgtagctctttcttctagtattatttgtgttagtgagtaactccttaaccaggttgtgagctcctggagagttgagagtgtgttttggtctttgtatctatgaagtgctgggttatgcctttactccagggccatgattgaaaaaaaatgttagagggagaaaattgcaagatgatcaccacattttgtccaattgaaaaggaatgtgccaaccagtttatacagttccatttatttttggaaaaaatatatctccatattacctgcttcctgccttcctttaacttctctctctcttttaatcaaaataaggaaaaaaaaaccacagaatgctatccacaatatgttaactgttggttatctccagatgttgggattatgcctcaaacaacaattctgagtaacttaaataaatatggaatgttctggaagctgtggggtaggatacagagttgagggaaagcccaagacccagaaattagaaggtcagtgttaaaaacatctctcagatgtgggtagtgagaaataaaggagagcccttcgtgcagggggtcatcagctccaagcattttctcatctttatacatctcccttcaagattcagaaccctaggaggagtctgattgacctagcatgggttatacgaccagccttggcgagaggagggcaggattctttaaataatgggaaacctgtgctattaccaaagatagggagaggagaactgcgaaggcaaaatacagatgaccatcacgaacaaggggtacttttcttttctatctgtggtttctaatgtttttgctacaaacaaaatacaaaaaatatttaagaaatatttatgtattatatatataatatatatatttataaatgttataataaacattttaacatttgtccttttaatagtaagaagaaaagatagcagcaacaccattaagaggaagctagttcactggaagggattcaga

SEQ ID NO: 1027 - DNA, 2482 bp, Homo Sapiens
aatggggagtgactgctaaagggcacacgggatttcttttggggaataagaatgttctaaaagcgattgtgataatggttacacaaatctgtcactatactaaaaataatggaattgcacatattaaatgtgtaaattacatggtatgtgaattatatctcagcacatgtttaatttttttttaagtgggttgtggttatgtagcatgtaccttccttaggtgggtacctgccatagtctccatagttccatattgactgccctacactgggacccagttaacttctttgattttggcctctgttggcatttgacattttagcctcagttcatattcatgagcattttcctttttctagtacctttatcatgataagttcccttttcttatccttttcctcatgaaaattacctttactggtcatcctagagcacatctcctataatattttttgacatgtagttatcaagtttctgacaaagaaatgtatttccttattagtaacaatattgctataaaattatacgttatcaaaccaaactgtcttataaatacaacctggattctgggtttcataaacaaacacagtgcactatgccaaccgaagaataacaggaagtactttatgaccccacattatctaacagttctcccctaaacatccctgtagcatgaccaggcaggagatgctacaagactgggaacagagctgcaatcactggcatttttaaacagcttgttgatggactgggcttgtgagaaaaccaacattacactgaaactcttagggatactttaaattggtggattagatggtcgcttgattaagtttgggttatgtaaacagtggagtgtttagatttaggcttggctgttggagtctaggcagctgtttgtacttaagtccagctagaagtcttgttaatcaaagaactgactgaatttctttctttctcccacccctgcctgcttcttttttttgtacctgtgttgtttttccccctgttcaaaccctttgggctcaggactgtaggtaggcaaggcagagcattttgaatgtttctctgaggaccaggaacttatttttttgattacacagtgatgtgccccacagatctccctcactgtgaggcaatcacttcatttatccaagttctacaaagcctttattatttcggttagttcatatttttgaagctaagtcatcagtttgatgcgtttgttgtaaaatgtggtttaacagcttgttagcacatttattttttttttaatggaatccaaaggtatttcatgcttgagcagcagtggatttaagagccgatgaaaagccccgcgagctgggcgcagtcagcacaaaacaatgcggggaacattgtggagtcctacgcagagctacccccagcagtggcgtgcgggtttcttgaactttaagttacgttttttgcttttctttttccctgacagtgtctcataaataacccatgttgccttatgcgtgttggtttcagattgtctaggatgtactggatcatttgagcagtctgcgttcatgtggtttttctcccctctgaagatgattcgattctgttttgtccacaaaggggagacgtggattgctgttttctgtcctccaagtgtggctttgtaaagctgtctcagaactaacgggttggaactgaaaactattatggagcttggtgaatgtcagcgagcctttgaaaagtaaaagctgggaagcgacaaactctttccacagttccatcccaaatacaaacgaggtcattttcttgggaggcagcaaaagtgagcattctgtgtttgaccaaagacaaccttttggttgaggttttgattatccagggatgaaatggaggcaaatggtcttctttgcctaaatccagacctacctttgtaccaggctaggtatttgttggattgaaaggagtgcagcccttggagagcagtttcatggaactggaattggtaaaaatgggctttctgattatatcttatatattattattagaatgtattattacatattagatctatattatatctaatatagatctaatatattagattataattagattatattaaattataattatatattagatctatattattatatctaaaatgttttaccttaccagccttgccatttgcatatctgtgttgtcagttcataaaccagattacaatgattttttaccattcaagtcagaactcttatatttcatttatattccagaaagtagagattaaagaaaagtattgagaagagaaggctaatttcttcttacataataatatctgtggttctcaaattgaaatgacagctgatatagtgcttagagcctaaattttatttttatctatctctctagaaagagatattgaaacacataagggaaagagaggagaccatatgtgaaaaattaccaactactttgccagtgattacctaacaatgaa

SEQ ID NO: 1028 - DNA, 2345 bp, Homo Sapiens
agtcactgggtccaccaaggtacttctatagctggtagcttactctttcttctaccactctccttcatcataccaatattttttcctttgtttaccttcatggggtcttttatgcttccttgccagttctaaagcatgtgtgaagagcagatacatctatgtaaatggtttatatttactgtgaaaacttatgaaatatttatgaattattaatgtcgtttctagggccacaataaatctctctttttctctctctctctgtgtgtgtagtgtgtgtgtctttctctctctctgaagtgtaacccttcaatatggtataactttctcagactgattctgctactcactcaggagggaatgttaaattctacttattttgcttcagtttgtaaactttctagtgttctcttttttcaaactggattgttagattatctgagggtacccactccctttgttcagagcacagcatttggtgggctgtaaaacagaagagctccttcagacttgtttgacaaatgagaggaaaggggcaatggtggcaggagcttgtacagataaaaaggctcttcaccttgggccaaaaggtgctacttggcaccacctccacttcctgcttttgctcaggaaagaaatctgacaaagcaggagacagtccttgccttgccttcctcactcacaacccccttttttgagaactgccatcttgttctcaagatgggccatatactagtctctatttctatttctccagctcttgtccatgccacccagacaactatgatggcctctccttagttattaccctgtagattagttttgcattattggataaatggaatcctatagttttcgtttggaataatttagtcttcggaatctcttacttaacatgatgcttgtggaattcaccatgtagttgcatacagcaatattttatttattcttttgctgaatattattccattacttttgccagtttgaatggatttctttcttacagtcaagtaggccatgactaagggagataatgaagcatggaattgtcttttccagagaaaccacaggcatggaataagaattccctgaggaggccttttctgtcctttcttcatcaagctgcgacattattttcatattcagagaacttcagagcaacaccgagtttcgctgagtgggttcagagttccatatggcagctgtctcagttcctggcacgaggccaaaggatgacagttcttatcttctttcatgttcttttgcccaaccttagggaatatttctttaccctgtgattgctcatatctgaaaatcttactcacactctacaatcttccatcagcccaatgccatgtggtgttaaccctttgcatgctgcagtgttgagctgcaaacctgcccttttcttgcagtaatccaaagtgcccgtaaagtcttgaggcagacaatgttattttgtcatgtatgttcatataatatcagcaaatcattcattgtgtctttgtctatcttccagacatggtggttgctttgtagaatcaaaatttctgttatcttttttcataattagttaataaattcaagttgagctaaggagccaggtgaagccactgtgatttgggcaaggttcccatcgatagacatgtgctttcagacacaagatgtgctttcagacatacaattctgtttggccagagtagaatagaatgggtggtgcacactttcattatgtaagtacaccctgtttttcccattggtaataatatcttaaggagcgcaaggaaattcaggaaggaacatttcataatgtcaagaatacctactaagtaaattattctttagaataaatctgagagatggattgtcataccaaagccaatagaaactgaagcatgataatgtcaatgcatattttccctgatatactgtagatccgtagttttaaaagcctgcttttttattttgctagctgaatctcttttatcttgctgccactcttctcatgggatgcctcaaaatcctacagactcttgcctggcaatggggaaaaatgagggtgtttaccactaagaaagccaattaaagaagtaactgatggattatccagcccatagaccaaacaaaatggacgttacttcatgtcttcaaatatctaggcactggaatcagaaaatgaactcccaatcagacttccctgcttttcctgcagggaaaatgagatgcaaagcagagtcagagaaaaatagcaaatggccatttgtctgctgggagataaaaatcttactcagaggtcaagtcacattcaaactggttgatcccatggagactgactctgtcctgtggga

SEQ ID NO: 1029 - DNA, 2435 bp, Homo Sapiens
atcagctgtcctagaaattgcagactgtgctgacctggagggaggaagacccttccaaacccctatccagactcctataagactcagatttttaaaacaaagcaaaacacaaaagcaactctttgcttgcggatgactcaacttcctttttggtaggctcaactctgcttcccaggaatcagcagtgattagtgatagaaagagtagccctcatgaccccaggtgaccatcaggacgctagggcaggaaggagcctgttgattgagtgctgacctgcaaaattaccagcacaggtgtccaacaatttcattcttgagaagccagagttgagtttctggggttgctttggagggttcaggacatgctgcagggtaataggaaggacatggggtgagaaaaaggttcctgccaagttgctgaaagacacatgatagctcaacagggaaccaagagtcaggtttaatattgtttctgcaccacacttaataattgaggtcaatggtttatcaagtcctcactgagggccacagagaggacaggcttctaagtgcagagaggcagcagtaaaggctgaggctgcgggaaacataatcagagtttaaaacactaacacttacctgctggtatggttgagaggcattccaataacccttggcccctgacttttcactgtgccaaaatctaaactattacactaggtcttgaataacttttgaaaatgtgtgctttcccacctagttaaggcaaagttgcctcaaagacaaatatcacattagcacagatgctcttataagagcaattaccatcaatggtcactgcctggaagttggacctggaaatgacatgctggatggtcatagtcttgttagatgaggtgtgcgtgtgatgataagtgggaaacagcttgatttaagggacactttagtccatggccagcacagtaatgatcttgggaagcctgaagctatgtcttctgttgagcaataaggtacagggcgcagaaggggcaaaataagtcagggagtccagttaacatgtgagatggaaacttaaggatagggacagagcacgcacaaagcccagggacacagctttttgctggacattttgcctgtactaactggtaaattagactgcacaacaggaaagaagcttgtgatagcaaaaggggtcgaaaacgggaaggacactcagagggcaggaactatgacggggctctgcggccttgtgggcagcagggagagtgtatttttggcctgcgggtctcgtgagctggaagaaatcaggaaagggaagctgagcatttaatcctacatagatcacaggctaatcgtgcccatttagtgtttgaaagtgagaagttgtcaaggctttgtgacagccttgaaaccgcaggcattagaggatagaaatcctgagcccagagggaggcaggcactcccatctgcccaatttggtcttcaacagcttccaactcttcaatattcccaagcagaatcagattaagcagaagtgctcataatagttctccaatttagcctgtatcttctctctctttcttttgtcctgggggccatgtgccattaggagcagaggttgtgaatgttccagaaatccctttgggatgcaggccttcctcccatgcagaaaatgcctactgaacacactaaatgccaggcacatgccttgtactggggtgcaatggtgaggggtgacacccagagggagtgtccccctcttctgtattactttttgcctgaccttttcagtagacttcagagttggtcatcatgacttcctgaactcatctccttccatctttctctcctgagctctgagaagcaaagtcaattcaaatccaaagtgctgggcataggagtttgtttcgtaagaattcaaactttattgttttacctctaaatctggcctgcttctatagtgcttgagacttagcaatctctcactactcttagctgtttttgttgttgtggctgtcaatattatttaaaactgataaaaactgcacagggaagttgacacagtcagatattaagttgatatgcctatcattgaatgtctggagcaaggtaacctcacctcagacttgattcctaacaaacttcagtgaatattcaatttttgttttatcacaaatgtattattacacctgcctatatgggaaggtgaagatgggccagttgtttgctttgaaaggaggaaagagtgagaatgtacaactgaatgaaaaaaaatattttggccacagacactttttctcttggctttacaataataaaatatgtagtgggatttttattttgctttagaatttttagttgttttttcctttttgaagtgctccttcagaggaaacaaatctttctattgacattgaaaatgagtcataagagaagtgttgctactttccttttgag

SEQ ID NO: 1030 - DNA, 2450 bp, Homo Sapiens
ctaaagtcagaacgcacatcataccacttctttgctcagttcccctccctggcctggctaaatttgccattcctgcttcctgaggacccacctttaataaatcacacgtgcctgaaacttcattcccagcctcttcctctcctagatctctctacctaggacagttgtaggtaaagtgaggaatcctaagagagaacccagaaaagcagaaatcacaaaggcaacctagtcaacagtgaaatgtatgacaaaatggagggatcttgtcgacaaacaaaatgatatctgaaaagtctcactaataaatattaaagatcattaaatgtacattaatctttggatgttgaaatcaacattgaatgtccaaaattaattcaaataattatatcaaacacacatgcacacatgtgcacacacacacactaatcataaggatttaaaatattctgaaattatttcatctttccttttctttctttcttattaaaaaaaaaaaataatggccagaatactggcttctataacattagtccctgctctggcagaccaaaagaggcagaatcttcccagcacaattttgccctccaaacattttaaaagtatccaattatctggctttgtattacttacaaaatcttgtagttatgaagaaagttcttttttttaaattcagtttatctccctaaattaaaagtgtccctataaataagaagagaagctgtttctgtcaaaactttgggtctacttaggactaatggagtttctttgtttcgtaggaaaaccttttgccctcagaccagctgctaaagttgaacaccacagatgattctttcaaagcgattctgaaaaaccatatgctggaatctaaatttcttaaactttacacacaagatcagaactccacatcttaatagccatataactctataaagaattacccctgatttctctggtagatcatcactgcagaaggaacaaaaaaaggcttcataaaagcattccacctgtattgttggcagatgacttataaatgtcgcacagacacgggctgactactggctcatagaagaagcattaaatgaacgacgagacatctgctggtaaatacacagcaaacaaaaaatgcaactcagagccaaacatgtgcacagtgtgggccccatctctgctcataaaccaagcaatgtgttctgctaatcattagcagagttattgattttagatgtgtatcacacagctataattttgtcagagagtagaccacataagttgttctttttctggttgtttcattttgtcttattccaagagtccgtaaattgacgaccgggacaaaaattataattgacatcatctgtgggaaatatttcataaaacaacaggcccagatgtaggattaaagccatgtggtagtaaaataccccactgaaaaggggccaggttccatgatttcttaagaaaacagatgtgctctttttccctctgcttgtttttcaattttttttctccaaataaatccccccccaaccaccaacgttttttcctctctgtctcctcacgattgcactggagagagttcataaatggattacagatgtaggcttgtacttcaaaattctaactgtcacaatctctggaataaaataaatgaaacatttggaaaaattacattgaactattgtaaaggtaatgatgattatgcaaacatgtctgcttgacatttatctagcatctttgggcatgagcatatgatctcccagatacctcaagctggagttcagggagtaggaagtaatttagagtttgtccaaaatgcagcaacagtaactccttctgaaagccccctgttctgaaggggaagcttttatctttgaagtttcgacaagttggtaaaagggttctcacgtactttttttcttcttaaggtgagatttctggataaaacagcacaggaaaataagaacccaatatatctcagcctctactcattcaagttccttttatctatattatgctctacaatttcccctttggaaatgttgtgaaccacaagaaaaggatcctagggcacaaacacaggctatattgtttaacaactaatctacaagtgctgtgaagaactgcacacaaccgggtttttgccaaaaaccttggtgtcatatggaatccattgcagtatcactgattacaattaattaattcagcatttatgctgtatctcagcatccacctccagtaatgtgccaagatggcttagtgttgggagaaaataataaagtgtaaaagaaactaaatttccatcatgtgtcacgttaagatttcaacagaatatctgcactctccaactgtcccttttcagcccctcaaaaactgaagcaaacagtacataaatttgtttagaaaccagaggagcctgactccaatttccctgcattgtttctttagtctgt

SEQ ID NO: 1031 - DNA, 2493 bp, Homo Sapiens
tttagccaggcagtaaaccctgaaactcttggctacagaggtttctattcctacaccatgatgttcctcctctctagttgtcatcggcaatggcttccactccataatgagacaagccggaaattgcagctgctactccatcatgcctgttctctctctctctttctctctctctcctctctctctctctctctctctctctcacacacacacacacacacacacacacacacacacacagagcaggtcacattgctaataatatatatcaccctgttactgggatatcctgagaggcagtgtattcccaaaatcccaaacaggaaaaacagtaactgcacttgttttctttcccttaactgattgacaaagacaccctacaagatttgagagaggaatgtaaaggcactgcatgaatctgacctgctgctctccctcctcattgattcccttctctttccgacaatccacacaggcagaagttctgggatgttcccatcctattcctttctggctggcatttcccctgtcataccctccttcccactggcatactaaagttcaaggcttaacctaactagtgaaacaacctatgatttaggtaaaccagacatgacctcagtacagaattgtcagacaccttaggaataaggcaattggaggatgatagctcattagttaatattctaaaaataatactctcagatcatcatttttccttgaaaatcatttctttcagtatgctgcgcagaatgaccttagactcccaatgagcctagtctcccaacgagtgagagcagagagcctcaaacatctttgtgtcttgtcctggatggagattcctgctcaagccactggctcaatggtccaatctttgaggagatagaatttaagcaggcagatctgtacacttttacatgacacccatcacctctcctctcgtgtgtctctttttccccctcctctttttctctatttcccttttctgtttctccaaacccctcagttaaccctttccctgccccctagtccttgtccacacagaaaatctggttctagagaacagtactcaaacagcctccaactaaaatgcattacgtgtggtaatgcaaaaaattattagaacagtttttttctatttaaaatatgactcctgttcactgctttggtttccctgtctttgtgcttcaggctaaatattactcagatttctgcgaggccaggtgctttctcaccaattatctgaaaggcccagagaatggtacttacatcaaagccagtcctaatgacaaaggacacctggccacggcaaacacaagcatctctcagctcctcgctccatttggcaaaaagctatttccatctcagtcacaacataacaaaggactaattgatgggagcattttttccatctttcaaaaaataaattgagccaaccccacgagctcatctagaggaattaattagggaataggaaatctccaaagccatccttaaattgacattgaacaaagcccagggaacagatggcttttcatctgaattctttaaaacctttagcactctactaattcccctataggaatgaaaaaaaattgctaaatgaatttgagcaaactatttcaccaggtgttcagttcccctaagattccttttgcactaagaaaaaaagaaaatacaacaggtatcctctctactgatattactataatttcatttgtacatgtgagttcttcccccagggctcattctaaacttcccctgcatttctgactaccaagctgggggaatgattctcttaattggtgcagctgatcatgcacaactgctcagagcacaaggacagtgtcaacacacacaaagtcgagaatgaggccattgttcaagcaaaatagaaaaatagaaaacaatttttgtcattttgtttcagatatctggagatttctggggcaagagatggagaggataaactgtattatcccaatagttgagtagattttttttccccgtacaaatttgacatgtagaaacattgtgaataagagagacattgcctctcatttgcatagttaataagaagctgtcctattaaagcctctagaaggatgaactgctggaatttatactttatctattcaaaggatgtctacatacaatcctccaagataatttggtagaaaattttaaaacacttttttctttttaaaatttgacagataaaattgtatatacatactatgtacaacaggatgttttaaaatatatggacattgtaggatagctaaattaagctaattaatatgcacattaccttacatagttgttatttttgtaataagcatatttaaaatctactctcttagcatttttcaagaatataatacattgtgatgaactatacctccatgttgtagaatagagctcttaaaaatattcttcttatttaactgaagttttgtaactttttaccaacaggtccccattaccttcctc

SEQ ID NO: 1032 - DNA, 2438 bp, Homo Sapiens
gagttagtgaaatttaattccgttgcttacaaccaaagaaccctaaccaagtatgtcatctaccaaaatggagacagccaaagcccaatgtctagcacttaaaattctcagtaaatctttgtgatataaaaaaaaattattgtccgggcgcagtggctcacgcctgtaatcccagcactttgggaagctgaggcaggcagatcacgaggtcaggagatcgagaccatcctggctaacgtggtgaaaccccgtctctactaaaaataaaaaaaaattagctgggcatggtggcgggtgcctgtagtcccaactactcgagaggctgaggtaggagaatggcgtgaacctaggaggcggaggttgcagtgagccaagatcacaccactgcactccagcctgggcaacagagtgagactccgtctcaaaaaaaaaaaattattaaacctccatctgccttgttgatatacactgtagtttaagttcattctcttaattccattaggaatcagaattctttcatgttttatttgcttccactctaaaaaatatttatgctcatcttgttccaaaaataagatgatgtaattgacatttacatagaaaattgaaacaatgaaggaaaagttaaaatgaagggttttttttccaaaaagagttataaaacaaatttaaaagtccataatcctgatcatcggattaatttgtttcaaacacttcatttctggtctgctattctactctggttttcccttagactcacttgggaagatttttttttttaaatacatgtgactagctctcactaaagaccagttttatctgaagatctaggtgtaggacctgggatgcaaacattttcaaatgtatcgggtaaattctgatgcacaataaaggttgagagcttgagacttagggatccaatcaatcatgcaagatgcttaaaatggaacgttgatcttcacatgatacttgtcaaatgtagaaaattttgtctggatttggaaacaaaaatgtgagcatgaagcttcggtaaaataaactctcttgaaaaacactaatactctacaattatttttccatcaaaataaaatagtgccaagtacatagcttcttccaagtaacaaatctttaaaaccaaagtgaaattttgaaaccactccttcaaatagcatccgtccggtagacagatggcatgttttatttcatttcccgtttctacttggtggagttcatggggtattttgagaatcaatgggtaattaagaattgggtgccaatttaggtatttgatttggaaattgagtctttgaaaaccatcaattccaaatatagcgcaagccctccttattatgctatcccagaaactggtaataagaacactctaaaaatatttagaaatgcaggagccagattttctgggctgcaggtggaggacacacagctgccaggaaatggaagacacctgctatgtccctgagcccccctttggcgggtagtggatggaggacaataaggtctgctgtagtattaatctgggtactaaatagtaataaataaatgtgatttaagagcattgttgggagacctttctgaaagagcatgcacagtagtccttggtagtaaggaatcaaggctggtagccctaagccatttttgttaaatgtaaagagtgctgaaaaagtttcacacctgcaactaccagtcagtagcaccttaggagacattacttcatcagacacgattaactccttgttctagagagttcagcagaagtctatagaaatttacagtctatgtgacattgtgctaggctgacaggcatcaacctgagactgaggtgtgaaaaaagatcacttgaaaatcttattaaaaggcagatctctgaggctcagcttcacatattctgatttacaaaaattgtagaggaatcaggaacctgcactttatcaagcattccaggggtacttttggtacaagtggtctgtaggcaacacttggggaaaccaataatgattaatatcatgcttccattaaggaaagttaattttagggaaaaaagagtatttgaaaacctgagtaaagaaggatctggcaggggtttctggctcaagtaagaaagcctcaaagaacagggagtgataggtaagtccagattgcaagatattccagaaagaaggggagaaccaaagggaggagaggtgagcagttgctaggaacaaacctcagaattacaaaacttttcctaagatctattctggggaggagaacagtttgagaagtaaaagaccataaggaaatatcggatcatccaacattgaccaaatgttactaccagtcagcattgcaccaggtgctttagaaatatcaccatcactaataggtagctgcagcctataggttaggtgcgtggactctaggggcagtggttgctcacgtat

SEQ ID NO: 1033 - DNA, 2449 bp, Homo Sapiens
taattgtggctattaaaccctgcctttgcaatgcaaaagtatagataatatgtaaatgaacaagtgtggctgtgtctccataaaacttcatttacaaaaacaggtggggggctagattgtccctcttctattgcacataaactgaaaaacaagaggtaaaaccagagggactctagggtggcttccaactttgtctttttctaattgtgctagagaaagagagaatataagttatacctgcttctttggctgctaattctcttgccaaccttatcttcatatataaaaggtgagtattaagtctacttggtagtgttgacggggggattaagtgaaataatgtaaaaatctgggacgatgtcagacttgttcaaagatattcacacttcccctgctctctgttatattttcccatttgttttcagaatttagctttaaggtttgggaatccaaatactgttttcaatcaagcagccaaggcttcagatgacaagcttgtgtgtgtttggaaaacgtggcctcatgatgtgcacacctaggactggtgcagctgtcatactgccatttcttagtgtagggtgctggggtttgaattttgataatccctgtgggacacctcagaaggactaggctttatctccaaaggggtcacagtgagtagagttttggctttatctccaaaggggtcacagtgagtagagtttaggatgccatggggttgcagtccagaatcaccaggcacctagtcccatttcttttttaagaagacatgctgcttcttgtaaacattacactccagcctcccggcataatcccaaataatgtcatttctgggaaaagttgataagtggtgagaatttaagccttttcatctgttgggaataaaagtgggtagacatgcagaagttttcttctaccttacatagttgcacctcctcggcattcactttcctttcactttctggaattgagctggccagagatgaggatcggtatgctgcttccttcagccctgccctgtgtggcgtttgtcttgcaactttcccatgcttgtttcaacaggaaaaaaagcaaagagattgacatatagctaccccgaggctagattgtcaccgaaatagatttctccaaataaaaataagggccgtttttgcttgcaaggccttgcaatgaaacagagttaataaaaactgcatgggaaactcacattgcagctataaaaatattaaaaaatagaattcttagctaaagtcagcagtgattgttggctcgaggtagaaattagggagtaaaacattctgaaacactcattgaaagtgaagagagggaagaattattaccctttatccatttggttaacccttcagaagtaaagctagagtcacacttgcttagcaagtgattaagtactgggtttttaagcgtaggacagaccattttctcctgtggctaacctgtaacaaacagaaaatagggccacttaaaaattagcacaaacatatataagaaacaaagctgctccaacaggaaaacttggtaagatcattgacgaaaacgtctacagcttcattcgttcttctccttcagcctctgtccctgtgtgtgtatatcagatgtctctgaggttaaagcttgtgtgtcctcctgggctggagtacagggacacccttcatcactctccagtccccagtgcccagtgtcatcatctggaatatcttctggaaccctggagggatggtttgtttctacagctccccactagcaggggtctttcctctaagaatggtgcttccaggatctctccaggctcagtttcaggcgccactagatcatcagggaatggtgattgattatctgagaaatgtatctatttgcattcaggattcaccaagtcactattctaatgggaactcactaattggcttcactaattcccacttagaactacaagcattaaaagtcacagtatctaagacaagtgagcttttagctcctggttgcaataggggaatttataagaatatttagaagtgatccaggttcctttctttccctctccttaaagcacataaactctggtcattttcacaggtttttgctaattaataccaccactgtggaaatgggggctgttctacaaacaagctgcaacaaatgggatttttattgctggtggaaaagtctggggaataattagcagatctatggagatcccttgactccgggcatctgcatggtaatggccaaccctggagatcactcagggaaatggggtcggactttccaccttagggcacatttatattgtcagttacagccttcaaactgcagtgggacaaatgtgggaaaatattttgtgaaatactagacaaatgaacctggtgttgaccaatctcaactaggaaaactggctctgctttgctaagtgctgtacagcagccaagactcg

SEQ ID NO: 1034 - DNA, 2482 bp, Homo Sapiens
cacttattatttttcataaatctatggattggctggctcggaagttctgctgatctggtctgagtttggttgattcagcttggcttgatttattaacttctggtctgcttggacaattcgctcttctccatgttgtttctcaaccttcagcagactagtctggcttcttcgcgtggtggagtctgagatctcaaagagtaagcaaaagcctgcaaggtctcttgaggcctaggcttggaactggctctgtcacttctgctacatttcatgtgccagttcaagacacatggccaaacctaggtccaaggaatggaaaataaacaccaccacttgatggaagaaactgctaaatcacattgtatggaagagaaataattggaggaaattttgcaatcaatttacaacagagtagcctgattgctctaataaacaaatctcaaatcttaggattaaacatcataatgtttatttcttgttcacagtccaatcttgtatcacagtccaatagaggtgggcaggggagtgagagagattgctccacacagccattcaggtaccaagtttccttctgtctagttgctgtgttatccaaagccatagagcctttgattgggtcctgcgtttccatccactagatgagagaagagagcaaatatgtagaagaaatatctgtccttaattgcctcaacctggaggtgtcatacatatcacttctgcccctttccagggctagaacttggtcacatgattgaatagaactgcaagggaagctgggaaatgtggtccagctgttaggagaaagaggaaaatggcttattgagcacctagctagactctgctgcagtcacaggctctgtgactgaggaactcattcccaaagaaagtgcactgggacacatttcaaaagttgatgcatgatagtatggggcagacaaaggttaaaaagacaaggtcatgattaagtaggggagaaacacacagatacctatgtaaatacctagggtatgagcaagaatctggggaaagacttggagttaggaggaggtgggtgcttggcaggcggtgagactttaataggcagaggtagaagtgaagggcaaagggaaactttgggccacacggggaaactagatttgtttgcttgtttaacactgtggcctccagtgggacctaaagtcgatgccttaatgtaggacggctatgttagtgctgatcagaataatgtaccccttagggctacattaaaaaactatgctcagtgcctcatttgcaccttcaaaatatgcacatacatgtgtgggccagaaaaggctgcgctcaggacatgcattcttatgtgaaccgtaggtaattgcacaagcaaacaggaagttgcgtaggtatgcaggcagctgcctgttgagaggtgcgtgtgggcatgggcaggcgtgggccttgtctgtttgagtacaattttaaaggcttctcctgatggaagggagggcaagcaagcctctgggcacctgcttccctaactgctgctgtcgtttgtccttctcaaggtttcctttctgggcagggccatgtcagggagtatttgtggctgtaagaaaaaggtgccgtttcaaggtctttgctaactgccgagctggtgaataaacgttttgaaattctctttgctgagaattccatctcctggttctcttcctgattctatggcccagtttccccagtttattccctgtcttcttcttctgtttgttcctcagatgttttcccgtgaacctgtccctaatcactttctgaccttctgaaccagagctatccaacagaactatctgcaaaggtacctgcactgttccttgttgtagccactagccacatatagtcattgagcacttgacatggggcttatgggcctgagaaactgacttttaaattttatttaagttaaatataaatagacacatgtggctagtggcttctctattggacagcatagctctagaacagtctttatgggtaataatttctcccttacagtctgccccattattcccagtctgtatctccttaccctacctgctctcctgaaccatgtttacaaatactccaatttgattattctgtggtccccttaatgcaatgtggctaaggttgaactctttgtctctacccacaaaactcatttcttcttgaccttcctcctgtcactttatccttggtcctcccttattagggaacagttctgatcagaccatgttactcatatatattatcatcaagataggtccaggttttgtggatctgagtcaatttgggatctctacttaaaaaaaaaattacagagtacaaatgcaaaattagatttagagccttggagcatcctcggcaagtgaagatgtctgtgaagcttaagctttatttgctttactgcaaattggcctcagtttatcattggaatattctacagtttctgggtttgaatctcagtctgaccact

SEQ ID NO: 1035 - DNA, 2492 bp, Homo Sapiens
ggtcactgatatggtttggctttgtccccacccaaatcgcaccttgaattataataatccccgtgtcaaaggcggggccaggtggagaatcattgactcatgggggcagttttccccatgctgttcttgcggtagtgaataagtctcatgagatctgatggttttaaaaaggggagttcccctgcacaagctctctctcttgcctgccaccatgtaagatgggacttgcttctcctttgccttctgccatgattgtgaggcctccccagccatgtggaactgtgagttcattaagcctctttcctttataaattgcccaatctcaggtatatcttgattagcagcttgagaacagaccaatacagtcacctaaattaattttgtaatgactagaggtacaaatacagatgatgatgatggtgatgaagacaacagatttactctagaataatgagaaactgtggaaagcctgtttgagtcgatctcaaaacagacatcagtagacaacaccatagatgaaatcaaattgtagtctcaggaaaaacattatcttcaaatccagggccaccaatcaccctggaaccatcccatagctgtctaaacgcagtttgcatgtggtcgttcatctgatggcttcatttccttttgacccttcttttattctaattttgctgaagagattaaatgatcgcctgttaaaaaggtgtataaagtggaatcttgtagaagaaataaaaataaatccctttgtgtatttgaatttactgacatacccagtgcctgactccactccccagtgtctgtgattttgggtaagatttcctgcttagggatctggagctagtcaggtaacgaccgctgcgtgcatttagcatgtacgccaggtacagctgcaaggtttccaattttcccgtttgcctgccagccatcaccccagactcatctgaaagccagcaaggagacagtggctgcaaagcggctttttgtcctcaaagtttaggctccttgaggccccagaatgacaaaatggagaggcagggccaggggaagagggcctggtgagacccgccctggctcccgccggccttctgccaatgcccgcagatggtgggggcccatggccgggacgcccgctcaggccctggcagcctcatgtgccccagcacctccttaaaagctgattatccggcttgtctcctttgtgagccggctcattaccatttcattgtgtggtggcaattcttacccgcaccatgaatattgactttatgcttgcttttctacctgaattacaggcgggcaggccggcggctcgcattgcttgctcagctccagcctccctggcagccacttgaatagtctcaaagaaaagctgtttgcttgagcatttagggataacagagagcggtcacaggccgctacagtgatttattaaaagacaggaaaatgagagaaaagacccttacttcttgcaccagctgcctgctctcttgcttccttttattctctgtctctctcctcttttctcttttctctttattcctccctcccttccatcctttccttttttccctttctctgtcttcctccctccctgtgcctccctctctgcctttctttctgtctctttctctgcctcctttttgttcacatttttaaaatgagagagggaaaaagacggctgtgcttttaaaatttgtataaatttatgggatacaaataccattttactacatggatatattgcatagtagtgaagcgtgagctttttgtgtgttcgtcgcccaaatgctgtgttaagcagatgcttgagggacgttgggcttgtttgctacatctaatgacacatcccattaaaggtagatagaacccagggttagcctttgaaggatatgagaggagattgagtacttgcaggtgtgtgtgtgcatttagtgtacacacacacacacacacacacacactgcaaatggtgccagctgttctggaaaaaggaagctctcttctcagaaaaataaggcagggtgtcctctcctctcaatctccttctccccagacatactccagcagtccatgaccttctgagttcctaccctgaacacagtgtctgccatctgaagaggccacccctgcactgtccagcctgggcttctctcaagggaatgatgcatggagagtcttccctccttggtgtgctggttcttccagtcccaggttcagccccatcaccaccccgatggctcctccctacatgcaggaaatctgtgggaagtaaacatggctggagtgtgtgcagaccttcaaagtgaaggctacatcttggtgacaatttctgttcaaccaactgacctattggagcactaagcaagctgggctaggaaggacacgggagggtgggctgggtgaccctggcatgctggccgcttggtgtgagcaattgcatgggggcagctcttccaaactgagccgcaaggactttgtttccagacctt

SEQ ID NO: 1036 - DNA, 2491 bp, Homo Sapiens
gaaaaaataaaaaaagcagttctaaacaaatgaaacgaatgattgcaactaaaactttctcagccatatccttttatgactctcatgtgttgagaggattttaagcaaaaatagagacgggccgcctgttcactccaatcactaaaagccccttacaagtgagttgaactttgtctaaaaggatattagattctgttacctaattactgcttgtcttttagagtcaccatgaggaagtccattttcaagaacttgggaggtttcagttgcagtggattataagaggcactggaacagctgatatactgaggtgccattaagaattatatcaccaccgaagcataatcttgctgtagacatgattgctttgggcgtaggctcccatgtcagtgccaaaaacgctaagacttggagaaaggagaggagaaagtagagctacttcctctgtatgctttgctgcttggaaaggagacagaaaaacagcaggaaatgctcacttcttctcttgggatctttcagggacctcccacctgaacaggacgattgaactttgctttggtaagggatgacttgctggaagatgaaaagccttgtggtggaacatgagtggagctcttcacagctccccaggcattgctggtgcagcacggggcagagggtgtggtacaggtgaggaggtgggtgtggctccagctcacggccgacagctttcctgttccctgctagggcagctctggcatgagcagttgggaatcagactctgggcaaagcaggagcaaagagcctttctgagtttcctcgactgacttcaatggacctgtttctagaggggcatgaaggtggctgtgacttcataagcagaatggaagtgatttgatctacaccgggcctgggaaaattggcttaggtgtggcaaaggtacagagtgtgaaacaggtggggaaaataaattcaagatcctgaacttttccatggcccccaaaggggaagccatgggtacagtgaatggaggggctgccttcagctcacttggcgctgtggtgaactgtctcagggcttggcacattgccaccattccaagacagatgggaaataaacaccattagtatgtcgataagtgtttgttttccttcagcattagggctaagaaaaataaagtggggagggtatcaagccctggagtaagcctttaaaaggtttccccttttgaatctcttacggttgtctatttataacagttacaatcacaacagagaggaaaagacttcaatcacccctgggacacattttgtcaaaattacatttaagcactttttatttgtaagcgagaagcattatcttttattatgcctttaaagcagcgtggggaagttgtgtgcataaaccaaggtgttgctgtggcctgttgtcttttgtgaacttctggaaaggatcaccaagaaggatgctctgataactgtctgccaggcaatttgcataagaggaaagaggcctttctgaagatcattaaaaatgattcattactattggtcatacacatacatgttgttttattacttaaaagcataaatcatacattggcaagtaattgtgtttatcagactattttaggccctgggaggagtagagaggtacaaagtgtggtgattattcccaaggaaagtgcattttaattagggagacaagaacaattacacgtgcagtagttaaaagctatacaaaagcctatgattaagtggtgagttgtgaataacaggctacccatgctgtgattctcttagcgatgacacaagcgacatcttggaagaggcaaaacttgagacaggtcttcaaggattggtgccatctggacaggttgaagaggagtaggagggctttcggatgtggagaatggcatgcacaaaagcacggaggtgagaatgcacatatgtgtctgggacttctaaaacagggcagcctgattggattggagcctttgggcaatgatgagtgagcaataaaatggaagagaacagggtcagaaggggcagacaggagttacccatcctcataacatgcattcacttctcaactccattacaaacccacaccaaatttttctgtgttgactatttgagtattgtaatttaaaaagagtaatccgtgtacagagccctgtactgggttacagagtctgtcttagttgagttttccccagaagcagacacagatagaaagagtccagagcaagtagtttactagggaggtcattctaggaaactttagcagaggggcaggaaagtgagacaggaagggaaaggaaggcagtcagggaagtgctattaagataccaacatggacaaatggagcaaaatcccagtggtgaactctagaaatcagtgtataaaatgtgcctcagagtgaactcatctgggaggtgaggaagttggggtatttatccaccagttgccatcagtcactgggtgagggctgcttttgagggcattaactt

SEQ ID NO: 1037 - DNA, 2463 bp, Homo Sapiens
gaaggcatccatgcttccacccaagtcactcagaggaaagaagctgttgtgtgttacattttcgggtagagaagagagcacttaatgaagttttcataagtgaattttcatgccacatgcattctctgtgcataatcctttggagtaatgttaagcatatactggcacccacagtaatattttaatgtcttcagcttgcttaattaattttctttcaacatatgttcatataacattaaaaatgttccactaagccagacaccaggatattgctgaatatgcagatacttattacacatagatggacttaaacctattttgagcccatctacctacccatcagtagtgtttgtggtcttgtgatactatctgtgacccaattttaagtgtgatctcatttatatgtggaaactaaataagttcatctcatagaagcagagagtagtaaaggtagtagaggctggggaggagaggaagagaaggggcaagcggagatattgatcaaagggtacaaagtttctgttagactggaggaataagttgtagtgatggatagcactgcatggagaccacagttaataacaattgtatcgcatatttcaaaactgctaaaagaatagatttccaatgtcctcaccacaaaaaagtatgttggtgaggtgatggatatgttaattagctttaatgaatctttctataatgtatacatagttcaaaacatcacattgtacccaatagatataaagaattattatttgtaaattaaaaattaattaataaaaaattagaaagttgctacttctcaaatatactcacgggttaactttttcatgtggaaaagcaatgtcggtttcatcacaaacatccttctagttggtcaagtagattatttaacttgaattaatatactttttttccatgaggctaataaagacattttaattaaaactaaaaaaaaactccagttttatttttcttttttgttttctgatttagtctttgtaggtaagaagttgttcattattgacagagacaaaacattctaatgagtgatggaatttttactctccatctaaatatcacgttaatatctaacacaaaacattattgtcctgtttcatatagaaactgcaagtttattttgtttgaaacatggggaaataaactcccgttttgaccttctctttgttgttctagctgtgtgtcattgacactggcgtgacttgccatgggaaggtgtaatgaggcaagactgggattgtaacaattattaacctacaaatacgctatggcaaagtcaaggcaagccagagtgacacttctaaatatctcaggaaatagtactcatgtttgaattactcattttattagttcgttttgatgaatatgggagaaattaataactttttaatataaagagtaacctaatgtcattaattgggcatttcacatgggctgatagattgcccctccccacccccgcccctttggtggtaatttattgagctgggaaagcttgagttcggtgtagcatctggttttcagtgatatcctgctggtcttatccaattttccagctgggagcatgaggcacagggaggtcgaatgacttgcctaaaggtcacctggtagctcaactgggattataactcaaaatctttctgattttcccatcctttgctcactggaccacaaaactcccttgatcctgtcttctcaagcttgcctgagcaggaagcaaatgtttaggcctagaaaaaagaatcccaaattaagtactggccaaaatcatctttaaaaatgtgtgaaatttccattggtataactcttaagaaatacctcattttcattctaacacctgagaatatgtgtgaccatgggagtgttgtccctttccaaggggtcaccatgggaaagtccatacctatcactgtttggatgctgctttggccaaaacattttaggaactccaaaatttgatgcttgtggtagaatacaaccacttgaatatataatggaccttgctcatattatactcagaaacagggcacttgactccaccaagtgctataaaccatctggctcatcctgtagtagaactcttaggcttgctcctccctcagcctgcaaattttccccgggatttcctcatggctggcaacttttcatcattcaggtcttagcagaaataataccttctcagagtgagacttgctctaacctcctgatgtaatggctttctttgtctgatggccccatttttttcttcattacatttatcagcatttacaattatcattgatttcatcttaaaaattcggtatgtcctaactctgagcgtaggagtctgatctgtcttgttttccagcatatcctagacaatgtttgatatataaaagaagctcaataaacactttttgaaagaatggatagccattcctggtaaaagaaggtctctcttct

SEQ ID NO: 1038 - DNA, 2485 bp, Homo Sapiens
acagcccaaagtttaagccataaggagtgtatttgagaattcttagttggcttcacagtagtttttgaggtctttttagcatatagccactaatgaagctctttaatggcctatggctacatcatgtctttgtcacactttgtattcctgggactctactctgaacatgtgtcagcagcaaacaattctcttgttctacccattactaaagttaggaaataacttttagggatgaccttcaagacaataaccacttgttggaagtggaagtcatgagcttgtccagtggtacagaacatttttctctcattgagagttttgaaaatctgttgcctttatgtacaatagagattataggtacaatagagagaagaatggcatgcatctcaagcttcaatctcaagaatttatctggcattagtgagcagtacaatcttatcttctctttaattttgtcttttttgaactaacttctctcattgtttgataaattatatggtttgattgtgtatgtcacatgaaaatatatttgaaagatatttagattcctctttggaattaagtaaaagaagcatttggctataaacatgtggtaactgggtctgaggtcatgtacatacattcttttctagttgcagccaaaatcaggtttgggggtttctgatgagctcttttgtggttattgttattaaagaaaaatggatctttctgctgcatgcttagaaaaccagatattatcaccacttgattatttacttactggtacagcttgtttcacttattaaagaaaagacaaggttgaaattggatctattcaatgcatgttcgtggctttatgtgtctgtagataataagcagccttgggtgtttgttcagggttgactttctaggctataattggcatcattttgatttttctttggatgagcccacatcgttatggagtctgtagctttaaataagaaaacacctacaaaaatgagaggggcaaaatgttccctttggaagcagtaggggagggggcaggaaggggaggcttttgttcactcatggaaaatggacgtgtgtctcatggtagccgcagtttaagtaaacataaactctgaaccagagatcatacccgccatttcctcagcactagcaataccaaaccaaaatatagttttatttggctaaccccaaagtaggatgtgggtgccagccttgaaaaccacatgatcgggtttccagcagacaccaccagggctatgcttttgtcttaagcaagaaagtcacaaaggcaatactccttgtagtaccatcattatgtttagcaaacagatgcaaccataacaacagttaacttcagagacaacagttcactacagaaaaaggtcaagagggtcttttactcttcatgcgtagaatctgagctatcccatattacaactctattgagagaagaggcattaaaagagagacaatgagaacctagggcataggctcaggtagtggggctgggtggggaaagaatcctcccatcttcttatgagttctagagtcggccaatctggaatccatgtttagaagcatcaccttgacttctgtggaaagtcgttttttccaaacagtaatccagcaatgagcaaagcattaaattgtgattttgacatgtcctcattttgtcttttctcttataaagaagattcttcagggcccagggtcattccagtcatcccaagttcggtaagcatccagtcagggcttgctgtttcagaggttttcatggtgtggtttcatttatttatttaccatgaagctgttgtttttctcccttctctggagccagggagggaggggcagatgatagagttgggtgccctgagttaatgactagccctatattcacaagctcatttacttttgtcctcacctggcgcctcaatgctgccaatgagtgggaattaattttattgagggccactcagttccttaaaagaaaactgctcacttggctggaaatgctttgacagaaggtagagcagccggtcacatttgaacactgtgtcttctagatttgggggcagagggggagtggcagattcagagggagaggggaccaagcagtcatttcacatgagctattatggggtggccggaatcccagcagagtccatcaacagactctcgtgctaaagacacagcctgttgtctctttatctgccactccccactaaatctgtgcatgaccccccagcacccttctcaacaatcagctgcccgtaagaaggtaatcatcttatggtgaattggagaagaagaaaagacactctaggaaaatgttatgataatagaaaactcttcagtgttgtaaccatctggtgtgctacggtgacaaagaagccgataattgagtgcccaataacttcttttggcctgagataatgggcactcaccctgatttgtgttcttcacaagagtaattcgccatcatttcacaccacat

SEQ ID NO: 1039 - DNA, 2485 bp, Homo Sapiens
tgaagtccctaatctcccctaaagcacattcttgtggagaaggacagactacaaagaagtgaacacataaacaagatataatatagcacaaacatttaggaaaacaaaaatgcagtaatgtgataaatcttagtaggctattatatacactttatgtatatatataatacaggcttatatatataatataggcatatatatattctctattattaacttaatttagtgacaaaccattaagcttcacctttccattagatgctttttctgcctaaaggactctacacttagatggctgcatgaagtatctgggtctcagttaaatgtcagttcttcattgaagccttccctgatgagccagtttataatagcctactaagatctatcacattactggattttagcttttctgaatatttttgctatattatagtgtctgtttatttatgtgttcacttctttgtcatctgtccttctccaaaagaatgtgctagggacttcatgcttctcattcattgatgtatccccagaatgaccagtgcctggcacatggtaatttcagttacaatttcttcaaccaatggttcattcttgcttctcatggatacaacatcattttatctgaaaaaaataagtacccccagtccatgactatttttgagcaaatgaggatagtaacagtataagatttttagtggcattttcaatgaaagaattatacaacaatccctgattactctttgtctttatgtgtccataattttactgctaacactaagagagtgtatcttgctgttatcaactctggccacatcttcacaagtacatatagcaggtcactattttgttttacaaacagaagttgattaagttgtccattctgtaggacccacaacaaaccacagcccaatatagcagcagaatgtaaggatttagaaggcctaaaatctacaagctcaggaagacacccaattaacagaaattaaagttcaaatctgactcatccacctactggaaattctgggctgtcaaacaatatccaagcttattttgcaatcagattaaagctctgggccttgtgggggccggagattggaattctattttaaaaagaaacgtgtaaggcactctgcttcccatcaagaagtgtaatgagtaggtttcacctatgatccccagtcccaaatgattgaactggcattagtgccaaaaaaattgaaaatgtcttaacatgcattaatcgcttaatggatgtgttgtctgcctgaaaagggcggggtggtatttaggttgcttaatgactttacattttcccatggcaaaatacttgtgatttgattatgctgtaattaaagagttacataaacaatatctttggaaaggaacaaacgggcttccttgaaagagggattttggtcagctccagctggtatctcaggccccttcatgaggagaaaactctcacccccaggtaaactcctctctctgcctcttagaagttgcccttagttttatgcctgcctgtgtgtgtgttgtgagtgtagatcatgggagatggggagtgggcagagggaggattttttaaaaaataaatgacatctttaatagacaattttaaaacaggttgaaatacaagtaataaagacaagcactttaaatttagaaaaggcttgggatcttgaagccaaaaagcctagtaatgagaaaccccaagggcagagtgggatctgtcttgtaaaaccagtcgatcaaatgtttattactgtataaggaagaacctttgaactcatgtggtttgctctcatgtgtcccagaaactatttcctccaggagcacagattctaagtttcttaaccataggtttctcgcaacttttggcagtcaagagaggtctttagcagggaaggtgggcattccaccttccaaagaaagcacaccagtcaggataatttagaaagaaacccagaggtttggcctcaggtttacattgaatctttatctttgggtattaggagcgcttttcttttcaagtccctactgcaatccctgcttattatacagttacaagaaaggtgggaaccaatgagaataaatgtcaaattatttaactatagttaactttcacagtacattttcttttaatttcctagatttcaatctttttcatgttgtaatctttgctacatttggcaatgagtcattcatcatgttcactgatccaagtttcccaccaataatttacaacctattcttaaataaaaataaacatcaactgcaactttatttttctttagacattttcacctcctcagctttcaaatattagaaactaaatcctatgagcctttcatttactaaatagcttaagccagcaaactgagctgaaatcaacttgcttttccattagacatattggcaatttttctaaagctggaatgagagaagaggtctggggtttggggagtttgccttagaggctgtggta

SEQ ID NO: 1040 - DNA, 2432 bp, Homo Sapiens
tcaaagtggaagagtccttagggagaagctcttggaactgccctcagtgaaaccaacacaaacatgtatgatgtttgattgcctgagtcctcatgtgaacacatccaaacatatcacaacacacacttaacacacaggccactcatatacacacaaaatatacaccacatcccccacatcacacacccctgtcatccactgcccctcccatatcaaacatctccggtaagcatgtcaatgggctcattcactctgtagatgaatgagggttaagtttgtaatgggctttctgtgcccccagaaaatttgtaatttaactgggggacacacattgcctgatgaactttgaaatttgaggtgtcatgtcccagtctccttccaagtccccccaaagctgattatttaggcactgacataccctgtccacctacaaagccactcttgagtaagggaggaatcaaggtggaagaaagccctcaaaacccctttgcccaggggaaaattttgtttaaggcactgactattaactcagacctcagtaaaagccctaaggggacagtgattcttctgcccaagtgcaacacgtgctgtcagtgcctacccacatcccaagtccttatctgtcagtgaacagaagctcaactttcaaagcccaggatctgcatttcttggcctgagggctttctctagactaagaaggcttctttgcctgcttctgtaccaagctagtagttgacaccaccaacaagcaactctcttcctgtgactgacagcgaggcatgctctgcacgggtcttctagaattccccatcgggattgagccccagttgtctacagtggtgactggcttgagcaaatactcttcattgactgcattcttttctctggctcactttcccatacccctaccaatgctttctgggattacctctcagataatctatctgcactgaaattcttactcggggtcagcctctatagaacccctactaagacaccaggaaagggggaagtcctctgcaagcatacgtgacaaaagaaagacaaagttcagtttgtcaaaagggaccagagtcacaaatatgtttacaaaaactctgtcctgttacctatacttgatttacaatgaccacttgggaaatttgcctctttgctggggtagggacctgactgaccatgtaaaggggaaacagatgcactcagcctgcggcctcacacatctgctggatgagcaacgactataatttgccaggaggagacaataaaaaaattcacataaaactttttattgtgtaagtgacactggttattgtagtcggcaatcagaaagttaccccgaggacagaacttttctgcctattaatgtagagaaaatggctagcctgcttcccacgtctcagaatataacactggagatgctaggattcattccagaggagttatgataccagcaaaatacaaaaaggatgtagcaaatgtgtgttacagtaaagatcataaaataaaatccaagcatttcagagctcttggggcaaattgaatccatgggaattgaaaaataaatggcttgaaaaaaagtatgctctttttacagagaacaggaaaataatatatttctcctttttatgaagagtaagctcttctggccccaaaactgtaactgagatatttcctaacatataaaaacattattttataaggactcacccacagttttggtatttgtaatcaggttttagtctaaaggtttccttttcagcgtggacagatgccaacacaggaatacaatttgtaaataatgagagtaatcagtatcctcctctatttgcccccatcatccaacctcccgtttgatactgacgctccctcctgcagattcagcctctgtgggagcagccagggtgccagcgtcttcacctactccataccctccattccaacacagctctagaaggctctgcattcaccgcagggtgtgggagagcttgggatgatgaaggggtcagttttacaacattagcatcatcaataaaccttaaatatttgaggaaaggggtctattctgaggtatcttttagcccaacccaagcgctataacaaagactagcatttgcatctgcttttataccccaagtcttgatatttaacaaaattaaaaaaaaaatagtgctcatatcacaacctaatgcatgttagtggaggggcaaagggacctagtttatgcagtcacacagggatctaggctgcccctgtatattggttctacaatgtcctaggacataggtcagcaagcattatgtttaaagagccagagagtaaatattttcagatttgtgaggcatatagtctctgtttcaactactgccactatagtgtgaaagcctccataaataatacatgaacaaacggccatagctgcatagcaataaaac

SEQ ID NO: 1041 - DNA, 2411 bp, Homo Sapiens
agagttcttccagaggtagcacttgaataatcatgtcatcaaatgtcatcgtggtagcagagaataagcatgctaacttttcccagtcctccagaaaaaggatacttttgtctttccttttccaatttcttttacccatttgggagagtatgccacaaatgtggtttttaaatatatgaaccgatgcttttatcctaatagttaagaacatggcctttagaatcacacagagctgaattcacatctagcttcaccacttactaggcatgaccgttggcaagttaacttcttgggattcagccctcttttccgtaacatgagggtaacgtagtcacaatatttcaaggaagttttggggactaaatgagaaaacgtgagcttgaaaaagtggggcatattttttatgttctctgtggtctcttccaattctgtaactctgtaataggattcaacaaacatttcttgtggacttgtaatgtggccttatcttgcatgatcctcagagtaaccctatggagttaaaccatcccaaaccttagcaacttgaaacaacaaacttctatcatttttcaaaattctgcagatgagttggttggttcttctcatctgagctggcttggccaggctctctcatgcatctgtgatgaaacggaggaacagctgttggctggctgttctaggatggccacaatcacacatctggtagttggatggctatcagtgctgcaggatgactagcaggtgttctcctcctcccgcaggctagcctgggctggtggttcactttgtggtcacaagagagtgagaaaaagtgtgcaacaccccttgaagcctaagttcagaactgacacatgttcatttctgccacatttgattagtcaaagcaagtcccaggccagcccaggtatagcaggcgaggaactagactccaccccttgatgagaggagctgtaaagtcatgtgcaagcctaggaagactccgtggccattttagcagtcgattaggctactcagccagttttctggagccacacatgtgggctggccttcccaagtcttctccgcccaaaaagccagacagagtttgtttttccagcagggcgcatatcgcaggcctgggtgggttgtttgtttttgtgtttgttttgacttttagctatttccaggatgtttctttcatggaggagaacgactcagttctgtctgccatgtgtattaagatgagctacaagagagcattgctttcttgtaatgcaagaaatgcaatgtagtcagaggctctgaaatctggtggggacagcggcagcagagactgtgacagcctcgggacacaggaggccaccttggtcttcagtcttaggtgcctggagctaccagacagccaaagttgcacaaggcacaggcatgacctgccaggttgcccagccaggccagggatgacagggcacgttcacctcaccagctaatcagagacaatccccgcctgaggaatgagcggaactcccagccctcagatgacgctgggcttgagttttctctgctagcacatttggagatttcacaagagccataaaagtttgcaaagggccttggagtgcctcattcaatgaaatcacaccctcccttctggactgggttaaggaggggtcacacacacccgacagggtgcctccagatgggggtgtgtagaggatgggtccttatccagctccggtcacttctcaccccttccaaaaacccactgtgggccaggacaaggagaaacaagagatcgtgactggcagagatataggaaggaatgtcccaaaaagagcaaaaaacttgctctcatgtactttgctgactgagcctctgggaatggagccttctcctgaggaaataccacaacatggctcagaggcggaaggctccgagaagggtcctggcaagtaggggaaaatgtcccttcaacggcctctctgacctcaggcagagccccactcagtgacattcctgggtgagtgggcaaaatgagaaattcctcctacaattctctctgcccacagaaggtattaaatgaggtccggcaagaggccaggatcaggtaagtctagaggccagaaacctcagccaggcctacccagcactcaggaagagcagaggctcagcagcccctgagggaggcacagcttggctcttggaaaatggccctactgggcctcattctccaggtacttggtttttggctctagagacaatgctgagttcagttctcacccatgtgaaagttttcaaatccaaaagccagggagacgcctcacaccatacccagacagagggacaaggaataaaactcacccacttcctttctatgcgtttctccctgcaggctgcggttccaccgcttccaggcggctggatggggccgcccc

SEQ ID NO: 1042 - DNA, 2457 bp, Homo Sapiens
aatgccaaagggactccaacagtgattcacgtttggaaacagcccgcgggaatctgtgctgactcatcggaggacccagtggaacatggcagctccaaggcagagccagcctgaaaccctgtgaacatgctttaggacaaccagacggtcagagcgagatggggtcagggtgggggacaccctgagccaaggagccagtgacttccagaagagtgaggagaaaattcaaggctttcctcatgaaagggggcagagccgggacaacattcaaggaggccagggggatgttgagggggcctggctggagggcctggcaggtgcatggagagccccttcccagacaaagacctgggcccagtccctgagaagcactgaggcacccaccaggctggaagcagagcccttcccgcccccgccccggccacatccacagtttgctggcatttgctggcctccacctcaggcccagctgagtcaaggaattccaaggaacagccacctcttcccatgcccatcaaggcgaccttccatggtttccgtgggacgtttggtcacactgggctcagaaatctgcactctgtaaactcaccggtttctccgtgactggggtttccctttgtgcctcagtgttcctttgggaaatgttcaacctttttttggcctagttaaggagaaaggaatttttccagactcagtcagagatgttggctcagcttgattgggagggaagggtgattttaataaggccgggggtggtagtggggacaatgtgtgacccccccgggaagtgggaccgcacacggtaccggggtgggcagttctggctcctcctgacctggctgtccctccccagtgccatgagttttgagcctggttgccttggtgacccgttttcagtccttattcacctcctaaccatctcatgttctctcgagcctccttccatccccagcacagtccacacacaatgtaagtgctcaaaagtcgaactgtagcactgagttgaggggtggtcagccccggtgagccctggtgtctcatcatggtttccccatggctgtctccacccctcttccagaaaagctattgagaaatggaactctttgacatcacccctagctaaagttgctgaaaacagctcagaggagtgaattccacagagccctatgccccgcctagattcctggggcttcttgtctcatggagtctgcagagccgcgtccagacccctcatcctggaccgctacccggcatcggcctcctccacgtagtcttcttgctcccactgcaatctgactttctgccaaaccatttccctcctggcttcaaacttttgtcgggaaagagatgaaatcagcacttggagagctggaaagggaaaaacagctgcttttcacaaaatgggctagggagggggaagcggagcagcacagctggatcttggtgggaaagccagagtctggtgggaacgtacagctcacagcaggagagacaaacacacaaacctagaggggcccagcggcagcagctcaggggcttgcttgccaatggcaccttgtgccgtattcttcagatacagtcacatctcatatccacattaaccatcctagggctgtagagattttctccattttagagaggtaggcacaaaaaaaaaaaaaagatttctctttccccttagttctcctataagaataattatagtgcgtgtgcttgggacaaatagagagtggtggggcctgtggcatcaaggccgccaggtaaaattgctcaggttgggcggactctgtggcatcttgcaactgtggccgtgtggctatgtgggcctctgataacaactatgatttttcaagaggagccagggatctggatttttatttaaaaattacctgagatttaaacattggcaactaattcagaagctttacggtattgagcagtcagtagtacactgtgggccaagcaaaacatgtctgtgggtagagttggggctgagggctggagtttgagtcctcctttatgggtgagaactgacacatgtaccccagccaggagcaggcattgtcagcactctacccatcccccaaatcccttcctcccttttttgtttccgtgacccctccagctccgaagggctttcacttcctgcagtatgcacctgacttacctcatggtataacctgtttcttaccattccacttttcacctgccttcctcaatgataactctaacataatagtacataatagttgttttttgtttggttggttttttgttttttttgttttttttttgagacagagtctcactgtcgcccagcctggagtgcagtggtacgatctcagcttgctgcaacctccacctcccgggttcaagcaattctcctgcctcagcctcccaagtaactgggactaaggtgcccaccactacacccagctaattttttgtatttttagt

SEQ ID NO: 1043 - DNA, 2446 bp, Homo Sapiens
catatgtgtggagagactgtgaactgtgaactacacttacgtaaccctgaactcgagtcttgctcacaagacccagctcatgttccctgcgctgcgaagcttcccaggaatggtccgtggttgttctgtctactgttgcatttgacacagggctctgccaaggtattcaccacatctgcttgtatatccatctccccactagactctgggcaagcctccaactttcaaattattattatttttttgagacagtgacttgctctgttgcccaggctggagtgcaacactggtgccaacatggctcactgcagcctcgaactcctggactctagtgatcctcccacctcagcctcttatgtagctgggactgtaggcatgtgctactatgcctggctgattttaacagtttttgtagagacaggggtcttgcaattttgcctaggctggtctcgaacttttgacctcaagtgatccacccaactcagccttccaaagtgctgagattacatgcatgagccaccgtgcccggcctaaacctcccattttatgtttcctctgcccctggtctaactcagtgcctggtatgtggcagacacacaggtcagtgttacaaatgaccataccctcacactcgctgttccaaatgatggcttcttactaagaacctgagaatttctgcctgcgggttttgtctgggtgcggatcaggccaaagttccatggagttaacaccctggggcaacacttaagcaatgaaaaccagcagttagtggatgaatagcccagcacgggacaaccctggggcaggttctgcacagtcacctggccagacccagcagcactgagccctggctgtccacagcagtgactgctcataaccactctgccttctctttcagtctcacttcccctctaccatctcacgctttctgggtcaaagaaactactatcttggggtctgcttctgctggagctcaaaccaagacaactggctagttggctgattggctgtgtgaatgggcacgattagcagcaaagaaagaaatggaagcccgcgcgccggctgggccctggcacatgcgctgcccccacagtgtgtctagactacgtcggggcacgtgcacagccaacagatccgacacaggaaaaagcacttctcagctgtccccaccatcctgctatttgtcattccatccatctgctgtccccacgaaacgctcacccacgtcagctaaaatggtacactgggcttggaatcggctggggaaatgtcaggctgacagaacaggggggacaactgaaatagcaactgtgtggacggtggtggtgacacaaatctgcccctttgcgtagaaggcaggactcccagagctcaggaggcctcttgcggaggaattggtatgtggcgaaggctgcagggagggggccctgggactcaggggcagctagagcagggccctctgccctgagagctcttcaccccttcctcccagaatagaggagattgtccaaacatagaactcagtttgtttaaagtcattgtttatttttaaatgttcagttcgttttccaatcaatcttccacggtgcagttcaagaaaaatgtgtggattttcatgcctgaggtcagttgcaggatgtacctcgcagaacagcgtgtgcccctgcaagctggggattgagtgttttgttctgttttgttttctcagggtaaaggggtcattctaaaagcaggactgtttggatcttagaagattggatatttatttattatttaaatttttttcttttctttttttttttttttttgagatgaagtctcgctctgtcacccaggctggagtgcaatgggatgatctcagctcactgcaacctccgcctccccagttcaagcgattctcccgtctcagcctccccaaccagccgggattacaggcgtgcaccaccatgcctggctaatttttttgtatatttagtatagatggggtttcattttgttggccaggctggtctcgaacgtttgacctcaagtgatccactcacctcggcctcccaaagtgctaggattacaggcatgacccaccgtgccgggcctattttttttttaatttattttagagagaaggtctccctatgttgcccaggccgttctcatactcctgggctcaaatgatctgcccacgttggcctccaaaagtgctaagattacaggtgtgagccaccgcgcctggccatggatacttatacattctttctacaaatatttattgagtgcctgtgttgatctaggcactgtcttgagctccaggaagaaagcagtgagcaaattcaacaaaattccccacctcttcgagattacagacctgtgggagggctggacagtaaacaaatatatgtacaaatgtcaggagattttaagtgtgaagaaaagcacaggggccaggtgt

SEQ ID NO: 1044 - DNA, 2476 bp, Homo Sapiens
agatccttgctcactcactgatatgcacttctcagctatagattcatgcttttccacttgttgaaacgtccctaaatatcgccctcaatgtcctgtttgtgtcgctggctctctgccactcagctaataatgaaacagcctcagtgaacctgcagcagcagctgccttagcttcagtgcctacccacccctgcagctgaaccactttgaatattccttgatggtgcaagagacagtctcactattcccttcactggccttcctctgtgtccgtcacggttggcatgagctacctcctgtgcatgttatggcgagaagggatgaatgaggaaagacagggtggttttatacttgatcctgggacagtcactgggtaaggaagggtttggggttgctcccccaggcccccctcaatgcgtgaaggcctgagccaggtcagctggcagaggtgtgtgtatgtttaacttagaactgaatgttgaaggctttgtgacccaaagggaagaattattgggatctgatgccctagcaggggaaattccaagcccaaaaagctacagttagaattcagaactgtgttgttaccctgcctctgagttttcctctacgttcagctccccttttgtggatgatcgtgaagctgtttacatgttgtcctcttccgtgaactgatccctgtaaacagtgacaggattttatccaaatatttctgatttctaagggaaaaatagagcaatttcttcccagtgcccttctgttgaccttgcctgggggagaggccagcagagctaaggatgacctcacccccttccagcaggatttcctgggatgtacagaacctccttcttcagctgtccctctgtgatcagccacattcaatctataaacttccagtgcagatgatggggacatctaatattgggtctgttcacatttcagcaggaggtgaaacacacaaagtaatcattaggcttcctgaagtcccaaggaccttctacgtcagtggcagaggtgggaggtgggctggcgaggtggggcagtctaggaactgcgctggtggggacaggaaattgggctgaagggagatgtaaggccttggtgggaaataaatggcactgtgttgttgacggaaaaagatcttggcaggactgttgttgtgagtgttctgtggcttagaaaggaatttcctacaggctggactaaccattaaaaatgtctctaccttcaggagtccccggcgtgcagtggagcctcgctgggggaaatgacagcttggaccatgggcgcccgcggtctggacaagcgaggaagtttctttaaggtaaaaggaagccttgattgggatctcaactcgtcggcttgctgcctgagcctgggagctgcggtgctccatggagctgctgagggaagtctgctctctgagccagcaccggctaagggagcttgcccgagcccagctgctgattgttaccagggcttataacaggttgcggggtctgtgatttagtgctttcatacaggcacaggactcgggcacggagaggggccgtgctgtgcaagacggctgaggctgtctttatttgagagctgctcagtttgtcctttttcagctgcagggttttatggtggaagctgtactttgctttccagtgaatcaatgctgtcgtccatgtgttctctccttggcttgtttgtatgaatcactgaagggctccaaaacaaacaaacaaacaaacaaacaaacaaaaaacagcttcctggaccgcaccttagaatgatgaaatattattttctggtatattttatcaaacatccccaaaggcttcttatgataatgaggaagcatgattataactgtctaactcttctgtgttcatattgatgttaatgggactaaattaccttgctagcttaatgagataagattttaaatgggtgttttatgtactctgtgtgtgtgtatttaatgaagacttggtggtcgcttctgatttacacttgggaatcaattcccctcttgtggctttttgctttgtttcctttcattcaccctcgaattaaggcatcctcagtatagaaaattttgaaaatacagaattatgtttaaaaaggtagaaaaatggaggtaaaatatgcacttgaaatctgtcataggcagtgttccaacaccaggtcttgtcctcagaggaggaagacggaggagattttattaccgaggacaagtgactatgtttaacaattaaccaacctttatgggttggaagtatctattaacacttatttacatgtttcctgtttccaagagaccaaaactgatatattgtgtcaactgttgactctacaaaaaaaaaaaaaaaaaaaaaaaaccatcagaagaacctgctgataaagcaaagttcatgagatttactgaaataaggaagaacatcaccaggacacagtcttattcatgtctaagccaggggagattaagaggc

SEQ ID NO: 1045 - DNA, 2463 bp, Homo Sapiens
gtgatttgcttgtagaaacaattttgaaagccccttgaggaaaataaaaatcaagaagaacacttttctcccttttccatacaaattaaaacttaacagcatcaaattattgggaccagaaaccaagtaatgtataatgtggcttttgttgagttaaataagatgctatataatggagaagaatttgaaaatgcacaaaaaaatcaatctacattatcagaacctgcagtgaaattaaacttatgttaaataaaaccagtttgcaggtgcacaaactatgagggtcttgtatccacgtaacacaggtagttacaaaaacatgttattgtactgtgtaaagatgcatagtcatctcatttggttggctttgtaccttgtaccttttttagccttggcttttgttgaactagaaccctcagcacatactgtgttgtacttttgtaaatgattttttaaatggaattttgcacataatacattgtaatactgtatgataatcatgtgtgaaaataatttttgaaatatcctttggctgtttttttttttctttagagtaagaatatattcatgcaccacgcagtgtcatggacagatgaaatccgaaccagggtttgtggttagacaatgtatcgtgggggtgagcagaaaagctcacatttctcagaagctcctcctgatatggggcaaaagttaaggagcagaaggaaaagatcatcctcccacctgaaagtgttttcattgttatctagtgctgtacttggctcagtgggacttagagcaaatcacaggtaatttgaacccggagttagctggggtcctgcagacagccccaccctgtcctcacgtaacctctgcaatgccctgggtgacagttcagtgctgttgcaaaattgatagcgcagaggcttggactcctcgctgccatactccccatgcttggaagggtgcctggcatatattaatagtaagtgctcaataaatccttgctggctgaaggaaggaaaacatgagtttagaagggtttctaactcatcagtgggagagatccgtaaagatcagaatgagaattgaatgggctgcctgcttttgatatttacaacggaccaaaagatgacagctcaatccatatggttgtcctcccaactcttcaaactaagatcatcatgctttgttgatttaaagcaggtcacagcctctggatgcgaggcagccttgcagccttcggtgggacgagagcgggctcagaagaggaaaaggtagcgtgggcagaaagcaacatcacaagacggtccctggttttgtcattgggcaatgtttccccgttaaaattacaacacaacatgtgcctccactttttcccccacgcaggcatttctcacttctcaaattgccaggaaacagacttgggtgaaggttggagggaataagaggagagtaaaaatatacatgctgggtggaggaagaggagaacgcatttccaaatttaaaaatacattatagctgaggtgggaggatcgcttgatcccaggagtttgagggtgcggggagctatgatcccgccactgcgttgcagcctggacgacagagcaaccctgtcttccccctacaaaaaagtaaaaataaaaacatgttataaaagttgaacgccggccaaaggaagggatttttttttttttttatgttgcatgcgctgccaaatactttcactctagtaccacccccacacccccgggacacagaatagaaatagaaactgttgaagtagttcatattatgtggaggttacaacttcagatctataagaaaatacaaaggacaggaaacccagctatgaatgcttccattcacaaatgcggttccgtcctcattgggcagctgttaccttcatcttctttaagagacttgaaatgaggcagcgctccaatctttaacgcctgctcatgccgtcatgcctggtcacacctagtcactcctggtctcctaccagcagtctcagagaaacagaaacagcacaagaaggactccgaagggcacagtgtgtgtggaacacaggcattttaatcatctggcagtatctgatagtaaaattctaagtgtcctcattttttcggcccattttcatgatggtgaattagagaccaaaagtactttttgtcatttggttaactctaattcagttggaaatatgggaaagaaatcgcctaacattgcaaaatcctaaatacgtgataaggaaaggaaggaaagaaggcagagaggggccaggcgcggtggctcatgcctgtaatcccagtactttgggaggccaaggtgggtgaatcacttgaggtcaggagttcaagactagcctggccaacatgtgaaaccccatctctactaaaaatacaaaaattagccgggcatggtggcaggcacctgtaatcccagctactcgggaagctgaggcaggagaatcccttgaag

SEQ ID NO: 1046 - DNA, 2483 bp, Homo Sapiens
gaaggaatggcatggggtggaaaagccctcctcctccttcagggctgggccctctccctgctgtcccctgctctcccctgcaggtttgtcctctctcctccacactgctgctgtctatatatcacctggccagagtcacctggctttcttccttctttccagataggccactgtcttttgatacaggtgtcccaatcacctgtgtgccttgccatggacccgagcttgccattttcatggtaaaagttgatgtgtagatctaagggattatgtagaacctttgcaccatcagcgtcagaaaatagctcagatttacagaaatggatcggtaagccaaacatcttcttgtagaagctattgatagctttgttttttctattttgtacatatatagtcacccattggtatatgttggggattggccagggcacacacatatacccaaatctgcacaccttgagtcccacagtcagccctgctgtgttatacgaaaaatctgtgttatatgaaaacttgaccctccatatataagtgggtttcatatccctcgaatgctgtattttcaatccttgtttggttgaaaaaaaatctgcatgtaagtgtaactgtgtagttcaaagctgtgttattcaagggtcaatggatatatatatacttttctcctaattgaagaaaagtttatttttagtggctagtttctattttgtgatgtgatatcattttagtattgcttgctacttctttgaacatcattaaattgatttaaaatattttcttaatttgcttaactaagaagttggaatttaaaaaattttattaggagtgcctcgtgtgccttttgtaacatctagtttgtcatgaagccaattagctgtgttatagtcgaatgccagcaaaagaatgccaagctgtaaaaggagatcagaagcacattttgtgacccatttcttggtaggtggcattgcttgtttgaaattatacatcagtgttattacacatagccaagagggttcttagaatggattatcttactgttttttttttatctaagaattttatctcctgacacagatggatgcagggatgggagccggggtagcctgggagatggaacctggcggtccaggtgttgaagggtcgagatagacccaggatggccaatgacaggaaacccatctggctgtttaaatacggtgctaggcaactagcagtcacccaggcaaccgatggggctggggaagtccagcaagaggtgacagcgggtcctgatgacaggactgacttgccctcggaggcaggccatggaagcaggcactattcagagacgcaggcaggtggctggccttggggacgtctgtcagctgcagggatgggacgccaggccttgggaagagcaagagcaagacagcattccaggaccagggcaactggagcccgtggatgttgtcaagaaggaggtgggcactggggaaagagatgcaggagcgagtaggtggtccaggatgccaggtccggcaggattccaagagcaagcagaccccggggcagctgaagggtcaagaactgtggtgctgtgaagtggttctcaggacttcttaggtttctctctcaggaaggcctaccaaagggtcctaggtgtgaaaacagcggaccatggaagtgggaacaggacgggatattttcaagttgggagtccctggttagaagttattggattggaaactatggagggtttttcttggaagggattgttattccacagtctgtgtgtgtgcccggggtgtgtgtgcaagtgagagtgtgtgtacaggcatgtgagtatacacaggccaatgtgcagggttgtgagtgtgtagagttgtaagtgtgtccatatgtgagtgtgtacggagttgtgagcatgtgctggtgtgtgagtgtgtgcaggtatgtgattgtacatatacatgtgaaatactggctgggaagtccctcttaagtggccagaagatggaatgctgctaccctagcaataaccttgtgtgcgaggtctaagcgtgggctgtgtttataaggcagggattggagtaccactttcattttctcagaaggtgcccgcctatgtttaatttccacctatcagatgggcagactgataagtgagctttgacacaataactcccctcgccctgaacagagagcgccagaaaaggaagccagaagaggcttcaggttgcttttaccctgctggggcctctgcctgggcttctgtaacactaggagagtgagggtctccattcttcagaaaatgtggcctggactggggagagaaatagggtcatgaccgtcggagagacagggctgaagcaaagtcagaactttgagtgacctcagactcaagattgtcccttctgtggccttgcaagcagtgaaggccgcagagaagaccacagccactcactctccttctgttcggatttctcctgctggggcccatgcagcag

SEQ ID NO: 1047 - DNA, 2493 bp, Homo Sapiens
gcggccccaccctcctagctccggccccgcggccaccgcgcagccccagcggagggggcagctcccccgcgccgcgcgcgctctgtttgttttccttgccggactgacgtgagtcaaaatattggccatatgttcagcggtaataaattgggtatgagcgcaaacacacttgggcttcgatggctctttcagctgccacatggtaggctttgcggggagggggcttccaccccgcctcggccccctgcccccaaacgcgcgggtagattccctccctcctgcgcccctctgagcaggagatctgggaccccaggtttctcctgaccctcgcccctcctccgtccccagcagtgccttggactccgcagctcctggcgagcccggactgctggttaacaaggtcgccatctataaattgctcggtcgctaagacgccataaaaccaaagggccagatgtggcacgttatttatgtgtgaaaccgcgtttacactagatacgcggatccaaggccgatagcacgacttcgcgggaggtcacagacctctcgccccggctccaggctcctcccccagcacgatctcctctccaggttgaggggtgtcggtcttgccgggaaagggattcacccctgcagcccaggaggaaagtgatttcagtgcgcttgtgccaaaatgccacctgtccaggattaaaggcagtctctggggtttatttccgtagctttcctctttcccctgctcttggcttccttttattacgggcccctgggaggctgttttattttccaggcagttgatacgtttcatgggacctagatctgacacagcaagggtagtgtgctagagatgcccaactctgtgggtgggcgggatttgagggtggggtctcctgagccctgagggaaggattttgggaagcggagcagttcacctggctgagggagcacctgaaattattcttgcctcgggcggtggtcgactccagtgtcgcatgtcacctgccttatttaacttgaggggcagccggagcactgggagaggcagccctggcctcggaatatggaatccggtggccctgggtgctgcaggaaagggaagtaaatactctgttctaatagaaaacaatcgttttgctttccttcttcagaaggcggccttaggactgcatgtccccaaactggtcacctcgcactttactcacatgaattcattaacagtcattgtctctccattgccattattttactatttcttgaagtgaaccaaattctctctgtggttaataagcactgagccaggccccctaccttccttttcatcttcaaaacacctggggttccctgaatggcatcttccgtctggccaaggaaaataagagatgaaaaatgttgccctactgcagggaaaaacataagcatttcactttactattaccagttaccccaggtctgtgttcactagataactgtccttaggtggctgttaagggtggaaaaatgatgctgttgaaagagggtgggagagaaggggagaaccaacatgagctgggggtggggaggagagacccatttgataggggcaaaaagagctataaaatgaacctctgaacctgaagtgctgagcaggaacagtgactctctgggtttgctctcttgggctttagatgagctcctagaaagctttagttaactgcagaaaaacctgggactagcttcagggctacaggagtggttgatcttgggaaattacactgtttttcactcttttttcttggatttttacatctttatttatggttaaaaaccaaactatagggtctatttttgggtttacattacctccaagtggaagcgctgagattacagatcaattgcttctttgggtgaaaatattgcttcatgaccaaaattagacaaggggatttgaaggcaggccttcacatttgtagtcttcgtgggaatgggtgtctttgtctcacaagtgccctgtgaagaagctcatgctttcttcctgcatgtaccacagatatgtgctaggcagaggattgagacgcagacaaggagcttagaaagtcagtgtctggtgctcccagggtggaaaactgagagacacgaagcaaagagtatatcaaggcaggctttacatcattccctagttaggaaaacccattttaaaccagcaaatgtagcagggcatctactagttaactgataataaaaatccatgacaaagaagatgcagtggggagcaagcataaatgaaatacgactgcttagatacaactcctgtttcttctctttggccttattcagcaatccggtgctaaacttcatacactacatcctccaacctcaacagattgcatgctgttcttagttccaccatcttttatgctattcttacttcagaaacattcctgtcctactcatggactcaaaattcactgacttttcacactggaaaaaccttcctccacgaagctccccgcagac

SEQ ID NO: 1048 - DNA, 2443 bp, Homo Sapiens
gaaacaaaaacaaaaaaccaaaaaaaaaaaaaaagaaaagaaaagaaatgaaagatggaattcttaagagctttgggtcaccaaaatgaaataaatatatgtccatgtcaccatcatgcaaaggcactcaagcctttgaaatatactccatttatttacttttcaagagtttgagctgaattcacttagaaaaccccatgttctgtcaatagactaggtttatgatgatgatttttaaacccagtaacctatacattcctcactgccactgccttatgcatgggtggtcactgtattactcccattttgcagatgagggagtggaggtgccaggttgttaatgagctggtcagggactgctggaagtaagtgtcaggagtgagactggaacactgtatacccccacctggctgcctctctcccgcagaacgtgtagattgaaataaaatgagcctgacaggggtttcacccagttccggaccattgcttctccctgcagagctagctttgatgagggccacctccataggaaagaaatcagcagaggaatcagctctggattctcaagaagccaaggtgtattataataattctgctttcaaaacccctgggacaggctaagtagcccacccaccaaatgcacacagaatgaccgtcatctgtccagcagatgagacgcctgggaggtcaagagaggaaactgaagcccatgtggaggcttgtggctcacagtagcctcagccaccaggcctccctcccttccttgaaagctgcagagatgtgcatgcctgcagcctgttgagaaatctggtctcgggccagccaatctgaactccactcacacacacttttctaaggtgtgagctgagaaggggcccccagatgtagatgtctaggaacaaatcccaggcagctggtgggatttgctctctggttactgctcatgcctcttccgtcttccccactcttgcatctactctgtttcagacacttggttttgtgcagcttctcccatgccagacaggaggcaacacccattggaagctgttggtgccgcagcgtgctggcctgggctgagatggtgtgaaaaccctgcccgtcccgctgtttcctaactctcccaggcagtgacagcctcttggcctgctccactggcaacgcctgccgtggggttccaccaattcatcatatctccaatgtgcagttgctgcaggcagtgcgatctcttggcgcttcgctgggctgccacatttggaattgatttgggactcaaaaaggctgtggatcgaggaaactctaaagcgttgttcccttctatttctggccacctatttctgagctgaggtagtgggatctggccaagttgagccaaagtgaaactgctgaaatcaagaaagatagtagccaacgtgacggcagtgggtggtgagaatcccctcctccctctcagtttcgtggactgtcagtccggacgcctgagtggggcctcgctaaccctgcctgctgctcttgctgccaggcctggcatccgttttccatctctatatgattgtttgccctgagcccagtgagtgctgtctgcatctctggctgccgcagacagcagcctgatttctcaagctggacattgctttgatttccccttggcctacagaccacaccacaattctccctcttctcataagcgcaagcatccctttgcagtatctaaaggttcctgacgcagtggaggtcctcaagattttcctccccttaagctggtgcaccgtcccctccccattccgctcttacgcctcaaatccaattgcatggacatcaccaactgcatgtcaaatggtgatgttagaaacgactttccgtaatgatccagaaaaagtcccatttttcacaaaggtttttttttctttctccatgacttagttttacatatgactattgtttgcaataaagatcaagttttgcaatccatcatgctcccttccgactcccctgtccccatggtactgtctcccgctccatgtccgagtaccctccctcctccctcagcccccaccctttggtgggctgtgccaacagtgtagcaagaggaatttctggaaggaggccaaatttggcttcggatcatttctcttcaacacacactggcctctgaaaaccagattctgtttgtcatttggtttgctctcccagcgttgtgtcattccgatggtaatgctgatggatttcaagcttgcctcgtagagtaacgcacaaggttttcataagcacattaatcttaaaagaaaaactgtcagatgcaaacaatacccatatgactgatgttgtaaagacacaaactaactcttaacatccattcccaaggaatattatcttacaggggcctgatgttgcctttaactctcttccaacataggtacttgtgttgcaggattttgtggcacgt

SEQ ID NO: 1049 - DNA, 2469 bp, Homo Sapiens
caaatcttgcctgccacttgttttgtaaataaagttttattggaatatatgcatgctcatttgtttatgtactgttttcatgttgcagtggcagagttgagtagttctaacatagactgtatggcttccaaagcctaaaatatttactattttgctctttacaaaaaagtttgctgactcctgctctaagaagctttcaaatagatttatatctaaaatgcagcaatggccaaatttatagtaatgatttcttttgccaggaagatggaaggttttcttactgtaaaacatttgcagattttaatacttctctctgccatgccttgtttaacagacagataggcatggagaaggcaccatgtggcagtaagggaggtgggtgctaagggtgtatcacaacactgggaagcatattccttaacattaggagtttatgtgatttagctgaagagagaacacctgtattagttaaaagggaatatttagcagcatttaaacaaaagctatttcacatgtcactaagtatactataagaatttccagaaagaagtatcatcctttgtctaatagttcagaggatttctattagtaaatgaaaaatgacagcctcattttatcctccaaatatgtcaaaattatcttgagttgttgggtaccagaactgataggtgtcatgtatttaagcccatttgaaaaatacatttcaataatggagtgagactctgtctcaaaaaaatttcaaatgtcttttctcaattgaaaaaacctattatttctagatagataagtaaataacctttgcaaactcgagccacacttttcccctttcttttaaaattcagcttaatataattgaaaactgaagtctgactctccaagcctataagggataaaagagagacaggatagatagaaataactggcaacgaggagttactgggctttggctccatgggagacaatagtggtttcatagaaggcaatggtggactcttagtcaactgaagcttgggtggaacttagctgcataattaagaagctgaatctgttttattttatttttctataacataaagagtgtgaaaaggtcattttaatgttcagagagtggcttctcttggaaaatatccccgaacataccatggagcagtgtcaactgtagtataaaatgtcctagaaatcttgcaatttatgagtttaatggcacacctgaggattacgaggttttttccgtccactcataatagcccggtgactgatttagcagagaggaagcaaaatgaacaatcttgatcaccttttaacatttttcctgtcttgctgacttcagagctttaggggtacagcatttgcaggaattgtatgtctttttggcaatactttaaaatcaaactcaaaagatgaagaagaaaaatggttattagatagttataaatatgtcattatttgcaaatggtattgctttgtggatatgaagctcttcattgctcatctgtttttaagttcaacgatccacatataaaggtgtaaggacttattgacattgtgcttcctctctgttgacaccattagcccgagaactaaggacaatggatagctgtatataagttcaagttctgcatctacttcttagtttccctttccatccttcagttgtgtttgttttttttttgaaatctgtaaagtaggaataataataaagttactattctttgtagggttttgaaggattttcttgagataatgtaaagtaccaggcatataattagcctaaatgtaactcaaccgtgtttttttattttaatatacatgtcactacccatctctagtgcagagaatcaacagaatacaaataattttgaagattcatataatattcacacgttgcaaaatcttgtttgtggagccctcattgtagcctgtatgattcaaacgatgccacgtagtcctttaaacatttccagatattaaggaattttacactgttgtgtcactttttaaatgtctgcatttttctgtctctctctctctcaatctctctgaatttgtttatccagtgaataaaattaggaagaagtggatgctgtaagaatatttatgtgtttaaaggttgtggttgccccattatagttacttaccagcagcttcagcacgcagtcagagactgtagaaaaaagaatcattcttttctctgatttgaggatgcatctccagagtgtttctggggtaatggatctaaaatcaaaattttaaatgctagtttttaagtgtgaatttttcttcagcacttttgttctctccttataaccttttatttcattgagttccagagagcagacagcttaggtttcttgatttggcagatcaatgaggaaggataactaaagaaagtttaaaggtatcttttataccaaaatacctcacttctctttcattgcaggtgtagttaaaagcactaatgccataccc

SEQ ID NO: 1050 - DNA, 2442 bp, Homo Sapiens
agtttaacaatcatattttggctacaggccaaaacagtgcttataaacagttttataaaataagaagaaccttcctgtattcttcaaagtactaaacctgtgacttttttttcttttttctttttttgagacagggtgtcactctatcatccagtatggagtccagtggcgcaatcatggctcactgtagccttgacctcccaggctcaggagatcctcccacctcagcccccgggtagttgggattataggcgagcatcaacgtgtccagcaattttttttttgtatttttgtagagacaagttctcgtcatgttgcccaggcttgtctcaaacttgtgggctaaggtgatcctcctgcttcggactcccaaagcattgagattacagaggacagccactgagcctggccctacacctgtcttaatctcatttcagaaactctactgcctaaagcagatgtcaaaactcttcagcagaagcaatggttgtgataaagttttagagtagagagtcactaagcttgaaaaacaatagcaggttatatgaacttttgaagaaattagccgtttatttttttcaaggagagaagtagccaagaagctgaaaaaatatgaaagctatattgcccactccattgcaatttccaaattcccttctgggtataagccctctcagaggataactggaaaggccatatactcagtgcatgtaaagaactctggcttgtttttcattgcatcaggaatgaaagaaagacattatcggccagtgtgcagggttttctggggagaagctgagctgaagtgacttagcatgctttatgttgcctgattaatgtcaagcgagggggccactgagtgaaagttcatagcaatgccattttctgtaattgaaaatgctatgcaaaaaataaaatatgtcaacagttcctgctgcctgcctcatatcctggagagctgtgtacattttaagttatccctgcaacttaaaagaattgtaaccacagagattgtgaggggagcagctggtttgcaaagttgcttggggtaaacctgtcagagctcatgagtaaacacaatctgaaaacagaggctgctcgtggggaaatcagttgctttttcaacaaaataaaaggaagagttttgctcagggcaatgtgacgatgacgtgcaactgttctgcattaactacaacttttttttttgctttctcattgcccagttcccctttattctacagcaagaaattgaggttgtatattgcacactgggaatatctaaactggaaataattaaaatatatatttcatttatagtgggtcttatgtgaggagaagtaaagattgccacagcttcctgagtatatgagttaatgatgtgttctgcattttcttgattttccacattttaactgcctctgttcctcatttgggggtagggaactttgagaggcatggaatacagacttgcatgagcagaaacgtacagcttttgagcatgtgaggggatggcgtggagaaggttgggttcatcatgtggtttcttggcactatttttctccagtttctcccttcagtgtcaaagcaagcatgttatcaagaatgtttcaaaccagaaattggtttaagaccattgcagtatcctattaggttgtgtttttagaatatgatgaacaaatggatcttcaaaatgaagttccaaaaatgacagttaaaaaaggaatacagactcattgaaggaaaaaacctacaaaagactctgtgtgtgtgtgtgtgtgtgtgtgtgtatgtgtgtgtgtgtatgcatgtgtgggtgtgtgtgtgtgttgtaagtacattcaatatatatccatactgaatgaagtcattggtaaagtaaagcaaaattcccgttcttcagacttaattaggacatcattttgatggaggctaagttagcaaaaacacagctagaaactgggtacaaagggcaaattgattgtaaatcttggagattgtttgtatgactgggttgcatgactgaagcttaaaaagtaaaaagtgtcttacatagaattgcgagtgtgcttttggtcatggctagctataaagggaagaaatatgaaagtcattctcaaaatgtttggagatagaaactctgtgggggtaaatccaaggggtcagaatgcattcttatttattgtgtgagttttcaaattgtgaagaaatattatttctagaatgagttcaaagttgactcaaagtgataactaaaggcaatgaattgagaaataaaagtgtgaaagacatgaaacattttatccgtttaatccccataaaaactcaatgaaaaaatgaaaaagtgtcttcctcaatagcaattcacagcctctggctcagagctgggacatgtggaaggaatacagacatgctctcccaaattgcttggcatccttggactag

SEQ ID NO: 1051 - DNA, 2396 bp, Homo Sapiens
agtggctcacgcctgtaatcccagcactttgggaggccgaggcgggcagatcacgaggtcaggaaatcgagaccatcctggctaacacggtgaaaccccgtctctactaaaaatacaaaaaattagccgggcatggtggcgggcgcctgtagtcccagatactcgggaggccgaggcaggagagtggcgtgaacctgggaggcggagcttgcagtgaaccgagatcgcgccactgcactccagcctgggcgacagagggagactccatctcaaaataaataaataaataaattctcaaaggagactttcttttttttaataaaaaccatgtattggatcagttatcttctcaaatctctagtctaaaataatgtgggcagttttacaaggaaatacatatattggaccatatgaaatgaaccgtcaatatttgttataaatctatgaaaacattaagttcaaatggtttcgtctaacacctatgtaatataatcagtaaattccaggtactgtgcgatttaggcagagtatatgtgtgtatatgtgtgtgtgtgtgtgtgtatgtatgtacatgcacgtgtgtatatattttgtagagtccagggtctcctgtcaaacttctgggctcaagcgatccttctgcctcagcctcccaaagtgctaagattacagttgtgagccactgcacccgacatatgcagaaaatatcttactgcagtataaaacatatatctgagaggaaaagaacaagagagagaggtttctaacttaaacacagctaaccaaggaaaaaataaaatcaacatttgaatgaatattgaaattctcttaaaaaaagacaaatgagggggaaatcacataagcaagtaaggtttcacacacatggtgctctagaaactaatcagtggacagattcagaatccatatctccctttccaaaatgttctctggcagaagtcattctgtaggacaaactggaatcaaaagagttatgaaaattgtacaatgggatgaaggggcttcccctgttggggaatagatagctgacatgctggatggggccagggttcaaacaaaggcccctgttgagtgggagcaggtacaagacagatggtttgttaaacattgccagcatgcttgcgcagtgccgtgcggcggtcagagcctggataatggtcaccagggcattgtgtagcagcgcattggctaatttcagcccagctaaagctattgcttatctttgttggttttgcaaagattaaggcagtttctctgctttgaatgcaccacagctgcccagcaaagcattcctgaagttttgtctgaattcccactgctaagaggggccaagcaaaaggtggctcgtgcaaggacttgttttaagctcatatgtgaagttgcttctcctcaactaatctggaccactcttgactcttacttctgggcaaaaccctctagagttacaggggccttctttctcagtgagtcctttcctgtgtggttcgaaatgcatctgctggggatttatatttcctagatttatatttcctattgggattgattcatttgctacttttgtggaaaaaggtaaacaccattgtaaattccatccggtgaatcatggggaggcggtggttccaattaaacgtgtttgctttcggaagggggcccttggcttcttatctttatgtacagaagaaaatagagctcaaccgggcctctgcagccaatggaaacgcacctggcccagtcagctgctaggctgagtctctgctgctctgggctccaactcgctcctctcggttgtttgcagacaaagggagagtagctgcgggtcatgcagaggggacagtccccttggctctgcctatagtcccaaagcaaagcagggggtgcagctactatctgggtatgttaggaaagggtgatggctgatcggtttagtatttccaacagttcaaatgtctttatcttcttttaaaggtagtgcatatctatccccacctaattgaaccagtgctgtatttacttcaggcagccccctctgcctaaattagatcatttctagctataaaatcaagaaagtgtgcccagcagattaagccctaaaagtggacttgttaactacatctacagaagcaaagagagcaagagaatttttatatactctccctctctccctctctctctcttttctctctctctctccctctctccctctctccctctctctctgcctctctccctctctccctctctctctgcctctctccctctctccctctctctttccctctctctctccttctctccctcttgtttctctctctctctccctctctccctcttgtttctctctctctctctctctcatgcatgcaccacacacccctacc

SEQ ID NO: 1052 - DNA, 2417 bp, Homo Sapiens
tgtccctgggaagtggagccagcatggtagacagaacaaagttgcagttgctccagcatttaacagagatgagacctggacacgaataatcgtaacacaagatgggatgtgattcagtaatgtgagacagagtgctgtgggagtttagggattgtttttgaaagtgaggttgcagtttgtaaaggtttttttttttttttttaaagtaaaatttgcaaaagtagtactgccttttggaaacaagtaaaatgctactaactgtatgaaataaaacacgaaagtctccttccttcccctactcccacgtcccagtgtaacccatggttcgcaataggattcttccagaatgttttctctgagcacacacatagagcattttttttaaaagaaataagatagtagtagcattatgcatttttaaaaattttaatttgttctttaaaaggttatacattcacatagttctgaattgaaaagatacaaacgtagagtcttcctcctgccttttcttcccaactgctcagctcccctccccagagatagtgctgccagtttcttaagttcccttgcagagactgtttcttcctatacatactcctacctaccctccttctcttatttttttacacaaatagcatcatactttacactctgtaccttggttttttcatacatgttgtgcattttaaagatgtagttcaggtgccacctcaggcatgtcctggcttccttcctgacaagtatgaagcctcttatgacaatctagtgacatggaggcagacctgcatgatgtcctgggtttgtgacctgaggtcccaaggactagagggcaaggtagcagcacctggtcctcatctcctcctggcttaattgagctttgggggcttgcgtattgtcttgagtgtttggttgaacctgtatatcctgttggatcaatcttgatattgcttccttttcatttctctcgatgaaggccgtcttactgaatcttgtctgctggggaagttcctcattgctgagagcagcagttaaaaaagctgttagccacgtggctgggctcctatttctgcagaggcaggctgagttacagcttggtggtgtggatccaggtaggaattggtcaacattctgaatcctgagctgccatctgcctcgtagcctgctgggatgctcagtttagacaacatataaagtttcctggatacgggacaaacccaggcctatggaaagagcaggaaggttaaagtgtgtggtactttgggcaatgacgaaggcgtaaccagggagctgacatgtttgctccaaagccaagaattccaggacaatttgttatccagctgaagccagtgtagttgctacaaaaaagcctggggacaaaagcatgctttttacttgtttccctgtcttcttgcacacctactctattttctaaagctgtagtaaaggttgctgacattggaaatgtttgatgatttttgctattctcctcgtaaatgaataagagtctgggctcaggccaaaccatggctctatgtgctgaaagtatcagcttcctgaaacagcttcacaaatgctgacatttcactcagaccaggagggtcaggggaaaggcctaagcaagtactaggttttatcatgaaagaatgatttcaacagactaaacctggtctgatggcatcaaatgcccttcccccacctttttttttttttttttttaaagcattattggtcagagaggaaatagaaacttgggctgtcagatctgaagagacccacatagcatgggactggtgtcccagaacattgcaggtgtgtgaatgcatgaagagttgcatccaagtgctattgcccagcttgtttgggcactgatggtctcaggtcttctttcaggagcaagggtgggagacatttccagtgggtcaagatactagtcagtggtcataacttgtaatgtgaaaagcagtctggggcagccttatttaagcttgcttagtggtgaagagagaggagaaggctgtagccttgcactgacgcacctctatcaccatactcagggacactctgtgacacagatgagtggggtttttttttttcttttgtaaaactttggttttatacatagtagagcttttctctctctctctctctatatatatatatatgtgtgtgtgtgtgtgtgtgtgtatgtatatatatatatgtatatgtatatatatagtattcttttctttttctttcttttttgagacggagtttccctctgttgcccaggctggagtgcagtggcatgatctcagctcactgcaacctccgccttccgggttcaaacaattctcctgcctcagcctcctgagtagctgagattacaggcacgcaccaccacgcctggctaatttttgtgtttttagtgcagatga

SEQ ID NO: 1053 - DNA, 2449 bp, Homo Sapiens
aaaaataatctctatttctacgcctgtaaatatgtccatttatatccctccagccatcttctttgtaaatattttgaacaaaaaggatcccgctctatggctgatttttatttaatttatttattgagacaggggcccaccctgtcacccaggccatagtgcagtgacacaatcatggctcactgcagcctcaacctcctggtgtcaagcaatccttctacctcagcctcctgagtagcttgggaccacaggtgtgcactgccacgcctggcgaatttttaaatttttttgcagagatggggtctcaccatgttgcgcaggctggtcgtgaactcctgggctcaagtgatcctccagcctcggcctcttaacatgctaggattacaggcatggttgatttttatagtcttttttcacctaaaatgtaatatgcagtgattctatagctctcccccaatttcatctctgtgtcctgaaagtgaccagtttagtccttgtcacagtagagcccccagtaattaatcttagcaataaaattctataactgtgggatggaacagtgtgtcaattgcgttttcggagaaacctatgtccaatttgcacacagaacgcccacagacctctgcttactagcttggctggaaggacagggtctgctgtaaggacagcaaccttacctagggcttttccagaggcctgagaggtcctgccaaggccctgggctcaggggtccaaggtgggagagggcgagagaaaacaacgtgctaatgcagccttgagtggctctcaaacaggagcagagggaaggctgtgaggggagttggctgctctctttggagtcagaaaggttgttgctcaactctttggattttccatcacagctgggcagggagagggtcagactgggcatgacttctccgaacaggtccttttaaagcctcttggctgaactgatttcctctccagagccaaggaagcagtgcctgggtgaagttaaccccttcacccccaacacattcttccagagctaggtgagcctggaagcctaggctcctggaaggcagagctacacagggcaagaggcctaaggagccgtgaactctggctggagaaaccttccctctggccttgttaaatccaacaggcataattgcatcctgctgaccttaattcccctggcgggtttaattggtcttggcattgccccacttcctgtcctgcccctgtagaggcaaagagggtgtctgcacagctggtgcagggcggggaagccccttcttgagggtgggcaggggctctggcagcccctaggtgggtggaggaagtttccccgtgccccacccctgtgcctccaagggagtgctgagaagcttggggactcccagggagcagctggctggagcaggcagtcccgtagattcggaaccaggccagactctcatcccagtgggaggcactgcaggggagctggcgggaacagatgaaccctctacctggggtgtccacgacattatcaggcccccacagtgctgtaggtactgtgccattgggcactctttacatgtgtgctggctaaatgctcgcagccatgctgtgagagggaggcaatggggcagagcagttatgagcagagccttgggttagatgggtccaatcccaactctatgactttgccctgtgactcagttttcctgtcacatctgtgaaatggggattaaagagctgacatttatacagcactcgctatgctcacactcactgttgtaatgctttatctacctcctgggaggcagatgctctccttacggatgaggaaacaggtgaagacattgttccaagctcacagttactggtcgcagcgcttcattgacagatctcctaatcactgcatggtagggagttgtaagactcgaaggaaggatactcatgaagctgcttaccccagggcctggtccattttagaaagagttcaataagagtaattatttgggaataataattataacaaaagtagcactaatgcccctgaagttgtcccaggctggattttggtctcattgggaggtggctctggatttgaatgtgggtagtttgaagccattcactagctgagtgactgtggggacaagccacttccctctgtgagcatcagtttccacacctttaaaatggtgtaacattggcccctacagtcccttctgaggatccagggagctggatctttggcatagtctggcctggccgttggtgggcactcaataaatgactggtattgataaccacaataataacaaggagatgccagcaaggtccagcatagggaggtaacaaactccagtctggagccttctggttaatcagttatttactcatcagacactgatgggcaagtccactctgtgctggggatgtgtttagcccctggccttcagggggctcccagacagtg

SEQ ID NO: 1054 - DNA, 2340 bp, Homo Sapiens
ttcttcctttcctcagttcagcccacgcaggttctgtcccagcatcgtgagtagctgcctctcctagccatacctgagaaatcgaagaagtttctaggcctaaagccactgccacaacccgcgtttctttttttttttttttggagacggaatcttgctctgtagcccaggagggagtgcaatggcaccatctcggctcactgcaacctccggctcctgggttcaagcgattctcctgctacagcctcccgagtagctgggattacagacacacaccaccatgcctggctaatttttgcagttttaatagagacagggtttccctatgttggccaggctggtctcgaactcctggcctcaagtgatcccactgcctcggcctccaaaagtgctgggatgacaggcatgagccaccacacccagcccacaaccctcatttctgtcaggcctcccaaaagctcctactgtcagtgcaggcagctgcttggaagtcattctaggccaccccttccatttcccaggtaggtgaaccaagaccattcaggtgcgaggctggcctgagtcagagatggcctgggagagcctttggggggcagggagggttcagtcccctcaggcctggctgtgtcccctgccccccacccacaatcaggcccagggttggggggtgcacaccaaggaggggcaggaagtgtccaagaagcagaaccggctctgtgtccccagtggcggcgggtgtctggggcaggaggaggctatctgatcccttccccactgccccggccatgacctcctccctccctccctcgctccctccctccctccctccctccctccctccctccctcctccttcatggctggggtagccagcaccctgggctgcagctgagaacccagcgttccccaaccccgccagcattccagtgagaggaggggtggggggagactgcacccagagctttagggacaggggcacccctggggctgctccactctgggagggccaaggccaggctgcctccaacctcaccgtttcctgcctccgctctccccatctctcagtagcagagctgcctaaatttggctccaggagggaatgggggaggcagcggcaggcgggtgccgtcagaggccagggcgtcgctcccgtctagccggctggcatttttgctgtctggaggagggcaggggggcccggcagccctctcccggaaagggagatgttcgtaccttctgacatacactgagtaatgtgcaaacgacatgcaaaccgagcttcaaatcagcatctcagccagggaacagcttgagagctgcttttgggatgagagcagaaggaccagagcccagtgcccaggggctccagtgggggtggggtggggtggggggcggcacagagtgtctagggctgggcgttgggagactcagtttcttgccagctgcagggctttgttccagtggctggaccctctgggtcccagcccaagggcagggccatggctttctctgcctgctccagcaaagcactgggcacaccctgtcacgtggttaagcacgtgagttctgcagccatcctgcctaggtttgaaccctggctctccatgggccagctgagtgaattcctcaatcgagcacccaggcaagcagctagtggaactgggtgtctgttttagaacagccacttcccttccctggaagttgggcacgggggcatgacgtgagagaacctgggctttggaatcagaactggattccaggcctcactcagccagtgaggctctctgagtctcactcccctcatttgggaaatgggttcaggatctcaaggtcagctgtgacgtccacgtgatgaccttgcacatggtgggcacacacaggccttcccatggtgcagcctcactgctgtctgcattcatgtgactcctagctccatcctgtcccatcgctcctcttctctttgttcttctgtcctggctttttcgtctctagatgtaaatttcttgcggtctttttcccttctgtctctcttcttaactggtgatcttggaaaagtcattgcctctcagagtctcagtctgcatatcttctaaatgggagtaaatgagaggtggacaatgagctctgtctggggcctgaggctcatctttacaagaccgcccacccatcattccaaagggccaccaggggtaggctgtgccctcaactctatcgggcatggtgtgttgggggctccacttctcagtaactctgtttaaccccagataactgctctcctgcccctcggccggggctgatatgagctgaatccagcttcctgccacccaaaagccacttcctg

SEQ ID NO: 1055 - DNA, 2438 bp, Homo Sapiens
tgctcagaatcccacagcactccacacagcttcacacatgtacacgggaatcttcctccccggcccccacacctgcccagcaccgaccttccagatgcattcactgattcaacaaatcctttttgagggtcttctctgtggaggccctgggctaacccataatcagaatgactggaacaggaacaaataattagctgccctgtgctgttgcctccgtttccccatctgtgagatggggatcctagccctgccacatgggactgtcaatgttaggagtgaatgtgtggaaagccctcggtccgtgtttggcccacagtgtcatctaagtaaggctatcctggttagccaaaagcatcccatgcccagctccacgcagaacacctggcacacattatctccctgagcccttgtccaagtccccagcagctggggtcatcgcccccattcctcagatgaggaaaccgaggctcagagaagaggcccacagtctgtaggttgccccaccgatctcatgtcatgccacagtgctgctccagcctgcctcgccaccccctacacacacacacacacacacacacacacacacacacacactattccctctggctagaaggcccttctcacttgcatatagcatgcccagctcctctgagctgcctacttacacttctgtgaaatggggatactagcccgtgtcagcccctgtttattttccccagggcactggactttaagggccaagagtgaagaccattttgtcctgttctctggcacacagtaggcactcgacaactatttcaaaactaaaggaataagcaagtggcctcatggctactgaggacagagtctggaactgaatgcagggcactctgaagctggagctcacttctacattattgcctttctcatgctactagcaggcactgaatgtgtcagtgagtgaatgaatgaaaccaagatctcaggatcccagtcaagtgctccctgagtttcatttcctggtagtgtggacatgagccaagctccagccaccttggatggtggtgggggtggcggggctgatgggccgcctgaagccggctgtcaggagctcgtctggccacagccgccagcaggagagaccagctggcggtgcagggtccatcggcccgggcctggaatctgagctgccctcagaggcccagcttctctctgggcccccacaaactggcctttgttcctgggccggccaagacccagcagcttgggctttctgtctgcccgcggcacccgcgctgagctggcggggtaaatgggccagcctcccctctgtccatgcccaggacgtcgctttaggactaaatggagatgtaattttctatacaaatccatgacaatttagatggagtgattgtaattggcttttcaatgggggttttgtccagagctggtggctagaactgggtggcctgtttgaggcaggctccatttaaatgacaataaagcaataatattgaggacttgtacagtgcccagcactcctcccagcccaagtagagcctcatgtttatggatctggtccttccctgaggctgtctggacaggcgggtggtggggggcgctaagcccaggagacaggtggccatatctttgggcttcaggacacagagcttcagaatggctggggcaaggtcccgcatccactggcttacctgtgtccttattcctgaaactgtcactaactagtgcctcctcgggctagctgctagtccaggtttcgggggcaccaagacaatgagagctgctcaggcaggtcagagggagaaggctacaatggccagtacagcatgacatttgagagcatgaccaagagatgaccaacagccagacagcctgagctcaaatcctactccacttctttttaaaaaaattttttttgagacagggtctcgctgtgtcacccagactggagtatagtggcaggatcacggctcactgcagcctcgacctccaaggcttaagcaatcctcccacctcagcctcccaagtaactggaccataggcatgtgtcactacacctggctaatctttttatttttttgcagagacagagtctcattgtgttgcccacgctggtctcgaactactgggctcaagagatcctcccgcctcagcctctgaaagtgctgggattacaggtgtgagccactgtgctcagcccctactctacttctgactcgtctcttgaaccttaccaagttacttaacctctccatgcctcagtttccccagccataacatgaagctgcagtgaaagtttttgtgaagatgaaacaccttaatagtgcctggcatgtggaaggtgctatatataagtcattgccgtgattcattccaagctctagctctggtgtcagggtgaccttgggcacgtgacttaacctctttaaacctccact

SEQ ID NO: 1056 - DNA, 2364 bp, Homo Sapiens
ttaatagacacagaaaaaaagttcgataaaatctaacaccctttcacaataaaaacgcaaaactaggaatggaagagaacttcctcaacctgataaagggcatttatgaaaaacactgctaacatcaaacttaataaataatgaaagctttccccctagaatcagaaacaaagcaagtgaaaattacaactttggctagttgtggtggctcacacctgtaatcccagcactttgggatgctgaggcaggagaatcacttgaacccaggaggcagaataaaattacaatttcagaaaaagtatgtgtcttgtatctgccattgtgagcttgacagcttgccaacactcgaagatttttgtgactggacatggcagctcacacctgtaatcccaacactttggaaggccaaggcaggaggactgcttgagctcaggagtttgagaccagcctggtcaacacagcaagaccccatctccatttttttttttttttttttttttgagatagagtctctgtcacccaggctggagtgcagtggtgtaatctgagacctgtcccgagaccaaaaagtttgagaaccactgccatagaaaagcaccaggacatgtaccaaaatggtctcggaagcattgtttctaatcacaacccattgggaacatctcacatacccatcagcagcacaatatgttatatatatatatatatatatatatatatatatgtatgtatatatttagtgcttcagacaagggaggtcatgctcaaggcagcctactctcaaatcttcatccaaagaaatcctgaatgttccctgggtctctgctggattctagaactcttgtcctcacccttagctactgcaaatgaatcttggtcctatgcccacagcaattagtcccagccctggcatcattccaaaggaaaaatgttaaatcacacctgcccgaggcctctggaatggttcaaaagcttagggaaaagggtgtacagggtaggaaagtggggtgagtgaggcattacctcctcagccagaaagcgcagttttgccaggagcttcttggccagtgccaccttcttttgcacattgcgccgtctcaggccgcgtagaagtcgcagtccttgcttagccaaaaggttctgggagggcaaaaagacagcatgagcggaaggccccagctaggcgcccctgagtcccttcccgaggccgtaccaggctgtgcaccaggagtttccctcggcatcgatccagggcattgggccgggtcatcgtcctgcgctcggcaccgtggcaaaactgtctgcagtgagcagggatgtgcacagcagacaggaatcaaaggaaaggagaaggacagtgaccttggggccacttgctctgagctgacctcccacccccagcctccctcatagccctctcagtcttgggctctgaagaggcaccctttctcctgcaaagctggcctatctctatttggaccactcccaaaaatcattaaggccagccttgctcttgagctccagagctcgctaatacttaaccacctactaccctggctaccccaggtgtggcccatggaccaacagcactggtatcacctgcaggctatttaaaactgtaggacctcagccccaccccaggccctgctgaatcagaagctgcgtttatgccctcggggattcctaagcacattgaagcctcagacgtctccaccagcttggctaacgtatagcttgaacattacatgcccaagccaaatgcatactttccaatgatcccccccgcaaaacaaaacaaaacaaaacaaaaaccctatttcacctcagaactttcgagtcatctctcactgctctttctctcttattccacatcaattcatcagcaaattctttatgctctaccttcaaaaaatatccagaatctggccaggtgtggtggctcaggcctgtaatccccgcactttgggaggccgaggcggtgaatcacttgaggtcaggagttcgagaccagcctggccaaaatggtgaaacaactgtgtctactgacgctgaaaggttgagcatggtgagaacagaaaagtgaccacctacagcctcctacctcactgcctctcctgatcagggtccttggctgagtccctgcttcctccctgcctctaaatgctggaacgctccaggttctcagatttctcttttctgtgctctgttaatgctgttatccagctccatctacataatgatagttcccaaattgacatttccagcctagaattctccccagaactcaactcatatagctaactgcctaccacacatgtccacttacaattcaataagaatttcacagttaacatgtccaaaactgag

SEQ ID NO: 1057 - DNA, 2386 bp, Homo Sapiens
ggcaggagaattgcttgaacctgggaggtggaggttgcagtgagctgacattgaaccactgcactccagcctgggtgacagggcaagactccatctcaaaaaaaaaaaaaaaaaaatcaggttttgatgtccaacaggctggttctatcatttataatttataatgtgtaggacctggagcaaatcattttacctacaggactctcagtttcctcctctgtaaagtggagataacatctactttctagggacagtgcaggaggatgaaagagcgctgagccagtggctaacacaggctgagcactcagtggatggcagcaattgtcattatcatcattatcacatcaccacatcattacaatataaaatattgagcaaatctgggatattttggtacttaacatttgtttcctcttcctttctccctacctttctccctccttttcttccttcctcctttttccctgtcttctcaccttcttttattccccttcttctcactttcttctcatccttccttggtacatctggttgcagctgcaaggagtggcaggagcttacacaggaaaaggaggtgtggtcagatcctggggggacttgaatgtcagagggagtctgatcttcagcctaggggcaatagtgagtcactaaagcctgcggtggagcagaaacaagctgtggtgaaagtggggaagtgagcctggcagcagagattgggaaggggctgtgagggcagaagctggagccagagaggtgagctatccagggagcctaaaggtcaagtgagagagatggggaagcagaggctgcatctctgtctagagctcgcctgggagaagtagcctcattctctacgttcaccttgcccacaaaacccagccggagcacccacctctgtgtgacctcagacaagtgcttaacctctctgagcagcagtaaggccatcttagctcttggtgacaccccctggcttcctagcaaagacacttctggatcctacaggcttccatcatcttccaggctgctctctgctcagagattaatttgtttactcccttgcctggagatgaaccgagggaactaatcgtccatcagcgcaggctcccccaacctcgcaccgccccgccccaaatgtccattttctggcaaaatatgtccttgccgctgacaaggctgcttggaaaatgctaattttatcctcgaattaaaatttgttcccttaccctcgttttaataaaaatgaagcatccggaaacattgccacggtgcagaagagaaagatctgacataatttttaaaatgccttcaatcacgctgacttctgaacggtctgtcctctaaccctgaccccctccccatctcccaaccccctgaggcagcatttacatttcttaataacccctcattaatattcatgagaaggggcgggtaataacggctgagcacaccgcactaattcaatttccacccgcctcagcgtgtttacttaatcaccaagggacccgggttactcagtacaattatttattcggaattagatctggaggcatctggactggaaacagggaaccaagagcaaaatgaaaatcgaattctcttcgtcctcccctcccagccgcctcttcctgaccgtgtgccaacgctccaggcagccagcagggcttagaggacaaggctccgtgcccgccgggcagctcctgaaggaactggctcgtgaggggctgaatgtgttccagatgctctggccccggcaggaatctctcatcaacagtagccttggagttatcgcaaggcccagcagtgggccagttgcaccgtcccagccaagagcatggccagccagagttagggtgttcaggagatgctggggtattggcccaacctggacatgcagtgtggacagacttttgatcacaggccctgtggaggtgagagtttgtgacatggggtctaaataacacctgctcatcctcgaacccccgcttaactgtcacctcctccaagaagcctttcctggtccccagacaaggttagcttctcctattacacacaccttctgttacaaccaggatgggcttggtcatagcaccttgcccactgtgggtgttcacacaatggtttctaattagttgttcagggtctgtttctcccaatagtcagttccgtgggagtaggtcccatggctgtcctggtcacgtgttcctagcatctagcaatgcccagcacagagatgctcaacagtatttgttaacttcttgactgattgattctactattgactcctgattctcaagcctctgtttccttatctgcaaaatgaagctaagaacattcatcttgtaggattgccgtggggactcagtgttttccatgtaaagaggatgca

SEQ ID NO: 1058 - DNA, 2734 bp, Homo Sapiens
ccccctgctgtccctggctcctagcccttggcccaagcatggctctcagcctagacaaggccttcctaggaggcctaggagccctgcgggaggcagagtgcagataaaggctcggagtccgtccatgtggaaaacctgggtctgcggcgatcgtgaaccacatgggcagaggggccagacctggggttcctatgatgggaacatgatgtgactgtggaggccagtcaaggctcctgccagcggtgagtggaacagataaagaaatcagtcatcagaggagagaagtaccccagaccggagtgggaggtcacatatcggctccctgtgctgccctccagaggggaactggggcagaggggcctcctcattccacgaggctggctgggctcaattcaaggaacccttgtcctcccacctctgttggaatcctcactgcagcccactggatccctgcacgagacacacctggggtgcttagtgagcaggcagattcccagatacccaccccgaaaagccagtctgaaagagaacacccaggggtggggcctggccacagccagcctctccagagagtctcaagtccagtaatatctaataactctgtgtttaggccaatggtgttcaatcctagctgtggactgtgatcacctggggaattttttttaaaccctgatacccagatctcacctaagaccaattatgtcagaatctctggggtgtgccctgggcacccatatattcttaaagctccccagtcgtcccagtgtgggtccaaggactgccccagctccagatcaattctaagagcctcaagatgaacatctggggaaaaggagaagtcatgagtctcagataagagaaataacttgcccaaggtcacacaaggtggtgatggcaaagcccgtcctgaaacccaggcctctttcctgaccgtgggccaatttcttcctgatgctgcatctctttttaaaaaccagagcccaggcaggcaatgcccacagtatttcactttaataatattggaaaccggtacagtcagggccaccacagtggtggggcgggagcctcgatggcgattaggggagctgtaagtctttcgctttatccaaatcttgggcagtaatttagaaaatttaattaaagggggagaaatggggacacctcgcgctccctgcctcctgttataatgagtgaaatacaccaggctgtaaaaggaaatgctgtctgagacgcagctccgatgttttattgccaagttttattcactgatgtaaacgtaatcgctggaaaccggagctcttattaacacacatattttcacacatccggggcccctcctgctcccccctctccctctgggcttgttcacccacctcctagggtcagccctgctgctttctgggcatgtctatgccaagcctggagttccgcaccggtttcataccctcccatggcagataagactttaatagaattccattgctcctcagagctcagtaatgcattctggaaattaggcggctacatactaaagccattgttcccccttataaatgggctctctcaaagccagtgaccatgggggctctgataagctctcatgaagcctcactccacatgttattggtgtgctaaaaggtgcaactccaggcttacattgctcattgttaggggctgatacatttaagtagtttctccatgaatcaggcagcctaggtatttcccccactcttggcattgatagatgagcaaaaggaagccatttagatggtgctatatagggctccagcccacgtggtgaatgatttccaatgcctggtttaatttatttttaaatgaaatttgttattgattctggattaaaaggacaaatcttacagctgttaccactgacagagccacagtgctcaagtgacacctctcaaggaggggagggagggtggcctgtctgagtcaaggggagggtatggagactctccagggagcttggctcagcagtaaggggcagtgcaagatcccatgcttagagggaagtttaaaaatatcatctttcccaattgaaatacttgacgtgatgctcacctctgagcctcatttatataatggaaatagcagtgatatttgcctcatggcatccacacgaccactagaggcatgttagttgcctccagggatgggaggctttccatctcctgcagcattcccagaatgaaatgagtgacaggcgtcacccactctagtgaattcctagagactgtttcctgggctagtctttgcttaccttctgcctccactaggctctcggcttccacggtgcccagagattacacttgcattgggaagcagacaagaggcacaattacacaggggaggaggatgggctgggatgtgtccgttcacattcagcctctgccctacctcactgtgcaactttgtgcaggttacatcatctttctgagctttgtttctccatctgtaaaagaaggaagggtataatagcagcctcaggggttgttgtatgaattataggagatcatgggtgtgaatgtgatttgtaaactgtaaagtgtagtttaggtgctgcaggaaatacaagtgggacagtacagtatagtgggaggtctctgagttgggagacaaaggacctggatccagttctgtcatgagtggctgtgtggctctgagaaagtgaattactttctctgggtcttagtttcttaaggtgccaagaggg

SEQ ID NO: 1059 - DNA, 2441 bp, Homo Sapiens
ggacactccctaggacttctggcaaaggcaggagccagaatgaatgaatttcctgtgcccaggcccccctgctgtccctggctcctagcccttggcccaagcatggctctcagcctagacaaggccttcctaggaggcctaggagccctgcgggaggcagagtgcagataaaggctcggagtccgtccatgtggaaaacctgggtctgcggcgatcgtgaaccacatgggcagaggggccagacctggggttcctatgatgggaacatgatgtgactgtggaggccagtcaaggctcctgccagcggtgagtggaacagataaagaaatcagtcatcagaggagagaagtaccccagaccggagtgggaggtcacatatcggctccctgtgctgccctccagaggggaactggggcagaggggcctcctcattccacgaggctggctgggctcaattcaaggaacccttgtcctcccacctctgttggaatcctcactgcagcccactggatccctgcacgagacacacctggggtgcttagtgagcaggcagattcccagatacccaccccgaaaagccagtctgaaagagaacacccaggggtggggcctggccacagccagcctctccagagagtctcaagtccagtaatatctaataactctgtgtttaggccaatggtgttcaatcctagctgtggactgtgatcacctggggaattttttttaaaccctgatacccagatctcacctaagaccaattatgtcagaatctctggggtgtgccctgggcacccatatattcttaaagctccccagtcgtcccagtgtgggtccaaggactgccccagctccagatcaattctaagagcctcaagatgaacatctggggaaaaggagaagtcatgagtctcagataagagaaataacttgcccaaggtcacacaaggtggtgatggcaaagcccgtcctgaaacccaggcctctttcctgaccgtgggccaatttcttcctgatgctgcatctctttttaaaaaccagagcccaggcaggcaatgcccacagtatttcactttaataatattggaaaccggtacagtcagggccaccacagtggtggggcgggagcctcgatggcgattaggggagctgtaagtctttcgctttatccaaatcttgggcagtaatttagaaaatttaattaaagggggagaaatggggacacctcgcgctccctgcctcctgttataatgagtgaaatacaccaggctgtaaaaggaaatgctgtctgagacgcagctccgatgttttattgccaagttttattcactgatgtaaacgtaatcgctggaaaccggagctcttattaacacacatattttcacacatccggggcccctcctgctcccccctctccctctgggcttgttcacccacctcctagggtcagccctgctgctttctgggcatgtctatgccaagcctggagttccgcaccggtttcataccctcccatggcagataagactttaatagaattccattgctcctcagagctcagtaatgcattctggaaattaggcggctacatactaaagccattgttcccccttataaatgggctctctcaaagccagtgaccatgggggctctgataagctctcatgaagcctcactccacatgttattggtgtgctaaaaggtgcaactccaggcttacattgctcattgttaggggctgatacatttaagtagtttctccatgaatcaggcagcctaggtatttcccccactcttggcattgatagatgagcaaaaggaagccatttagatggtgctatatagggctccagcccacgtggtgaatgatttccaatgcctggtttaatttatttttaaatgaaatttgttattgattctggattaaaaggacaaatcttacagctgttaccactgacagagccacagtgctcaagtgacacctctcaaggaggggagggagggtggcctgtctgagtcaaggggagggtatggagactctccagggagcttggctcagcagtaaggggcagtgcaagatcccatgcttagagggaagtttaaaaatatcatctttcccaattgaaatacttgacgtgatgctcacctctgagcctcatttatataatggaaatagcagtgatatttgcctcatggcatccacacgaccactagaggcatgttagttgcctccagggatgggaggctttccatctcctgcagcattcccagaatgaaatgagtgacaggcgtcacccactctagtgaattcctagagactgtttcctgggctagtctttgcttaccttctgcctccactaggctctcggcttccacggtgcccagagattacacttgcattgggaagcagacaagaggcacaattacacaggggaggagga

SEQ ID NO: 1060 - DNA, 2473 bp, Homo Sapiens
agcaactatgtcataagggtggtgggtgggctaaatgagttgagttctggcatataagtaacttagcatggagcacaacaaatgcttactttgtgtttgtcgtcattgcttccaagttccttctttggtctctattggtgtggagtatctcattgcttttttttttcacagattttcattctgtcacttaggctggagtgcagtggctcaatcatagctcactgcagccttgaatttctgggctcaagagatcctccttcctcagtctgccaagtatctaagaccacaggtatgcaccactatgcccagctaagtttaaacaaattttaatttatttttatgctattttatttattgtgtagacagggtcttgccctgtcaccctgggctggagtgcagtggcaggatcttggctcactacagcctcaatctcccaggctcaaatgatcctcctgcctcagctccccagtagctgagactacaggcatgcactaccatgccccgctaatttttgtactttttgtagggatggggttttgtcatgttgcccaggctggtctcatctgccttaactcaagcactccttctgcctcagcctctcaaaatgctgggattaccgttgtgagccatcatgcctggccacatatccttctttatctaaggtcagaagaacctttaatttcaattaaccttccttggtcaaatagtcttttcttcaaccactggccaagctgaaagtagagactaaaaaataccacaccattatttggccagcaaagaaactctccctcccctaccatcaccatttcctctccttttccttttgcctcttccccctttccctccctttctcctccctcccttaccttctcctttcctcctttcttccctgcttgctttggcttaatgaaaggcctcacaggacgctgtccgtggtgctgacttgtttttctgtcttgttcaaactctgtatgcaaatgaaaagacaacacagctattgaatgttgaagctggggacattccccaagctaatctctgtgcctgtggtgtggccacggctctggccattatctctggccacagtgccccggagatgctgatgctgacctggaccagaggtgccagcctgggcactgccagtccccacagccattgactagagccccagggcacaggcagctagcaacttatctgggtgccccagggactgctattggcaaagtgatggccccacagggaccaaatgtgaagctaaagcaggatacgcaggtcggagataaggccaagaacagattccctttagcgctcaagtgctgtttgtcagaaattgacagccccacggccctggccggtgacaggcacagggtgataacaataccatatgatcagcatcattggaggacaggctgtcactggctcccagagataaggaaacaatgggcgacccctctgcctagggaaaggcctgcatggagcccccagggcaaagcagcaagatctaaagtgtgtctctgacccctggcacctcaccagcaccccctcctcccagcaggcccccagagctccttcctgtcacccagggacccgtggcctccattgtgcacccactattctgacccctgttctctggagttaatcatgttatctctagagcacaggtgttagtggatgataacagacaagcagttccctccccagctccctgcaccacagacgctgctaagggaatggagtgggagaacagagctttctcgaggtggtttatgcaggccatggattcagcactaacagcctctctccagcactggattcttgagaaataaaaaggttgggtgtggaggggctcccacattttctagtgtcttcccattccaccccactggagcaaagctgttgaccctacacttggggacatattttgggatgggttccactgccctggcttggctatatcccttcccccactgctgcgcaacctttccctaccatagccccaatagccatgaaatggggactcagcacacctaggtcctagttctttccctgaccccagcttgatgaatgatttagggatcatagtcaagtcacttcactccctggcctcagtttcttcaactgtaagttggggctactcatctgtaactatcagatctgccaggtggtatgaagttccagtgagataaatatatgtgagggctgggcggtgggagatctgagatttaccccccactaaccaggcccactgagtacagtgtggagcactgctgggtctcagcttggaggtctgctctgcctgactccccaggtggcaagatcatccccccgttcccctcctcttctatgcttaggctgtgatttctcatgggctcacctctcataccctcctgttttctttctctcatgtctgtctctcaactggttcttgttcttgcctttttttctgatcttttacgtatatctgcaaacctcactc

SEQ ID NO: 1061 - DNA, 2500 bp, Homo Sapiens
atgatagactggattaagaaaatgtggcacatatacatcatggaatactatgcagccataaaaaatgatgagtttatgtcctttgtagggacatggatgaaattggaaatcattattctcagtaaactatcgcaagaacaaaaaaccaaacactgcatattctcactcataggtgggaattgaacaatgagaacacatggacacaggaaggggaacatcacactctggggactgttgtggggtgtggggaggggggagggatagcattaggagatatacctaatgctaaatgacaagttaatgggtacagcacaccagcatggcacatgtatacatatgtaactaacctgcacattatgcacatgtaccctaaaacttaaagtataataataaaaaaaaaaacagatatgacataatcacaaaaaaagaaagaacagcacaccagagggaaggagtagtttttattttttattttttattttttttgagacagtctcgctctgtcacccaggctggagtgcagtggcacaatcttggctcactgcaacctctgtctcccaggttcaagcaatcctccttcctcagcctcccgagtagctgggattacaggcatgcaccaccacacccggctaatttttgtatttttagtagagatggggttttgccatattggccaggctgatctcaaactcctgacctcaggtgatctgcccgcctcagcctcccaaagtgctaggattataggcgtgagccaccacacccggccagtagttttatatacttaggaaaaaagtactagatgtgatttttaagttaataacaacttagaacagaaaatccaaacactgccccagtgtctggcccagttccagctcaatgctgcattctgcatctgtttattgtaagatgtgaatgccccatccaactttcttggcagatgtatccttttttacacttttttaaaaactgaaagatgatttcttcatttcttattcagttttgaaagggaggcacagtcaatgatctcgcacgtattccagaaactgacttccttagaccttaacagaagctactcaagtgcacagatgtttgctggttttacatggaggccttgctggctatgaaaaaacattcccctctaattttttgctcaatttgttttaagttggtaatgaaatctgtgaatctgtgttccctttctacaggaaaaatagaattttgatctcttttaaaaatcagaacgcaacaggataatggagaaatcagtctcaatagcacatttcttgttcgtttcagagcggtgatgtaaacacgatgatgctatgcttttggggtctttgaggtttctgccaaaagcatagcagcttaggtggattcgtgcctaccgcatgcttctttggtggatttctgtcgacaaattgtatgtctgctcttctgaaatagcatcatgaagttgttaatgtctttgcataaagaccaccccattctgtttgccctggggacaaagactttgcactaatcaccttgctctctcctggagcgaagagctgaagaggcaacaggaaatgcttatttactgagttcttactgggtaccaactgtggacacccacagaaggggtttgagtaagtatctcctcattgtccaggggccagagtagagaacagaaaggaaacagcttggcctctggttccacaaaataaataagaataaaatagaacattgaacatttgtgtttctttcaccatcttaatgtatgcactttgtagattctgcattcaaacatgtagaacaggctaatgaaagaaaatgccaaggccgggcacagtggctcacacctgtaatcccagcactttgagagtccgaggtgggtggatcacaaggtcaggagttcgagaccagcctggccaatgtagtgaaaccccgtctctactaaaaatacaaaaatcagccgggtatggtggcgggcgcctgtaatcccagttactcgggaggctgaggcaggagaatcacttgaatccgggaggcagaggttgcagtgagccgagattgcaccattgcactccagcctgggtggcagagagactccatctcaaaaaaaaaaaaaaagaaagaaagaaagaaagaaaatgccctcaaatctcaccacccagagacaaaatcattcacttttggagagcattcttccaaatctcgctctcttccaatggttctcagctgaggacaattttggccgcctgcgtacatttggcaatgtatggaaacatatttggttgtcacacactaggaaggggtgttcctggcatttagtgggtagaggctgaggatgccactaagcatcccacactgcaaaggacagcccctctctccaccacaaagaattatccagctcaaatgccagtggtgctgaggccaagaaaccctgctatagacatatggatgtgtagctctgtgataattacataatcaagttcatactatgccagctgctcatcatcct

SEQ ID NO: 1062 - DNA, 2333 bp, Homo Sapiens
cctgtaatcccagcacagtgggaggctgaggcgggaggatcacttgaggtcaggagtttgagaccatcctggccaaaacggtgaaaccccatctctattaaaaatacaaaaattagctgggcatggtggtgggcacctgtagtcccagctactcaggaggctgaggcatgagaatcacttgaacccaggaggcagaggttgcagtgattcaagatggtgccactgcactctagcctgggcaacagagtgagactgcgtctcaaaaacaaaaaccaaaaccagaacgcaggatatttaatactcattgccccagccttgttggggaggggcacaataagaaaaatcccatctggcatcctgaaacaaatcagtattggggtgagcccagtggggcagctgatggctgagtcaggctggtgcgatggaaggagctgtgagggccccgtagcttggagcatccctggtccccttagcagccatcataagacggagcaggcagggctgtagttggacagcccagtcaggaaatgccagccatgaatgagtgccccatggctgccttgggaatgtgtgccaggattggaatcctgcagttgaggatctgaaatgttctgaccaggtggctaaagagtatgacttcaggccgggcgtggtggctcacatctgtaattccagcactttgggaggctgaagcgggtggatcacctgaggtcaagagtttgagaccagcctggccaacatggtgaaaccccgtctctactaaaaatacaaaaattagccaggcacggtggtgcacgcctgtagtcccagctacatgggaggctgatgcaggagaatggcttgaacccaggagacggaggttgcagtgagccaagattgtgccattgcactccagcctggatgacaagagcaaaactccttctcaaaaaaaaaaaacaaaacaaaactgtgacttcataataaggtcatgttgctagggaccacgtattgacgtttctagggagaaatgagaaggaatacagcaaccgaataagacgatgttcgtttatgacatccatgatgtctttcaaggcttgagatacactgtcttttgtctaattagtcattgtgaccatatctccatggagaccattatgtttgtactcacaatagacacgtgtgcatccattaaaggaacacagttgccaaacgtacgctctgggcccagggtggagtggctttttacagcacagtcatcggagctgctgcaaaaagtgtcagaaaacaagcaaggagctgtccttattcatgaagagaggctctctctggtatcaggccctgggtctaggggagtgtgaaacccaggaaggcggggtgcacacgctcatgacaaaagttccaaaggcgtagattcactctcttttttttttttttcaaatgtgtgccaaagatttttaagctcattaattaatgaagggaccagtaagatgttaaaaactggctcaggagagaatgcagagaacagacattaatataggtaattaggaatgttttggtcaagagacacaaaattggtttcttccaagagcagtaaggagaatggggagaagatttagtctttcattaaaaaaatttgagagccaacaagtgctcagtagagtgagtggtgcttggacggaggggtggacaggccggatgggactcaagcgagactgtgctacccagacctgggcagtgctccagggatgcttagcagaggggcaggaggctgtgggggatgccgctgtctgggccttgtcctttttgtgctaagcatccccagctccctgcacaggccccaaatgtggtaaatgcatggcagaccttggggcatgaggggatgagaggggaccttccagaagagtagagtgggaacagaccatgaaagcttgggattgcagaccctagctctgccatgggacaagaaaccagtccctctcagataccattcggcactcgtttctgcctcagaactgagagcagcaaagggcttctgtgtttgtcctgctcctggcttcttttttctttttctagagacagggtcacgctctgtctcccaggctggattgcagtggcacaattgtagctgactgtaatctcaaactcacttctgggctcaagtaatcttcccactccggtcacctgctaatttttatttttgttttttggtagagacagggtcttgctatgttgcccaggctggtcttaaactcctgtctctagtgatcctcctgagttggccccccaagatgttggattacaggcgtgagccactgcacctggccttctccttgctgccttgtccaatgggattt

SEQ ID NO: 1063 - DNA, 2492 bp, Homo Sapiens
agaggcatcttggctgtgggagaaaagtaggtcaattctggtacgatcgtcccctcctgggacagtgagacaagcttcccaggaccagctggggagccctagagaagcccggcactggcaatgtcctgagagtccattcctggagccaagggacccaggcttcctaccgtgtatgtccatttcctgggcaaggcactggatggcaggactttaagcagaggcaggaaagggcaacttccagcctcttgcagaaggcctgattgcgggggcagtcagttgggattgctcagccctgaagcagagactgagaaccccgcctgcctgtgtgaccaccatccatgtccactccctctctgagcttcagtttctccaccggtaaaatgggaagagaatggaccagagagtatttttctcccattcccaaattacagagtttttttttttttttttaagacaggtcttgctgtatcacccaggctggagtgcagtggtgtgatcatagctcactgcagccttgacctcctggactcaggtgatcctcctgccttagcctccctagtaactgggactataggcacaggccaccatgcctggctaattttgtatttttattttttggtagtaacagagtctccctgtgttgtgcaggctggtctcaaactcctggcctcaagcgatcctcctgcctgccctcaagcgatcctcctgccttgggattacaggtgtgagctgccatgtccagtccacagacaacatgtattgagtgctcactacatgccaagcactgggctaagcctgttgcatgtagcatcttgtttacatttcacaataatcaagggggcaggcatctgcctgctttacagatgaggaaaccaaggccctcagcagtaaagtaaattttccaagttcactcagcatgggaatgatagacacaggtttgtaatccaggtcttgttgacatcgaaacctgggatgctagtaaccctaccctgctgcctgtcagtcctgccaggctttccaggacggcccccaccctgagccacatccccaggaacactctgccactccctatccccctcctgggctcataccatgaaagccccatgcagagcctgctactctagagggatatatattatctaaatttgataagacaactcaatttcactccgtgtctgttaccggcgataaaaccaggagacttttatgacccagcatcctcagcaagattgtcaggaacttattatacaaggtctaactggatttctctctgcagatggctgggagccatgggctggaacgcaattcggcaacacatttggggaaataaatgcaaaatgcttgttccagagacttagataaggcagcaggcctccaagctccccaagaatcggatctgcttttcctgggccctgaagggcgatttggggaggatttacgctgtcggaggaggagggaatggcgggctctttctcccctcatcccttgactcttcttgccccagggaaggaatgtgagcgcacctgagacttggagttcagcaactgtaattccctgagaggtagcaattcagagtagacctgggggtgggaggacaggatggtgggcagtggtgagaccaaggttatgaggactgtgtgcattgaaagaggggtgcaggatgatcaaaacgatggggaactgggtcttcactagctgctcgggatctgccatagagtcactccttactgccctgagaggcccgcgtccttcccaaacacacctctaggactggtgtggcccccataaactgggttcccaaacagaccccattccttggatgtgagttcacatccagattcagatgacccccgtacataagctcacagatactccaagattttgaggttcactgtgagggcgctccaaattcatggcttacctcaaattctgatctctcgcaggcgtgggctcatagacgggcttgcggtccatctcagctttcacagcatccatgcgatttttgccattggaaggaatggcaacaaccacattcacttttgcacccacctaatagatctgccgaatcttgaggttggagctttacaagagccagccccaaattcagggttcattctctagtgcagacatcccccaaacctctgctcacacacagatctggcataaccccagattcagttagctgcccaagctagactccagccctctagctaccagcagcatctgagagttaccccctcaacaagctcataccaagccttgaggatctggcacctccagtcccaggctccggtccttgtgcagggaagctgctgcaacaccactgatctgggaagtttgaggtctgcccttgcgcacctgccctgtgactctaagctctttctacggggccaggaaggcggcggagacatttttatctgtccctgggctccccgatgcttcaatggactccagtaccagaagccctttttttttttgagtcggagtctcgc

SEQ ID NO: 1064 - DNA, 2301 bp, Homo Sapiens
gatagcttctagcagattctgatgttggcctgagagcctctggagcaggtggtccacaagttgtggaacagagatcaagcatggtacactaactgtgtgcccagccccgagccaactgctacatgttttcacagtgattcaacaaggtatgtgtgaagggctcattcccacacacaaccagtgtgagctcttattgctcttattttaggcaattgtcacaccatcctcctgagatgggctttagtctctccagttaccaatgaacaaagaaaagtgtcaagaagagaggtggcttgctgagaaccacatggctaggggccaactccaaagcagtgagcttccgccccagcatactctgcttccattccctgactcagctctgcagctgaatggcgtctcccaactctcccaacctcagtctttccatctgtgaaatggaggagttggactattgggctgggagcccctgacaccatgtgtgaccttgcatgattttcttcccttcctgcacctcagtctttccatctgtaaaagaagttgccagtatcctactccaatgctacttataaacgctgctttaaaacaaaactcctggtgagggaaggccctaagtccagctccctggaaacaggccttgagccagagctttgcctgcgggaggttcactgggggagagttctcaggaacaccgtggcaggggtgagggaagcaggaccacgtggagggagaagttgaactgtgaagctctctcagcaggggcctcagctgctcccacagggaactctggagctgggatgctccaaatcgagcaaggggccaggcctttgaatccatgtatctaccagatattggacatgggtttctgtcccctcacccgcctaaaggcatgacgtggggtgaggcagctgactttggctgagggctgtcagcagctacagggtcaaaaccgtcctgggtggtatgatccatcacataaaacctgctaaaaactcgggccgacctcagccctggaaacaatagcaggcaagacgtggcctgagcctgggcttatccagctgggcctggccccgctccgagggtctgtcgcttgctgtgatcacagcaggatcagtgccccagatcttgcttaaagcctggcggccaccgcctgcctcgcagctcatctcccgcagctccccgaggtcccagcgattatgccactgaaaattccgctttcatcttgtcaacctcgcagtaaattacaggcctggggaggcgtgggcctcctccttaaacaagattcaattccacttagctgcccccattcccaccccacacacgggttccctccctcccaccaccccgggctcgggatttatggcctctctttgcaggcagctggtaaccatggcaagctccttagggaggcttcaggctggagcctccttagccccagactccagcacggccggccgctttctcctaggatgggagaggggagaggccagagatggcaggaatgggcttcaggggccaaggccgagaggtcatagtaaccccagcaatcatgagaacttcaacactaccacatctgaccctcacaataaccatcatttcccccattatatagatgggcaaactggggccagggagcatgaggtcactgccaaggtcacaaccaaggaagcagttgactctggggctgaggtgtttaagcactctggcatactccttctttccccagctgctgcttttggatgttcaaatctctcttagatctcagcccctgcttacattcccctagtgatggggaaatcactcctctctggcaggcctgttatctctctaacgattagacatagttgccaaataattgatcaggccctgtgacccctcagaagggttattttgacactgactgccctctgtgatctggctgctaactctcttctgcaaactgatctttcatggtttgccaccacagcaggctgcctggggtctccttgctgctcagtgtcccgctctgccccaggtctttcttattcattcccatcctgctccaattaccagccctgtctccattcctatcacagaatatcaaagctggaaatccatgactcctcattttcctgatggagagaggcccagagaggggatgcacttctctagtgcacagggtgaattgacagtgtgggtcccaaatcttccgccaataaaataataaatagtactgagcatagctaacttttgtcaagtgcttgataaccaccattctaagcattcacgaatgtaatccatttacttctcacataaccctatgag

SEQ ID NO: 1065 - DNA, 2351 bp, Homo Sapiens
tataaaatgttttagggagtcattgaatcttcctaaggggcagtagataaagcataaccttggagcagggagatctgctgtgttagtttaggagacgctggctgctgtaacagggaaactctgacatcccagggactcggttcaacaaagcgtatttcttgcttacagaaagtctacttggtggcagggttgagggtgggtgggggttttctgttccacaaagccattcaggcatccaggctgacagagactctatgccttcaacatgtggcttccaaggtccctctggatttcataagctagatgcgacaggacagagcatgaagggctggtgcggggcacccttgggagtggtgcacattattcctcttgattcactggctggaactcagcctcatagctatgtaatctcaaggagagtgggaaattttgtgcctaggaagaagaggaaatggatttggagagccacatcagtctctgccacacttggttttgaatctagaccttgccacacactatttgtgggaccttagcttccttaacatgtctgagcctcagtttcctcattaaagggcaaatggtgataatctcctaggaggtatgatgttgggagggtttcttgagttttttctccaacactcccatgcagtcgtggttcttacctgcagagctccagcctctatgtacaattgtccacatacttgtcaacttccttggtaataactcctctcctggagggcaaactccaccagaataggggccacactgctctcaatcagagctgcagccctaacaactggcctggcgcccagcacttagtaggcattcaataaatacatgtcggggaaatgaatggacggataagttaatatgaacacatatgtgctaagatttactcctttaaaaattcttcctcaataaatattcgcacctctatgttccatcatggtgtggtgagggggagggaggggggaagaagacgaggaggaggaggggcacctttctcccacccctactggagctcaaactataaatagctccagttggaatctgactgcagattcctccagcaaagtcagcatccccaggacctctcatcctggatggggaccgggagtgcttcctcattaatcacagctctttaattaacagctctgagcctggaacaaaaggtgcttaccgggagaacgccagcgggccctgaactctggccgcctgtttttatttggaggacctggcgccttggggagcaggcatggcatggctcagtgctgagcctggcaggggatggggtttggagggcgagcagctggcaggccggctgcctgtctccaccttggacatctccacacagagctgactcgacttcgagcaggttgctggcagctctgtcctcctcaggctgatgctgatgtcattggtctggggtggggctggacagtgaagttgtcacgttccccaggtggctctaatgtgcacagtttgaaaaacactgctccagggatggcaggcttggcagaaggcactgagatgggtccaaaggcctaactgagtgacccagagatggacacttacccaaggcatgcctaatgcccaggcagatcaaaggcccactccctcctcttctccccgttggcggatgcagcaggaatggaacctgcctttccttctcccatcatgcctcctggagatgatcagaggagagccagaccacagaagcaggacttcagccaggggctgggtgggaggcttggaaggcaggaggaagcacacacagcttggcactggaagcagtggccctagggctcctgctgagccccaggtgtaatatcaagttgatgcaaaagtcgttgtggtttttcctattgctttcaatgataaaaaccgcaatctgacaaaaggctaatatccagaatctacaatgaactcaaacaaatttacaagaaaaaaacaaacaaccccatcaaaaagtgggcaaaggacatgaacagacacttctcaaaagaagacatttatgcagccaaaaaacacatgaaaaaatgctcaccatcactggccatcagagaaatgcaaatcaaaaccacaatgagataccatctcacaacagttagaatggcaatcattaaaaagtcaggaaacaacaggtgctggagaggatgtggagaaataggaacacttttacactgttggtgggaccgtaaactagttcaaccattgtggaagtcagtgtggcgattcctcagggatctagaactggaaataccatttgacccagccatcccattactgggtatatacccaaaggactatgaatcatgctgctataaagacacatgcacacgtatgtttat

SEQ ID NO: 1066 - DNA, 2440 bp, Homo Sapiens
attgcacaaatgctactgtgtccactgcatgccagatactctttgagtactggaaatacgctagtgaaggaggcggacaggagtatgcgtctagtcaggatgacagacaacagaggaatcattaatttcaatggtgataaatgcatttcatacattggacctctatgtaatatttaatcagaagataaagttcttttactgaaaaataattagtaggtttctaggccagcacattttgtgggtcatgaagtcagcagctaagagtggtacttggaatcttgtctttgtggttcatttagggtgggagagtgtctgtgaggcccagccaccttgtcagaatggaagtttcatcacccgctgatgagtgttagacagtgcgtcagttcatctcaaagttgccaaaatatgcacctacctgggtctgctttgataaatagataagaacttgtgttccttgcgagtccatcagaactcagttatcataatcatctgtcacatgttccttaaccctatgggcaattctagggaggtggctgatctagatgaaagaaggtccttcagcaactgtccagggcacttggaagaatatccaagctccccaccatgacctatgggcctgtgctgatctcggtctcttctccctgcccatcttcattttgttccatggcctctcatgttgcagatgtcaatctcaggtcctatttgaattattcccagttgcaaatcaggaaggtattaattggtgcatgttctgtaagtgctgttagaattagagctactgggctggctgacaggagtttagagggcagcccttttcctcctctgagcctgtctccccagccatcccttctaaaagttgctgggctgatgcttgtatcttggctggctctgatgccagctctgacggggccaccctggaacctgcttgcacaggctgtcgagggcgtgagaacccaagcagacaactcccagtcctacctcctttgctgtgccaggctgccagtgccagctgaggaggccccctcctgcctctgcttgtttcccttgattgttatgtaatgttcggcagcaggaggtaaattcctctccaatttccaggcccgttacagcgcatgaaccccaccgtggggagccacagtgattgagctcagcagccaggtcccatgctgagtgtcataaatcaggcctattaccagcttctcctggcagatgccatagccaagaacctgcccactgcttgcgagacccagccgcctctgcatactgttaaaccagggctgacagatccaccggggatttaggggatcttcatgacactctggctgggtgttgccaggaatcttattctgagagagcaggaggtgacacagcccttggcaaggcatctcagacctgagatctcacagcctgatgtacggggagcagaatcagggcatgatcacctgcaggctacctggatttcctggtatggtggcctcttgtgtgcctggctgtacacgtaagaacctctaggggacttgttaaaaaatatacatctcccaggtccatccccagagattctgatttggtaagtgttccttgggacatggaaattagcattttttactagatcccaggtgattctgatgcaggtggttcctggaccaccctttgagaaatgctgctttgggaccagctgtatccctgaagtgatgcctgtaaaatgaatgcctataaattgtgggtcttttttttccatttccttctatcatttggctgaagatgtgtttgcctggggaagaagatgtgggcttcaagaatcaatggcaatcaaactgaagaataagacaaatctttgactatgacatatttaaagggcaataataatgctaatagcaaggggaaaagtcccgtagtaggatgttttgctgatacttaacgtgctacagggggagctctatccttgtttctcattggctctgtctgtatgaccaaggttgtcatatgtcctggttatcctgggtcagtccaagtttatgcaggttgtcccagtgcaacttctaatagttcccccttcgactctcgaaagtcccagtctggatgacagttgttactctgtcaataacccataggattgcttcccttaagacctccacttttcttccaaagggatctgccctatagttgtctctgaaggattttgtcagactgatcccagtagtggatttcacactaaagttcaccctgactctgggctgggatgaatggtaaaaggaactctttgaccaggtaatccccctactctttccaggaaatcccggtggggaaaaggaaggtcctatgacctgaacagaagaaacagaatttggtggccagggaaagccttccctgggggtccacccttcctgtgacctgaacagaagaaacagaatttggtggccagggaaaaccttccctgggg

SEQ ID NO: 1067 - DNA, 2476 bp, Homo Sapiens
ctaacccaaacccctatcaagatggaaaacattattgtcactccaatgcgttttcttatgccctttcttagtgaaactccaactccactgaccccagaggcaactactgttttgatgtttttcaacatcgatttgtttttccttttctaaaattgtatataaatggaattatagaacatgcattccttttttgtaaaacttctttcactcaacatagtatttttgagattcttccaagtctcagcatatatcaatagatcattccttttattgctgagtagtgttccattgtatggatataccacagtttgtttatttgttcctctgttgatgcatccctaggctattttctatttttggctattatagataaagagattatgagcattctgtgacattctgttacattcatttatcttgttttttggctaccatgaataaagaggccatgagcattatattacatattagtatattcttttatcttatgtaaatacctaggagtggaatgtgggtcatagggtaggtataaacttatttttataaaaagctgctggacctttcttcaacataggtgtagaaagagtctgttttctttagtaacatcaaccagatagtatgtgaatttggcacaaagtaagtgcttaataaatatttgttaaattaatacacagagaaaataaatagaaatatagtgactgttctaatcctttcctactgtttactagtgaagtgtgactgtttacgaatcatttaagttccatgagccttcaatatccttttatgtgggaataataaaatgtgccttagatgcctgaaaaggttagtgctgaagggccaggggcatggggggagattttaggaggtgagggacaccattcatttaatacaagcgtgcccttccttctctccctgacctccccagtctgcaagatttcggcctgcagctgtcagggaatatgccaaagcctaggcccaggaggggtcagggtaggtgaaaggggaagaggcacttggatcaaccattggttgctctcaaatgtctaaagttggcatttatatacttgacttctctcacagtttctctccttcagatttaacgtctaggtttctctgattttaaaactgggttatttgaatgtcaaactttcgataaccctttaatagaggtgtccattaacctgtgctaaattagagcccagcgtccctggaaatacatgtgacacccacatgaataccaaatgccttcattaggcacagcacttacatgatgaataccaaatgcagagcccaacgcagggacacagatttcgcttcgaggacttgccaacacatctttgcgtttcctcagcggtaccggtcagccctgtttgctgtttatttccaggtgatgagatgtggcaattgtggcattggctgaaataaataaatggcatcctaatcaccaagttcagagatggagcagcaaaggaggctatagctgatcactcaggagtcagcaaaaggatgcccacttagtatgcaagacgacttccaaacacttcataaaaggcgataactttctttgaccaaagaatatattatttataagtgattccaatgccttcttctctccctccttcactgccatcctcctgccccccattttcactgtatgttgtagcacttgttcagtgatgaagcccctcgtaataaataatttataaagcaatttacaagtacattattcttagcaataagataagacctggaagaaagtgttttactgatacacacacacacacacacacacgccccttggcttataagtagcaagctatcagaacaccaataactaaggtccatgggcttggggtgaagggtgttataagccatagtgctggagcccttatacataagccatgtaaagtgtctgaagtgtatttgcataataaataagagaaaactcactaaaaacagccttttctcttaatccttgtacacagctgccatggctttgtccacatggcgtgatactaagtgaagacaattttcccttaatggctaacttctcttgagtacatccattgagccaggcccagtgttaagagttctcaataaattgtcttattttatcttccctatctctatgagatatgttttattagtattcctgttactggacaaagtaacagaggctgcctcccagtcttcaacattcagtctttgaattcccaatccagttaaagtcactcactcaagtattcattcaatgctaatatcctacaggcatttgataagcatctgtcattctttattctgggagctaggatgcatagacagatgatgcatctatagcagtactgcctaatagaaatacaatgtaaatcacaaaggcaagctgcatataaaatttcaactttccttttttaaaaaaaattagttttttggttaaattaaatttaaccaaaaatttggttttggtctgttgcacagg

SEQ ID NO: 1068 - DNA, 2497 bp, Homo Sapiens
cttggcagaagtgcaggtactctgtaaccccagcagcccctactccatccgctgttcaggtctgctagttaactggtatgccctagtagggcgaactggctttgcatgtttgaagtcctcttgtaacaattggtaaataacttctgctctgagctcccgtcaaatcctctgccaatacccttgcctcctcagcctcttcccaggacctccagacctcccactattcaggaacctaaaagaaaatacttggcaaagccagaccctgcaagagctgactccaaatgcacaaatgatttcagttctcatttgtcagtgctcgggcctcactagttgttggaaccctgtgaaacatccgcactattcattacatccaaaggaagcaatctaactccctaattgggtttttccagcctctctcactagacttgaggcaaggggaccacatcccctacccaccccttcttggaatggcagtaggaaaaatactccaacacattttcccaaagaaattctctctttaatctagcacctcaatctttttatacctttcatgtggcttttgaaccttatatattgagggtccgtattaaatgttcattcactgaaattactgctgacaatcaatccctacacaccacacacacacacacacaccacacacacacacacacctaaatgtgcttggctataagaatttcccatgcagcagactattgaactacagatttttcagcattggcatttggaaaaggctcaaacctgaaggcagagaaaactaatagcctaaggcctccaatctaaagatagattctactaatcctaggctggctgccttgtacagctttgcaatgtctcctccacatgtgagcctggcccgcttgcctctcctgtttctacattctcagttccttggctggctcccccagggataactctcagtgcctgcctgatctgtgttacaaagcagacatgaatagccaggccagagagccatgtactaatttcctgggtggccaatccctctctctcatatcctagtgccattttaagggaaaagaaatgtaggacatggaataaacagagggaaacctgcttgatttgttgttaatgtgtcagtgttttgttttgtgggtttaacttgtagaaggcaggtctttgtcttgttactctctggcatttaacagggcctgccttcagtgactcagccgggtttccttagacagaaaacagccacttagtgccttttacaccaccaagaaaatgagattattccttgaggagatcagcagctctcggctgctgtcgaaagggcgctttgcctgtttgtttggctgaaaggcaccacgcagcccaggcttgtttaaaattagcttcctcataaatcacttgcacaatgaagtgtctgcctctgccctctgacatatttgtgtctctgtttatttttaatgatgacatggctttttctgtttccatttggctctttactctccacactcccaagcactaacttctgtggcaaaagtacaaaatctaagaaactgcagggaagaaagagttccttttctaccagcacataaatgtagtggggaaactgagttagccttgggggtatttctggaggaaattgcctcctttctaactttgtcagattataatatcctgaaattgtactttttgaaagagtaagagggtgatggcaatattctgtaacttgataggggtctgtgttacacacgtgtatgtgtttgcaaaactcaataaatgtatatgtaccttacatgtaagtttttacataaagaaaaaagtaaactaataatgaactctaataatatttatacagaactatttaagaagaagtatactagttttctcaatttactttgaaatgcatccaaaactgtgataaattaattgatggatagatggacagacgtgataaaacaagtagaaaaaaaatgttaaaggcaaaatatagatggtaggtacaagtctgttccctgcaaaattacttcaactttgctgcaagtttgaatatttttacaataaattattagaataaatgctctcttggtgacccacactgaatccttggaaacatcagagagccacagcttctaaaatcctgtattccacccaaattttatttttaaaaatctatatttatatagagttaaattgcaataatttatgacaacaaggaaaacagtatccttgacccagtaaaaagtacaaaatacagaatattctaagagagagggaaattttattagttagacacataagaaccttcttcaatttaaatggcatgtaactagaagttcttaatgcagctctctaatccaatatataaaacacaaatgaagaacagtaaagggcatacaatgaccaaaacccacataggatgaattcaaatgggcctggggtgagaaagtccaaccttagtgaacccacagttactgttgaaacaaacaaacaaacaaacgaatacccagaaaag

SEQ ID NO: 1069 - DNA, 2396 bp, Homo Sapiens
cctcccttcctggcctcaccttggcccctctcttaccatttaaatcctccaccctgaacaaagtagcaaaatgtaccccccttctcatgcggtttagtataaggacaggtttggatccctacaatgaaagttcatgtttctaacaagtgtccacagccagtgccctctgcatccatttaactgttgcctcctgaaagctatcattttctatttcctgtgactaatgtgcactgggagctaaattcacacgtgtgtgcaggaccctacttccaaagacatgtttcatcatcgtccattgacagggctctcaaccccaagccaggacccacgcatgccagaggctgtggcgagccacgagcattgcgtttactcatgcatgggcataaacctccatggcctctctcccctgcacagtctgagacacagggtggatacgcagtaattcaggctcctacagcgggcctcagactcacccctgccaggatacagatattgtagagagatttttttattgtctatctccctcatcagcctgagctctctatctccagatctttcctgtagttccttaatattctgaacaatactatgtggcagatatggtttattccattttacagatgtggaaactgaggttaaatgtttactcaaaattacacagagactaaatgccttaatcataataggactcaagtctctttggtccccaagtttcatgttcttctcacaatcccccagttaatatatctagtccaaataaagaacagattaactgactaatttaaactcccaaactcacttctgcaccagtgctctggaggatcaaggccatatccacagagtacagagcaaaaaaggagaactagcaaatacccagagcatttggcaagtatcttagacattcaagccagaagatttaggagtgaaagagaattcttattatcataattgttatcataattgccaaaacaaataaaattaaccaaggacatgtagctgtatctgcacccaagcaagactgtagcagttcttaaccaatcaacatgtctattagcatgaagcaattgtgtcttgcctgtgatcggcacctcatttttattcatcaaatatttattgggtaccagtgatgtgccaagccctgtgctggaactcgagatgacacagatgactgacgtggtccccgcccttgggaagcatgcagtccaggaaagtcatagaatgcagctcccaagaagaagccactggagcaagcagatgaaggttgggaaatcatgcaagcctagggcagaccagccaaactgcaatgggaatgcagctagctactcactctgaggccctaaagcggaataaaagggactgcaacagcttagatttcccctttccctcctcagggacaggagtagccaccattcaaatctttctgtgatgactagctgtcttagtcagctaaggctgctataacaaatcatcattgactggatgatttaaacaaaaacatttatatctcacagttctggaaactgggaagttcaagatcaaggcactggtagatctggtgtttgataagggcagtctcctggtttgcagatggttgtcctctagttgtgtcttcatatggctagagcactctcaagtcttcttataggcactaatcacacctcccaaaggccccacctcttaatagaatgacactgggggctagacttcaacatatgatatttgggaggacgcaaactttcagcccatagcatgagcagtcttcatgcacaggaggctaatcatgatacttcatgtgcctgccatttgagcctcacatctctcctccatgccagagtgggtcactttatgctaccttattcatccctgatgctctcccttagttgaacagaatccccttcccacccaaggaatacgcattgccctgtcaaacaagggaggctttctcacttagggcaaagtataacagcatcctagctaggatttgggggactcaggcatggatcatttggaggctagatgggctgacagccaactggtaccagacactgtcacttcccattaacagcccaggcatctgggagcttgcccacctcagggcaagtccattgatttattttttaatctacagaaacctgaatctaaaagattggcagtaacatgtgatgcccatattcaggaattttagttttggtgcactgggggcccctgcttgccttttggtcctagaaggcatctcaagggctcatgcaaattaagttccttacagccaccccagagatgccagggtgccccagatgggcacaccagtgacaccatgccatctgatgcttggaccctcccagacaactgctttgctagcgaataattcactggattcagccattgagacactgggg

SEQ ID NO: 1070 - DNA, 2391 bp, Homo Sapiens
caaaaaggcaatacacaaaataactaagtacagtatgttagaggaaggtatctgctatagaaacagatcacagtaagggagccagggagtactggggtggggagggtttaccatttggataaggtagccaggaaaggtgtctgctaaagtgacatttcaacagtgacccataggaagaaaggaagcaaaccatgtagattatctgaaggaagagagctccaggaaaagggaacagcaagtccaaaggccctgaggccggagtgtgtctggcgtgttcaaagaagagcaaggagactaacatggctagagtagcatgagaaggttagaaagagctaggcaatgcagagataggcaatgcagccagagagaggatactgtgagatcatgtggggccttataaagccattgaaaagactttagcttttactctgagcgagacagggaagaattacagttttgagtagaatgctgttatctgattgacatttttacaaagtactttgtgactcagttgagaatagattgtagagtagatggaggacaaaggagaaagctaggaggccagagaggacagtgatgtgataatacaggggagagacgtgggtggcatgagccctggtgatgaaggtggtgaaaagtgattggattctggatatagtttgaaagtgaagcccataggacttacaggcatggttgcaaacaatgtgaagtgttacagagaaaaagcacagggatactgtgtatcactggtgagtagaggctgcttttctaagaaagcgaccttggggccaaaatctgagatccaagtaggagttaatttgataaagattttacagattccctgtctagtcatctgcagcctcctgacaatgagaggaggggagggaacggaatgggagaggaagaggctgccttctcctgggaaaggggaaaactttgctacaaaaagctggaaacagcccaaagagtcatgttttgttagatatgtatctgcaacccaaacagctttgctcttatgggcctgtttgtcatagatcagttagtgggtagattgcttcggctggaaatggagatttagacaatgccagagtggataatggtgcccgaacgctgtcaggcgctaatcaggactcggcaatgactctgctgtgcagattgaagtgcgagcatttggagttattactcaaggcttgtctctgcaattagatgattgcataaccttaatatgatcaatcttgccggatgtgaattgtgcagctgtaaccacaaaataaggtggcatttctgttttcttgttgaacacaaacattatatatgcgcaagtcataattttataacggtcgcttttggcaagaaagagctttgtcagtcagaagatgcagttgaggggaaaaaatatatatatatgcaatacaagtgcttaaagaggcggtcataatgtcaggcttcgccttgggaaatattgctttgcgggttttgcatcttctccttttttcctttgtacacatcaattttgaggccaggaagttgggaaacttggagctcatattgagccctcccgggacaacacagctttgcactcgcacatgcaccacgttgagagtcatagggaatcagcttgatattcatcagcaattgcacatcacaccccgttcatcaagcctcattgttcagtggggacgtgagctacgacttaggctcttcagattcgagatccttgcagaaatcttagcccgccccccaaggcccggcttgagggactacagggacacagccctcaaatgccctttccacctcacaggctcagggtgcgtcggaggggatgagacggatgaggggaccaatgctgagaatgtcaagatttctcttctgactctggcccaatttgcagggggcacagaactctgagaaaggaaaaaaaacctagaggttaagagttgttttgttatgggtcgtagcttaatcttgggaaaggagagagagagaaagagacggagatggggtgggaagaagggagcaaggagatacatttaagaatagcgcagtgtgatgggatgtccagagatgaaacctagtggccaaataagtgaatgcctaagattaggtgagagcgtgtgtgtgtgtgtgtgtgtgtgtgtgtgtgtgtcagagaaaaagaaagagaggaagtgggagaaggagggggagagagagagagagagagtatttaccaatagcatctgaccaagactgtaatttcatggctgcaactaatgacaaagtcaagtgtcgaaggcttagttctcgaggagacagaccctgagatacagatttgaatacaagtttatcggggagtgctcttgggtccacatctacagggaaaggcagcaggaatgggcagagggagagaca

SEQ ID NO: 1071 - DNA, 2470 bp, Homo Sapiens
aaacccggtgagttttctgactccaccattctcattcccatcatgctgtcattttcattcctagaaattattacaacttgtatattttatttagctagttgtgtactttataggttttgttgttgttgttttgtattgctttatattttcttcttgctctttttcccccagaatgaacactctatgaggtcaggaactgcctgccttctttacttctgtagctccagcaccagcacagcacttgacaataaaacccagcagataaaagcaaagagtctgggccaggcttcctgggtctgaatcccagagctggtgctatctaactgtagagagacaatttggacaacacagtgtctcagttttcccctctgtaaatggggccaataatagtagcgatcccatggctgggcgcagtggctcacacctgtaatcccagcactttgggaggccgagacaggtggatcacttgagttccagaccagctggccaacatggtgaaaccccatctctactaaaaatacaaaaattagccaggtgtggtggcaagcgcatgtaatcccagttactcgggaggctgaggcaggagaagcagtagaacctgcaaggcggaggttgcagtgagccaaaataacgccattgcactccggcttgggcaacaaaagtgaaattctgtctcaaaaaaaaaaaagtagcaatctcattaggaggattaaatggtactatgggtaaagcactcaagaacagtgctggaacataggaagtgctatataagggtttgttttatacgtagatataggtagatgtagctagagataaaatggtaggtgttcaagaaatatttgccaaattaatatgctaagtctaggaacgggacaaagtcctaactggggcagagcctcagatagggacaatgacactcccaagggtaagttccttgatctgaacagagaaaaacttggaaagcttggaagccagaggcagctgggaagggcagctgtaagcaaaggcctggtggggtggggcaggggccacaagagaccctccatggaacccccacctggaatagccagaccgagtactaacacacactgaacagctaaatcatacattattgatttgtcaaacgtatttgcatataaataagcatgatcattcatggaggcccgagcagtggcacctcccctcagtgccatgattacagatggatggccctagttagacacgaaccagggacgctgctacccctgccgcaaagtcagcggctgatttaaaactacatttattggagcatgtaagtgtgacagcctagtggtgagtttgggataattagtctaaaagacaagataaacgactcctaaaactggtattgtgacgaagatcccaccctacccccccgccacagccagctcagccctgatgccaaaaatacagccgaagataattaactaggaaatgttaacaggcaggattatgttccaattgcattttccagaggactttagaattttacacccaagttgattgtgttcccctccccctggtgattaggcaggagaggcggattcttagctagaagcagaggctgggtggggtgggcagacaggcccagacaaggtctctaaggccaggcaagcaggtggctccagtcagccttccccgagcctgaaccgagatggatctgctgggtgaagcacgttgacccgggtaaattatatctgccatgttaattcattccacgtgggagatcagccatgagctcagaggctggcatcggctgcctctgatggatcaagggacccagctgctcagacacaatgctagagacttgtcattgcgggggaaacacggcttgctaatgctttattttaattgtcctaaattacacttgaagatgcacagcccaggaggccagccagcaaatatcaaacgttaccttgaggatctgcttggcctagagaggaatctgcagtcctaggactggggcctcaccgctttgctgatacagaagagagagccactgccttttggtttcaccacctgcctccctgctcccaaggaaggggtagagaatgccctgagacctctgacgcatcctatccataggtttgagggttccttctctgagagttaagtctaatggacctagacagaaagaggggggtgggcctttggagtttgtttgaggcaatcaaagaagaatctaaaaggaaggcagcacagcagaggaagccatggcagaagatgtcctcgtcctaatccccaaaaccgtacatgacaaaggggactctgtagatatgattaaagatattgagatggggggagtgagtgagagtgattgcaatgtcattgcaaggtccttagaagagggccagggagagagatgaaaatgctattagtcagctggcattgaagatggcactgaaggtgcaggtgggctccagaagctggaaaaggcaagaaaacaaagggt

SEQ ID NO: 1072 - DNA, 2493 bp, Homo Sapiens
agtctcgctctgtctcccaggctggagtgcggtggtgtgatcttggctcaatgcaacctccgcatcccgggttcaagcaattctcctgcctcagcctcctgagtagctgggattacaggcacgcaccaccaggcctggcttttttttttttttttttttttttttttagtagagacggggtgtcaccatgctggccgggctggtctcgaactcctgacctcgtgatccgcccgcctcggcctcccaaagtgctgtgattacaagtgtaagcttgatgtttttaagaaacagcaaagagatctgtctggcaaggctcgaagtgaggatggttgttcggaagagggttagcctggcaggccacagcaaggccttcagagtttactttaagacaaaaagctattggagggctctaagcagaggactaacatgatctgaattttttaaaggattgcaaagagaaacacaagttcctactcataaaacaaagatgtatctctcataatctagttataagtcaaagaaaaaaagcatagaataaaagttgtgtagtatgatagcatttttgtaagaaaaaacacgtatacatgggaacaaggctaaaaggcttaataccaaattgtgatttactatggtttgtgggattatggggttttttttgttttgttttgtttgcaatgcttttctttgtttttcaagttttctgccttaaacatgaattactttggtaatttttaatgttatctttaaaaagaaaaaagcactccaccatgagacttcccttgtctgaaatcttacttcaatatgaaaaaaaaaaaaacaaactcaaaaccaaaaaccaaaacaacatggggaacatttttttccaaaaattaccacacttcccatgcaatgtttgcctgtcatgaaccactgcacaaatcaagccccgctcaatgtatcaaggtcacaaaaccaacttggttaatatgttgatcattacatagtggctctgtcctctacagcaactttgataccatctttccaaggcagcaacagaagggcccttttcattcattttctatgtgtctttgatactattttgcgcttctggatttttccactgtatgtctcttagaaacaaattaagctcgaataagttgttccagctaatgaagtgcgcttttggctccttctccgtggttcagaattatccggcaaaataccaattgttttaggatgcattttctcttagttttgaaatattgcaatactaagttaccacaaataaagagcattgagataacaacacacaagaacgtgtataaatggaaactactgtaatccttttttaaattaaggacgtgtggacgcctcatgaataaacatttaggatatctggataaatatatactatgtgttcacatagataaaaacagaaaggagcattccttcctacctcactcccccaccccaagtcacataagtttctcgcagggcacaagcccagggcaatcactgctcagaaatgtaaaccatgcaactcaaaatgactcaagccctcaaacactccccacctaagtcctacatcccatccactcctcaatcacttccaacaggcttccctgaatgaaaatcccaaactgggaaggcttaacaagctccaaactccactcacacgccactcagggaatccgaggacctggggcccacgtgtagtgttttcgcgtgggcagacaagggtcccaagattcagggtgctactgtaccccgagtggttcgagtcctggctctgccgccttcactggtcgagctgacgctctttacaccgggggcatgggctgccacatcccagcagagtgcaagggccctcgggcgtggacgcaggcggctctcgggtgcacacgcggaacgcacactcgggcatgcactctcacacggtcaggcgggcctgcgcgaacgcccccgcttcccctctaccacccccttttgcgccttctacgatggtggcacgcggggctaccctgacccctaggacccctggacgcccgctcctggagcccggggggtgatgacagatggcggagggcggggctccggggggaaggggcggagcctctcagcatgggggtgctggcggctgacagaaagaccaggggcagccggcgggagggggctgactgagactgcgggccggccgcgggccaggcgtggcgggaaggagctcgcgcagacacagggtctgacaggcagagagagatacagacaccggggactgacagccgcgggggcacgcggggccggctggccgtggcgggcgctcacctggcagcggcggcggtggcggcgcccgcgaccgggccgctcttcccgcgctgcgggcctccctccccgcggccgggcgggcggccggcgcaggccccgcagaggcggcggcggcggcgacgccggagccgcggactgctgagcggcggggacgcagctgcaccaaccgactccgggccgctcggctgggct

SEQ ID NO: 1073 - DNA, 2385 bp, Homo Sapiens
acaggttcccaccaccatgcccggctaatttttgaatttttttagtagagacggggttttgccatgctggccaggctggtctcaaactcctggcctcaagtgatccacctgcctcggcctcccaaagtgttgggattacaggcttgagccactgcgcccagccctttcttttcttttctttctttttctttttcttttctctttttttttttttaagacagggtcttgctgtgttgcccagactggggggtagtgttgtgatctcagctcactgcaacctccatctcctgggctcaagcgatcctcccacctcagcctcaagaataactgggactataggcgtgtgccaccacacccagctcatttttgtattgttttataagagttgggtctcaccatgttgcagaggctggtcttgaactcctggactcaagcgatcggcctgcctcagcctcccaaagtgctgggattacaggcatgagccactgtgcctggcctcattgtataattctttcaacttttctgtatgtttgaaatttttcatcataaagtgttggggggggggataaaatttccatttgaaaatattagctagacatttctcataaaatctttcttcattgctagatcaaggttgccacgagactatgccaagtcaattgtccttgtgtcccccaccaatatgcccaggaagaaagagtagggagacaattccgaaagaggccttgagggtgctagggagttctagggactagctaaggcgtttgggctctgtgtttgaggaaactgaggctcaggctgttttgcgttgctgtttagaatccagggaagtccaggatgttttttcttaagccatgttggggtgcttaggctcagtggagaagcggggcatggccatatgaatgatatgcagttggcagcacatagtaggcacacaagtgtttgctgaatgaatatttacatgaaattggaaaggagccttccaaagatggagccagcaggagacagtgaagttgcctgtgcgggccgggggagtctgtctctgtctctgccccagcccacctctggcctggcctgagtaccttgagaagtgggcccaggagaggcccctggatccctgggttcctggacagccagggtgagggcgctttgccacattcttaggagagagcacatccaaaacaatttctttttctaaaaactcagtgctaacggattccagatgtccgtttgttatataatggggtttgttttaatagcgtcaacttccagatgtgcagcctggaatcaagaagcccattggccccctgaggacactgtgagccaagctgagagctgcccgggggagagacatggacgtgcagaaccagggatgggagaggagccagggtgccttcttgctgcccactgggctgctcacctgccctgcagctgtccccagactgaaagacaggaagggtgttcccgcttccttttttttcagtcctgactctgagcaggggctcccaggggacaatcatagacaggcagcttggggagggtctgctttggaatctggttcaagcaggcctagctggatgagcctggagaagtccttggcctccctgtctttgaatggaaaatagaataacgccattctacccagagaggtcattgtgcaaaatgaaatgaagtaagcagcacagcacggggctcagaaagccttgactttccctgagtggagagaacaggggcccaagtcaccgagcatcctcccctactcctctcagcaacacggatgcccctgggcagcacgggctgcattttccctggaacactggaaaagagccaaggtggggagctcaccacctcccccagtggcttgttccatggccctgcagctccaacggatagaacattcttccgttcactgagccaaaggcggcctctgtgtgacccccaactggtctgagttctgctctctggagctctgctgagcaggccacaccctctttcacctgataccctcgagtatgggaagacagagaccgagtctcccaacccttttcctagtaggcagctgcagttatgacatcagatggacgaagattaagatgctctaaggagagatgttcaaaatcccaaacaagaaaagtctcaacgtctgggggaatgattctgtggttctccctgtgtagatgttaataaaatctgtatgccttcactccaattcaaagagaaaagggccaggctcacgcctgtaatccccacaatgggaggccgaggaggatcacttgagcccaggagtttgagatcagcctgagcaacatagagagacctgtctctactaaaaataaaaaaattaaccaggggtggtggcatgtgtctgtggtcccagctaattgg

SEQ ID NO: 1074 - DNA, 2440 bp, Homo Sapiens
cccgcggccggggtctgcccggacccccgcccctgcgcgcggcccgcagcggcgcactcccaaggacggccgcccggcccgagcgaaagcgggagcgggagcagtagcctggcgtggcagaggccgcccctctccccaggccgcaggccgccgcctgccctccgccaggccgcccgcccgccggccccgctcggaccccagcccggccgggcctggacgccgccgcagcccctcatcccggctccattcataggggcaccctaacccggccggcggggcggggccggggacccgcggacaaggccggtccgccgaggccagggaggaaaataaaaagttaagagaagaacttacctaaaatggctcctgcagcagccaaaatacaaacagctattatttggtgaagtttagctcagacaccctgcaaggacaccctaacccatctcgggcccgccttccctgtcgcgccattgggcttcgccggtccaaaacacagacccattggtcatcccggctgccgctcagacagaagcccatttcaagcttgcttgcaggggcgagtgatgggctcgctccattgtgctcgtatttgcatggatgtgatcgcggccttgattggccggcgctgagaccgccccgccccctgcctcgtgccccccgccttggagacgccgctgcgctcggccccgcccccccgggactagcggcagggccacgggggcggggcggggccggggtcccgcgggccgagggggcggggcggggtcctgcacgctgcagatcgcaggcagggggcggggacctggcgcgctcgggcgccggcgggggttcagcgcccaggtggaggtctctcaggtagctggctagtgatctggaagacccggggctggcgtctccgggggtgggggaggatgtggctggggtcccgcgacacaggggttccgcaggggccgaggccacgcgggcagatgcaaggagaagcgagggacccgcaggtcaggaaaagaagatcctgagtggccaagcgaacggagcagcctccacccgcgtcttctgccgctcagcccggctccctggtactcctggctcccaacgggcttcttcccaaggcccagcgcacccgggagttttccagccccggggaccctgcagcgccttggatagatctccgtgaaatcaggtgtcgagctatggtgcatttattttcgggcctgtcgcccctaccatccttgtagcatcctcaaggacagggcccagtgtttggcagagattcaactaattgttacactctcgaattcattcgttagcaggtaatctttgagtgcccactaaattccagacattgatataaaacgggatattgcggtcaacaagacaaagcccttgctttcatggaataggcgaaagactaaatacaaggggtaggtagtgataaatgctgtaaagaaaatagatggaagaagaagggaaattagaccagggtttaggaattaggaaattcctaaattatgaaaggaggtatggagagtttgccctgcctggctgaatactctgtatggcgtctcattactgccccctcccaccctaaccttggcagtcaccagccctcctcgcgccctgcttgcccatcgtgttttctaagcacccactaaaaaactgattggattctgactgtagaggctcattctacctcaaagcagaaatgatctgagtctgatgattctaagagcagtttgtgggatacatttaggataagcacattttgactgtgtcaggggccatgataatgatttagcagaggcttactaactccagagagagaatatttttagcttctttgaaatcccagttttctgatggctttcagcctgtggccctaactctcttctgagtaacactcttcacttcttggcagacacaagagatttctccagcttgaaaacagaggcagcagccccctgctgcctatctctctcatctgtgtgcatttctgtcatttgactcaaggctggccaagatgtcttatggtctttctttcttgtctttcttcctcccttaaacagatatttattaggcaccaactatgttccaggtattgttctagacacaaggaatgcagcattaaacaagacaaataatatctttgccctcaaggagcttacaatccagttgagggtgagatagagagttacgcatagatcctgaggatctccaattttgccaagctgctggtgagtgagtatactgagggctactcgcctgctgctgcctcttggggacagcatgcttgaccttctgaaccagctgcttcaggagctgaagctgaagctgaggtaggaccaggcagctggtagccacaacctctccagctcaaacaccagaatcacaggttccaaagctctcaacagtgcccatgggagtcttggctctcatgtcttga

SEQ ID NO: 1075 - DNA, 2422 bp, Homo Sapiens
agatggaagttggttggcatgccctgaaatggtgaggctccaggagacatgggtgggaccccttcaagaactgctacaaactcctgctctgaaatcagactacctggattcaaacctccgatgttccttcctatttgttatgtgaccttgggcaagtcacttaagccctttagtcttagctgttgaatagaaaatatgatagtccagactttaccaggtggctgtgaagattaaaagagataaggcatgcaagacacttacagggtacctggcacaaggcaaacactcaacagactttagctgttatttgtaactagtctatttattgtactgaaactgactgggggaacattcagacctagacgatgttatggggaaaaatagacaagaaacaacaacccaaggttttatccaagagctatgtgatgtagagtgtgaccagtggacagcattgtatatttggacaaatatgaatatataaacttttgagttgtctttcggatattagcttgtttataggaggatcctctgcgcagttgatgaagcccatgtagctggaatcaaaagcttctgtacccatgggctgaactggtagtagcaaactgaccagggaattagagcatgacacccaagatagtgggaaccagctgagatgcaggtcataatcatgataacagcaggtaacatttactgagaattttctgtgtcaagccatgtgcaaaacacatcaccagattatgacattttctcatcacaatagtccaaggtggtgtccctgtcatgacagcctgcctactctcctttcagagtgcatgttaaaataacctctcactgcaaccagtggatttcccagtagtctctcttttttttttatttttttctggagtccggcctttcataacaagcccccaggtgcatttggagttgctacctgtaaatgtggcaggatttctcttcatcagacttttgtccctgttctcttccctgaagagcaaacatgctgcactagaaggaatcagtggctcattgtcactggcaaagccgaggcagtgggaggaccattttttctctgggttcagcaaccctcctagtggttagcagacagcagcataatggccagccagtgtgaaactgtgcaaattgcctcataaataactcgtaatgcacaggcaacagggagaggccatagctcatggataaatgactccctgccatttcggggtattaaaccagggataatccggacctcaccatggggattcattaactactatgggtttcccgcacgcaagcctgctgggactcaggcctgcttggtgcttcttgtggcatcatgatgggggcaaaacacttccaagcagggccatgagaaagagaatgtaagtacctttaacaaaccagccaggggtgaaccctgtaggagccaagtattttctctgtggaacttgctttctgaagaaatctctttgaagcgcagagaaaaacataataaccttaacaattaacatgtattgggcatttactctgtgccaggcactgtgctaagtctttttttttttttttttttttttgagatggagtctcgctctgtcgcccaggctggagtgcagtggtacgatcttggcttactgtaagctccaccagccgggtagctgggactacaggcgcctgccaccacacccggctaattattgtatttttagtagagatggggttttgccatgttggccaggctggacttgaactcctaacctcaggtgatctgcccaccttggcctcccaaagtgctgggattacaggcgtgagccaccgcacccctgtgctaaatcttgtgtaactcccacaaacattccattgagtggatactattattattagtcctattttcatagaggatgaagtgatagctcacagaggtttagttatttattttaggcaatatagccaatatgtggtgaatgcattagtcagcttttgttaggttgtggtaacaaatagtccaccagtctcagtggtttaaaatcacaagagtgttttgctcctattttatgccactcatggatcagctgctctcctttacctgactttattacaggatccaggctgaaatagtagcctctatctgggacatactattctcatggcagaagaagacaagagcaagaaaactggtggaactggccatggctgtgaaagcttctgctcagaatgggcatatatcacctctgctcacatttcattgatcaaaggtggtcatatggccaagccttctttcaatggggtgaggaagtttactcctcacactgggaggtactgcaatgaatgacaattggggagagatatctaagtctcttagaggaaaggcagagatcagagaatagtaatataatctatgcagctgagtgagatcagatctttgtgg

SEQ ID NO: 1076 - DNA, 2186 bp, Homo Sapiens
gtgtgaaaatgcttccttaatcacatcgaacgggaggatctccgaccatctgtactttatttgaaaacctagcatccggttgggatgtttgggtgggtggaggaccctgccgtgttgggatgaaacagcagggacacgtttaaaacacaagaaccatgcgcggtggctcacgcctgtaatctcagcactttgggaggctgaggcaggcggatcacaaggtcaggagttcgagaccagccttgccaaaacggtgaaaccccgcctctacaaaaaaaaccaaaataaaacaaaaaacaaacaaaaaaaaccaccaaaaaaataatcagccgggcgtggtggcgggcgcctgtagtcccagctactcgggaggctgaggcaggagaatcgcccgaacccgggaggcgaaggttgtagtgagccgaaatcgagccactgtactccagcctgggcgacggagcgagactccgtctcaaaacaaaacaaaacaatcccacgtcaagatcgctttgaaacacaggcagaaaaattaggcaaaaaatgtcaaacggctaattaccttggctcagttacacatttactcgaaagcccgcctcccccacttttagccccagcgttaagaatgtaaaatagggcgcttagaagtctaagcgataaagatcttcttaccgagagccaagggacaaaactcattacagataagcctagtcctcccatttcccccggacgcctctccccgattgctaaagaagcagccgctccccgggtagctgccaggaaatcagtccggccccgcggcgctgctttcaccctgcagggtgtaagaggcgcacttcctgcgccctccccgcggccaaaccggggtgcgggaaccttctccagagaagctgcgagttggggaaactccgccaccgatccatcgtggcgccgggaaaggggatgcggggctcggaagggctagatttcgcaatcctgggatcgacattcctcccctcccccactttccccagccttggactgggccaatgaaagcccgaaaaagaaaaaaaaaaaaaattaaatctcaatgtagccggagtgcaaaggccgctcggctttgtttcccggcgggggaatgcgctgtgttggaggcgcgaacaggagccgcagacggtgagcctcaccgctgcaaatgccagggcagtgaagccgaacagaaaaccccatcgctttaaaaaggcagctgtccgccctccccctttcccctcgccagggcgaggggcccctcaagtccgggatccgcgagctgcgcggaggatctcgccaaacccgagcaccgtgcggcgtcttttaagagctcgaacaacgggaatccagcaaaaaacaagccggccccagaaggcagcctccctcctctctccgcgcacgggctacaatcgcccccagtccccaaactgtcccagtagaggccgcgcggagagagcagagccgagggacccagcgcaaggcgggagccaagcgcggctgctttaagaacgcggagagcgcgcgcccgccgccagctggcccgggctgcgcgcccccgccgccaccgcgcgccccctgttcgctcgctccttcgctcgccggctttaaagtctctgccaggatccatgctcacatgttacttcctgtatggaggcatggccagtttccagccccgcgctcttcgttccttcccagcctgcgccggagccacaactttcaggagcatggactgaaggcgccctcgccccagcgcccctctgagatcctttgtgttttcctccgtttcctccggccgtttctattttggggggctctccgctccccctgcctctcccctccccttcccctctcgcaaacatgcctccttccttcccggggccctggaaggagctgcctgcctgaagcccggagacgccgcgccgcgctcagccccgccgccgcccgccggctctcgggctgtgctgcgctgccgactcaagttggggatcctcggctgctcgccgccgccgcccgcggtccctgcctgccccaggcccggggcatcgccgccggccgccgactccgcgccctgcccgatcggctctctcctttttaaacggaaagcagcctttctccgccgagaggatcgtccccagcgtggctctgcgttcccggtcactttttgagattttccggggggcgct

SEQ ID NO: 1077 - DNA, 2420 bp, Homo Sapiens
agggaggcccaggaatgggatctgcctccctcctactttttatgttgggttctggagaatatttcaggggtggggaaatttccacggcaaaaaaagtctaaaaaaaaccccactgcattaccacactgtgcccttaggtcctcgagttcctgaacatggctctcccatacccataaggatcctgcccacaatgtttcactccatccttctctgctcgtcaggtaaccccagtcagagaggggatgcttacaatcccttcttctggggctgtgggcctggcggacacgtggcatttgcttatctttttggatatgttgtttccattgttgctggacattaccaaacatggtaacgtctatgttggccccttatccttccttaagtagacggggacagatcttgtgtgtgcatgcatgtgtacctgtgtgtccgagcatgtatgtgtgtgttcattgtaggcaggtgctatgggtcatgcgttttagtctggacttactggctcagacacccatgaggtcagagggtctgcaaagctcctctggccgtgtttcttccccataattcccagcaaactccctggtcctctgggttcaaggcctcagcctgttttccaggtccttccaggccggtggggaccgcaggccccgttacggagcttggagctcagtgtctgcctgggatacatgaggggccccgagggctcacatgtcccccagcctgggaagtcactcagccgggcctcggtggggctcagcagaatcctgggcacccccacggcctcctgatactccagcccctgccgcctccacccacacggagacagcttttctcctcccacatccctcatcccccatgacatctcttggtatgatcctgaccatcctagctggacaatcaagcttttcaagctcctcatgccgccccattctccccagcattgttgatttaacctcagggggacctttctcttgacgcctccatgcctcgtttcttccctctgcagattctttggcagcccttttgtgcagaacagccatccggttctatctcccttgcaaggccggagttgctgttttattcccttgactcatatataacaataaaaaaaatcattcttgctatgtgtttctttatctccatcaagtggttgaaactcaatctgattgtccgagcacttctggctggatttgggttggagtcgatgggattttatgagggttgtaaaagtcaagcttttaacatgtctcaaacaaattggcgtgtaaaggagaaacgttagaagaaggaacatggctgcagacgggaggcttgggaatgctagccgtagtactggggcacaggtggctttaataatgcacacaagtttggctgtaagttgcttctacaagagcagaagaggctgcagaaccactctcaggaggttgagatcaaacttctcggctcctgagtgcacacagttttgcatggcttttaaaatacagattccaggatcatccataacaatataaacctgtggttaattctgctgaattttcatttagacccaagctgtgttgtcagtagaaatgcaattgcgttagagaaaaactgtttatatttcttgagatactgtgataatgaaaaacagtaccataaacccccattaagtaagaagaacattaattgtatttcatgctgcctccctgggccagcacgctgacacagacatgctttacttcagcaaaacacggctaatctttgcagcacggtacccattttcccctttaattatacataattgtatagtctaatttattctaacgcctgacgccgaaaagtgcacatttatgaatcaagggttagtttgggagggaggagaattataaacgggtataattgcagtctcctgggggctgcttatgagtgatttcaaagaatgatgatgtttattctgaattcttaccagtgaaagacagtagggctgcctccagttaagatactgttctaagaacgcagataacaggacaatttgtctagttgcttaccacactagtggttttcctttggataagcaggcaagaaagattaaagatgtgggttccacatattttgtgatgtgatgaaatccaggcacacagacagcatcagcaaatgtgcaattgaatattaaaatgagtaatgtggccccaggcagcacagctgcagatctctgtggacaagggagagtgcttggaactctgttggatgatagttttctcagggggaaaagcaggatccatttgaccattagtgcaattcactttagggctctctctggaacagtgcatctagttttgcaatcgtatttcagaaaaatcacctttaagctttgatcataattaattaatcaattatgatgaatgttgatggtgatttagtaaaagtggaatgatgacttaggg

SEQ ID NO: 1078 - DNA, 2437 bp, Homo Sapiens
tctgagaatctaatgatgtgggtgatctgacaggaggcggagttcaggcggtaatgctcgcttgtctgctgctcacctcctgctgtgcagcccggttcctaacaggccacgaatgggtacctgtctccagtccaggagttggggaccccgatataaagcctcagactgtgtctgatacagactaagccctagagaaactttgctgttgctatgattattattgacattattgatattattgacattatcattaggtcgggcacggtggctcacacctgtaatcccagcactttgggaggctgaggcaggaggatcctttgagcccaggagttagaggccggcctgggcaacacagcgagacctcgtctctagaaaaataaaaaaacaaaaaattagctgggtgtggtggcatgcacctgtagtcccagctacacaggaggctgaggcaggaggatcacttgaatctaagaggtcgaggctgcagtgagctatgattgtgccactgcattccaccctgggtgacacagtgagactctgcctcttaaataaataataattaatttaaaaataaaagcattagcagtagtagtagtagtagtagtagtagtagtagtagtagaagtatggattaatccaagggggaaaaaaggagggagtgggactgaggtaaagcaagctgctacttggagaaaaaggtaaagaagatgaccagatagatgcgtgtgtagatgttcacaccatctccagagacccaagagactggcggcagtggtggagggagtggggacctgagggaggggaaaggacaccgactttccaccctttgtccccttccacgctgtttgggttgttcctttttttctgtgcacttgtgtggatattcaaaaccaaacactacagaaagaaattctgcaagaggtttccttccttagcgaaagccccaaatcgtccctctcagccccgccccctcccacccccacatcccggcctgtgggtggcccagtctggtctcccacctctgctggtgttctgcgctcctggccttggagcaggtccgagctggaatgccctgcaagaaagggggctcctcagagtccctcagagtggccctggctctgggcagccaggggtgtggggctttggggaggggggtcccggctgactgatgagaactccaaatgctccccagccccggctgctaatcacttccagattggccgggtcagggccagggccgccgccgcctggctccataaacagcccgtcgctccagatggcggctggctccagcctggcgagcaggttcatgggggactggggggtggcagcaggtggaggacccccacctcactagccgcctcagctgccacacctccacaccgccctgagttggggaccctgggccagaaggggtggcagaaactgaacccattgctcagaggagggaaactgaggcccggaaggggcaacgtgggtggtggtcaaggtggggggaagacagagatgtaaggggggtgctccttgagggttgatgctgggttcactttacctctgtgaatccagcacaccatgaggatgccgtaaagacccgaggagggagggaaggggggcatcattgccagctgggtttaaattctggctccagcttttactccctgagtgaataaattatttccacccccagcctcagttttctcatctgtaaaatggggatggctggagtacaggattgctggaagattcaatgattcggctcctgcagacagtttgcactccacacacggcgcaggcgctgaacacagcttctccctcttccttttccggaaactccttctattcctgcttctcctgccgccggagagcacagtggcctcctccaggaagccaccttgacttttactcagacctctccctttgtgccaggcactgtgcttttcccacagcctctctcacagggtctctcctcgacacaactggcacctgacgctcttgtccttttgaaaacaaggaaacagagggtcagggaagtaactggtacctagtgctgttagggccccgccccttgcagatgaggagacaaagggccagggaggcagtgggatggatatgttgaggtcgccaggaaaagacagcctgatgtgcacctggagctgtctctgaaggtctcacagaacctggcacagcgtcaggtaacccggctgcctctcctgccacacccaccaaccccagagcccacaccttggcacagaaggaagagatccaggctggtgctgggtcgtaatatcccagggaaaggggtaaggagccttgacctgctcccatacctgcctgtctccaaactgggctggatcctggctgggtggccgctgggtggtagccttgtcccaggacacccggcagcaggacaaggtgggggagccagttgctctgtgagttc

SEQ ID NO: 1079 - DNA, 2383 bp, Homo Sapiens
ttgtctacccgctcctgggtggcagctccatctttgtctctcttggtcatcactgtgtccccagatcccaacaaagcacctcgtacaagaaagtgctcagtccatagttgcagaataaatgaatgaatgaatgaatgaatgaatgaatggaaagtgcttagctccacgcccgacccttagtaagcacctgaaacccaatgccgtgtggtggtgttagctttggctcccgatttctagccccatccaatcccaccctcatcagcccggcgcccgtgctttctctgcctggccagcttcctgctgcctgcacagtctcctccctgggtcaggacgacctctgagggaatcgtgggcctgcacggctggctccctctggctctgcctccagctcctcttacatctcccgggggcagaggcttctgggaaacaggctttgaagctcccctgggtcagacccgctggggccttccttaggcattgcctgatgtgaccccattagtgaacaaatggggacagtgagacctagagaggggcagccatgtccgatgtcaggcttcggggctcccaaaacatccagggaagcttccaggactctggcttctttgttgtttttggaacagagctgagctcaggtgcctgttttctagatgacaaaactgaaccccgttacaggctttggagccaggtttgaatctcagtcctcttacttcctggctgtgtgatcgaggtttgtcacttggtccctctgaggctcagcttccttgtctgcaaaatggcaccctaatggtacccaactcacggaggtgtttggggggacaaggtcagccatcctgcaggcaggtggggtctctggcctctcccacggggtcctgggactcctggctccggaacccccaaggcccagcccctccagggcccgcatggttccctccttgctgggataatttacagtcccagggccatagctgctgttgctttatttttttcccttccccgacttctcccttcctcaccctggcctcacttctccagaaccagcttgtttttgttttctgtttttacggctccataaatgagtcacgggtctgatttgatttaatttcgttgtaattgttatcttttcaagcttgtttttttccactcggttactcacgagaccacaaaaacctaaacaggacggggccttccccagcccggcctcctggtcccccgggactccgggccagggtcagcagctcctggagactgaggtggggtctgtggagcttctgtggggagggacttggtgtccccagcaggactgggtatcccgagtcccgggctgcagctctgttgctggacagccttgagagaattgttcgagctttctgatttccccagcatcctccttagcaggctttagaacagggaaccaaaacccaggcacctctgggccagaaggtgaaaggatgagtaaggtggcctggtgctggctccggtgaactggagagaacaggctctcctcaggggacggtggcctctgagccagcaggcggcccggatcttcccatttagtaagagaagccagaagtctgagattgtatgtgaaaagtcctgatttttaaatgttggccaacgagtcaaattaaaaacaaataaacaaaacctgactctgtggatatctgtggccccgtgggccacctctggtctagaaggttccaattctagctgcggcagccgtgttctcagtccttccacccttctgcctgagcagtcccctctgcctgaaactctctccttcttcctcctcatctcagtcactctcattctctgaacctcggtgtgtctcctgttcgcagctcagaagagatgacatctgcttcatccatgttcgccttcccaaggcgcctagttgttcccaattcacttttgtttctatgctttctcttccatggagggtctgtcttgtttgagaccgccttcgtagtgggggaaattagccccttagttgttaaaagtcataacacatatcctgcctgtcttatcattcatttctaaaatggggcacgatacttctttggtcatttaaaaaccgaagacgcgaggccgacgcctccagggatgtgcgctgggcggtaggagccaggtgtggggccaaggagtgggggcggaggaggaagccaggtccccagccagggggctgagggctgctcctccaaagcttgggtatggacatgtgaccagggcccaccaatcacatgcagccatgccagatttatgaatcagaagttggaaatgttgggggctgattgcttaggactccgttctggggtgggtggggctgcagcccggctatttttccagaagctgcagtgggccagttctgggggcagtgaccagggct

SEQ ID NO: 1080 - DNA, 2495 bp, Homo Sapiens
atacagagggtatagatttttctccatctttttttttcttacaaaagaaatgcaaacagaaaacataaacaagagcaaaatcccatgtaaatctaccactcaatcatggctaatctttaatatcattgtttttttctaaaattgggagtttgggatcacactggatctactacttggtaacagactctgatcttgtaacacatttccattgtaattctataccatcattttcatggctatagacttggcctatagctgtgaaagtagattcaccataatgggatcagccaatctcctttccttggatattaggatattttcaattttttattttcatacagacacttaagtgaatgaagcaaaatgtctgcacatattcttagttacctaaaggtatgatgttagattgtttttcttcactcatatttttactacatcagaatgttgattacagttatctttgatggtatgatgtgagattattactttgtttccatacttattttctctaaatgccttgcaatgaacaggttttatttgcataaacacaatattatttaaaatgatgccatgaaaatttctatatgaccaccgttttcatggtaatggcttgttacggctgcctgtaattccacataggggataggccgtaattcacttaaccatcccctatcattgaccggctgggctttttctaatgtctttaagatcgttatacaggaaacctactccatatctggggttacgtcctcagggagcagcccagcaaaggctggtgaacagatttcacacctttggttcatcctgccaagctgctttcccgaaaagatgttccaatttcccctcccaccggcagtgcgtgggaatgcctgcccagccgccctcctctccctgagacggttcaggcccctggacagtcgcatcctctgctaggagggcaagagaaagcaggaaataatttggccagcaagtgaccccagacccagagccaggagtgatttttaacaagcctgattctcagaacagaacctgcagagaaaaagaaagcaagcaaggaaaaaaaaaaaaaaacccctctctactggaaaaaacatacacatacacagattaaaataatatttggcacttacgtcgcacttttaaaattcttcaaacgctttataaacactagctaattaattaagccgcctaaatctggctgcagtcggtggagagagctcgagaggagctaaaaaaaaaatgggggagccagcgctacacaactccagattttattgtcgcctgcctggggtgtgattacaggcctccggctgcaccacaagaatagccctgctccaacatgctgcacgcctgactccgcagcctctcctgcgcctcctgctccctcaccaactgctgactcacagccccttgtggtgttattgataaggataataataactgcaagccaggctgagtcccgggctccgggcctgcaccctcccctggatatgccagtatcaactccacctaacacatgaagagagaggagatttgcccagggtcatggagccaacgacatccttccttccttcattcattaccgcattcattctgcatatttttatcgatgacactgtgttttaggcaggaggttggaaacagtcccttgtggatcctacatcctactattgggaatgtgacaatccagagaaaatcaaatatgtgaataatacagctatgtgataataatgggaataagaattaaaacttacccagcacctatgcagcaggcataccaccgtgtcagggtcctcatgactgtgctggggtggatgccggaaccccacttcatggatgatggaatgggggtccagggaaggtgggtacagaggtggctaagaggggagccatgctgtcacccaggcctgctggccctagcaactgtgcttccccgaggcagcctttccagttggtccagtctcgaggctgaaatacagacctatccggaaagttcctagctcagtgctgctggtgctgcctctgatgtccccgcctggatgggcctcccgggcctcccacacatttggccaccagcctcacccctctcaggccgtctgatgctggctgggcctctgtccactgtgggttctgtctgtccactgtgggttctgtttttttctcctgtgccatgaagatcttgccatgttcaacttcaaatggaaatgaaatgagaagctggacttcctgataataaaagcagttgaggtcttaagtggttgatcaggaaaaggaagtcgaaatggtaatatttacacccaaagcaggtggagtggtcttaggcactctgagactccactcacctgccatgagaaccgggccccaagggtgatcccttgccagagtcaagactgggtgaggctgggaatgggagaaagaggcaggacaatgggcagatagccctgggcttcctgcagtgagggcagataggggtctgtgagcctctttccctggct

SEQ ID NO: 1081 - DNA, 2491 bp, Homo Sapiens
aaaaaagaagacattcacggtgtctctgtaccacatgtctgacagatacaccatgtgtatatggtgggtatgtgctctgtatgattaagcttttcctatgtgtataatggatataaaatgtgtgggaggaggatatgccatgtgggaggtgaatttgctgggggcatctgctatatgggatggctttacagtatttgcaataactatattttgggtaatcatttacaacataaaatgcgtattaatgtatttgttctgtgtatttcctatttctctgtgcatatactgtgtagggtgggcatacaccgtgcatgatgggtacaggctctgtgtctgcttagtatgccatatgtgtgggatgagtgcaggctatatgtggagtacatgttgtttatgcttgtgtgaaggttataccccgagtgtgtgtgatggctgtattttgtgagtaatagtatccaaggcataaacagtgtctacaaagaatgtgctgtgtctgaggagtgtacatggtgtgggtgatgggtatactctggggagggatgtgttgtataacagatgtgctatatgggtgatgagcatatactgtgacgtatacacagtgtgtgataacattacatggggtatgtgtgcgtacacgccacatacggagcatatattgtatgtgtgatgggtatacagtgcgttgggtataatgagtaataagtataggtagtgtatataatggacttactcttcatggtgaatatatactgtgtgggagtgctaagtatacactttgtggcataaataagccctgtgtgatcagcacacggtgtgtatggttgtatagcgaagttgtcattgtgatgggtctgtctggtgtgtatcaggcaccctggtatatggaggccatgatgggaatatgggatgtgtgcctgagtgggagcaggcagaggggactcatcctgtggggagggggcatggcagggagcagttggatcttcatctgtttccagaacccccagacccttgagcccaccgaccacactgtttcaggttcttcctcaagttcttcctcaaatgcaaccagaactgcctgaagaatgcggggaatcccagagacatgcgccgcttccaggtgggtctggagagagggtttccccttgcaaccccaccctttcctgatggaggggaggggagggggaagggaaggctgtgaccctgccaccctgggaaaggcctccaaggcagatctctgcccagccctgtgcctccccagcctggttggtgcctgctgggggtggggcagctccttctcaacttgtgctggctgccaagggaggcttcattagagtcccacttaagaagatgctaattgtgacatttttacatgattaacgacccaggcaatttgcatagcgtgaagcggagagcagctgcccttagcacatccccaagctgcacacccctctcagtgcagggcgggggaagaaggcagccccagttttctccccagaatagggcaggggctcctgctgctgagttctccggctgatgctgcccacctccacttgcctaagaccccattcctggcttggaggtccgtggatacaacccagcattctgtgtatgcaaaaacagtagccattctttgcctaaggagccagttttttcaggggtctttatttttgtagcgcctggggagtcagttcatctgggggtatcacctgatccagctggcccccttccaccagctcagacactgcaggattgaagccctcctcctcccaccagtgaccctaaattccagcatccaaccaccagcctcaaggtgctggttccccaccacattcccctcccgggagcccccgagggccccagccaggctggcctcggctctccccgcaggtggtggtgtccacgacggtgagcgtggacggacacgtgctggccgtgtccgacaacatgtttgtgcacaacaactccaagcatggccgcagggcgcgccgcctggacccctccgaaggtcaggacccccggcccagccccggccgccgcgggcccagccagccccccaggccccacctcagcgcggtcccctgacctgggtcctctcctgcctcccagctgccaccccctgcatcaaggccatcagccccggggagggctggaccacgggcggcgccaccgtcattgtcatcggcgacaacttcttcgacgggttgcaggtcgtgttcggaaacgtgctcgtgtggagcgaggtgggccaaccccgccagtctccctctgggcctaggggctgggccctcccctcgccggtgcgggacctgcaggcctcccctctcccctcgcagctcatcacgccccacgccatccgggtgcagacgcccccgcggcacatccccggggtggtggaggtgaccctctcctacaagtccaagcagttttgcaagggatgccccggccgctttgtctacacaggtaaggagtcgggcgggggagtggaggtcta

SEQ ID NO: 1082 - DNA, 2395 bp, Homo Sapiens
aagctcactcccacctccgggattttgcacttgctggtcccttagtctggaatgttcttccactacagcaagacctgttccctcactttcttcagatctctgctcagatgtgacttccaagaagccttcttgccttccccatccaacctgggcctccattcacctcgctctctatccccttcctctattttatctttcattatggcatttatcactgcctgtggttaaattccttatttatttgtttattttctgtttcaccactggaatataagctccacagagcaagtagcttgtctctcttgttcactcctgtatctccagcacctagaataagcctggcatacagtagctgctcaggaaatttgtgcaaaatgatgaataattaattattatttctcttctatgatcattgaagagctatgtttttgttgttgtttgttttttttttttttttgggacaaacctggctcccaacctcaacttcaggagatgaaggttgcatttttaagggaaaaaaatgtacccaaggaacaatttgatgacaaaatctccaattttctgtaacatggattgaagtttgtgtcttcccagttttattcgaagatcctaaaattcatactgctttttccaaatcctaacatttagattgtttttcaaatctaaagttgtggatgaattcttgtgacttctgtacgtactttgactgctacggtcactcgaagcttccttttcaaaaccacaggatggcttagctaaaccatgtcctttccaaactactttactgagtccctcctgttataccccaaagagaagatgtactcctttattagcagttggaacctgaaagaataaataattcaaaatagattcagcctttgttggtttctatgactatgaaggtatggaacatcattcattaacaagtgtcgtcggctgactgccttctcttgcacataaaaaatgagcatgcatataatcgcagcaacctgcctttgctgcagagtgaacagcttcagaaatggaccattctgtctcatcctgtctttacatatgtgggacccagcatgaggctattcagaaacaacagaatcaggtcgaggccagtcaatacagtcggtagctgttattgaatgcccactgggtggctgcaggctcctggctgaccacgtttctaagagctggttaatggagtcctcgttacagtcttggttaagctagcacatttaacagcccgcagtgcaaatgaaaaatacataggtctgactagggagcattttccctttctgtctttttccgtaaagagaggaaagtgattgctctggaagtttctgacattaatagccatgttggcatgtggctgtaagacaacctgagttaagatggtgatatgccacttaaaataacaaggccggcacagtggctcatgcctgtaatcccagtgctttgggaggccaaggtgggaggctgggcttaagcccaggagatcaaggctgtagtgagctatgattgtgccattgcgctcctgcctgggtgacagagcagaaccctgtctctaaaagaaaaaagtaatagggtgtgctgtgctattgttacatttataaaccactccttattttccagagcatggttgtttttatgatcttatctgctgcaagagaccttaaatgatattgatcaatattttcctgacagtgtaagttttcattctcagaactgagtattatgcaactgacgacatggggagtggggcttgaattttctggaccactcagggttgggatgtgagtgccactggagagccccttggcccacaggaaggaagggctgcacatgggtatagggccacacggaggtactgtatgagtggtgggaggccagctggcatcaagcactgttctctaccatcagtgggtgtgaatacgactgcaggttatttttctgtgctgttcaggttttgcttttatttctcttttgttggtctgatcaagctgtttattgtttgcagatggtaacaaaatataattaagttgtttgttgttgaagctcctgtaggaaaaaattatctagttttatcaactctgtaaccacagccctccttttcccatattgaaatagctatttatatgatttttttataatgtgaagttcttaggaacatagttattatagcagagctaattgtaatatgtttgaatgcaaggatccaaatcattgaggattactgccattctgatacctgtacaaaattatgcactgtcaaaaaaaaaaaaaagaaaaagattatgcattgtcattgaggcagtttgtataggatagcaagatcttctccaagtggctttcctttgacagtcctcacagatggctttcctgtgagttgccatcacagtccctt

SEQ ID NO: 1083 - DNA, 2469 bp, Homo Sapiens
gctttctctctgagggctctaggggagatccttccttgcctcttctagttttggtgtttgttggcaaccctaggccttcttgggtttgtaaatgcattgcaatctttgcctctgtcattacacagctcttctctctgtgtctctgtcttcttctcttagaagaacaacagtcatattggattaaagatctaccctaatgagctcatcttaacctgattacaactgcaaagactatttccaaataaagtcacattcacaggtattgggagttaggacttatcctaatatcttttggatcttatgatatccagttcagcccacaattaaacccacaatgctcttcgtgagaaagaagcagcagccatgaagaaagcctagatatttttaagggtggagagcgctcttgacctttcctttgacagccttgagcttccctaaatactgttgtcctcactgactggcttgtcttaggagtagggtttttgatcttcaaaccttggagtgcagttcagtaaagtgagacaagcataccttctgtctctgaggtccaggagcactggaagagtggacagattaattgtgaatagagaatgccctgaaaatacaggaagaaccaccctcctgcagatgtagctctggtcccttgtgggagcccctggaccttcggtgaggcagatctggaaggctacagcaggggatgtaaagagccccttcctagacccgcttcctggcccattattctgcccttccaaatgtattccaagggctcctcattttgatcattgctcagtggcattgttgtagaggaagtaggagggtgcttggtggagtttgggaggcccatgaatttctgcacttggagaaatgttaatgttgagcttatatttctctccttgcagcacagaagaccattactaggtctgtgtgtagaagcccaagcagttagagggggcctctgcgaggcttgtgggatttttctggccagaagatgggccatggtggaggaaggccatgttaaatggctgtgatccactgcctatagggaagagtacgcaacacacacccaggagggcttaggtagccggaactgtggcggctccatacccccaaagtgaattttaaacttgacttatttatgccgttctcatagcaacaggaaaactgttccgacctatagccacggaagactctgtaaaagaaactgtaggaggaaaaaaagataatgccaggaaaaaaaaaaatttaatgaagtaccattctttcacttattcagtcaactgagaataacagtttgtgcatttggcaatcaaatgggaagtggcatttcgtgttgcaacatgaacctgctcacattaagtgatttatttttttgtttagacacactgtactgagaactttcttcaagtagaaagctattaaaaatgtgagaacaagcagtcctcactaacctgaagcatttggggacttagaggaatgataaatgcaaacagcccagaatccagaaactgtcttgaacatttaaactctagactctgggaatgtgtgcatgtcttcagttagtcagatgtagataatttttctttctgtgaggtctcttttcacttatatcttgtctggacagggtggagcccctgcttaaattctatttctagcttgaagaaagactaaattattgtagaccaaagccagtgctactcggaaaatggaaaagacataggagacagggcatgtcttctttagcccgactgtgaacttagggcccctcctctggtgagtgctcctgggaggttgcacaaggcttatgttcagctactgggccaagctgaaggaacgcctctcatctctctcatgtttgtactgaagatccgtgtttggtaaccatttcatagatcttttctaccacttgatcctgggcttgtagttaatgctgtgctcagcatatttctgtgtgatcttgataagaaatctattggccaaagaccttgtgagctatttctgtcctctgtctctctcatcttctatttaatatgtttgtctgtattatatacgtataaatataaccgagttgtattacattaattcttttttttttcaaaaatatattaaaattattccccttttctaacctgcccatttatgagctcttgcacggtaacatcttgattcccattttggctgagaaactacataaactagtttattgcatgctgctccattttgtattcatggttatgatattgaaacttcaggaccacacacagatagcatagtctctggccacttaagcatgtaaacagtctggctttttataaagtggaaaaatatttcttgtgcactattttaacatgatcagcatgttgaaacttggtgtgcaactgtgtcaacatttctttggctctgaggagcaaacccggagaacctcatggtaacatataaaatgcaaagctggtttgtttactactgggattt

SEQ ID NO: 1084 - DNA, 2485 bp, Homo Sapiens
tcattaagtctttttaattggatgcctatgaaacctcaggctcaagattagatttcttcttttgatatcagcatgaggttttcactttgttaactgtagggaagggtgcggtggatcctaagatttgttgttttgtgttttgtttttgttttagttcagttgaggcagtggctagcaattaaggggaaaaataaacctctaagtgttgagatttagtcatcgatatagcttttggagtaaatttgtattttgctactcattgcctggccaggcaacaagtctattttgtttggatctgagcagcagtttggagaaaaaaaaaatcatattgacggtaatagcttgaaacatgaaattgtttttattcccagcttggagaaattgcagggcacgttttgtttaagcaatccctttgactccagtctgaatacaaatggaataccaaaagtgttgggcacattccctcttatctcctacccagagactgatttcattaccataattgtgggcttgcctggctcttggcagcctctcccctccaagacccttaatagccttgcagacgattgttgcagctcagttccctcagatggggctgcagagaagaaaggttatgtctccaaaggctcagcatcgccctgtcactgcccagcttggctcggctctacccagctgtgtgctccttctccacttgtctttctgagcttctgtgtgggtccctgttaccattactctcccacgaccattcattccagcaaatagcaatgatacaagatgtatgatgtattccttttcttttcttcccccctacccttttttttttttttacttttgggattactgaaaagctccacaattatttacaaatatgcaaagggtgcctacaagactggagtaagggtggtggcatggggtaaagctagtagtgcccttctaggtgtcccgtgacagaggagaagggtgcacttggcctgctgcagcctgagtagactctggggttgaaagtcaccctcttgaccatgtgtccagactccacaaaaccacagcccgggcccattggctgggcaacatcatttgaagtgagcagaataattcaaacctccccattcgtaacacaaaaggaaggggttatttgtctcagggatgggcacgccctggtgcaatttggcagagcatctcagcaactctatcagatgtcaggttagggcaaaagtggaaatgcgtctgcccagtacatcttgggttgattacttggagtgcatgtttctgattcatttgcacataactcatccagggggtgttgcaagagctatgcgatggccaaaggaacccaatgcgtcttttattatgttttttaaacaagtctctctacgttgattgtctcttggaaccaagaagcttcattcttccagccccgtgacagacttcaaaatgagactttcataaatctgagaacaagttctagctttggctccaggactatctgctctgaccctaagggttagttgaggagtgtgaaggctaggatgagccatggggtgagtgaaaattgtagctgggaaagcctcgtcttgaggagcttgtacttatgtctctatacaccctgaagcaaccagcccccacctgcacctgtggtctttttgtttctttggtctcatgaggagacagtagctctgtcacttactttttgagagacagtgtggcaaagttagggacagcatgggctctagaaccagactccccatgtctgccacttactagccctgtgactttaggcaagttgttgatgtctctgtgcaccagttttccttggtggtaaaagttatctggcaatcatctcaaaacttaatagtttgagacaatgaccacgggattgctgtgggtcaggaatttgactgggactcagctgggagagcttgtctctgctccatgtgatgttggctagagtgacccaattgaggctggaagatccacgatggccctactcacatgactgaggcctcagagctagacgtgggctgagggaccttggttctcctccatgcagcctctctctttacatggtctctacacatgtagtggtctaggctaagcttccttacatagcggttagaacattccaagagaatgaaaatgaaagctgtaaggcctctgttaatacctgtcaccattccactcctacccattctgctggacagagtgaatcacatggctaatgcagatctccagggaggagaaatgggctccacctctctcaatgggagatgtggcacacaaaaacacagatgggaggtctttacaagagttaaataatacaggtggagcatttaggatagtgcctggtacagagtttgtgttcataaatgttatgttttattataatatgattattctggtatcacttcaggaacaaatatagtacatgtttacttcctgagtgaaaggcttctcaataccacatggaggagagacaaactctccaggc

SEQ ID NO: 1085 - DNA, 2500 bp, Homo Sapiens
acacaccatgatgctgtcaaccctctggtgtcaccagcagcaatttgactgctctatcttgaacatgaaagccaagttctgaattttcagaaatggatcacagggtcatgagggtaagcactcatgggacccacacgaggctgtgcccagtttaactcagccctttctgggtttattgattagcaagtacttctagagcatcaatttgtggaacacacagtattttcaaaagacaagacataagcaaaaaaaaaaaaatgatgtcagaggcctggtggtggccaaataattggggagcaatattaatagggtatcatcaatggccaaaaaaaaaaaaaaatgagctggatgtaggcaggcaattagcaatgtttacagttaagaaaactcctgctggggttgttaagaattgtccttcagcacagggccaatggccagtggaaaagactccacagagcaaagaagggtttgagaggtatcctgaagtctgagtgagatttatatggatggcaagggacaagctggccttcccgtgtggcagatacatggtcagaagactagagggctaagtggatcagagatgggtgatgagattgagatctgacttgcaactctgccactttctaactgtgtgacactcatccccagtggttatacaaccactgcaggcttcagcttcctcatgtgtaaactgtagacgatggcaccctttattggaagagtaaatgacaatgcacacacagcatttaaagcaggatctgaggtacacagagttattcttcatggttttcatcatgactattatcatcgtcattgttaaaggactctgacaagaaaacaggattaagtgtgagtattaacaacttgcctctgttatccctgctatggtgatgggaggtatttctagttgggttacctgatccatgtcaatggggcagctggaatgagcaggtggtaggaaaaaaggcaggaaaatggattaaacctggttcataaagcactgagaaggcaatgggagagccaagttcaggacactgttgtccagtctggtcccacatgaatttaatatttcacacttgtggaattttacgaggggccaagtcaggctgcacggtgaatcctggcttagccgtgagaaccctgggagaaaatgaagcacaacagaaattcccatagaaagctgcgggggtatcgcagtcagagcagagagcccggaatccgtcggcctgaattaggacttagctaagtctatttcatcaaaactcatgaagctaacagccccctttacttggcttctgaaggaacactcccattgtgtaatcacttccgtggaaactgcaatactgtgtctgctattatacagtattaatactaaatggccaggtgacaaaagccaaggacatcaagctaaaagctcatgctgcattcttattgcacactacaggctacaaattgagagtgtgccctccactactttaaagttcctggggctggatctttgtctagcaatttcatttacataacatacctgcaatcatttttttaaacctccaacctatttctctgaaataacagcattagggtttttgattgttattttgttgctgttttgcctgagggaactaccagacagcgatggtaaatgtaatccatagcataagccaatcatttgaatggaggttgtcctgaacttttcaggcaatgtgatgggtgaagctacagtaacacttctgagtaggtcttccttgttatcagcaaccagccccatgcatcagctaaatgccaaggtggggtctcctggccagtacactggacttctgttgaagcccccttaggaggtgctgtgggtggggggagtactgcggagagggcaaggtttcatctctccaatctgagcttcagttaagatctcaactgagcagggagtggtggctcatgactataatcccggcactttaggaggctcaggtgggagaactgcttgaacctaggagtttgagaccagactgggcaacacagggaaaccccatctctaaaaaaataaaatacataaaataaataaataaataaataaatagccaggcatggtagtatgcacctggggtcccagccacttgggtggctggggcaggaggattgcttgagcccaggagtttgaggctgcagtgagctatgatcacactactgcactccagcctggacccagagcaagaccctgtgatctcatccatcctcttcttgtacaagtggtgacactgaggcccagtgatgaaagatcctgcccaaggtaggaacatgctaccatcttgataggaaggggctgaaccaggccataaattcctcttgcaagtctccaaattgggtgatgtttgcatcacccaggtggctgttggcctttctgtgagtcttgccatcaagtcttcaaggctccagaaaaggtgtcctcaaattcacataatatgcattttgagaacttatggtctggtaagtatggtgacag

SEQ ID NO: 1086 - DNA, 2419 bp, Homo Sapiens
aggccaaacaactagcaagtggtagattcagtatgtgggcctagacagtccttctccagagactgactctcactatccctttattcagcactctctgtattgcatgagaaaaaatacatgttgcatctgtagctgaacttcatacaacgcacaccaactacatttgggagacagattcatttatttacaaattcccagtggccaccaaaacatctgatagttaaaaagcccatcttaaatgtttgtggaaatgaatggaattggatggttttagtagcttcaatttgactcatctaagaaaacagtataacccacatgtagctgtcctcctgagggtggcctctgttttcactatctgccagccatgaaacagggctgcttcatccctgcacagatatcttcagtagaacttgtcagcaaccaacctcacttctccagcatgaatattagctctctctctgcatgcgggaggcagaataatgaccttctcaaagatgcccacattctaagccctagaacttgtgaatatgttatgccacatggcaaggtggggttaaggttttagacgaaatgaaagttgttaataagctggctttgagacagggagattatcctgaattatctgaatggccccaatgtaatcacgagtatccttacaagaggaaggcagaagagaaagtcaaggtgatatcatacaagaaatatttcatccactgttgcgccgttaatgatggagaaatgggatcataagccaaggaatgaggaagcctccagaagctggaaaaggcaaaaaaagaatccctgccccctacaagagcctctagaaggagcacagccctgctgacaccctgcttttagacctctgattcctagaactgtaagagaatgaatttgtgttgttttaagccactaagtcggtggccatctgttacagcagccacagaaaactgcccactgcaggatgaaaagccactttctcctggtatttctcaaaggctaatctaagagcatggattgttctgtatcttccaggagcactattgcaaagtcgattcattacttttttcatttgttccgcatcaccgtgctggggctcattaacgccctgtcatcgggtgctctgtgcgtaagtagaagtgtgttaagaatcaatcgctctgacctttattccctgttggtgttttgtcattcgtgggctgcttggcttgacatatgaattactctccagctgcctggtgctggggaggcacagtcaccagcccccaaatatttcagacatatgccaattgcaatttcaacacacattttttttctaccgtcaccctggaactgttccattggcaatgcatgaaatatgaacaagaggaaataattgacaaggcaccactgttgactaaggggctaacctttgaggaagattaaaaacagatgtccttgaagaagaaagaactgaggaagtgaatcttctctcctcttaactctttagttcattgtcctcatccaaaaattaaactaacacactctgaagaaggtttaaggagatcaggaattttcaagaattcatttgtattctgtagcagacagcttgtttgttccccattgaaaacctacaagaaacaatactgcaacctttgttatagcaaataactggtgggtgtatccctccatgccaaacacatgccaagcataaaaaatgtgcctagaaaaacaaataactttggaaggctcttttcccagtgccttcttacttcctttgtcttagtcctcctttctgtgatggtgcccaacctaagccctggatcctttgctgttgatttcagtagcatttctccctgacttgcaggaaactgcccaaggctttcaaaattaccttttccataaactcctgttccttcctcgaacaatctcaaccagcatctttgcaaaaagctgcctaattaatgacttcatgcacaagtgtgggtaagtgataacacctggatgtgttgcccttcccagaggacttgttttccaaatcttttcaaatagagacataatcagcctggataatgagtgctcaaaactaaagcttaacccttcatggcaggagtgtggtcagtgtgcgtgtgctcaggggaggtgatatgggtcattggaggctttctttgtgcccctcaaatcacatgatttgtactacccaaatgctgcccctgcttccactctgacgatgaaatgatttcatgaatatattgaccattataattatagccagtgacatttatagtatgcttcattattctcaacaagaaaagtttatttcatgtcatcctcaccaataagcctgtgaggtcaagaattccatcatgtccgtgctatacaccagaaatcaacaaactttctgtaaagggccagagagcaaatatttcaggctttgaggcca

SEQ ID NO: 1087 - DNA, 2353 bp, Homo Sapiens
tttggaaaatatcaattaaataatatattttaaacaactttgaaaaagataaaggcatctttttaatttggggcaccctattagccattaagaattaatgttattatctcctcatctgtttagtgtttagaacctctcccaagtctgctgataatggtggcaatgagggccaaaggatggagctgcttagctctggtaaatactggccaggcacagaggctcatgcctgtaatcccagcactttgggaggctgaggcaggcagatcacttgacgtctggagttcgagaccagcctggcctggccaacatggcaaaaccccgtctctactaaaaattagccaggcatggtggcacacctgtaatcccagctactcaggaggctgaggcaggagaatcacttgaaccctagggacagaggttgcagtgagctgagattatgcccccgcactcaagcctgggcaacagagcaagactctgtctcaaaaaaaaaaaaaaaaaggcatggtggctcatgcctgtaatcccagcactttgggaggccaaggcgggtggatcacgaggttaggagatcaagaccatcctggctaatatagtgaaccccgtctctactaaaagtacaaaaacaaaattagccaggcgtggtggtgggctcctgtagtcccagctactcgggaggctgaggcgggagaatggcatgaacctgggaggcggagcttgcagtgagccaagatcacgccactgcactccagcctgggcgacagagcgagactccgtctcaaaaaaaaaaagaaaagaaaagaagaaaagaaaacataaaatgtccagccacccaggacacaactgtgtggcctgaccgttcagttgtatcactcctcttatctggaaagtgctccagtgactacagaagttgctagaatttccaaaagcaagaagaaagtgatgggaaaatgtgtcaaatccacaatgggagaacactgtgtcactagaaaattatatgaccctggcaaccttaggagtatggaagaaagatttcaaacaagtttctgactatgtatctttttctaaatttttttgaatgctgaagaaatgttaaatttcattaagttttacagccagatttaatatagacataaatccctttaatgttcgtttcagtcaaaagtgagcggaacattatcgttaaaccagtgcatgtgggagaattacttgaggaaaatcaaaataggcacagttgggaacattaagccgtggccatattagacgcaagtaggcgcaatagcaaaattctttaggctctaatggactgggctattttgcttctcagtttccatacagatgagctttgttctggggcaatatggttgcagtttgagagtctatctgaaggagctcatttctctttcattagtccatgagcacagtgcaatttcagctaatactgttacacagctcctagctgggttatttggttaaatgccttcagggaaagtagcaagacagaataaaaggacaaatgcaatgcggtttcttgttctgagttcctgtagctgtggaattacattggcagttaatcattaccacgttgtactcgtgatcataaactcctgttatttaagatgttattcaagtctcacaagaaacatcttgtcttctgtggcacaatttccttgaggtcgggtttgtgcacaactataaccatagagacctgtttcttgtgcttcgtggacatgctagtaggtatatagtgccatttgtgtgaaattgaaaatgacattccctactggtgggtgaactgggaaacagcaccctgtctatgggcaaattagaaaagatgtccccttctgggtggacaaatgagcaaaaggcagcccctctgggctgaccaattcttttttaaagcctcctccaccttggggtgtgggggtggtgcacatggcttggtaagtccaatgcagaccctagttgctccctgtgggcaggaacccctggcgcaatgcacaacctgcacaactgtacacaacagccctgattacagaatccattttcacaattttgtagttggaccacagagtttgcccctcagtactctaaaaatatctgttcaatcacatcagtggatgtccatattaaatacattggtcttctttcttatggcaagtaactgccactctctgccaagggcagtgttctaaccttggaaacaaacaggacactcgtaggttgagaaacagaagaactagaggacggtgactcctaggggcttgaccagtggtgggcagtggagtggtggaaaccacggtggcacctcttcaccatcgcaatgtaatgctctcctcagcctccatcattacct

SEQ ID NO: 1088 - DNA, 2486 bp, Homo Sapiens
tgcatattgctcagcaaaagaagccaatttgaaagggttatatattgtatgattccaactatgtgacattttggaaaagataaaactgtacagacagtagaaagataagtagttgcttggggctccaggggtagggaggaaggagggataactaggtggagtgtagagggtttttaaggtggcaaaactattctcttatgatactgtaatgatggatacatgacattacatattttcaaaactcataaaatgtagaacatcaaaggctgaccctaatgttagccatgcacctcagttaataataatgtatcaatattggttaatcagttgttacaaatgtacctcaccaatgcaagatgttagtaataggggaaactggttatcgggggagcatttgggaactctgtacattctgttcagcttttcccaaaaccactctaaatttgttaagaccttattttaaggtctattgacaaatgacaagaaaaaaattatgtaaattggagttttaaaaattagtatttgtgattattaacttacaaaataaattggaacagaattcatggtttgcttgttaaaaaatgagttctgtttgaaagacaaaagggcgacattatagaaatggaaaatactgtgtttgaggttgtgcatggtgtagtggaaggccacagttcaggggctggtcactctgtgtttgagtcccctccagcccgtttctgagaagtactgggacttcaaattagttacaactaagcttcggacttcacatctgcaaagtgaggatagggagacctacttgatggggttgttgtgaaggtgaagagagaggaagtctgtcaaagcaattaaacaacacccggcatgtggagctctgtgcctcgccctgcttcgaaacctttcctggtgctgacctgaatgtttctctctgattcggtcaacagttgtgccatttttggctagtgatctgtggctgggctgccagccgatgacaggcagttccccaagcaggtcacaacaaggtggcaattgaccttgctccccgaggatgtctgttcgggttctgctagaagccaagggctccctgatgtggggtttcggtttcacactgtggcactctgaacaattctttatgggctggcaaaaggcgtttcacacttcagataggccccaggaggatgatttgctttcttcaaggagaactgagaattctcagatgattggaaggttctgtactctcattttagcacctccgatagattctcccacatgtggcaaacacagtcatagctggaggtccattgtcggttgttaacaggcagtgaactgttgctgaatcagacagtccacgtatagggcatttccatcatcacagaaagttctgttggtcagagcatctaaagcatattcggcctctccccctagccaccctgtttatctcttgcttgcattcctccttggtatttgtgctgctgccaccccagttccagcccccaatgcctaataacatcctgatagatcaatagagttgtgttttagcaggtctaacatcatgttgtatctctggcctctcaaatggcagagctactcctctgcttggtgcttaaggcctcatcagggccctgaccgcctgtgtcaccttacagtctccatcctccaggatatgccgaggagtgcatggagtgcacacacagactgcttgctgtttattgagtaagctttgtcagtctgtgctaggtctgtttcacaatccactctccatctgccctggtcaaactcttctccattgtgtatctgcttcttatatatcaccagagacaatttctccctcaggtaaacacctgaatacttcaggtttcccttccacgtgacacccagcatatcctgcttcatatgcaatttgtctgtctgcatcccccagccttgcttcttcctggagtgcttgttcctttaggaacaggtgctctaggccttcttctgtgtaggctagcccagcaatacataattaccaagcaatacatacttggtaaattgtaagatgctttttccaagatacaatttctaaatttcttctctaagaagttctttcctaaacttccataggaacaagccagcatacttgcattgactccacattgggagactacagaatcgctccctcaagcaatcctctctccttgcatcagtctcctgtctctgtgcctctagactaacattcagccacactagctgagtgtccccttctgcagactaggaggattgggttgtgtattagacactgtccatgcctagttcgtatctcttaggcgttactacttagtatgtattatcagagcctcccattgcctgaacctgaatctctttgcctgagggttctgggagacttctccaatccctaagaggaccacaccacctgcccctcaaagcagaccagaagttccaggagaatgaagacccctgagaaaagtccttgaccaagaactgatgag

SEQ ID NO: 1089 - DNA, 2457 bp, Homo Sapiens
aatttttttttttttttttttatcaaaacacaaaaactcaagagactttttactaatgttctttcacgtggtttgctagaatgcacatttgtttgctacaatccagccaatgaacaatgaaatttatttaagatgcttcctgcaaaaaccagagttgatgatgtgccattatattagtgattctatagaacaggatccatgtgatcaactcatgcatgagtctgggggcttccgggaaaacaagttatgttatctctgcagaccaactgtggcctcctcttagcagacaaaattgatgtggctcagcaggttcccctttgtcatagatgtcagaaaatgtacaggcaaagtagctgcccaattgcactcagcagttcctctctgtgatgtaatagaatctcacgctactttctctgggcttgtgcttctaccactggaagcacattagaatcactggagagctttccaaataacacagtgaaacccaggcctcatcccaggataattaaaccagaatctctgcatgcagcctgagaaatgacatcttttaaagccctctaggagcttcttctgtgtatccagggtgagccagtcctctttaggtagtcattctccttgtctccccagctgtcttattttgtatttgatttccttgtgaactgcccaaggtccatttagaagtacactgggataaaccttaaataaaattctatagtgtgtttgttagacaaagtacaaatgtattttcactatgtagagaagtttggcttttcttgaatgtaggagtctaaataataaatctgaatagaatttctgtgaagtgtcaaataatgtcattatttcaggttgattcctcccatacctattccctgcaatagttcttttagccacaccgtctgattgccacaggaaaggatgctgcagacctctcctgagtggtgattaagtgaaatgcaccaaagaaatgaggacagtgagcaactaagatgcctgaagcaacactggaaagggagtcaggtctgagccacctctttttgcagccagtgtgcagtggaagtggctcgtgggtgttccatatttggattggagagcaaagcataatcccagcgctaagggaagcctcttatgcttctggaatagtgccccatacttccctgaaaaggtaataaaatatgtgcattcgctgattaggaacaaatgtcaaagcgtccaccatgatggaagtgtccgatttccatggctctgataagtcgccacaggatctcatgaatctttaatggctggcctatatttaggggctttcagtttctgagggtggtaaaaggtccacagagatgctattctcctagcacactggcttctgccaagaccggtgtctatttaaagcacctctcgtctttcgaatgtacagagattctgctgacaacaagaaactttcttgggcctgaaattagatgaaaagacctcccactcagaaagtgtttattaatttatttaaaaatatgatctggatcatccactacatgtcagggcttattctgggcacactgaggaataagacagggtccctgacctctgagcttgcattctagttaggggatacaggcactaggtaagaaaacaaataatcgaggtaatgacagtacagggtaattgctatgaaaagaataagccgggcaatcggatatcatttaagcacagcagtgacatgagcttatttgcattttgaaagatcactctagctgttggatgggaaaaatggattgtagggggataaaagcaaaagccgggaaatcaattaagaggccattgagtggtccagggaagagatggtagtggtgatagagatagaagagagcagatgtgcaacatatatttgagaatgaaagagaatgtgctggtgattgggacagaatcgcagaaagaaaagaagcaagaaaaactccaaacgggtggcttaaccacttggtggattgtgacagcatttcctgagacagagaagactgggttgtacatataaagaatagatttgggggaaatttcaagtgtacagtcatctaaattatccaagtatggctattatctaagggtagatatgcctagagtctggctagaggtcaagcctggagatactcactttggagacataagcttgtaagtggtactgaaagctagagctgacctggaaagacaactcagttagaaaatgagccctttgaggctaggcatggtggctcatgcctgtaatcctagcactttgagagcccgaggagtgtggatcacctgaggtcaggaagtcgagaccagcctggccaacatggtgaaaccccatctccactaaaaatacaaaaattagctgggcgtagtggtgcacgcctgtaatcccagctacttgtgaagctgaggaacgagaatagcttgaacctgggaggtggaggttgcagtgagctgagatca

SEQ ID NO: 1090 - DNA, 2431 bp, Homo Sapiens
ggttaaatattaacttaaatattaaacattaattcacctgtttatctttattcttttttaatgtgtctactagaaaatttgaaatgacatttgtggcttgcattacttttctgctggatgtaaccagtatagagcctttaaggcttaatgcagtatctatcccagggatatttgcagctgaagtaatgatttttatcttaaagctaaagaataaatcttgcattgtaatatttatgatggaagagagaatttgggagacaaatcaagcaagtaataagccatatgctcctgaggctagtcctattcaggatgtaaggcaaatgctgagtgagattattgtgggattaaatgagtgaatacacagcaagtacttgaaatcatgtcgtcgtcatcgttatctggacttttgggatttgtgttgtttgccttttgggagttttcaagctcatgaatcaaaacatggttttcctcttgcgcttttagtcaccgtacaattctttccgagtgcttctgagtcacacaccatccgacagaagtggggacaaggcacacagaagtgccactggtcccacaaagctgtccagaaaattattcaaaaaacaagaaacctaggcagcacctgtgctgtcctgatataggtaccagcaccaccctcaccagtcagccagtctacatctgcactgtttccagaatttgaagatttgttcataagcacaggggtaccgagttgagtggaccaatgtgtggatgtttgaaccatttactcattatttaggccactttaaaagtctcagaaggaggagacaaagctcttttaaaacttggaagatttaactggaaagtcttgctagaatcttgctactgtgagttttcagctcccaggttttttggatcccaagagtaatatttgattctgactctgggaatgttgaacaaaacaagccaatggattctgaacgtggcatctgccttccatttttcaaattcataagagcatctctccctcctgtcacatgaatagagcagcagctgctgactcaagagcgccgggaaaagggtgattgtctttcacttggcatagacacccctgaggacaagactactgagttaataatcgatttcactcccctgcaggctctcccgcagctcattcgtgagggcaggaggaagggcgggtgctctggactcatttacagtccctgtttccttaaataattgtgagtaaggaggacagaaggcggcaaacggagtcagtgagacagctcaaatgccgcctgggtgttgcatcacttagacataaaatatcaaccctaaatgccaggctgttctgtgtctgtggatgccccgaaaccctctttccaccctgtgctgacctagcccgaatactgactcagcctttaatccgtgttctctcttcttctgcagcccctgaatacgttgttcatgcacctctttgtggccgtggatgagtattctgttggctgttgcaaagagattcttcggtgagtggatatggccgtgcagtggtgaacatgaaagagactgtgtggatagttttgaaatattttttaaaagacatgaaattctttggggtgtttaatttgcttgtaatttgtggctatattaaaatatttactttgaatagcaatgatatttctgaaaggagatagttctttgaatctattgtccattctgcacgctgttatcatttgaggcaaacagatagtgcagtaatttaaagaaatggatttaggttgaggggagtaggagaagaattaagtgtcgcaagcttggacatttctaaaaactgcttttctttatcttatctttagaaatgtttattaacatgacagacttcaaagcatcctgaataataggatgcatggaaaatgaccagcagggctaccgagtcatggcgatgtgtctctgacagcctctgacagcctgcacagacatttgggggtggtggtcacagctttcaagtcactttgtaatgtcacaccagaccgtccagatgccaggtcaaaggttaatattagcagaaatctggtgtgccatatgaacatggcaccctttattctctctgcctccatgggacagatcgaaaaggggccctttagaacccaaggaaaagtagagaagaaaaagaaattgccttgaggctgttcttgccattgcaggtggggagcaaaggagcccatgtggatttaggaacacctcacctttttagtgacagcatttgtcttcatcaagtgccagctgatgggattgctttgttagtaacactgccccaccctctctttcctcaccagaaccgtgtataaggcagtgccagagctgcacttcatatttctcatcgtgccatcctacatgagcctaggtaaggcccgcccaaccacctctggtccccggtagcaaacattgaaaattc

SEQ ID NO: 1091 - DNA, 2402 bp, Homo Sapiens
ggcaaccactgtcaaccagaggaaacagaaagaagtccatcaagtttgtctttctgaacagccatggcagttccaggccaggcatgcagcatgcctgagggcaaggctgtgccctgtgggaaacccttactactgaaagggtttttagttacaaggactttctttggcttgatagctagtttggaggagtttggggccatcacttcatacaagttccttgtcataactgtaccctggcttaccttgacatctggtgtttactccaagctgaggttttagggaagggtagttggaggccagcggcggctcctagtgacagatgggcagagcgtctgctttggcatcatccagggtgtgggcagcagtggtccgagtaggcaccactgacctgcaggcagggaaagcctgccaggtcagccatgcgcttggcatcaggaggagaggatcagagccagcagtggtcacaatgagggcaaaaccctcacagtggaatattgtcacccaaaagggatgggtggctgtagggctttttggatggaagcataaatgagaaaatacacacgtttctgtaaatggacctgtttgggaagacaaggccacagtacacatagttttctagcaatctaaaccttatgtgtcatgatgtagatatttacaggacaagcaagaacaacaaaaccttcagttttgttctccagtataagataattgaagacacttgtggtgaaaagtacttctgtcaccaggaagatagataacagccagcaatcaatgcctttctgttgtacaagttaaaaagtccattaaatccatttttttttcagtgcatacacaagaatacatttggatactcctgcaaattcatatttaagaatagtgtttctcaaatcggttatttgaaagaaactcaaaggaaaaagcagacacttccacaatatgtccttgctctgttgtagtctgtaattgtgaacttttgtaaattgttacaaccctggatgaatgatgggaatataacaggttgtagaattggagaacgttaaatctttgttcctaatggcaaaacatgtttttctcattttcatcagaatgtgtgatccatgccatttgaaatcaaattccaaacacaatgagccattagtgtaatagctcattactaacagcggtcttataaataatacattcttatcatacacatgcagctcgctgtgaagccagcaaaaggtatttcaggccatcgaagttttgttgcgccagcgcggctgtagattagaaggacatctccatgtgaaccaagatggatgccaattttccctgccgagagtcaggctggccgtctctttctgcacatatggtagatggattggttaatcagcgtctgctgagtcttgggcctgaaattacagagaagctagacaactgcggctatgcagcctttgttcacgagtgcaaacaagacaaacaatcacttgttatttgggaaaaaaattaaaatgtttattttggacttttattaaagtgtcaatggctttataaaacagctgtgtaaatccaggctttttcagcaagtatcattttagggggcctgtaaagaaaggaatatacatgaaaaaattaatttttaaaaattcccctcatatttcagtattgagaagaaaatagaggaggtctcacttttattttgcaaacacgtttgagaacaaatgatttttaactgggagacatattcgagaacaaatagtagtttaatacctatttttttttttttttttggtgtcatttaaaaaactgagtattattgtagcccgattctctgttttaggagattaaagcattttctctgactgggcatttatggaaagatgctgcgttcttgggaatagagaatgcctgtgattattgagttctgctactttctgaatgcaatggttatctaaaagtctgaacacttgagagataggacccagtaaatgcaggtttctaataagagctatcagagtctaatcagtcaaccagaatttgcttaaaatctactaataattattttatgtgaaatttaaaggactatgtattttctctctctttttaaattttaaatactttccttgcagaaaacaatgaaatacagaattacttaagggatatattaaggagtttcagtcacagccgtctctccatgtggaatatgatagaattaaagtctgttgttaatttctaatgttttggtaccaatcaggtacctggtacccaaccaaggttcagatcagctagttactcatcttctcgcctatgtattactcatcaaagactgaaaatcatggggacgactgcaagagcttcagaaccaggcatttcagggtgatgggaagttcaacatttgcagatcagacccacctggtgaacca

SEQ ID NO: 1092 - DNA, 2471 bp, Homo Sapiens
tggattaattttattacattgtaatggtttgtactttaaatgtaaggataatactaaatttccagttggccattattctcttcttccctttaggctttttgaattaaaatattaagaaagcgatttgctcaattcatcttgtcagaatttatagccaaattcattaaatgtgcaaacattttataagaaagtttacaaggtatgttaataattatattcatgcattataagtgtactatctttttaaaaaatcaaaaaaatcacttttgattctataaagtgaattaaaatggcttgcatgttttttacttaaaaataaaggtgacatttttaggacattaaatgacattttagaagcccatgttgaaaatgagctaataaagccaattaatccatactaaatattaaagaaacacatttcctctttttgaaagctataagacactaaattcactggttctcttatattaaaattttcagtttaattctttaaagtagtgctcttcatggacaaatacaaatgttagcactaagagccattttcatacacaaaactgaaaacttcacgcacatggagatcagaataaaaaatgatgcaaatatttaatatgaagtgacttttggcatctgcgttccctcaatagaaaagagggttccctttatgtcaggctttgcaacagccagaatgggacttttatgaattcaggagttgacccacaatgcatctattctgagaataataagcatgttaaacttggaattcattaagtattctctctccatagtagtaataacaaaaaacaacagcaacaataataataataatagctaacacttaagtagcttttactctggaccaggcactgtttgaagcactttctatttattagctcatttaatcctcacaactttaaccctttagattaggtcataaatcccaatatgaacaataaatctgttgcctattatttcaaagctttaaaagagagttttcagaagggtaactttcagctccttcaggagaacaacttgaaatgaaaatgaagattatacatactatcaagctgaaaaacacaatgtcattcctcttgagggatggcttaatatgctaatgtttaatttaagaactttaaaaacgcccttctattagtaattctaaaacaaaaacaagtcgctacataaagcatggctaaaataccactaaaggtatgacaaggatcgaaactgcagccaatttagtacacagcacacagatcattggattgttccagctcttcccatgatcaataccaattgacatggctgaattgattctgcagcaaggtgctccaattgttgaaactcatcacgtgggccgtgctccagagtcccggcctcttcgtggacatgcctgcaattctgcaggattgaccccattagcacagtcagaggcttggcaagtgcccgacaccaggcaaggctggattccatacccacggttctccacaaaatgctagatgtgatatggggttccttcaactcttattattaatcaacataaccaaaatttcaagatacaatttttcaaaagtacaaaatttagaaaacttaaaacatttacaaaataataaatttgacattataatttccaaagaggcctagtaatacaataatacaattttgtgctcatgatgaaaaattctttgaaaatcccaattcatatttaattcctataaagcatgcataattcagatatatgtaagacattcaacaactggatgagagtcccctttaacatatttgtatcactgattttcaatgacaatgaatcacatggcaaatgctttatgagtcagtacaacaatgcaatgaaaacgtacctcaggtttcttcgttatcgcgatgaagaacatgtgattcttcattgggtaaataatgattgaaacatctccaaaggcagttgggataatacccctgcggtagtctctggagtgttcagaccagacgatatggacctcgtcattccccaagtgacgaagctgcaacagcaaattgactgtttattaatcagggtgataacagcagtttatgaggggtcatggcttacaaattgaattataaaactcaaaggccaaaaaaatttcactaccaaaaaaggctacaacattgatgttcttctgtgaggattttaaaaagcacaagtgcataaaaacacagcctgtcttcttaatgtgttggtaccaagataaggcatgctagcttcgcaggcacattacagctggatggggctgaggcctttgtaagaatttattttctaatggaattttactcctgcgtcagagtcctgtgctttatattgctgaatatgtttctaaacaattaacaacacgtgtcttttattccacattgcagttgtgctttataagattctcaattcaatggttattatgaaaataagaatatgaacataagagaacataagccactacaac

SEQ ID NO: 1093 - DNA, 2499 bp, Homo Sapiens
tatctaattcttgcctgtggcagatcaggggtccaccactggacagcattcatgccatccatggccaggccacatctctgaagccatctgtgcaagcgtgtttgtgtgtgtgtgtgtgtaacaggaattagtaagaaaaccacaaaccacaaacttatgcagctgttggccatgtacattaatcaaaacacacactgaagtacagtcgtgtcgctttatgatgaggatacattctaagaaatgtgctgttaggcaatctatgatcatcttgtgaacatcatagagtgacttacacaaacctagatggtagatgcctactacacatccaggatacaaatgtgcacaacatgttactataccgaatagtgtaggcaattgtaacacaatggaaattgtctgcatatcaaaccacatctagcacagaaaaggttcagtaaaaacacagcactataatcttataggaccaccatcatatatgtggtctgccactgactgaaatgttacatgactatactatagtaacgtgacttatagttatacaacctattatagtctcaatataagagtaagaagcaaaatctccacacacacacacacacacacacacaaaatcctagtttcttttcttagatttcagtatggttatctaaaaaatccttaaaaataatcctgatttaattctatcagtatcacattagagcaaagcagtagtaacatgctaaattctaacatgttcagtctgtcataataaaaattacctcatttaacaacttatcttcctaaaaaactttgtatgtgttcacaaaccatttttcctaagacttttttttctttacatgggtcttagtttctacaaatcttgatatttacattcttaaaattactgtataatgcttaattcagtagagttcacatatggtaaatagtttagcaagtactaatttaaagttttagcatttcagcagacttttttcctacatcagaaataaacagataaatagataagtgaaaaaggaaggaaggaagaaaaaaaaacatgaaccatgcttcttccaggttaatgtttaagcctgctttaatcacgtcctttgatacactttaaggtccatatcagtcaaggcaaacattctaagggaccgagcagatggatgctgcagtttagaaagtgtgtggtaaactcaggatccaagagtggaacaaaagatccacctttttcataattaagcctctgattaatgccctaggctcctcagcacacacctgtaattactcacagaggtactcattgtgctgggacttgtctcggaatatcaggcatcaagctatccggcagcagatggaagcacatttctgttgacatatgttgcaatgaaaggattcgtgcaaacctggctagcaaggtagcagaatgccatgcatttgaagattaataatgcaaacaaccatgatgttaactttgttatgcttgtgttaattccatctgttgagatgtggaactaaaccttgaagcttgtgggctttaaaaatctttagcacatacttgaatcaaataagccccttttcaccactggaatttagagttttaattaaaaaatgcttttctaggctaaatttatgggaattatgaactaaatcctttaacaagctaataccacaatttgtaaatgaatccattttgcattgtaagatttgtatgtgtaaaggcaacaatctgtaaaatggggcattcaaaaaatatgactaagttgctatactgatgctaaagacagcagataggcatgtagctgagataaagtcacatggctccctcaccccctggacctcagccaatcacttcaacggaacctgctactatgagcaagaaggttggaaagagagggcaaaataacagatggctagcctaccctaccctgccacccacgtaagacagcgccctgaggagacacagcgcctgtgtgaagtcgccaaagacagcactgggggagggtaaatgggggggttaaagagggaactatatgaccagtcagccaaattatggccatatgcctgcttccgttgcttctccacactgaagtggaacaactcgaagactgtatctttgtgataacattttaaaattaggaataaccacgtggtactcaaagaagagccgctgcatattctcaatagtgggacatccacaaaatgccccactcatttctaactcagtagaatccttctttcaccatccccaccatacattaagacacagctataacagaagtctttgaaaaatataataaaaatctgaaaccttcctcacagcctccagggctttatatatacatgggaaagaatgatgctctcagacatgagtcattcatgtgcaatcctcatgccttttgccatctccctgtccaaagtgaacattacttgcctaacaggtttttcaaagtgactcatgttttaatttttttatttccataggtttttggggaacaggcgctatttggtcagatg

SEQ ID NO: 1094 - DNA, 2400 bp, Homo Sapiens
acaaaccatttttcctaagacttttttttctttacatgggtcttagtttctacaaatcttgatatttacattcttaaaattactgtataatgcttaattcagtagagttcacatatggtaaatagtttagcaagtactaatttaaagttttagcatttcagcagacttttttcctacatcagaaataaacagataaatagataagtgaaaaaggaaggaaggaagaaaaaaaaacatgaaccatgcttcttccaggttaatgtttaagcctgctttaatcacgtcctttgatacactttaaggtccatatcagtcaaggcaaacattctaagggaccgagcagatggatgctgcagtttagaaagtgtgtggtaaactcaggatccaagagtggaacaaaagatccacctttttcataattaagcctctgattaatgccctaggctcctcagcacacacctgtaattactcacagaggtactcattgtgctgggacttgtctcggaatatcaggcatcaagctatccggcagcagatggaagcacatttctgttgacatatgttgcaatgaaaggattcgtgcaaacctggctagcaaggtagcagaatgccatgcatttgaagattaataatgcaaacaaccatgatgttaactttgttatgcttgtgttaattccatctgttgagatgtggaactaaaccttgaagcttgtgggctttaaaaatctttagcacatacttgaatcaaataagccccttttcaccactggaatttagagttttaattaaaaaatgcttttctaggctaaatttatgggaattatgaactaaatcctttaacaagctaataccacaatttgtaaatgaatccattttgcattgtaagatttgtatgtgtaaaggcaacaatctgtaaaatggggcattcaaaaaatatgactaagttgctatactgatgctaaagacagcagataggcatgtagctgagataaagtcacatggctccctcaccccctggacctcagccaatcacttcaacggaacctgctactatgagcaagaaggttggaaagagagggcaaaataacagatggctagcctaccctaccctgccacccacgtaagacagcgccctgaggagacacagcgcctgtgtgaagtcgccaaagacagcactgggggagggtaaatgggggggttaaagagggaactatatgaccagtcagccaaattatggccatatgcctgcttccgttgcttctccacactgaagtggaacaactcgaagactgtatctttgtgataacattttaaaattaggaataaccacgtggtactcaaagaagagccgctgcatattctcaatagtgggacatccacaaaatgccccactcatttctaactcagtagaatccttctttcaccatccccaccatacattaagacacagctataacagaagtctttgaaaaatataataaaaatctgaaaccttcctcacagcctccagggctttatatatacatgggaaagaatgatgctctcagacatgagtcattcatgtgcaatcctcatgccttttgccatctccctgtccaaagtgaacattacttgcctaacaggtttttcaaagtgactcatgttttaatttttttatttccataggtttttggggaacaggcgctatttggtcagatgagtaagttctttagtggtgatttgtgagattttgatgcacccatcacccaagcagtaagcactatacccaatttgtagtcttttatccctcatccccttccaccctttcccccaagtccccaaagtccactgtattattcttatgcctctgcgtactcagaacttagctcccacttatgagtgagaacatacaatgtttggttttccattcccgagttacttcgcttagaataatggcccaattattctgaaaaatttatgtgtatcctttctcataagtaaaaagtaactcaagtaatacaatgacagtaatcaatgctgctaaatttttgctaaaaataccatcctctgatgaagactctgggtctgagagcagctctccttgttgaatataagcacagaatgcaatgtcagggtggtgtgaaagaataacttctctcaactccagctggcctacctaacagtatcacaaggacctgcagagaggaggaaaggggccatcctttctactgtgtgattcaatgctattcagcgctgcctccactgagatggctagtgagaaacggccctgcactctgacgtggtgaaaagaactctagaacttgagccatgaggcctaggtccaaagccttgtgtgactgtgggcagatcatgtcatacccagagcttcatgcttctcttccgtaaaatgaaatgatactc

SEQ ID NO: 1095 - DNA, 2490 bp, Homo Sapiens
tcagccaattacttacttccctgagctgtttcctcatttataaaatgggcataataatctcctaaattataaaaatgttttgaggattaaatgagatcatgaatataaagcattcagcagaaggctgggcatccattaagtgcttagtggtagctactattactagtaccatctaggctaataagaaacaagataaactgaggaaccaaaagccccaaaacttcaaactttttcttctggacctcacttttatatcctttccattgaacctagagatagcggttcctccttcttattaccctggcacctcctcgtccactactttccacaattgtcctcctcatggaggtgctaaggagcaataaaatgcccaaaaggcaagagaggaggaaggggaagcctctacttaggaaatttacatcctagtcagtcctggtaccagatgtgtttcttagcagtgcatcaacatcaggagggtctatatgggaaggcaacagcagattcttagcattttccctaaaccaggactagaactggtcccatcctgaccaccaccacttctctgggtcactgtgtctcagggcccagaccatccctctttagcaaagcctgtccaacacccctaggtgctgagaggcccctcctacagggcctcagagtacatatgcacatctcctttagaagacggtagcgagctcgcattggaatttactcctctccaccagcctgattgtctgagggcttgcatcatctctctttcatctctatatacctaatatctagaaaaggaaccctaactttatttcagataggtaaactagtcactgaatgcaggttgattctcagggaccaacctaggcccaggtagttctggtttaaactgggttcgcagccattcccaagtggggagccgaaatcttaaagtctgattctttctcttgttgaatagaaggggagatgtgcaagaacgacacaactccattccagatactaatccagaggaagaggatgggagttaccacactgactctcaaaaggggacaagagacccacattcatactcccaagcttaccacagattaccaaccacgatgcaacctgctacaacagggggattccctttgaagagatggtgccaaaatttgatcatgaggcttttccatgtgaagagagaaaagggggtgtctggggattatccacgagaatctggggagggctccaactgcacaaactagctgtgggccacagaatgcttgctcagctcattagcacctgctgcttacagtgaccattcatccaacagactggccgtgaacaagatgatgggatcagcgggttcatgccccagagagctttgctcatcattaacatgagctacgtcctgttcaggaaccattcctcttgttgaagaaacactgcgatgtaatatgataaacacgtccccatcacgagtgtagatttgtctagaaagatctgcattaaggtggctgcattttgcatgaatcacatgctggggaggggtaggtagcactaaaaactagtcccacttgagccttcaagtcattatggcatatgtgcctgcttcactataaacctcaaaggcctgtgacgtctggctttcattgtttaagtcccctcctcctttgcaagggtggaattacctgtttgtaataccagcaattactatgcaccttggaattgagcagagagtgtgctcgagtgtgcatgtttagattggagggaattacccctaccttcaaagtcaaattctactcccccttcaatttgaaatcatgcacctcagcctctggaaagttgggaatggcagccagaaggaaacaagtcacatcaatttggctgatgtgagagaggagcctagccctggaaactccacacaaactcagaaagagaacattacgtccccacctcccacacgtccacctcatctgttctcctgaacaagcacaaacaagacacaatagtttagtaggctgctactgaaagagtgagtaatgggcttctaggaaagaggctggtggtggctaaggagcttgtactgatagaaccaaaggaggaaagcagcagccatgtgctcaccttgatctgcttttaatggggctatgtcttcacaaagaaaagagccaacaccctgatcctactctcctacacttttcaaaaggcacaggaagtccctacctacagtcaccagcagcctcttggataaccaaagctgctagtgttacctaggaacccttttggggatctagtctctctctgccctttgtctgaaaactcctctgatccagaaagattcctgggtttgtcttacataagcagaaggcctgttccttcagacttgtccttcctcagcaaaactgtgaaagaattctacttctctttcaaagctgctcttctggtctcacattttaatcttaacaactatagactatagagaagctgacagaacctgtttccataaaacaaacacaa

SEQ ID NO: 1096 - DNA, 2475 bp, Homo Sapiens
gccaccgcgcccggcctatggataaggtcttgatgctggagaaaggagagtgaacaaaacaatcatgatccctgccctcatggggcttacagacagggagtaatcagataattgcacaaataaataatcatagattttggtaaatgctaagacatttacagagggccagaagaaaacatgtcaggcagttccaatctctaggtcaagagagacaggcattctctgttgagctggaagaggaaactaaggcccaggacagggtaggtgtgcctgttgtcgcttggtgagtcagggctgtattaggaccagaagtctcactcctgactactgaataaaaggcctagcttcaggctgatatccatcatgacacatcttcccactcctctccctgctacctcctgattccactccctttggaaaataagttttgatccgcagccctgacatttgacgcccataaacctctaaactccatcttcattatctcctcacccccaccccatacagagtgcagtccagtcaggttggcaagggctgctggtcagggccagatgaccagaaagtgtagaggaggagagaatttggggctttcaggctgggagcagctagggaagggccaagccggaaaagcagcatctgccaggctggtaagagacaaggctcaagtgcaggcactgcgaggaagcgagagtgaggtagaaggatgctctaatgccaggaagtgacgtgcagggacagagggatgggggatgaaggatgaagaatggaggggaggatgaagctgggccacatggctaggaggaagagcagcagggaaggaatgcacagagagctctttgcccccaggtctcttccaatccctgtctcctccttctcttacccccacttctcacaattccagcagagggctgaggggaacacagtaaaattctggagactgcttcctagggagcagagtaccttactaataccccggccagatccatggctcagggaggggtggggtaatccacaggagagtgaaggcgttctagtccccaaggacttttgagaggtcatgcagtccatgcctccgtctcccaacacccaacagaggggaatcatattctctttacccctccctagacatgaagagattctccgcttctcccagaccctctgcttctcacaatccctggctgtggggaacttctcttaaggcacagattggatccctcttgctgcagtctctgacttggtttctcctatcctgtcctctgtggctagagaaagccctcttctgggtgatcacagcggttccttaggatctccccttcaacattccttcatcgttagttggttcttcccagaaggtaagcccaatcccttctactgcagtccctagcatcctctccgttgtcgcatcctacgcctccaaggcagaaatgcacccccttcctcaccaaataattaacagagacaagggagaagaagggagagatccaagaagatggggatgaattaaggagatggagctggaggtggatgcttgacacagaagaaggaagaccggggacttcccaaggcagggcagggacggggtcagcgggcctcaccggtgtcggggtctcccagaaaggcgtcctcgtccttgcggcccctcagcggggccgcgggcgccggctcgtcctcgggcagccgcgggaagctggtgatgctcatgtagtccactggcgagtaggcgcccagggcgctctcctggctggcctcgttctccgccgccatcctcgcccgcgccccccagcagcgcagcgcctgccggaagtggctgcggcgggggagtgggagggcggagggcggggcctgatcttcgcgacagccgggagggggcgcctctcccagccctcggccgtgtcccggtctgactcgcccccgtctgctcagcgctatcagcctgcagctggcacacaggtgcgtgtagatggacagccaggaaggcagcgcagggtcgaggggagagcgcggggcaagcgagacttcagtggctctgcactttacgcagctcagggaccaaaccccttcctccttccagcctgaatacagctagtgtcctcctcaaatcccaggcttccttttcgggccccagaccctttcactgaccgcaaatccctctcgaccccagatcctgtctctgaccccaaactcctcggaccccagacccctccttgaattccgagatcctcctcctccgattttagactcctcctccgaccttagacctctttttcgacttcagactctgtcttcacccccaaacccttttgaaaaccccagcccatgcttcatctccaggcctctttgactgcagacgcctctttggacaacagatccctcctctgacctcagatcccttcccgcaccccgacacttctgactcctctttcaaccgcattctcaaactttagtgtgtgttaggatctttgaaagcggatcccc

SEQ ID NO: 1097 - DNA, 2498 bp, Homo Sapiens
tcccctacagctgggcgtttaggtgattgacagctttttaaatattatgtcagcactgaagacattcatcttcccactctgcaggttagaagactgaggcttagtgatgtcggagggccccacagctagtgagtgaggaagccaaaatgtgaacttgatggctttttttgacttaccccatgtttgtgtgtgacagccatggctgtggcgggggtgagagtgggtacagagatgccagcttgggtttgccattgttagaagtgaagatgacacctcagtgctgcagattttgcaggaggggactggagccaagccacaaacttttctctgttaggagatgggttcttggagtgggtgtggtgtctgaccatccggggagatggctgaagctggggatctgggaaggctcccagaagggaggtggcctggggaaccaggggttcagtccttccaggatggactggcttgatggtggcttttcaagctcgttctgttcccagccactgggcatcctgtccatcctggaggaggaatgcatgttccccaaggcctcagacgccagcttccgggccaagctctacgacaaccacgcggggaagtcacccaatttccagcagcctcggcctgacaagaagcgcaagtaccaggcccacttcgaggtggtccactacgcaggcgtggtaggtgcttgctggaaccccagccctcggccaggctcctcccgccctgctccaggtctcccacccgggctcagcacctgacttgtctctccaggtgccttacagcattgtgggctggctggagaaaaacaaggatcccctgaatgagaccgtggtccccatcttccagaagtcacagaataggctcctggcgactctctatgagaattatgcgggctcctgctccagtgagtatggagggacaagatctccactctgacaggggcccacagagcgacattccctggagtgaccaggccccttgtctctattagctgagccccccaagtctggggtgaaagagaagcgtaagaaggcagcatcgttccagacggtgtcccagctgcacaaggtaaggccccatctgggagacagaccctccctcttggcagcctccagccccgtccttcaccccctgccctgtcccctgtgccttgggcgggcggctgttaagacttgcagtgatgtttaactcctctccacgtgaacatcacagcaagtctgtgctgcttcccgtccctacgctgcctgggcagggtttgtggggaaggggtgggagccctggggctctgggagggacggggatttggcagggaagtgaagactttggtggtggtgatgggagacagcgaagggtctcccatcaccagaatgagagtgaaagagcaaaagtgcagggcacttagggccctgctcccgtctcggtcctgaccactgcggcatccaattctggttctctgccccctttgtgcctttccctcactcttccccactgccaggagaacctcaacaagctgatgaccaacctgcgggccacacagccccacttcgtccgctgcattgtccccaacgagaacaaaaccccaggtagtcacccagggctggcctggctggggccgggaggcatcatgggaaggtgacagggcagaggccgggaggctgagtacatcttccccctcacctcgcagggtctccactgctgctttttctctggggcctgcgggtgtgcctgttgacctctgaccttttcccctctcacgtccaggggtcatggatgccttcttggtgctacaccagctgcgctgcaatggggtcctggaggggatccggatctgccgccaagggttccccaacaggttgctctacaccgacttccggcagcggtgggtgaccccttccccctgcctgctgctccaggtggaggcctgaggggctgggcaggacacacatatcagagcccaacagacggtcccctgtctggagggggaagcagggactgtgaggggcctggccaggtatcccagcaagacatgggggtggctcagacctggccggggacttggggagaagtgaataggcttggggcaaatagtggaggtggagcctacaggcctcgctgataagctggacatggaattctggatgcagaaaagacgaatgatttctagttttgggagtgagcaacctgggagctaccagtggtagatttactgagctacaaaaacagggttttttgatttggaggagaggtgaagggatactggtttgagctctgttttgcgtgtatcaggtttgaaatgcctccagcagacatcctagaaaagtcatgggggagattgggattatcaatctggagctcagggcagcgggcagaaaggatgcagatttgggagttgaacgagaatcatgtggacgaggcttcatgagacacctggcacatagcaagcacctgggcagtgctgccagctcctccccgttccctcaatgggcaacaagcat

SEQ ID NO: 1098 - DNA, 2282 bp, Homo Sapiens
ccggctaaatttttggagacacaggattttgccgtgttgcctgggctggtctcgaattcctggattcaagcgatctgcctgcctcggcctcccaaagtgctgggattacagggtcttaagtcaggtcttaagaacacaagggggaaaaaggctgctcatctatggttgtgtgatggccaggaaaacatttctcactcacaactgctcctttcgtccacagtcctccatacacacagaccccctagcctttattttattctatccttttcgtcatttgaggaagtgatattcaaattaaatttaaataaagttacactgtgaaaagtctcactcccattttctccccctttagcccaattcccacctcactcccaccaaccactttatcagtttcttgagtatccttcaaactttttatgaaaaagctgtctttaaataaagctaatgttttacaggtgttagcaaggttcggggtgggggagggtggaagaagtagtggactaggtcctattcaacctggtttaccctaaagcagtgtccttcgctcactcaaaaataacaataatcatatgttgggcacctgttataagtcagatgcttaatattaactaccttcagcccttagtatgcaccagaaatgcactaatgctttacacaattgccccctttgatctccacaacaatcttaaaaggtaggttactaattctcatcttcatcttacaagtgaggaaactgaggcacagaaaggtcacctgcccaagcaagagagaggagcagggctttgaacccaggcctgactccagagtccctcttaaccgtgacgctctacactagcaaaccagatatagtctctgcacccgctggaactcagcctaatgtgggagacgggcgagaaaaaggcagacaacaaagaaatacgaaattatagactaagaaagtaatgtaaacgaaacgaattcgcggctgtgacagaataacaatggggacctactttagaaaggggaaggaaagagtgtcaaggaaaggcctgagaaaatgacatttatgaaatgctcgggaaccatttgggggctgcaatgatgaccccctcccccacgcccaatacacgggataaactcgaggcccacagaggctaaaacaaacacgacagggtcccccagacgtgtagacgtggcgcaaagaagggaggatccagaaactgggcccagggttcgtacacgccatcagtgtccacagcagcccagccccgctcggcccctgacaagggacatcaagccagctgcttcccacggccccgctgcagctgagagcgtccgggcagctcacagggaggccttccggccagccaaaagggctttggcccgtccagcggcggcctggaaaggcctcttccccggccccccgccagctcccgcctggtccgccccgccccgcccctcctggtccagcctcgtacctgcaccgcccggaccaggccccggccggtcagctggccctgccgcagctgcagcagaatgttaccaggccgcggccggccgccccatccgccccaagccgccactgtggctgccgaccgtctccctcggccggctccagacccagccgctaccggcgccgccgccatgtctcctcgtcggacaaacaggaagcaagcggcctcggggccgcggagatttctacggggcggcggaggggtcgccgcagcgcccccagtgggccgtcggcggaggcgcaagccgcgtggcagggaccgtgtgcggcgtggaggctactgggaattgtagtcctgcgcggcagcggggtaggtgggaaaagagatgtggcctttcctgcactgccggtttctctggcccccgggcccagcatttcggcgaaatctcccaaggtccacattctcccatttctctcgccgatttgggcaggatgcaggcagctggccaagaaatgatcctgggcttcaggtcaggagtcaggccctcgagtccgcttcctgcctgcttctctctacacgtgactcaccgcggacatcgaccaagtcatcgcgctctgccactgcgcctgtgtcctcgtcaggtcactccatctatagattctgggagcctgatcaatcgtagttcctggggctttctctgcgcccgacaccaaaccatgtctaggggaaagggagggtgtctgggatacagtggtgagcagaacggcctgggatcctttatcacgaaatgcaggttacaggggaagacagcagatccatacacaaagaaacgcagtctcaaactggata

SEQ ID NO: 1099 - DNA, 2452 bp, Homo Sapiens
aaaaatacaaaaaaattagccggttgtggtggtgggtgcctgtaatcccagctacttgggaggctgaggcggagaattgcttgaacctgggaggtgaaggttgcagtgagctgagattgcgatcacaccactgcactccagcctgggcgacagagggagactccatctcaaaaaaaaaaaaaaaaaaagagttcccagatattgctggtgttccagggaccacactttagaatcatccctgtttcctgataggaagagatgaacagagggaaaagaagtggtgactgatctcacctggattattgcaatgtcccactgtggttccaggcttctccttcactccggtcactgagtcttcaccaggagcaaattaattttcctaaagcccagctctaattatgcctctgctcaaagctctctggatcctctgacactatccaccattgctgtccactagaaatgtctgtagtgatgaaatgttctacatctgcaccgtccagtatggtaaccactaaccacatgtggctatgagttttacattttgttccattaaatttaaatttaaataatcacatttggccagttgctagacagtgcagtgcacttggtttgtcattcaaggctctgcttggcaccagctcctttctatctcctcagggatagcctcaaccctcagtatcccaggctccaggtcatatgcagcgtttcctgattctaccttgtaattcccagcactatggcttgtgttatgctctctcctcagtctacattgtccttctgccctgcctttaatgcccaacccacatatgacctcttcctcgaaacctcctttgacacctgctgctctctaatctttttctcctctgaactccccaacactctgtcctcttcttacaacctttagtgctttctgttttacattgcagttggctggtgtgggtactttctcttactaaactgtgagcttttggaggatgtgactgttttctgtagagagctcttgcttcctactgtaggtccctccaggtacacagaggagttcgacaaatcccacaaacctttgtactggcacactggggatacagagatcggtaccataacttccctgtcctcaagctgctcacaggcttctacgagagtctgattcatgcccagagaaccactgaagccaatggttattttaggcagggagataaaagccacagagggcccagttggcgaggggagtccggcaggagctgcctaagcagaaggctgtgtttacatacacagacgacttctctgcccagcctggcctagtgtggggagatgggaacattcaggcgtcactgcctggctgccttgtgaagttgcggattaaccagtgatgcagcggctggtctagccgtctggtccctgcagatggatggatgaagagaggactgaaaagacagcagagcagtgccagcttctggaagtgaagtgctggctgggtggagtgggcacctgggctgggaatgtgagtgcaaggaaatgtttgtgatctgacagcagacagcaggtgaaattctgctgggtctggcttggggggttatgaggtcttcataacagtccctgttttaaatggaaaaactgttgaaaagaaaaaaaaaaaaaggaggtcaggtgcagtgggtcatgcctgttatcccagcactgtgggaggccaaggtgagtagaacacttgagctcaggagtttgagaccagcctaggcaacatggcaaaaccctatctctacaaaaaatataaaaattagcagtgcatggtggtgtacacctgtagtcccagctacttagggggctgaggtaggaggattacctcagcccggggaagttgaggctgcagtgaaccatgatcacaccactgcactccagcatgggcgacagagtgagaccctgtctcaaaacaataataacagcaacaacaaaacagaggaaaaaaagatagaaacagctttctggctttagactctaatcctaagagtattttacatcctgaaaatctctagcatatattcatctctgggacaaaaacattaaaaaaaggaaactttattgatgttataacataaacacagaaaagtgcacagatcataagtttacacatacttgtgtaactaccccccagacatgaacagaatatgtcagtatctccagaataaacctgtgtgaagcccaatgtgtgtaggattaatgatagaacaaacacaggccttggagtcaggcatgcctggggttgaatcctgggcccctgcacctactagcagtgtgaccttggatgagtgatttaacttcagtttcctcccctgtaaaatcaaggtggatctataatgtctgccttacagggaagtaggagatttaaaattgaaaatataggcaagttgctaggcacagtgccagcacataagtggggactcagatgctctctgcaatg

SEQ ID NO: 1100 - DNA, 2498 bp, Homo Sapiens
cgggctcaacccccagcctcctgggactgttttcccctttaaacagtcatgggtgcctcaaacagactttgggtcagagcctgatgacttcctgggatggacaggggcccatggagatgggtgcctaggagccctgaagcaaagctctgcaacccatcccccttcaccagagtgagtagcaggaaccgggaggcaggggtgaggaactcagagtttcggttaaggccaattcaggcagcactcactggaagcagctcagagcaccaagagggcaggagcaaaagacccttgtcctggctcgtcacctccctcctcctcctcaccttccacttgccctctccttaccaccggcttctgaagactcaaagagccgactgaactcccagttgccaacaccgaacccggcccttgggaagacatcctcccatttaacggatgaggagactgaggcctggcttggggaaaggtgtctcttgattcagacagaccttgtccttccatactacaagcatttacagaactcaggctggagagcagatcccggggaaaatggggagacagagacatagttgagcaagacaccaacactctaatgagggagaagcccatttggtcagaagagccacaaggaaaagttaaaacctaagtgctgagggcagacataaaccagcagcatgctgtgagctccacagccaggggcactctgggtgttgtgccaggccatcatccactgacaagagtcggcaacatttcagcctcctccaaaaccgtgcccagccagcggcaggagagctcaggaagcttccagcctcccagggagaggtcaacacgtgcaagctgggctgtccctaaagctgccatggcacctggaagcgtgcagatggagcccggctggcacccagtaggtgctcatgtccactgaaaaagcaaaggcaaagcctgctgtccgggggaagccctagggtccccacatggccacagggaagtcctgttccaggtgggcagttgccctcctctcactgcgaacatggaaaggcactggccacgaggggccaatggggctgttgtgtgcacaaggtctgccccagggagggcaaaagacactgtcctgggatttaggaagctgcctctgaaccggttctcccacgacatcatcctccaggctgtgggaccgttaggctgggcggaagtggactccagccaaggggatgttcccagatgtcatgctttcaaactggacccgcccagaaaggcaggcagagacaggcctgcgcccgggaaagccctgggtaacgactcaggatggcattcaggcctttcctgggcaggggatggccacaggtttccctggcggcggtgtctatcaatcccgtcccaagaaggagagcctgggcgtggaggttctgggcagctgaaggcagagatccatcccttccctggctacccacccccacctcagcaacgcctcccagaacgctccaaagctttctcaagtccccgctcccaggttagggccctgtagccagttccaaggtctttttcaggagcgcgcttcccaaataaagttgagagggggcggggggaatgagggagccccagatccacctcagagtggtccccagagggcttgggcccctttctccggattgttcagtgggaaggagggccggctggtgcctcaggcccgcgggactgtgacagccggcgacccctgcgacctccctttctacccgggcgcccccaccttgagatagtcgttctccgagcgcagctcctccagctcccgcaccaagccgctgggcccgcagtccagcatctcctcggtgaggtcggagaaggcaagcgaggcgctgagcggcaagcggctgctgcccaccgacgacgcggccaccgacggctcgtccggggaggcgggcggccgcgggggctgctgcgcggagggcgcgggctgggccggctgccccgtacggacccccgccgggcccccggccgcggactcggcgtcgctgctcagcgccagctccaggcccagcaggcgcgcctcctccgacgcgcagtccgacacctccgagctgctatccgtgaggctggggggcggcggtggcggtcgcggccccgcacccgagcgcggacggcccttggcacggaccccggtgcggaccccggccacccgcacacccgcaccgcgcgccccgggagccactgcgcgccccttcttgtccggccgtgaggagaacgcggcgctgcaggcgactgctgagcccgggcctgggccgcggcggcccttagccagcgaccagccggccacgtctttgggccgggccggcgacggcgcgcggtggctctttttcctctccggggcaggcgcgggtgcaggcgcgggctggggaccgcagccccggaccgggggctcggccgccggcgcctccatcgcggcctccctcggcctcagcgagctgcgcgcatggcccaggcccgcccggcctcgacgtccctgg

SEQ ID NO: 1101 - DNA, 2500 bp, Homo Sapiens
ttcttttttactgttacccctaccattctggtggggacagaaacagagacacagccccttgcaaagtcagacctgaggctggctgagatgcaggttgggtattttgcatattttgctggtgtgttaggctgtgttttcacaagcccagactaaaaatggggatattaggagttgctatttgccctagaggcacaatggcagcaagagacatctctgaaatagcaccctgcttttctcctgggagaatgaggagcttgcctctctcacttccatgggaatccatcacagcccccattatccttgcactcaggcaccctcacctttccaaaaggctttgcatccctgatctctcaggctttccacagtgggagccccagaacagagcaactcagcttttatgtaagttgtggactcttatttgttttaaaggaaagaaacatccttgtatgctccatacaccaggtgccatagcacattcataggtctcaggggttaggatgtggacatctctggtggggccacgattctggctaccacacagccccaccctttggctggcatgcaggatctcctgagctctctaaacagtatggtgagtatggcatgactgcaaggagggcttctttctggtgtctttctggtggtccgtagagaccacaaagagggaaaagatcttgtcaatgctgttggatgtggttgaaaatgttctttctgctgagtctgagaagtgacagcatgctttgctggctggcgtggttctaggattttaccccgcaaatctgaccacagacatttggagtcctaaagagttagaaaaatctgtaaggttgaatgcagaagtttgaatgcctttattttgagccctcattgatcataattacctttgaacagcaaccactgcaggaatgaaagaaaatttggggctgactaaatgaagtagtgtaagattctgagcaggggcagatttggccagcagtgcaaaaaaaataaggccctgtgagagcttacaccctcttcttattttgctgcagcttacaggtagccctgcccaatccccaacgtacgctcttatggttcccaggcaaaccacaggagatggcatcggtcctctcaggagtgacctagcaatgctcaggtcctaaggcagacctgtccatgttgccaggctgggctagcttggaggctgccttggcatgagcacgcaggcagacagatgctgacgccgcttcaaagaaccgcccctccaggtgctgagggcggcttttctgatgctcatcctgtgtcattgtttattttcataaggcgcccagctgctgcggtgatgatatttatatcaataagtgctctattcatctgccggtttcagggaatgcttgccagctgcgtatggcagccaacctcagggtacttctgagcctgatgtttttgcatttagagaatcagttctcaaactctgtaccaacatctgggcctgaaagattcttcattcacccaggacccaccctgaaagggggagctatagccaatgaccttgacctttgtttcaaaggttttatatgtcccgaagtgaagttctttgaaagtcatcctctgtgcctgagctctggttttgcagaaagggatgttgaaaaagagaagagcaaacagggttttgcaggccagacttcatgcccaggctcatgagctgagttcattcttttatttcttcagccaaaagcgtagggtggtgatgccttcagactccaaaactctgcagggaatgttccagaactctctgttttatgagaattcatttattttttatagttatctcagtttctaaccttctattgctcaggccccaatcattgacattatccttcattcctctttctttttttgacagggtcttactctgtcgccctaggctagagtactgtggtgtgatcacagttctccacagctttgatctcctgggctcaagtgatcctcctgcctcagcctcccaagtagctaggattacaggcatggaccaccatgcccagttcatttaaaattattttgtaggactgggtgcagtggctcatgcctataaccccagcactttgggaggccaagatcagcagatcacctgagatcaggagatcaagaccagtctggccaacattgggaaaccccatctctactaaacatacaaaaattagctggctgtggtggctcacccctgtaatcccagctacttgggaggctgaggcaggagaatcgcttgaacccaggaggcggcagagttgagatcgcgccactgcactccagcctgggcgacagagtgagactccatctcaaaataaaaattcttttgtagagacagggtgtcactgtgttgtccaggatggtctttaactcgtggcctcaactcctgacctcaagtgatcctgcttccttggcttctcaaagtgctaggtaagattacaggcatgcctggcccttgattcctctttctctctcttattccatagtcaat

SEQ ID NO: 1102 - DNA, 2477 bp, Homo Sapiens
atggagctccccttccagccttcactcgaggattgacaaagagaagtcaggagagaaggaagctgactcagaagctgttgagaaggagggcattcgagaatagagaggccctgggagccagacctaggtaagagcttatggatccataaagggatacacatatacacaatggaacgctgctcagcaagaaatgaacaagctgcagacacagacacacacaacaacatgagtaaatctcaaaaaaattcatgcaaaagaaaaataaaagaatgcatgatgaccccacttatgtgaaaagttcaagaacaagaaaaactgctctatggtgataaaagccagaagcatagtgacctgaggggcaggtactgaccgggacagagcctgagggaagtttctgggatgttagaatgttctctatatattgatttgggtaattaaataacagaaatcaaaatagtgttactataagggagatgactgcctgaaagaaggcataagaaaaatttgggaggttataaccatttctgtatcttaactggggttatgtaaaactcattaaactgtgaactttaaacagaagtatttttatgcatataagtgataccttaaaagttaaaaaaaacaaaaatatggatatgtgactcactggatgaagagaatgccactaattacctgaaagggaacctcagaaaattgggagaaaatgagcctttactcctataccattccctcttatcagcaccatcagatgcttgaattcctaacagtttttcaaacaagaggttgttcaggcacacaccagtttcttatccatgaggcttttcacttctaacacaaccaatgccctcttaacagactccacaccatcatctgtgcaaagccaggagtaagtgtttaacatctgacagcaccctctgctcacaaagtttgcaactaaattaaggaggaggaagtcttgccttcatggagctgagggctgagctgggagatgacatcagtgccttccagccaggcatcaaagcgctgcgaggacaaggatgccaggagccatccatgagacctgggcagcagcggccctgagcttccaaggctctccttcaacatgtagatggtgaagtgaccccttcctgtaattctgccacatcctcaggcatcaatctccagaacaattctgtctttcttttccctgctgtgagcacttgtaacagtttgactccctagaaattcctacagagagtaaaagtgtttcaaatagctggagatggagctgtgcgcatgtactgtctgctctagatagaaatcaaacgttttgagaaaaaccaaacgttactaagacgtgaagtgagccttgatatgattaaggtgagtgtaacctagcctccaacactttacaccacacgtctcaccccacctgatcacccttttaactgcattttctattcactgaccctccaggtctgtgggaatgcctccacccacccaaccctagccaccaacacaaacacattcatacacagacagaaacacggttgtgccattctcatttccagacttttgtctgtgccatttttcccaactagaatggctttccttttacttgttttttttgttttgttttgttttgttttgagacagagtctcaccctgtcacccaggctggagtgcagtggtgcaatctcggctcactgaaacctccaactcttgggttcaagcgattttcctgcctcagtctcccaagtagctgggattacaggcacctgtcaccacgtccagctaatttttgtacttttagtagagacgtggtttctccatgtttgccaggcaggtctcaaactccttatctcaggtgatccaccctcctcagcctcccaaagggctgggattacaggcttgagccaccatgcccagccttcaattacttttaactaaaccatgcctatttttcttttcaaaactgcttcatgacgacttactttcgtgtagcacagggctaggcacagagtagatgttcaatgctgattaaactttctacgatttatgcgcaacactgttttcatacaataatggactgaggatcaaaaaggactaccttggggccagggttcaagctttccttgaccttggcttaccactagccagatgtgtgactctactcaatcttcatggtcctcaaatttattttaccttgacaatgaaagattcaagtcataaaagtccctaaattttctctaccaagggccacagggattctatgtgtactgaatgactaccctaacagtgagcaatcggcagtagcccagccttctcattcttccctggcttgggctcacagtccttggacacaacctaagtagatatagcatcaaatcctccagtaggtgccaatcagaattagtctttgttggctgggaacggtgactcattcctgtaatcccagcacattgggaggccaaggcaggaggatcacttgaggtcag

SEQ ID NO: 1103 - DNA, 2439 bp, Homo Sapiens
ttttaaatagagatatgtttggcagagccaagaaggaatgttcatttctgcttggggaagctgtagaagtcttcacagagaggatgacatctaacatgagctttgaaggatgactgcgagaagaaggtgaaggggcaggcatagaacaaagaaaaccacagaggtaaaagcatcaaatgatgaaagatcgtgctgtttcatgcttagaggtttggcaagtttcttgttgcaagtttcttgctgcaaagttgattagaactcaggtttcctttcattgaaagtccgatgcttgggggctcaacagctgaaatatttgcctcagggcccagaacttaaacgtggtggtaaagtattatctctgaaaagaaggaaaaatgtactgatttttaaaattcaaggtgaaaagggaatgcagatgttcatattttaatacactacaaaagatccctggatacttatctcctggcctacatcttccttgtttttgtattgcagacatactttagcatacacaggttgtatagaagacaaagtaccagttttaggatgaataaatgggaacactgatatctcgagaggccttctcagcatggaaacacaatgatgcaacctcatgtggaaataaaggtgctttacttccaccctcacttacttcaatacgctggcacatgcttgctttcaagcaactccctctctagacatggggtttaaccacctgccctgcagatgacgtgtacattctgacatctgcatggaaacaaggtaactcagtcttagaaagccaggagggtggccaagatcacagcgggaggatggagcaaatccttgggtttatgtccctttagacgaggggggttcactctcttctgaaacacgggctcatttatacaagcaaacagatcagaacacattacaggaaggaattcccacggcatgcgctgctctttgctttgccttgtgaagataaaaggaggaagaaacaaaagacttagagagcagagctggtatgaaccatgaagctgctctacattaatcatctccatcgcccccacttcctgctgcccttctcgacataggccctgggtcttttgctgggaaaaggcaggtcgaactggagctggctggggagctcattagcacctcgccagagccgagggctgcctgccttccaggaggcattttgaactctcccttcagttacttccttgcaatcaatatgctgcttttgcagttgctccatccactgcccttgcagccatcggaggctacaggcttctaagaagaactgttggggtttatcaacatacacatcttcacttcacaggaagcagcattccatggtttgcacattggtcctctgggctcataacacagcagggtccagatctggggagaagcaggcacgagggatgtactgggagtagggaggaaggccttggccaggtgctctggcaatgtgggcaggaaaaggccttggtggcaatgggtgttgcatgaggaggtcctatggtcagctcaggcaaaggcccaggagtctcaactgggaagcagaccctgaagccatgtctcccaattcagacctaggggccctgaaacgctgtgtctgagatgcttttcccttactgattcctgtaatgcctgagccagcttgtagctgtcatgcatatggccactagggaccaggagaatttgagttctacatgtggcctggttggccccatccctctgggaggtcatcactacagctgagccacaagatcctgggactgggatcctcatagacctctgggacagtaggttctggggagtgacattgactccaaccctgcaggtgtagccttccagaagccagttcctctctgtaaaataaaggcatataaaggaccactcttagcccttccaatcaccagcaggaacccaagagagagtccctctagccctgagagtctccaatagcatcatccttcttatccaaatccaataaagcaatgctgttcttcaaggcccactgaccacaacctaatggagagctgaggctgccagataccaagacttagcattatagaagggcagagcatggcaggatcccaggggaaaagaattagcacaacctcatacaaaatggagtaataatacacctacctcagaaaatctgctatgagaattacctagatcatctctttaaagcactgtattacttagctttttcttagtgacaaacaaccccgaatcttgatgtacgcagatacttgtttcttgttctcagttagctccaggctgtgtttgaatctattccctatgcctctcattccaggaactagtctgaaggagctgttgctgccaggggcaggttcttccagtgacggatggcagcaggcaacagagcaagcagggacacatgatacctcctgaaatctctcctgggaactggcacaccat

SEQ ID NO: 1104 - DNA, 2500 bp, Homo Sapiens
atttttttttaaaactcaccctggaagaagagatgctccaggaaacataaatagatcactgctttgtaatcccaggaaaattaaagagaatttaagctctacgaaacaagcaattaaagggtgagaaaacatgacagttgttcaagaccgggagtgtatcagcttctcgacaacacccccaggttcccccagggttgtcttctgggcaacctcccaggtactgtcctctcatcaatactagatccgctgcagttcctgaacatgtgacggcacagtatgtaaaaatgcatatactattagggctggaggaccctcatctagtcatcgtcaatgacaggacaataaaaaccaagttcacgtatttattaagtggcaaagctatagcttagaccccaacctgaccctacatgtataaagaggaaagaagagggatgaagataggatgttgggagggaaaaaggaggagaaaaaagggagagaaaatggaagatggaagcaacagctggggtgcagtaaaaaggggcactggactagccagaaaacctaccatgaatcaaatctgagtacatgccttcaatttctggggctacatgcccaacaaacagaattgttgggtcacatagtcacttgatgtttaaattttgagaaattgccaactgttttccacattagctgcaccatttggcattcccatcggcaatgtacaaggttctaatctcttagctctagcactcactatgttgcatgactctgaaaaagtcattttatttatctgaacctcactttctttttctctaaagagtaggggttagaactagctatcctgtttctgcctattcacacattctttctttccatccaaatcctgaccttccactgcccacatctgtttccaagagtttcctgacagtgtgaagtactgtaatgagtaagtcctagctctgctccttagagctagaattatcttaatccatatccccaagttatattaatgcacttccatttccatccatatctctcagcgtacattttttctctcttgtctattcttttaacctttttgcaagcatcatcttgttctgtctgtcggctgtcagcttttctctccgagcttctgcggagttgccagattcttgactatttccccaccctcagctcataactgtttttccctggagctcagcgactgctaagtggtctttgtgaaatcctattaggataatctccctgtctgtgtctcctctcagctgggctgcctctagaaacctcagctgtcttcctactcacaatcggcaaatcataggctggctcctgagtcatccaacatcgtacttattcacaaacatgcttagatgagctctgaacctgtcgaatcttgtagcccacaagcaagagttaaattcactggagattcaactcatatgtcttctcctgcagaaggtgtctcctgtttatgcgggacccctattccctctacaatcccaggaatgacacctgccccctttttactttttctgtttctgtttatgtttatcatctatctctctcatcagactgtgagattcatgagagcaaggagctggagtatcttgtccaaagctgtatcctcagtgcctggcatattacaggccctcagtacatgtttgttgaattcatgaatacgtgttcctcttccatagagtcaatcatggatctgcctacctgtctacctattagacccaaagctactttggggcagactgagatttacctgccatggtaacacttgttaaaaataaaattactctgacacttgttaaaatggtaaggaagacattattcaagattattgcaatggaggagagaaattaggcaaatataacaaagacagctggggatttagagccaaggaacagagtgagtggatgaaaaattaccaagaggagacaagggtagggagattcttgctaaaacaacttaccagggttcttaccgaaggcaggccaggatgatcagatagtgctatcatccgaatgtttgtggaggccaaaactcgtatgttgaaacgctaaccgccaaggtgatggtattaagcgatgaggactttggggagatgaattaggtcatgaaggaatgggattagtgtccttataaaagggaccccagagagctgccttgcctcttccatcacatgaggacacaactagaaggtgtcattttttaatgaagagagatctcacgagatatggaatcttctagcaccttgatcttcaacttcccagcctctacaactgtgagcaataaatttctgttgctaagaattagtttatggtacttttttatagaagcccaactggactgacagatgtcaaggggttgggggatcctcagtaggctaacctagcagagttcttgctaaaactgggctagacaggccacagacaagatagccaaaatcaaagcctagttgagaagggaattcagaggagcatgactaaaatttggtcaaggggagagtctt

SEQ ID NO: 1105 - DNA, 2473 bp, Homo Sapiens
ctcaaaccaaaggctgatacgttcttgccctacacttcactcaatgctggcaacccaatgagggacatcaggataaaatcgagaatgcgcggtctgtgcttgtgaattcctaccacctggccccagctagcctcccatcccttatatctgccaagacaaattcccccaaatcccctctcccctggccagaagtgacctccacattcagccccgattatggaaggctgtcacaggctattccttttgctgggtaagcccttccccctttcaagtctatgttcaactgtcatatcctttttgaggacttcctttagctcttccctccacctctactgccacacttaacagagcggagttgtctcctctggcatcccattgtcgatagcccactcctgagttacagcaacaacggccacctgactccactcatctgttgacctgtccatttctccattagcctatgatctcctttagggcaagattcatccttatctgattcatctttgtatcccagatcttagccaggcaaacaacagggatccagtggagagagagatggataggtgggtaggtgaagacacagatgtacggttgaacacacaaactggcaaagttccaaatgaactaataagtggacacctcactgagagacttaaatgcagaagggtgccaggacataagaggaacggctgcgagttatgaaaatgggctccatggggcaaatcaaaagtccactgaaggcaaatgcatcataacaagactggcatttcctggagtttccgggctgatcaatcactttcatatgcatcattcatttactcctcacaatgacctggtgaggtaatgagttactattagctcaatgcacaaggaagctgaggcttgtggacatcagctgaagtctcacagccagcgaatggcaggccagggcaccagggcctaggtctgcctgcctcttccatccaccttctgtcatcacaagccttctgatctccagccctctgatctgccccagtgggaccctcctgcgtctctgctctagttgtagaggacccatcaggcacttagagagaaatgagtggtgttgtgaacattcgactgtgtccatgtggaatccacacacacagtttgcctgaaaatgactgataggatggaaactgacaagtcatcatccgcttcgggcaccagcgatgactggttaacatgaatattgtgttgatttccgctagatagaagaagatgtcacttgtcgttaatggggtgtcacacgtacacttgcctaaaggaaaatgctcttttggtgattgttctcaattttcacctcattttatagccataaaaaagaaaagattcagcagaaaggatgaatccacctaggggtaggatggaaaggcattcttctcatttatttccttctttctttaccagaacaaccaaaacccagtgaaaatgctggtgcaagtcagaagagggggacctgggttctaagagcagccaggtactctgggcttcagatcagagcctcagaatccagcagttatgcccacaaggtagccaaagtccagccagtaccaccggtctctcggccagctatacttgcctctgctcaacaatgatgatttgaacgtacatgtacaaataataacagataacattactgagcactttactatgaactatggaatgtgctaggtaaagacgttactccacgtaagccataaaatcaacctatggggcaggtgcagatccacaaaccctgatttaagaattctgaatcctcaaaagctttgaaaaccaaaacattttttcgtaagtttggtacagacttatttggtgctaagatttgagttaaagtgatatacattgactaatagttttttctatctccttcttactattaatattcatactttttgctacaaaaatatcaacatgcttgatttaagggtgctaccacagcctctgctgagggatgttattaataaatatggtacatttactatattgctttcctttaaaagttaaataaatctaaatccgagcacatttggccccaaggactgcagacaagaaattgagaacctgttaaacccattatatggatgaggaaacaggctcagaaaaggtaggaaactttcctgaggttacagagctcaaaagcagcagatgaaggtttacatctaggcagccttgctccagagctggcccggttaatcagtgggctttgctacctttgacaaatgcccctgctagctggtctcagccccatcctcccagcgcagcagttcagtccctgtttgttcttgagcaagaagtaagcatgtgccttcttagtcgaggtacaaggcaatccccagggtatccggatcataattacaatgctttattaatataaatctcaggatatagacctgtgtttcaaatcaagagtcaaacacaacaataacatcagtcttaggtaactaccagtcaa

SEQ ID NO: 1106 - DNA, 2408 bp, Homo Sapiens
gctgattcacacaggacagggagtgggctcctggttctggtcttgcccagtccaggatacttttcccagctgagtcagtctgggccgggacagacagggctgcctcacgcacaccctaagacagcctcaggtcagggcgctgcccagacctgatgactcaggagtgtactcctggattcagtcttgccttccaaacatctcccacagatctactctgctgccagcaccatgcagacaccgagaggcacaatccctaccctcacagaccatccactccagtacccataatcatcactcagccactaccctgtggagacacagctgatcaggacagagtctcaggtccactcccaccaaaccgcttgccaaaagaaagtgtcaaaggtcccgggcagccctacagtacatcagttaccctgctcccatcctgtagctccaccgagtgggaacaatgtaccctcaagagcacaggaaacatttggatgcccatcacccttcctccagcttctgggctcaggcttctgtttgcccagagaacagcagctctgagcaaagttcattattctactaattaattcaaacactaaagtgcctagtatttgccaggagagttggggtttttcattaagttcaatacaccatgcccctcccgctgaaagacattcccatcttctccagacgccataactgcaggagctgggggtctgcttagaatcacagaatgccaggacccaaggagctcctgtcctcccgtttcacacaacttgaatctgagcccggaacagggcagggacttgcccaaggtcacacagagcgttcgctacataactcaggatagaaagaggtcaggtctctgtttcggacaccccaggcagtccttcactcagctgagactgccattgacaaaggagggtgtctgagaaggaacatctgtccctaagataaggttattatcattgcaggagaggcccaggaaagctgcttcagagccactcctgtactctccccactgggcttctggggagaggcaggtggaacctgaccctcatgcaccctcttccacccccacagagggagaatgctggattcccggaagggagcggggtcaggccacaaggaaggcagtggccaggaatcactctctcccggggagtggggagaatgctgaacgcttggcacccgtgggggtggaaagccagagaggttaagtgctgctcagagatgacttcatgactcgggaatcaggagctgccgggctgctggtgctggaattcaagcccccgcacatagcccgtgcctgtggctttggtttggcagagcaggaggaaggctcctcatggctgcccaagtgcctatacctaagggcagggtccctgtgctcctacctccatctcctgtggcaaatcccccaagaacccaagtgacaggccttaaccaagcacacagcctgtctaggtccttttaatagtccctttttgcagagatggaaacaagggctcagaaaagtaaagtcacttgtccaaggccacacaagcaggaagtagccacactgggccagaacccaggcttcactgacctggacatttaaccacaaacacataaacacacgcatgaacacatatgtacacggggtcaccagcctgccccaggctccaagggagccctgttaagtaggggggtcaatctagccgggagaaagaaagaatggtacactttggccagctgttgaccaggtcaaagtcctcaacaggggctgtagttccatcaggagacttgtctcaggctgagagaccttttcccacccctcactgcccccaggagccatggaaggttgtttatgcatccagcctctctttcagtatgtgaaagtgctaagaggtatttcaaaacaacccatgggattagcatgcccactggctgttaggaattacctccgttttacattagagaaatgaaggctatgagcgaaagtggggcgtgaagatcttgcagccaagtcagcagcaaaaccaaggctgaaaccaagatttattcccagttcagccctctttgtgggcacctgttcatccttaacccttcatttttatactcagtttccaaaaaagaaactagtctagtctgaagtcaccccggggctccgcggcacggcctggattcgatcctatttcaaagctctgaaaagatggagtcttcaaaggctgcatttagatgagcccaggatttccctcctacagcaagtcaaggggctgggaagaaacttcttccagctcccagtggtgataggaggacacagggaattaaatctctccttgagctctggaagccccctctctgccctgttttggtcccttctccacccatgacctctgacaagagggaaggcaactccaaagtggataagagccatt

SEQ ID NO: 1107 - DNA, 2498 bp, Homo Sapiens
gttgtgcatcaaggcagattcacaagtgtgagttctgccacttcctaactatatgagcttgggagtttatttcatctctgaaatcctcagtttcctcttttgtgactagggctggtagcaccttgcagggtgatgaggattaagaggaatgcatttgtgtgtgcaagggacccagcacgtgatcaatgaatagtggctgtgattaacccctacctgccttcctcctggccagtgggatcagtgctcaaaggatcagaggcctgggaaaacttgcagaggcagttctgttgctggaaggaagctagcctggggacagggagatggtgctttgcaaactgtaaaggaatataatctataataggttatcattttgcttctgagcccagagacttttcaacaaccaatcaggtcccttcagactgtgaaaaaaagatacagagatagtcagagacctgcccaaggtcacacagctttgaccacctgtcctaagcagacagaggtaaagaccatttttattttccccgaaggtgcaaatgacagtgaccagaaacacctgaaattctacttggggacctgggtccccagggacaaaataaataaataaaaatctagaaggtaaaaagaaactacacaccaatccatggtctggtgctctggtgcctgaatggttaaaccaggtctgggggtgggggtggagtgagggttcaaatgtcgccttcaaggtcgggttactctgaacacaatcactcaggagagagccaggcctggcactgcctgcaaccagcttttcaccaagcctcagggcagcccattcccacagcaagaactccaggatcctagggtgccagctagaaatgggggaagggttcaggagcctctggatgtctccctgccaggagctgacccagcacccttgttactaactccctggatgatcgtggacaattcccttctctgagcctcagttttccaatctgtaaaagacaggtctcaaagagacaagcctccctctgtcccagcccagtaaccaagctgggcattgctccgattaccggtggagacagccaggagggggctggctccctcagggcctcagagacagaggtgcattgaagttggagcttgtaatctaggcagcagatccgaaatccctgctggatccgagggctagggaggctctcgggatgtaaacaaacctcctgtgttctcagagcagagtagagagcccacgctgcagccttatctcagctgattagatcagccctgggtgctggcttcctgcctcttcccagcctccctcaccgacccccaaggaagccatcctccagaccaggtcagtctgtcccacagacggctccggcagggcttctccaaggcaaggagtatccccactctgggtagccgggccagccatgtgccacatctgcccccacgcccagaggctagagtgacaccgccagtccccgcaggcctggccactgactgctgggcttcaccaagtcactgtttccacacataccagcctctccctgcctcccctttccattaccccaggtgtcacctgaccagcagcctcttctactgtgccagagaaaactggagcagccgagctcccgggcctggaggacagggggaggggtgagatgcagcctgaaggggtgggggccgctgaataggaaggtctgggctgaaggtgggggttgggggaagcaggaggcaagaacaaggctgggaagtgggggagggaggaaggatggctgtagaaaggtcaaagccagaaagaactgctgagatcagagtgaccttttggggagtactgcagccccctgaaaaggataaaaaggtctaaaccccaataactgtaactcttagtttacattttcaacatatgcacagacaccacctccccaaagccaaactctggccgggttaagaaccctcgtctaggtgctaataaagccagaactttacaagtttgccaaacagcgatgatgacctttgagtgccacaggtgttttatagaggacactggagttcacatcaacaaagtgacgtattaactgtgtgtgtccctgggtgagcagcagagctaggacgggggctggagttttctgtaccctctttttcagtcacccagccttcagcagatgggaccagagaggccccagtgagatgcaagaatgtgcccaaggtcaccactgtgttagttaatgacaaacaagcccaagaagtcaggcttattcttctaaggttaaatgagaccccaactgttgacatatgtgttctctctcctccctctctagggcaccatgcagtgaaaacatacgagaaactggcttttcagaacactgtaccttttctgtccaccaacaccccacccctcaaagtgctatttgcaatcactcagcctccttaagggtagaaactctgcccctccagcacaggagggtgaccccaggtcctggacagtgtccagagtggtctgatacccttggcaa

SEQ ID NO: 1108 - DNA, 2452 bp, Homo Sapiens
tgaatatgtgtgtgtgtgtgagtgcacgtgagtgtgagcttgcaagctccttgagggccaagcatctggctgtttattccatctccccagcacccagcacggggcacagcaccaaacatattgaataaatgaataataaaatatacaacagtcatcagactcccccagttgtcttctaggatttctggaggattcagccactcttaaatcccaggtacagatggacagtcgctgggaacctgaaacactccaggcacagttctagaccttttactgctgtctcattgatgtctcatcttgtgcatcagagcttactctctccccgtcgtgtagatgggcaaactgaggcccagagagagtctaaaccccacctaaagtcacacaggtaatgagagacggccccaaagcctgacaccacattcagaattctttctaccacatcaagtgtggccagccctggaggagaaatccccctcaagccccatcccttgatcataaacaacatgaaaaacacaagagcgatgttttctcatcccagggggctgaaaaatgggatttatgaagccattaattacttcctcctaattaaatcaaaattaaatgtgagcataggtacgttttccttattaaagacaattaaacggacagtgcggctacgcaaataaaatgagtccaggatttaaacggaaagcaaatcaaataaaaagcctccccgggatgaggggtctgttcacgactgtgctactcgtaaaccaggagttcatcaattttctttaaatattagcaacttaattaaatctgctctcctccccactttaatcctgccgtatatctaaaatagatctcaccacctacaggagttggtcatgagtgctgaccccataattctatctttttttaaaaaattaaaaatcctacaaaatccacatccagctgacagaggcctcgggggaaattatagttcggaaaacggattagtcagagtacccagattttatggaaatgctgggaggttgctttgagggtgggtgtcgtgagaaggttcggggagaggtgggccagggttgccaatgggggcagggccgcggaaggagctgtttgtgtggggccttggcgacaaccgcggggcccagcggttcctgtgggtgctgacaggagcctggcggtgagtgatggaggaggcggttgtaaaataggttaccgtcgggcgcccggggttcactctgcggatggtgctgttgctaagctacctttagaattcgacaaggacggatgctccgagcggctccctggggtggggggaaccaggaagcagtgaattaactgaaaccgtggtgaagtcctttcttcctgaagagtgagagagcgtggtatgagagtgtgtgtttgcattcatatgtgcccacacaagcactcgtacatacgagggactcagctggaaaggggacaggtggcttttaaaagcccaagctcatattcctagggttggggggtggggtgggctaatgacaaccttcccccccacttagtggtaagaaactatactgttaggttgccaaaaagactttttgggatttggggcgggagttcacagttagatggtacactcaagatggtggaactatccataatagtgagacttacaaggtgagacttaacaacataaaagtgaatacttactgagcacgtgccaggacccagagagtattctaggttcttgacaaatgctaactcactgactccccaacgccagactttgagctaggtcccagtaatagcctcacttaacagataaggaaactgaggcacagagagggtaaaaaagttggccctctgtatccgtgggttctgcatcagtgaatgcagccaacccaggatcaaaaacattcagaaacaaaattgggtctgtactgaatgtgtacagacgtttttcttgtcattctccaaacaatatagtataacaactacttgcatagtatttacactgtattaggtattatcaatactctagagatgatttaaagtatatgggaggatgtgcataggttatcggcaaatgttatgctattttatattgggttttggtatccatgggaggtcctggaaccaatcccccatcgagagatactgagggacaactgtaatgtgcccaaagtcaggaagatcataagcagccgagctgggatttgagcccacgcagtacagctccaggtggccctttaaccacacacaatgccacctctcttaagaaagtgtacattgggcaaatatttgctaagagatggaaacttcttctccctccctggatggagtgtttttctggaggtggccttgagagtaagagagcagggcaggggctctgggtgaaggtgatagagaaggagggtgacaagtcacaacagcagtggcaatgtggggactggttgctgggggaaacagaaagggccctggg

SEQ ID NO: 1109 - DNA, 2489 bp, Homo Sapiens
atctttctttttccagttatgtacaatatatccatataaaaatctcatattttaatgggattttataaatatatacatggcatcatactgggtgtatcactcttttttttttttaaacagagtcttgctctgtcacccaggctggagtgcagtggcgccatctcagctcactgtaacctccacctcctgggctcaagcgatcctcctttctcagcctcccaagtagctgggattacaggtgtatgccaccatgcctggctaactttttgtatttttaatagagacagggtttcactatgttggccaggctggtctccaactcctgacctcaagctatctgcccaccttggcctcccaaagtgctgggattacagatgtaagccaccgcgcccagccggatgtatgattctttaacctgcgtttttcacactccaggatgtcttggaaccatttccatgtgctagcataaaaattcacctccttggcttgggacgtggctcacgcctgtaatccccgcactttgggagtccgaggcaggggggtcatctgaggtcgggagttcaagaccggcctgaccaagatggagaaaccccgtctctactaaaaatacaaaattagccaggcgtggtggtgcatgcctgtaatcccagctactcagaaggctgaggcaggagaattgcttgaacctgggaggaagaggttgcagtgagccgagactgcaccattacactccagcctgggcaacaagagcaaaacactgtctcaaaaaaaaaaaaaaaaaaaaaatccacctcctttttctgcactgctgggtaggattccactgaatggatataccacattttatttagctacgacctcatcaagggaactttaggtgttttccagtttctcaccaggatgatggacatttttacacaaggctctttgcaggtgttactctgggtcagaaagtaaaaatccctcgagacggggattgcaccaggtcccggtcctcagccccactgcacttcacctgtgtcaaggccacgggaacccttccaccgtctctgccagcagatgccattcagcacccaccccaagatactcatactttgacccggaagagaccagaagcaccctgcagttcgtgtggacaagtctcccctctgacttacagtcccctcaccctcgtacctaggagagggatggcagcgctgagggtcgtgggattctcttccctggaggctcccccatcctcgtggcctctgcgcggtccagctcccctccgagctggctcaaggggtaacttgatccaggtcagctggtggagtatgaggtagcgtctagctgagcgtcacggtattttattaagtccgaaatgtgatcgctactgttgtcacactttagcgcccccaacaatccccttacaaatgagaaaaacagagcctccccaaatgcctttcctctgacatcaaggaaagcgcatggaaccctgcccagaggcctgagcccgggtgaccccaggagtggctccagagcttgaggaaaggcctggggggcggagggggtgtttttccagtttcaggcaaagcagtgagctgggggctatctgctgtttcctctgcgcctgggtctgtaaagtcagcggttgccgtttaaatcccattttccttaacatgtcaggattgctcattctaggccatccatttatatggccatggctcagaggtctcagactcacatgcctagtggggtcaaggatccaggtaacgtaaactgaagcaagccccgtagagatggtgggaaactgtaaatggatgccctggctgaaggaggtagctgaaaatctggagagagaacaagaacaagaagagaaagggaagaggaggcagagagaaaagagagaggacatcccccaagtttacatattgcccattgcttcaaaaaaatttaaacatgcaatgagctaagtaggtatgtctccaggccagtttgcaggctcttccctaactgaacttatcaacacagtagacaagctgccggcctggctccctcacccctctagagcagcactgtccagtagagatttctgcgatgataaaatatctgcagcgttcactgcaataaccactggctacatgtagctcttgagcacttgaagtaggactaaagaactgaacctttaatgttatttaactttactgaatttcaatataactataactagccacaggcaactaattgctaccatattagacaacatggctctagattctttcaatgtggagggtatcatcgtgcttgactactgcaaaaaagatcactccttcttggggagagggggtagattatacctgagaccaccaagcattaatcagagtcctgggtaaatggaaagaaaggaaattcgaaatactgagcagtaaaagcttaggtgtaaccagatgtctgctggctcaagagtggtcactcagtgtccttccactcccccacttcccagtgagttt

SEQ ID NO: 1110 - DNA, 2458 bp, Homo Sapiens
gtgtgtgtaaagcaatatggaaaaatgcggaggtgggaaagatagagacagagagacagaagagatagagagatacaagagatagagagatagagagatgctggtttgaggccctggggatccactcttacctgaaaccactttttttttttttttttgagatggagtctcactctgtctcccaggctggagtgcagtggcatgatctcagctcactgcaacctctgcctcctgagttcaagcgattctcccgcctcagcctctcgagtagctgggactacaggtgtccaacaccacgcccagctaattttttaatttttagtagagaccaggtttcaccatgttggccaggctggccttgaactcctgacctgaggtgatctgcccgcctcagcctcccaaagtgccagaattacaggcgtgagccaccgtgcccagcctaatgttttaatttttagtagagatggggtgtcactatgttgctcacgctggtctggaactcctgggctcaagtgatcctcccgccttggcctcccaaggtgctgggaatacacgcatgagccaccatgcccaccatatttttactgtactctattaacatgttcacgtatgtttagatacacaaatacttcccattgtgttaccaccgcctacaggattcagtatggtcacatgctgtaggggggtttgtagcctaggagtaataggtcacgccacagagcctaggtgtgtagtaggctatgccatccaggcgtgtaatgcactccatgatgttcgcacaatgacagaatcacctaacgacacgtttctcagcatgtatccccattgttacgtgacacacgactgtacattgcttggaactggcacatagcaagtgcctactaagggttatattttcattatccaccaatgggcccgtcccctgttatagccaacttcttgctgttaacatctggtttaatggagtccccctgcccccttggagaggatcactagctccccatatccttcctgcaccctgcttcgtggcccagcaggtcggccacttcccctgcaggcagctctacggtggaggctccacgcggctgcttccccatttgtctgagttaagtgctcctggggaacgattcggagcctgatgggaggaggagacccttctgttttctctcccagccccaaatctaactgaaattgccttgtaataattgcatttgtggtctgtgaaagctgtgtctcgtggcgaccagggactgagattagctggtgaaaaacctggcacaggggcacacacggcatcactggggatactaagcaagccacggacaatgggggagacagagggctcctgcaaccagaaaccactgggaacctcggccacctctccctgctgcagacatgtccccgccatgccgggccggcgtaggaacacgctgttcctcccagcatcagttctcccttttcccagtaacacaggtggtaatgtggcagagtgcccaaagcgtctctgcagtcagactgtctgggtttgaatcctggatctgccacctcctagctgtgggaccacaaaggactttgtcccctgtggttgttggcaatgaaacgacagtgcacccccacccactgctatgcacgtggatgaactgacaggcatgcgaagggtgaaacaggacctgatctgtcctaggggcctcccaagaggcagccagcaggacagaaagcacccgctgctttcggaggactttctctcccccacgacgggccatctggctggaaataccaacagggcttctttaaggacatcagcaactttcggtacatgttcatcccacaccatttccacccacacactacattaaaggtaatcgacaaacagctctctaagagtccaaatgttccagagctgactcgctgaatcatgcaacaccatttcattaaatatttattcactttgatttggcaatttgtcctcatattttggaaccagcacacaaacacatctacgcacctgcataaatatacaacacatacatatacacacatgcatgaatacatatacacaagcacaaatacactacatatacatacatgaatatacaacacacatatacacacgagtgaatacatgacatataaaaatacacatatgcattaatatatggcacacatacgcacatgcatagatatacaacattcacatatacacaatgcatgaatatacaggtacatatgtacatatacacgatgcaggaaaatacagtaaaagcacatatacacacatacacgaatacacaacatacacatatacacaggatataaaatcccaaaaaagacagaaatgcatcttgcttcttcacctgtttccttctcacagccaacttccaactggacttctgcctccgcagccttcccagagcccagacttccccaaatggccagagggcccttctgagtccaagag

SEQ ID NO: 1111 - DNA, 2422 bp, Homo Sapiens
ctaccggaaagagaagctccagcattctaatggagctccgccttcagcacaggtaaggacaggctccaggctcagagctgccagttcgagtttaataacctagtttatttttgtggtattcatttttaaccctgtgttcaatttaaggtgattaactccatacagtttgccagaaccatctaggttttaaaactgaaagttcacaggtgaatggaggcaagggtggttggtcacccctgcttcaacttatgggtatcagatactggttttccattaatggcagcttccttttaaaataaacatttgaatttaaaaaggggccggacgcagtggctcacgcctgtaatcccagcactttgggaggccgaggcgggcagatcatttgaggccaggggtttgagaccagcctggccaacatggcgaaaccccatctctactaaaaatacaaaaattagccgggcgtggtggtgcacgcctgtaatcccggctattcgggaagctgaggcaggagaatcgcttgaacctgggaggcggaggttgcagtgaaccaagatcgtgcaactgcagtccagcctgggcgacagagcaagactccgcatcaaaataataatagtaaaaataaaacaaaataattttaaaaatttaaaaagagagtcacttgagggaaaataccaagaaactaatagtacctttggtgaaaagaaatggcaaaaatattgtgaatactgtgtcatgtgagtgagtgatggtgttgagaaatgtacaatgcctgcaagtctggaaacccaagctcagttcctgggttggtggcccactggccgtttgactctaaacaggttgcttgccctctccgagcctccacatcatcccaagctcacaaggccaaccatcctcagaggtggggagaggtcagagggcaggcaggctctgttgtgggcaggcaggctctgttcacccttatcctcttaagggtgaggtcttaaggtatgagttgctcccagtgcaaaagctggcaccaacagcagcaactcacaaatctttggagaggcccggcattccccactcagtgactgctgagtttgactgatggggccatgtcggcaaattagccaccattcagcagagacaccctttagagatgctaattgcccagtgctcatgcgtccccacccctccctggcacaggcggctggctgtcgatcccctgccattattgtctgataacagtgcttgatttgtctacacagaccagggcccctgcatgcatgctgttagcatctaactaccagccagcacggcgcatgaagcacggttcattaatgctcttgaggggagcaaacaggtgctggcagaaatctattcccgtggacaaatctgtggacacgtgcaccctcatacgtgcccacttagcccccaagtataggaatgagtcagtgtcacgtgtgcatatgcattctgtgaactactcatacgccggctaagaagcagcctcagacacatacgcacaggatggagtacatgcatgtacataacaggcaatgctacatggggttgtgttaggattacattacagaacacctgtaaggcgtcttgaacagcgcccggcatgtggttaattactcctcagtaaattagatctcttattattttttcccagtgctcctttatttattgaggtataacttacacataataaaatgcacaagttttaagtgtttagtgcagtgccttttgataaatagatacacttgtgtacccaccaactcagttaaggtccagaatatttccatcatccaggaagttctctcgggttcccttccagtcaatacctccaaaagcaatcactgttctgatttctcttgttatagttgaattttgcttgttcttgagcctcatataaatggaatcatatggtgtgtccttcttggcaatgcctattgtggatgctcagatgtgtgcacagccactcacacttacacacatgtgcatggatactcagtcagactcattcagaaatggggatttctgagctgtaaatcccttggcctcagcttgcagttcagctaagcctctctgggttcagaggactaaaggagatggggagagcccctgatgctgggtccagccaccgtggggggctccttccacattttcttcagcttcccttactgagtgacctcagacaagaactgaaaatctgttttctcctgtgaaatgaaatgaataataataacatacagctcataactcccctgtattgagcacttattatgcagtaggcactgttctaaggactgcgcaagttcgagtccactctgtcctcccagcaaccctataatccaggtatcatcattacctgtcttatgggaaaggaacctgaggcacagagaggcccagcagcttgtctgaggtcacacaggaa

SEQ ID NO: 1112 - DNA, 2465 bp, Homo Sapiens
ccctgttaatagggtttccaaagaaactatgggatgcccggttgaatttgaatttcagataaacaacaaattttttaagtataagcacatctcttaactattagcagtctggcacatatcattccaggcctttctctgtgaagacatgtacttttttttgagacggagtctcgctctgttgcccaggctagagtgcagtggtgcaatcttggctcactgcagcctccgcctcctaggttcaagcgattctcctgcctcagcctcggagtagctgtgactacaggcacacgccaccatgcccggctaatttttgtattttgagtagagacggggttctgccatgttggtcaggctggtctcaaactcctgacctcaggtgatccgcccgcctcacacattttttttggtatggtttgtatctgacaccgtctgcagcttgcttttcctctccggggtatcaccggggccactgtgtttattagagcaggctgtgaggttgtggactccatctggattaggatccttgccccgctgtttgttaactgtgtgatcttgagcaggttaccccacctctctgagcctccgtgtcctcatctgtacaacgtggaggatacgggtagctttgttatttcctgtatttgttgatcttgtctcttttgaaagctgcatagaatggagaggccgtggtggctttaaccagtcctccgtgatgggcgccaggactgctgcctgtttattgctctttcaaaggaggcagtggaagggggtcgagcaggaaccgggcacataatcctaagacttagtttgctttaaaaaaaaaaaaaaaatgaagggtgtttgtctccctggaaaccacttgctaatctccaggatatcgtctctttttcaggcgaaggaggtggaggagaccatcgagggcatgctcctcaggctggaagagttttgcagcctggctgacctggtgagtggctgcctggaaggcgtgggtttaggcccaggccagacttcaggcccttgctggagttttctgcggaagccattttggtggtgagttagcaaccaggaggaatggggcagcggccagcgctgagaggaaagccacgtgcaaacactccctcctctctctctctctcgctctctctctctcactcaaccccaagtgcttcctgaggcggccatcttgatctcgtccttccctcgagatggtttttattccgcagaggagccaggagtggaccacaaggtggcactctcgggcaccgatgcagggagccgttcagcggggacgctagactatatttaactttcctcagctctgcaccgtcccctgtgcaaacatggagacagccaggaaatggcttcaggcctgcgaggcctaggaggagcctcttgcccaggccacagcccgtggtggagttgggcatcgagttccttcctgaatccttctgttctctctgcttttacctcctactctgtctggttggcccaaatctactagcctggctgaggaggaagatggaagacaatggcccagaagacaaagcctcccacgccagagtctctagaaatcgcctctagaggctgggtgcagtggctcacacctgtaatcccagcactttgggaggccaaagcgggcagatcacttgaggtcaggagttcaagaccagcctgaccaacatggtgaaaccctgcctctaccaaaaatacaaaaattagccgggtgtggtggcaggcgcctgtaatcttagctactcaggaggctgaggcaggagaattgcttgaacccggaaggtggaggttgcagtgagctgagattgcgccactgcactccagcctgggtgatagatcaagattgtgtctcaaaaaaaaaagaaaagaaaaagaaattgcttctagatcccagtgttcctaggattgctgccagccaggtgtggagcccccaggagtgctgatagaattttctagaagctcccaagcttattagaggcaaaccagtaacctgggcttgaggtgtctgcctggaggcccaaagggtagagctccatattgtgaccaggccctgtgtctccccagagtggaggaagcctggccacctgggcccagtggtgtgcgtttatgtccctgagaagcaccgtgtccggaccctgagagtgtttgtgagaacccaagggagtaacagtaacagcagccccagatgttcattgaacgcctttctttgtgcccggcacaaagccaccctagacagcaggcactgagtcatccctacctattcagcggacctcggcccagcctctagggtcacagcagaaatcccaagaggacctatatggtttcttctcttgagtcaatttttacgttcagatgtgggtccaggtgggagctaggtaacaagacaggcttttaacagcctggattgtcctttctttaccaccacgcattggactctttctttctctttctgtctt

SEQ ID NO: 1113 - DNA, 2474 bp, Homo Sapiens
gacaggagaggaattcacctcgccaagaaggactcttctcccagacaagaaaccaacatggctctgccctctgaaccctgtgtgaagtcaaccaggctcccagagtgcaggtagaagggcagctgatgttttctgagcacctactatgtgcctgatactttcagttccttgatctccttctattgctaatacaccaccaaccccatctcagagatgggaaaactgagtcccaaggtacatagtgtgaggccaatccaggcttcaggccgagtctgctgggtgattcaaaatccagcctttgaagtgggaattacacaaaggcctttggtaccaggaacaatttctgatggtggaagtgcttagacacaatgagtgttctaactaaaaactcatttctctgtggcctccttcaaatggatgcaaacggaatgaactgcaggattcttggacttaaaagcctgttcttcaatgcaggggaccaagtttaggcaaatatttagatccctgaaaacgagaccattttctctatctccacggcagcttcggagttgcaatctggatcgcatctttggagagcagcttcgtgtcccagcaaagctgtgggtaagtgatgggctccagcccggggggccactgacaccagggacatgagtcacagagggcaaaggtccggagagccttagtcatgccccagccctgtctggagtctgacatttcccagagggaagccccatctagagactcccataccaggtctattgtttcagagaacatcacgccgggtacaaccaaacccagggagagaaacaggtgggaagagcaggtgtctgctctaagatggttccgattgttccagggcacaaattcacggaaaaatacttaatttagaaaaaaaaaaattattttaagcatatgcatttatatttattaaacaaagctcaaaatacaacctttggggacctccaagtaataaaatgactcatgtcaggatatgatgactcagtgggaaagagggaattccaccacccacgcgtcctttctaaaaaatcaatttgtcctctggacaggtgatgggagcctctgccatcagaccgttccaagaaaatcgtccagcaaaacaaaacaaaaaattctcttcaaacaatttaagtttcaaagctgagtaatctgatgcaggccagtttccaacctacgcccccgcaggacacacagagccagggagctagttggccaagcctgggggcctgaattaagaaggatttaccagccgaaaaattccaaaactctgtgtcatgtgaaggaaccttccaaaacattggatcccacccaggcgcagcgagtcgctcaaagccatggcaacccctttcccgctgccacatcacttttatttttgtgtccttagattttttcctgttttgcaatgttttgctgggacccccgactccgcctgaggccctgtggccaagggccagggttcccactgaagtcaggaacagcctggacttcccagcgtgaactttgcctgaagggttacacattttttaaatttcagagaacatccaaatggcttttcagcaattactgagaatgataaataggaaagaccctgattgttctgtttggtttctctgtcctctctgacatgactagaaaaaattactcgagttgacgacaaatgctgccttgggattccacctctgtcaccagttgtgggctgacctggggtgcatgacttgacatctgtgagcctcagttacctcatctgtaaaatggggataatgctgcccgcttctcagggctggagtgacaactaaaagagatgcattcattcaacaacacaaatgagcacctgctatgtgccggggaccactctggatgctgaggatacagcagcaaacgctgagactctgctgtcaaggaactaagagtccagcatgagagaccaggtgataaatgaacagacagacaaggtaggtgatttcaacagcgctaagtgcccccaagaaaacagagccgggcagtggcacagaaggtgacaaggtgtctgggaagcgggacaacttcagaatgacggtcaaggaggaccccgtggaggaagtgacctttgagctgagactgggaggaataggaggccgcaggcttgaaaagaaatggtggaggaggccggacgcagtggctcgcgcctgtaatcccaacactttgggaggccaaggcaggcagattacgaggtcaggagattgagaccatcctggctaacatggtgaaaccccgtctctactaaacaaactacaaaaaattagccaggcgtcgtggcaggtgcctatagtcccagctactcaggaggctggggcaggagaatggcgtgaacctgggaggcggagcttgcagtgagccgagatcgcgcactcgcgccacgccactccagcctgggcgacagagcaaaactccgtctcaaaaaaaaagaaaagaaaaga

SEQ ID NO: 1114 - DNA, 2463 bp, Homo Sapiens
tttgttcaaccaatccccttgtgacctcaattattttcccgtctgtttctcccagcagactgggcactccctgaaagcaagaattgatctcatttctccctctatccagagtacacagctcacattcagcatctgttgactgaatgggcattgctgcctatcctggctgccgcgacagccctggaaggccccaggcagggtggcaggggctagaatccactccattctccgcagcttaatggggttctgcagagggcttcaagtgatgctgcaaagccccacactgagaaatgtcactcccatcctggccctgagaggggacaggggcttggttacaagctgggactagcacccaggttactaacaagtcccaacaagcttcccaaagtctaacttctaccaaaccaggcaccctccgaggctctgtctctgcccaaggcaagcgcagcaatgtgtctgcctcacgacttcaacaacttcgggtccaaagtcaaggtgcacttgggccaatcattcttctccctcccgcagcaagaaaaataacaatccaccaaaagataaatgcaaaaagaagatgcacgtgagaacgagtccacgtggatgtgtaagcacttgctctagagacatagtcacggggttgctttagggccagtgcatgaacttaatatgatcccatttttgcacaagacttttctgcatttttcaccccaatattacttggctgaaacccccggtccagccccagaccacccttgttcaatccctgcaaacaaggccacatttgggtactcatggcttattccacgcctccccccatgatagacgttcgcctgagcccagcctctgcagccaccgccttccaccaaagcagatccttccccctcctttgctcacggaggagtgagggggaactgctgagaggaggggcagattggccagggagggggcgattgagaacaggaagaagatggggtgagatctgagaggcacgctttggacacaataaacaagcctgctgccttgttcagaaagggacccgggacccccaatcccaccagagccctaaaagcattagttcaaagttaaagttagatacacgcaaagctgcagcccccgggggaactcagagctcaaaaacaatactctctttgactcaaaaaccacaagggaacacccacggcatacttcttgattaaaaaaggaaagtgaaaaataaggttttctttttttccttcttaatcatcataaaactaacttgtgcctattccatcaagtcacgacttctgttggcctcaagcgagcccaattcatgttggccacagacacgaggggccgggaagcttgggcatgtcctagtgaactgaaccggtcctttctgaatggttgtcatttccttcctctgcttcctttagcacaggaaagccaccaaggagccgcctacgccagcacatccatcacccagactcccagggcactgttcatctgagaggccagacacagcggggctcaccaaagcctcaaagcagcagcaacaacctctcaaccgctgttcttgagatagatgaagtacctactatgtgacaggcactgtgcttgggactggggatgaagcaacgatgaaggagatgaaagatgaatgtgtggcaggggggtggatgagtaggtgggtgaaggggttggaagggaggaggaaaggaagagagaacatatatcaggctatggaaaaaaagaaacaaacagaggccaggcatggtggctcacgcctgtaatcccagcactttgggaggccgaggcaggcagatcacttgaggccagatcactggccaacatggcgaaaccccatccttactaaaaatacaaaaattagccaggcatggtggcatgcacctgtagtcccagctgctcaggaggctgaggcatgagaattgtttgaacccagggggtggagcttgcagtgagccaagattgagccactgcattccagcctaggcaacagagtgagacttcatctcaaaacaaacacctaagtagaaagacagatgatggcaggagagaaaggggatctattttggtaggagaatcaggggaagctgctttgaggaggtgacaattgagctgacagctgaatgaagcagagaaagtagccatgtggatagctgggaggagtgaaaggcacgtgcaaaggccctgaggcaggagcctacctggagtgtttgaggaatagcacagaggccattagcaggtgggaatggagtgagggagtgagtgagtgaggaagagaggcaggcagggaccgggtgacacggcctggtccacggtgaggagcacaaggctactctgcatctatactccgggaggggagacacaggagggctcagaatgggggtggtgtagaccaaggtacactctgaacagatcctctggcagctgtgtggggagcagatgaatgaagggtgcaagtgg

SEQ ID NO: 1115 - DNA, 2493 bp, Homo Sapiens
tgaagccattctctttcgtcctctggtctctagaggcttctaaacatgctgaatccacacagggctttgttgttgcagcctaaccccagctgcgggagccttgggcagccttgcacctgctccaataaaaagtggggaagttgtgcagttctgttaatgaatgctttgggcttgtcactcccttgaaggaaaagacaatttgtactttgaccatcttccagaaaggattgggaagaaatacttcaataatgcaattttttaaatgaaacattttattttgaaattaatttttaattcaaagttgcaaaggcactacagagagttccggtataccctctcactgagttccagtttcccaagtagtaaaatcattaaataaccatagatgctaaaattggggaaaagattcagccttagactctattcatcctcaaataagtttggtgcattcattcaaattccattgatctctgaaagagggaggcgcacacatattcacactctggggaccattttcttgacatttaaaataacatgggcagtttaatctcagtattttaagattaagtacttaaaaactgaaatttggactaatataccaacgtaaatcttcatctggccaacacaataaaaacaagagctaccatttgttttacacctactaggtgacagcctctgcgcatgggtgatatgatttctatttctttagaatctgttgaggaagagattctcttgtagcctttataaaatgaggacacaaatgcagagatgttaagtaacttgcccaaggtcacacagctaatgtgctgtcatagtggaaacagacacataggtttaggctgtgtctaaagagaatcactgtggatgccgttccaatctcccttgccaagtcacacccactgctgtcaccgagaacttccgttacacggcagtgaagcccccaatcccccaccccatatatcacccagaattagctgcaaagtgtcaggagacttggccaggcagccccaagcatcagcgagggctggaagccttcactgtgaagccctttatagaaagccgcggttggcagcccccgctcctgcatgggaacaaattaacattggcattccaaacacaggaaaggaaggaaattggaaacacagtttatacttggccagccctttgaaatactgtaccatgctaccgacatcaattaatgaaaagcagggttgtgtgagaggctctggtttggaaatgcattaacacacgttcaacatgtttgcacaggaaccggattatatgcaccctggctccaaaacaataaagcaattaccctaaagctggtgctctcggagttgtcattaattcaatccactccacgcggatcagcacaggctttgcgcggctccccacaatgccttccgacacaaatgttgaaaaggcggtattgcacatgcttgcctgagtttcgcataagtaagtgtcaaacttcatgcactctaatatccccccaaatcataaacactctactttggagcggaaaaaaatacacagcagcagtcctagtattccctggcattgctatttcagtttgagtttgagcaattttttttttgccggggaagcttaaatgaactatctgttccatattaagaaataccaagtcacattttttgtcaattattatttgtcagatgccatttgctgcaaaacccggaattcaatcccagcttgaacacacagctaataccaaacggctcactaatagccgcggtcgtacatgggatcatttgcagtgaacaaacgcccttcctctataaactgtttcagggattggaaagaaaagcatgtgaagctctggaataaataaagcaccgtgccttgagctgcccagtacatgacccttgcatgctgtgagaacaggctcaaaatgacccaagagcaagtgcccacttcgcaattttgtaagaatgcttccgagaaaggattttagatgatgtaggtaaatctcattgtttttgacctgcaatagaaagaaccagctcgcttcttgaaggaccagcatccccagtcactgcctctacacacatgtccacctgcatctggaatccagggtccaagcaacagacatcacgggtgtctcctccccgctcctggtgacgtcatctcctcagctcaactccacgttgatctgggatccatcaagttggagcaatttgagtgtgtaaagctaaatgtgttatcattttcaccacaaattaacagtttctatgtaaatattggtagttcctcaccccatgaaggcgagagaaggcaaaatggcaccggcgcatttgatttaaactaattaaaagcagagggttgtgcaattcaatatattgattttaccagtgggacttaaatcttttataataagtgtacacagctgcagtgctctcccaccactacgctgtaaaggctaatccgcacattccttctgacaataacatgacaggtcccacacatccctgc

SEQ ID NO: 1116 - DNA, 2396 bp, Homo Sapiens
cgggtgggggtcggggagttaggggtctagctgggaggggggcagggtgacttctctccaccccgcagccctcgctccagaagggaactcggaagcctgcttccctcctgacctgaacatgtagcgggcctggaagtcaactgaatttcccaagtccactgggctgtgtagctgcctaagaaggaggggggctctgagaaccgcccccaccacccactgcagagtctgaaggagccaaagtgggaccactttctggttgctggcaggacgatgcctatttggcctctgcaccggttcctgttgggcgggtgatgggtgattggggggcccgggagaccctccacccccatagcttgccagtttttcactgcggtaacaatgacctagtcgctatggcaatgaggttaattaatgcatctatttggcagaactaaaacctcggacgcattcaactagccctgatattttcatccttaagaagccaacctctggtgttttatttgtctaggcatgtaggcatgccacaaaacaaaacattgccacaaaaggaggagctgtaagaagaaatgggggaagttgtggggaggagctgggaggggggggtctctgcccacccctcagagagaagaaaacctggaatgtcacttttcctttttcgatgatggtataaaattagcacagtcaagtaaatgtgttataaacacaaagatgctgccaggaggcaaagtgccttcatttaaggagaggaagaatggctgaggggttttagaaagggggctgggtggtcaaacggttggagggggtgccgtctgcaaccctcccaagtactgtaaccagagggaaaagccatttcccccgagaacgtgcatctgcagaacgtctagacagtcataaagaggacaattaaaaaaagaaaaaagctgcaagccgcagtcactctcctcgccagggtacccacccggctgcaacctccagctaactgcccgagcaggtgaaaaattataaaagcaagaaaagccagtgtgggctaggaggaggccggggagtctgggccgaaaacagtttatgagcaagtgttttgaaatcccgctttaaataagccggtaaatgaattcaaccttgtcagatctctctcccctcacgcagaccaaatattccgctggcgtgctgtctagacacagataacaaaggactttttacagcgcacagagacgcgctgacaaagtagccatttaaagatgcagtattgctttctcggcctaaaacgatttgtcagatggacttaaatgaaaatgctaagttatcggtctggtttggggtctgctggtggactggctggggggagggggctggctgctccagagaactagaaaccatcatctgtgattgggctgccctccaggtcgctcttaaaataggactgtacgtggccgcccagcaaataattctggctcttcttgttctgggaaggcgcctgctaagatgtctctaacacctagtagcagcaattttgttgtagcactgttcacttaaagggggcgtgtggcaaaaaaaggttacatgaaaatgcatgggggagaacttgtttccacctgctccgggtggaccagaaccaagaggagaggaatctggtctcacctccaactttgcattttagcccttctcatacaaagggtcactataaaatgagtcaccctcccttcccaggaaagaaagacagggttggaggtgggctggctgcaagggtgtggcccggggacacactcagggtgacacccaaacaccctctaaactggggagtgggcctccatgcagccaaggttccaagggaggaagaacagcatccaggagctcccagagcctcaacacaagccgtgcgctgacctctccttcaggttacactccggggcagccggacaggggtggttctcctaaatgggggaactagtttcttcccctgggactgtcagcttccaatctagagaaagacctgctgcctgccagatgcccagtgagggctcattcactccagcgacctttctctgatggggtgccggccaagcggtcacttcctttccatgcctgccctgctcatggcagcttctatatgagactggtctgctctccttcctctgtctttccttcctgtcctcccttccttcctttttctctctcaaatgttgtaaagcccagacgctggaaccagacaaagcccatctccaccaccttcaggctgtgtggtccaagggaagtcacctccctgagcctcagtttaccctgctgtgaaatggggtctcaaccacctgtcctaaagagctgttgtgaggattaaatgcccttgtgcattaaacccactaaccagccactaacacggcatccaccggcctctttcaaca

SEQ ID NO: 1117 - DNA, 2500 bp, Homo Sapiens
ggctctctgcccgtggggatcctgccaggttgttcagagcagctcctcagtgtcactctcctccccaccctccctttccttggggtctagccgtttctagctccagtgttgcccctcccaagctggatgtaacctagcttctgtcttttacctgttacctcatttgtgcagttaacattttatgcacgtcccttacagtgtagaaggaaaacataattctaatctgactccattcagtgatgttaaatactgcatgtgaacatccccatccagaagttcatccaatgtagactcatcaaaaagcaggagtcctaaatgtttgcattgtgcaagcatccttagcacattgctatataggtgtttaagagtgtcttaagagatatttggaaaattggttggggattgtttttgttggcctgggaatgtattattattttttcccagttcacataaaggggtgaagccctgatgtctggaaatttgctctccaaagtgtttccaggaattgacaatatttggataatgaggggtgtctgtactttccttgacctaaactgctggtagagggggatatttttgtatgattgggcaaggtcaaacacagaatcaaatcaggaagaacagggtctgacatgatgaatccctgcctcgccttgccattgacaagagacagaataaatgcccccaaagaaccctgcaccatgaacgcttgatggcaatcctgtctcagggctttgctgctcgctgtcaggcagcaggtacactacccagggccgtggggaaggcgtcttgcagccacactgcagcaggaggctggtcatatctacgggctccaccaagccaggatgcagagctcggcccgtctcatggcacaggctcgggctgctcggagcttataatgaattagagccacagctgattattttcaaggctggcgctcacgctgggtgcctgagaagacgatgaatctgcagtgccgaagtgctgcctggcctctcaggaaccagctgcagctgggattctctgcagccttccccgcagcaagctggggtagccatgagccctgcctgtccaacgtggggtcaggcgggcatgcctgctgtgtctggcagccttgacacccccagattctgctggaagatgctcgtggcctgaaagctcattttgtagtcgctctaccctgggatgcagcttctgcactggcaggattaacgcaaacagaatctgcttggctcattcctcgccgggcctcaacaggcctgcaacgccactgtctgccagggagagccactcggtgatactgttaattaaaaccatgactctgggggcaagaaaaaattttaaaacgctgaagtcatcttccctaatagaaatcttattttgaaggtgctcacggaggtcaggctgaccagaaaaacccacaagccataaataagctcaaatagttttatttaatttacttaactcggtgcctggagtcctcatggggagaggtgcctggcatcaacacagggtgggggtggccaccctcatctctagcccctgggtcccagagctgagaggagggagagaactgaactttcttggaagaatgtggaactgctgagtagatgctttggaatttgctgacccaggcatctgggagtacagcctgaccggccatctctgcgccaagctatctatagtccaatggctattttcaattggaaattcattttaaagtggtggcagtgacgggggagtggctgtatctgtaatccattatttcacacagagaattcccttctttcatttttttctggccaaagttgctgctttgaacgtgggtgggtcttggagcccaagactgagctggctgcttggagaaaaattggagggatttgaaaaggcccgagggagggtgtcctctgagttgggggtggcagaaaacatcttaaatgtgcaggcccaagccttctgcagtgaagggaataggactctggcttcggcagacctaactcagtctctgggttcttgggctaatttgtgaaattacctctcccctcaggactgggagagaacggccttaaataagtgcaatttaattcccttgattgtggtcctctttaatgaaaaaccaaaatttattctctctcctgctagtttcccattgaaagtcacaagaaatgaggctggggtggagggcctggagttgctatggaagcatgatgcctagaacccactatgggatggatggtcattggtgtcacggactgtggtgtagacattgtctcctgtgccaggatgtggcctggtcctgcacccctttgcctttgaagctgtgcctgcctgtgatctgggagtggcacgaacccacagaacccagcccaccctgcaggaagtgggagagctccccgggtactctggtgctgaggaagcacagcttaaagaggaaatttccttgaaatccacacagacctccttccagaatgttctggaaggaagcacaacttcaagagga

SEQ ID NO: 1118 - DNA, 2495 bp, Homo Sapiens
ggttttgtcgggtatcaatcagccgtctgtgtgtggccctgcctcctgtcaccctgctctgacgccttccttctgtcgacaccaccctgtcttgattcctgtgcgtttcaagtgaatcttgaaatctggtagcgtcagccattcgactttactccttccaaaattgctttggctcttctaggtcatttgcattttcctatgaattttagaatccacttgtcatgtaaaaaaaaaaaacctgctagaattttgactgggattgtcaaaatcactctcaaaaatcactgaagttgactctgaaatgcagcatgcaagggtttgggtgtgcaacttgtacgtgagttctagtgcacaaaagaaagtgagagccagcaagccgggctagaggggataaaggagagagtggtggcgcatgtgcccaggctcccgtcggtccctgagagctttcctttccctagagtgaccacagggtgggtaggaggttccctaggatccctggagggtgtgtccctttattaataatgataaagggtgtgatgtagactccttaaccttactacatgtgaaaagagtgtttattgctgaaaggattaaataagataagacgctgagtagttgagctgcaaatgcttgtggattgaagtctaaagccagcttacatagacccacccacctgcccatttcctgccgtggcctcctgtgtcccagccaccaccatcgtcccatggcgcatggctgacgtgctgtcctgcaaagggccaggcgttaccctctagcatgtaccactctccactggcttcgttcttggggctcatgatacatattatttggttacttccaccttggagtatcacaggtcaaatcagccagtaactcgtggaactaacccacgagtggtgtttacccctggataatggcccagtggaggggctggcctgcagctcacacccaccatggttttgctgaatggtgctcgttagactttgcataatcgaatttagcccagctctatgaaggctctgcacaagctagtcccctctctccgctatttgatggaataatagatccataggagaattcatttgcaactctaagccccgagttaaagacgtctcaagggatgaacgtgggtgatttgtggaacactgcgatgcatttatgagatagattgcacgttcaccgcggcgctcaaagaaaccagatcgggttgcattagaggcggtgctgtaatccggctgtcctctgggaaagaatgcaagcttccagtgtgcgaagtatgaggggctgcagaggaaattgctttggtggctctggtcctgggagcaagtacctgcttctcgttcatttaagcacattagcgagcttcataaacacttaagtggctcacgagatgcttcacttccaggcctcgccccacctcctccgctgtcacacagaggccaccagaaaccacggtcttctgggtttgacagccaggcagacaggaccaggccaggctgcagctgctaacccctgcgctggcaacttccagaccccctgcacaatgtcaccgtccagtcattcctccctgggctgcctgccttcatggggcccctgcaattaaaaaaaacaacaacttattctcactcctttcttttaatatgtcttattaataactgtgtaaatttgtttactttttaggactccatcatgatgtaaagtagataaaacaaccaatttgtctttctttttcttggtacatgggtgtcctgcagccttcattccttccaacccccgcttcacgttcacgagtatgaagttgaattaactcatgctttgctgaagccggattgtgagattgtgtaggcagacgtggcttttcttctgagcctgcaaagcagcagaattcatgacaatgggttccgtagtaacagggactgactgcgccatgctgtctctgtccatccttacagcgctcaggagtttgcatgccattactgggaccattttacagaaaacagaggctcccaggggcaacgtaacctgccccaggacaggcagccacaaggcagagaaaggagggttggacctgcacctgtgaaaccacagccctggggcatggcttctgagactcatagctggggctgaagatccctaggggggctctgctgggctcactgctctccagagtggtccagcccggctgcagggtgctgcttccagcttggtgcactgcggccggaggaggtggaggatggaaagtaagattcaaagacagggagtgcaaggggacagtgatacttgaggactccgaggaggaagtaggagaatcatccggaatggccagcctgggccgagcctgggccaacacctgggttgagcccagcccacagagcggctcccgggtccttgcacctgcaggaggccagagctgcttttaccttcaaatgttagatgaggtgccagcacctggacaggagacgtcctgcagtcagctcacagacatgagggtgtcg

SEQ ID NO: 1119 - DNA, 2500 bp, Homo Sapiens
ttgccgcgtttgtgacatctcgcctggatagtggcagcaggctcctcactggtctccagcctccactgacattgattctcaccacagaagccagagtatgccttgaaatcgctcaggtccctcctcacagccctgtctagagtaacagccctcccagatttacagagccccatcccaccccttctacccccacctcctactgtctgcccctccccaggcctcccagcctcactggccttcttgcaggtcctcaagcacaacaggcctgagggccactgcgctgactgttccctctgcctggaattggcatggctggctccctcatttccttcaagtatttgtccaatgttactttctcagtgaggcctaccctgaccactctatttgcaattgcaacctccctactcccacaatttcccatctcccttaccctcctctgtttttccatgccacttattatcttctaacacatttattatggtgtacagtattaactgaataaaatttagtaggggagacaggcaataaacaagaaaataaaagcatgagcataggaaagtttactctagcagtgagtgctctgatggaaataacaccccagggatgggacagagactgcagggcaggttgctttacaatggtcccagaggagaccactgagcagagactcaaatctgtgtccagaggcgtcctgaggagtggagctgcggttgggggtgggaaggaaggccattctaggctgcaggaactgcaagggcaaaggctctgaggcgggagccaggttcatgggcagatgtttgaggacacctccggcttccagggccttccagaagttccagtctcttgggtttggttgtgcattcctgcgaccttcaccgcaggcctcctcctccacccactagtgcagagcctgggggctgccggtgggtttcaggccagggaagcagaaatgggtaatttccagaggcagaaatcagccgaccccggtggcccggtgggtggccaacaaagcttggctggccctcgcgggctgtgtaggagcccaccctagggaggtacccagagacatccctggtttggctctgccgggaaagtgggccgagcagggagagggggaccagagaggaagagatggacagagttttccggacggtgggctgggtccgaggcccgcggaccgtccgaggggggcctctgggttcgaggccgcccgcaccgaccagtgctgtggctcgggcagttcaccgccctctcgggcctcagtttcccgccctggcagacctcgaggcggcctcggagatcccgggcctggcgaatactgggcggggaggggcgttaactccagcctcccgggcggggtctcccggctcccgcggccacgttgcagcccaggcggaggcgcgggatctcgagctgggatcgccctcttgggcttcggtgcgatcggcggcgggaggtgagagtgggcccggcgggctccgggaggaggtggccccagggaaggtgtggccgcggggaagtggcggcgaacagccccgacgcgaggacggggaaaccaaggcggcagccagggagaccctgaccgaggtgacctctgtttagggcgacaaccgggttggggctccccgcagtggccactggcccggcggtcccgcacccccagcccgcctctcctccaacaaaagaatccaggaagacggtggggcgggcgggaggcccggtgtgcggtggcctggcccccctactggtggagaggagggagcgcccttccccagacgcgggggaggggaggggtcatggccccacgggctgcccaccccctccctgtgccccagtgctgggcccaggacccccagtgaggccactcctctggcaaacatctgtgatctcttcccccttcctgggccccccctactggaatggcgtctctccccatccaggggcctggcttgtttttctccataacccttagcattaccggtccttatgttatctcttatttcactaattattctttcattaatttattagtatttattttgtttgcctacagtgtgtttccccctgtgggaatgtaggctccaggagggcgggagacttcgatttgtccactgatgtatccccattaattcaacagatccctcctgagggcctctctgagccctgcacggtgctgggtattggggttctcctgggaacttagctgagccccaccctagacattctggggctgggaacagtgctgtaaacacatatgacatcgtcgtgggatgaaggaaacaaaccagaaatgggggggtctactggtcaggtgaccttaggtcaggccaccttggtggtcagggccaccttagatgatatggtgatcatggaaggcctcccagattaggtgacttcagttaaagccaggaagtgctagaagggaaaagctaggaaccatgagggcatgtgtagctctgacctggactcaggcagggagctggggtctgaagagtaaagg

SEQ ID NO: 1120 - DNA, 2433 bp, Homo Sapiens
actcccagcccagaagggctctgatctcagaactgggacgcaagggtggggagctcgagctctcattagcatttcgcttttgcacaccccctgcccgctcctcagccgtcacaatcccgtcctgcagcaggcccccccaccaacaccggaccctcgacggggaaggggtcagctcggcggccccagaggccactgggccagaacacgtgctccggactccacgtgcgcggaaaatgaactcgtacccgcgacgcggccggcgggggcggatggcagcgagggccggacagcgaacctttaccccgcggaggagtcggggccggagcccgcacgtgggtctgcgacggccccgccccctgggggcgtcccctcagggactctagccccggctggtgggccctgcaggcccgggcccgaccgcgtccgccaggccgcccggaggtcccggcgagcccggcggaggcggcggcccctccccgcccgacggccacgcccgcgcggattggccgctccccgacggcggggcggggcgggacgggccggggcagagctcgcggccaggtgaggcgccccgcccctcggcggctccaggtgcggctgtgggacctcggaccgcggcggggccggggccagggccggggccggggccggggcgccatggccgagtcccagctgaactgcctggacgaggcgcacgtgaacgagaaggtgaccgaggcgcaggccgccttctactactgcgagcggcggcgggccgcgctggaggcgctgctgggcggcggcgagcaggcctaccgcgagcggctcaaggaggagcagctgcgggacttcctctccagcccggagcgccaggccctgcgggccgcctggagcccctacgaggacgccgtccccgccgccaacgcccggggcaagagcaaggccaaggccaaggcccccgcgccggcgccggctgagtccggcgagtccctggcctactggcccgaccgttccgacaccgaggtgcctcctctggacctgggctggacggacactggtttctaccgcggcgtgagccgggtcacgctcttcacccacccgcccaaggacgagaaggcgccgcacctcaagcaggtggtcaggcagatgatccaacaggcccagaaggtaggcccccgccttcgcccccacaccgctgggacctcggccccagtcccctggaccgggccccacctcccaggcagggcccggggcaggccgccctgagcaccctctggaaaatgggccccaacccgcccctacttcctggggctgcagtgaggcctgtagagcgaatggctgggaacgtgtttggcaaattacaaggtgctggacagatgtcagccgtcggtattccagcgttcagaggcactggctctgctctgtacttctgaaacttccctgtccagccttcctccccagggaagactgggggccgaggccctgtggttaaaatgcaccactcaaaggtcttgatgataacctacgtgctgcccagaacatatcccgagccgctttctcatgtgatcgtcaaaacaacttcagggagtgggtggcggtgaccttcccggtcccacctctgccatgctgctccttggaccacccctctcctcccatagtcaaagctgagctggcgccctcacagtcacagcctctcctgggccgggtactaggccccagctgcctggaatgaatgggggacggggtatattgaggacctactgtgtgcctggccctgtgctgggcgccttggcacagcaggtcacctgactcggcagctcaggaaagggctcctacttagcatatgtgtcctgcttgagagttggaaggaggggctgtttccagggtggctggtgaggccagtccactgtggaacaggtggaagactttaatctttatgcctttgggtgggagtcctgggcagcttccagatcaaatgtaggatgccccactacatttgaactttcaataaacaacacataactttttagtatcagcttatcccaaacatgacatgagacgtactgatactgaaaaattcttcgttgtgtatctgaaattcaaattgaatgggaacgttttgtacttttatttgctaactctggctgccctacactgagatttgttaagaaacagcagcagcttttggtgcccaattcagaataatacaacaggagtggcttgggttcaccactcaaattccactcagtgagtgaggttggagtcctggttcccctcgaggctgaagaggcctgaggagggaaaatagagctagaaagaccagtgctcaggctcatcttcctggaaggggtgatttaggtagttggggtgatctagatagttggctacattggctaccagaaggaagggttaactttccactgcgcacatttctaccctccctctctataattc

SEQ ID NO: 1121 - DNA, 2339 bp, Homo Sapiens
acaggtgaataaaaaaattaaacagtgtggggaaaaaacagacttgtacataaatcttcacagcagcgctattcacaatccccaaagtataaacagcccaagtgctcgtacgctgatgaatggacaagcaaactgtggaagccccatgcaacgcagtgtcgttcagccacggggagacgtgaagctctgacacctgatacagccaacgcgctgtaaaccattgcaccaggtgtgggaagtcaggtacaagaggaccggtacggtatgattccactcacaggaaatgtccagaacgggcagctccacacactcaaagccaatcagtgttgccaggggctgggggaagaggaaggaggagggactgctgatgggaacgggtgtcctttggaggtgattgaaagattccaaaattgactgtgatgatggttacacagctctgagaatgtactaaaaaccagtgaattgtgtgccttagatgggtgaattttctcgtgccaatgatatctcagtaaggctggaaggacacagacctggtcagcgaggagggcctgggccttgctaaagtgggcagagtctgtggggtccattggctcagccccagcctctctgtgcagccctggggcctggcttcttctgccgcaccccacaagctgccccctctccccagccggggccccaggcctgctcctctctgggctgagcatcacctttgccagaggaaggtcaaagcacctggaccccaacaccccaaggacccttgcaggcctcttccgggatccacttctcagtgagcgctgccgtgcgcacccctgggcctgagggctgggcatctcccaggtatgcaaggggctctccgtgcagggctgtgagcaacgtgggggcagccggccgcagtctccagccccggggcctgctggcatccccaccagcccccagcctgggcaccccacccaaggaacccggctcccagagtccggggcactgattaatattcacacaggcagcagagagctgctgaaccctgaacgcgaggcagggaagaaagttgaagcatctgctatctataaatcaaaatgaatttactcttcctctaaggacagccgctgtaataggccgcagccaacaggtcccatggtgtgatttctgcgcaggaagccactgctcacaccgggtgtggaagcatttgtaacccccaggggacctgctgctccacagaacccgacggaaagctcgaggaaggccgagcttcgggggtcacaggccggatgccggagctgctccatgggtggtgcccgagggagccctgggaggagccgtcagcccaggcagtgggtggagacgggctctgccttctgccttcaccagctccgcccagctcccgggtcacccaccacagccccgccagagcaggcagacgtgcagatgccaaggcagacgtgcagatgccaagccgcacttgctcactaaactcacgtcctcgctacaacgtagttgtcgagtaaatgctctccatggattaaaaatataagcagagatggccgggcgcggtggctcacgcctgtaatcccagcactttgggaggccgaggcgggcgggtcacgaggtcaggagatcgagaccatcctggctaacacggtgaaaccccgtctctactaaaaataccaaaaaattagccaggcgtggtgggggcgcctgtagtcccagctactcgggaggctgaggcaggagaatggcgtgaacccgggaggcggaggttgcagtgagccaagatcacaccactgcactccagcctgggcgacggagcgagactccgcctcaaaaaaaaaaaaaaaaaaaaaaaaatatatatatatatatatatatatatatgtagagacatgaatgccgattcttatgatgcttatttattcatgaaaccaatggcttacctgccagaaattcagtccctgggttgacaccaaacccaactgttggcttttcctgctgaatggaggggctgggagaagccgcctccagctggcagcctcagacctgtgtctacctggcaggcccccacccaggtggggacaggccaccaggcgggagtcactggggcactgctggggctcaggacacttgcaggatgagtgaaggaggaggagagggaggaagacagagaggaccacctcggccactctgaccttgcctcctggccatgcctgggttctcagaggcaggagctggggggctgcagggctgggggccacaacgactctccagctgctgtcaccctccctggcaatgaaccccaaagcccccacctccccaccgcgggtgccagacacaggcctggtgcaggt

SEQ ID NO: 1122 - DNA, 2444 bp, Homo Sapiens
atttccatttgaaaaagtcctgactagtttactcccccgaaccaaccagaagacacaaagcagagctcaccttcctggaaatgggccctttaccccctctttttttttttctcctctagtttggaaattctttctctccacttctgcctgtcccaggcttcattggccatgatcgtcctccattgctgggtctcagtctcctcctccctccataaatctccccctttctcagatgaaaagaccaacactgaaaaggcaagttgatgtgctccggtttgcacagagccctggaagcagagctgggatttgaattctgggctcctgattctctgtccagggctcttcattctggcagagcaggagatcaatttcttctctttctttttttttaaatgaagcttttatacatagctatccacatatgtacaagcagctcttaaggccagagaagttaattccaaattttagagctgtggaggctctacagattatatggagtttcagctagtgattaaatctgaggtaacagcatctggaggctcagccttagcactgaggggagttggagggaaaaattaagccaagagtaaaatcttcccgttctgaaaataatagtggcataacacaatactcctggactgtgggaaataaaatggagagggacatgattagaaggaaacttctagaattctactaattccacgttcctcaaattggtacaactggtgacaatctcagagtcacctgtcatcgcatcaaagtttgacagagaaggatgacccacaggagcagccttgctgtgcttgaggattgtttgacacttgaaatgagcttcggatcagttcttggctgaagtccacctaggcccctttcgcgaaggctaagctatcagagtcaaccaccactcttgccccaccctgttcaaataccgtcgtcggggttgataactgtatccagtgaacatctgtactggaatccggagcatctacctccctccacctgcagcctgaggaattctgatcctttggtgatttccagaagcctctggacgcagctgtccgtgaggcggatctgcccgtcgccggcctcggggctggacgacacgcccggagtcccagggaggccgcgaggagcctgcccctcggccaggaagtgaccgctgtctgcgtcgcggcccttaaggacaacccctgggcggcaaccatcttcctccacccaggagatcaatttctttgttgaggttccacctaaggctgtagcactcactcactgaggttcctaagaaacctgcctgtcctaggaaacctcctactgagacctgccccgcactgccacctggtggtaagatataaaaacacaccctccacggtgggatcagattgcgcgcctgctccgcccccaccccgccctctccccggtggtggggtagagggatggtggaaagggaaccaagagctagttcccagaagtgtaggtatctgggattgagattggagtggggctacacctccttctctgttttcagtaccagccatagctctgtcactgtgcctctagtttctttcctctttgcagacattggccacttgtgaaactaattgtattccctctttgcattgtcttccaggacacctggaaccagcgtacagttcactgttagcaactggatagaatcgcatggcaggaatttagaagaggagcttaatctctgagtccacattccttcccctgggcctcattttcctaccttattttatatttagttttctgatgatgttcaggacatccttccagccaccttaactctcctctttgtaagggacaggagggacaaagcaaggttatacattcagaaagagcttgcctaccttctgcaagtctcagtttcctcccctataaagtgggcacaagaatccctgccttggagggttttgtgtgtgtttcaggagatgctggattaatattagtgtccaccctatttcccacctccccatcctccaggctctctgccagttatgtgatgcaggctaggatgcaaaggagatcaacagcacagatcactttttccccagtgccatttgtgctctgcaggcccagtgggtgcccctactagagccttgtaccctgagcccagtccctacctgccttctggaagatgttggctccagaattctctgcctccctcctgcaggcattgtggcattcacagctgatttgcagagagcccagatgcatctcataaataaggaatgtactgttctgcaggacggctgtggcgtggctgtgtgggggtgggcaggctggagtagacaggaaccacgagaggcagggaggactgtacaggggttgctgaccaggtggaagatgatgggagcctcagaaggtgtcgtgggacagggtcagggagagggctctatgcggccaggatctggatgcagattgtt

SEQ ID NO: 1123 - DNA, 2414 bp, Homo Sapiens
ccagctccaccttggtcacctgcaggaccctgagccgtagaggattaacccagtcggcgtgcagggggcgtggcctgtgcctcactgcaggtacccctcctgtccctcccgcagcactgatgacaggccggctgtgctgggcaccgagaatgcaccggccctgctctcgcagggcccacagaccagggagggaggaagatcataaataaatgaagtgagcaaggcaccgtgcatgtattctaccagtgtctacagagcccatgctctgagccaggcactagtctagtaaataaacatcgctaacgtgtttcagacacttgccttatcctccagcctcaacctctgttacccatgaagtctcacaataggcctagggggtggccctcttgtaaccccatcttacaggagaggaaacagaggcccagagaggctaagctccttgccatgctgttaggcagtgacggagcctgcacccataatcggtatgctgcctcctgctggatgctaggggggtctccaggggctgaagctcatgtggtccctgcctcctggagctcaggctagtggggcctggaagaagaggggcagggcccttccatctgttacagtgaattccaggtgggtgagatcagggaaggcttcctggaggaggtgatgtttgagccgggatctgaaggtcaggaaggaattaaccaggttcagagggagagagaatctactccttctactcatgctacctattctttgacaccccctccaggaagccctccttgccctcttccagacggagctcccacactacagctgcactatctctgtctgtgcccgagttcccaccagactgtggaactcccaaaaggcagtgcagggggctggctcctctgtgtccccagcaccacccagccccgggcacgggaatcagaggctgagggacggcaggctgtgtgggctgaggtgggagggcggcatagccgaggggcccgtttgtcacactggctccaggtgcacagggtgagacactcaggaaccctgctgctcaggagaattttaggccaatgacctgccggcccctgattagcccctgatgttgctctgtgtcaggcagcgcgccaggcagatgaccccctctttgaccccaggagaggctggagtaagcgtgtctccagccaggacgtgcaaatggcatgcagtggaggaagccagggagcatgaattgctgggacccagctgtctgttctggaagagggcatttttcccccctgcccatgttaactttatccttagcttgtacccagaactccaccgctgtctatcggttgggcagacagaggctgccttgcctggctgccaacacgaaatggcattttgctcgaggtgttcctcctccctcgcctttccctgcctctaaattcagagcaaaggtagcatgagtcacgactcatcgacacggtgagggacaagcatgctccgccagggaggggctttgtgcggtctgaaccggggactgcagcaaacgatcgcgcagcggggactcaagcccctgatggtgccagaaaaatataacaataacagaaataaacaccaaacccacaaaagctcagtgcagaaggcccagagtccaagagcgcccatgtacgcaggccggccagctgggggatcttgggcaagatatccttgaggataaagatatccctttttaacttcagtttcttcatctgtaaaatggacaggataatacttatacctacttcataggattattgtgctgacaaataagtgagtatcatatgcccagcacccactaaggttcagatgcaataaatggtaagccgtactgccatcattcagatgctcatgaaagcctctgtgtctgtcaccagctaaccatggtgacctgaaatgagccttggaaacctaggatggcaaggaatgggtctagtttgtgccctggtgtattaccaagactttcataaatggcatgggaaaattacccctgaagatttatgaccacaagccagccctcaaacaagttcatagggacaattgacacttccagttctgtgtgcaaaaacctcaggctgagaatttagatgaaaatggctttctctagacttctcacaaacaaatgcaaatccccctggagcaattaaggtgacattccaaccacaggagcatcttacagctgagagtcactaaacacacgaggaaacagggcaccatgagtaagaaccagcacaaacctcacctagctgaatcagatccacagagtccccagatagcagaattatcagatgaggaatgtaaaataagtctgtttactacaattaaagacacaaaaaagaggagagttcaaaatatgagttgggaacaagagattctaaaaatggaccaggcatggtggctcacgccagtaa

SEQ ID NO: 1124 - DNA, 3544 bp, Homo Sapiens
ctcagcaacttctcccacatgcctccccaccaggctcaagatgaaagcctctgtctcagcgtctcctccctcccctcctctatcctcttcccctccacccacgaagatcccagggttctgcgagggtcggagttccctatgcactcccacaccaagacagttgtcaggatttgcccaacaggaagttctcccctaccagagcccagttccattccagggaatccatctcccctccggaaaaaggaaaattgaagccagatgctctctgggatcgccatttgaggtgggcgtggctattaggacgctcagagagcccagcgcggtgaggaaagcgacgaacttaggagccctggtctgggtccagccaccccttactacctatttgaccttcatcaagctctttgacctttccaggctttagtttcgacatcaataagatgaattaatagctgggcatggctcgcgtctgtaatcctagtactttgggaggccgacgtgggtgtatttgcctgagctcaggagttccagaccagcctgggcaatatggtaaaaccccatctcgccaggcgcggtggctcacgcctgtaatcccagcactttgggatgccaaggtgggtggatcacttgaggtcgtgagttcgaaaccagcctggccaatatggtgaaatctcatctcttctaaaaatacaaaaattagctgagtgcggtggtgtacacctgtaatcccagctactcgggaggctgaggcaggagaatcacttgaatccgggaggcggaggttacaatgcgccaagatcacgccactttactccagcctgggcaacacagaatgtctcaaaaacaacaaacaaacaaacacaagaatcacctgctctgggaagtgcagtttcttccagcctacctaggccaggagcaaagtcagctcatcaatttttgccagcgcctcccttttcagaaattcttttctcaataaaagatgagaccctctcttttcttttaaaaggatgatttgtgtcctgtgtcttgtctgtctgctctgtccacaaaactgatgaaagctccactgcaaggcaaagttaatgttcccctcccacttctcaagaactcagaaatggaaatataactctgcactcagagagttaaaatagaaaacaagcaacagatccaagtggagacatgcagatcacacaagagatcggactctccaggatccagccttgccgctaaactcaccaagggtattaacatatctaaggaaaaggccgggcatggtggctcgtaatctttgggaggccgaggtgggtggatcacctgaggtcaggagtgcaagaccagcctagccaacatggtaaaaccctgtctctactaataatacaaaaattagctgggtgtggtggtgcacgcctgtaatcccagctattccagaggctgaggcaggaggttcccttgaacccaggaggcggaggttgcagtaaaccaagatggtgccattgcactccagcctgggcaacaagagcgaaactctgcctcaaaaaaaaaaaaaacatatctaaggaaaaaggtgggtcagtccaggatgccaagcaaagggagagttgagacccacaaactggaataacttgaataacgagtggatcagctgaggtcaggagttcaagactaacctggccaacatggtgaaaccccatttactgaaaatacaaaaaattagccaggcatggtggtgtgcatctgtagtcccagctactcgggaggctgaggcacgagaatcgcttgaacctgggaggtggaggttgcagtgaggcaagatcataccactacactccagcctgggcgacagaaattctgtcaaaaaaaaaaaagaagaagaagaaagaaaagaaaagaggagaatttcctgatgaagcataagtgtctggtccgaatgataacagcattctgactttcttgtttacacatctatcccttatgaatttgttcagtgtgtattgatcctgcggagtcctatcacttctgggtctacaaacagtaaacttcggagcgtataaaagcctacagaatatgctaacaaaactaaaatactgccaccatgtgggcctttccacaagcttaactgtcagtccccaaggcatttgtgtatccgatcaatatgtaaatgaacgagcagactctcttggatacaatgtggagaagactctaccaaaggtcactttccccaagccactgataacctttaaccagctcaaacccgtctgagctcaccacataaaacacccaaggatcctgcccactcccacaataccccatctccctcagcccaacaaaaacatcctcaggaaagttctctccaataaactcactgaaataaaactctagcagtatttgagcacctagggctgctctcctcgaaagatccctcccctaccaacacggagcctggtgtcagtccatctcagagtacctaacctcagttatcctttgcttctggccaaaatgcaagacccaaaaatcagatttttttgatgatgctcccttcttttggactctttctactcctttccatttcactctctccaaacttccttccttaaaatcaaatttttttttcttttttcttttttttttttttttttttttgagacggagtctcgctctgtcatccaggctgaagagcaatggcggtatctctgctcactgcaagctcctccccctgggttcaagtgattctcccgcctcagcctcccgagtagctgattacaggtgcgcaccaccatgccagctaattttttttttttttgagacagtctcactctgtcactcaggctagagtgcaatgacacaatctctgctcactgcaacctccacctcccaggttcaagcaattctcctgcctcagcctcccaagtagctagaagtacaggcatgcgccatcgcgcccagctaatttttgtatttttagtagagacagggtttcaccatgttggccaggatggtctcgatctcgacctcgtgatccgcctgcctcagcctcccgagtgctgagattacaggcatgagccacctcgcccggccaacagctaatttttgtatttttagtagagatggaatttcgccatgttgaccaggctggtttcaaactcctggcctcaagtgatccaccagccttagcctcccaaagtgctgggattataggcatgagccaatgcacctggcctcccctctctttttaacctctccacacttcttccttctgtgtgcaaaacaagtctctccatcctaaaaagaaacctgtggcccctgtggttccctccagctatctcgatgttctttttctcaaatcacactcagagcctttaatcagccaaacctggctccaattcatcacctgtatttcatttttctttctcttttcctttctttctttttttttttgtgtgtgtgtgttttttgagacaacatctaactctgtcacccaggctggagtgcagtggtgcgatcttggctcagtgcaatctctgcttcccaggttcaagtgttctcctgc

SEQ ID NO: 1125 - DNA, 2382 bp, Homo Sapiens
ggatttacctactgtctgtaaccccccgggctgaagagaccaccccccgggagtcaattaacttactctctggagcgcgcgttcctccctgctcccaggagtcggtttcccaaaactttctgaggcccgcgcatgctcccctcgactccccgtgtttccactctccacagaaatccacgcattcacgcccctcccctcccccgagcctgcagaggactccgccctgctttccctacattcagggctgctccttttgtcgccaatacaaacctgttgacaggtcacgcctgggaagcgggtggggtgtcccggagcggtgctgaggcgctgcaggcccggcttctggctgcgggggagctgtaccctgaagcctcgccggaactcgcgtctggggccagcagggggcactagagtcaacagggactgtatgcaaaacccacttcctcccaggccctctagggggatggtcaggcttctgcagagatggggaggatcctttcctggtaaggggagagggacgggctaggagccaagcggaaggaccccgtgttcaaggcccttcaagggacgggacaggcgaggaatctctttgagtcttttgaattgttttatcagtcaggcctgggaagtactccgcctccacaaactctgttttcctgaaaggggtcgggggggggaccccaacatctcctgccacaggctatgatgggcatggtggctaagagcaacaggccgcgtggtgaggctggctttttgtggctctgccctgccattccccgaggcatccccatgccagtgaacagagctgcgggttcccagctgcacagatgaatgcacgaacaaaacataggtccatacaaaggaagtcattgcattgatccagattcgacctgggattgtcgcataaaacagggctgataaaaaccgtcgtgttttcaccctggaaacagagactcagcctccccctctttgcttgaggcattcagcaaaggtttgtccttgagtggctgtggatgctcaaggacttacgatttctgactttataaagtttagggtgaaaacaaaaaacaaaataaggagaccattgttttaaagtggccgttgtagctaattatctcaagaaagcaaacaggctggtactgaaagttacacaggcgggcggctccctgggagggttgcccagctctccttttctgagacctgagcagggagcagccagaggagcttgaagggatggtgttcagggcatgggaacaggctgcacacatcttcacggagtacggtgcttgtccagtttgagaagggaaagaaacgggagcagagggctgatgagaaggcagcagatggatagtgcgggattgaaaaggggatccatttgaagactggccaccattatttattttcatcatctgattgctgttgctccattgagatcgatgcgtggagaacaagttggggagtggaacaaatggcagggaggggagagaagtgagtgaacatgaccctggtccagcctcataggacagagcgtggtcatgaagtccacagaggaggacaggtagggaggaatcatggcatggccaggttgtagggcaagaggcagagaggagagaggattgtggaggatgcctgcggagtgccgactgtcagtcgaggctggtcctttatttatttattttttttttttgagacggagtctcgctcttgcccaggctggagtgcagtggcgcgatctcggctcactgcaagctccgcctcccgggttcatgccattctctcgcctcagcctcccaagtactgggactacaggtgcccgctaccatgcctggctaatttttttgtttttaatagagacagggtttcacgtgttagccaggatggtcttgatctcctgaactcatgatccgcccacctcggcctcccaaagtgctgggattgcaggcatcagccactgtgcctggccaaggctggtcctttcttttatggcgatgggtgtttgaaagttgcacataccaaaataaactcactatttgttgacccaaagtaaaaccctgagggtatgaaagggaagggctcatgcttacatggctgagataaaagctgtctcaggaagctgggtgtggtggctcacccctgtaatcccagcactttgggaggccaaggttggaggatcccctgaggccaggaattgaagactagcctgagtgatatagcaagaccccatctatatttttaaaaagggttggctgtctcgggacttttcgaaatagccctgcaagacattcctgttttggaatcacaacaatttagataagatgcttttgaaagaacacctgcctaggcacagcgtctccaccaatgaactgatgccaactgtggttt

SEQ ID NO: 1126 - DNA, 2303 bp, Homo Sapiens
cataatctactctttgtggattgggagattcagtattataaagttgtcgattctccccaaattgttctacagatttaatgcaaatccagtaaaaaattcaacaagaggctgggcgcggtggctcaagcctgtaatcccagcactttgggaggctgaggcaggcagatcacaaggtcaggagatcgagaccatcctggctaacatggtgaaatcccgtctctactaaaaaaaaaaaaaaaaaaaaaaatgagccaggcgtggtggcgggtgcctgtagtcccagctactcaggaggctgaggcagggaatggtgtcaacccaggaggcagagcttgcagtgagccgagatcgagacactgcactccagcctgggcgacagagcgagactctgtctcaaaaaaaaaaaaaaattcagcaaggggtgtgtgtgtgtgcctgtgtgtgtgtgtgtgtgtgtgtgtatgcaagccatagacagaatactttttttttctttttgagacagagtctcactctgtcgcccaggctggagtgcagtggctcgatcttggctcactgcaacctccgcctcccaggttcaagtgattctcctgtccctgcctcctgtgtagctgggattacaggtgtgcaccaccacatctggctaatttttgtatttttagtagacacagggtctcaccatgttggccaggctagtctccaactcctggccgcaagtaatctgcccacttcagcctcccaaagtgttgggattataggcgtgagccaccgagcccagctagtacacagaataccattttttacttaagtatattaatctagaagagttttttttaaaatacagtataccatttttatctataacacttaaagacaatcaaagccaaattatgctgtttcaagataccatatacttagaaaaacatctataaaaagcaagagaaacatacaaatcaggcccatctggagagaagggagtgaagcattgcgctgatacggggataaatatgctggttgggtagacaggcagtccttatgcttttggctgacgtagatgttacgtactatttcatgtgttatcacactctccagtaaacacgtaacataagagaataattaaccactatcaagcgttctcatcttgagacaggaagatgtagaggaaagaccttgatgtgtgtgtcagttacaaggatgtacaccagtgactgacatgacttggtgcaaatcttgggtagagacctatacttaagctcctcacccccacctgccgaggcgtaagggctcagagggggttccatggggtgggcgggagtggtaagggtcgaggtgcagccacagcctggctctgtgcacaccccctccctccccctggtcccatgtgcacaccctctccctgccccctgccccttgtgcacaccctctgtaccccccttcccgccccagcctgtgtttgcagtgctacagggtggctgcagcctttgcctcccacagctcctcaaggtcagagggctgggaacccctgggatgtggctgggatgaggaccctgcccctcctcaggcatttccaggcaaggggcacagagacacagccagcccagcagctgagcccctcctatcaggccaggtgggaaactgaagcatgaacacaaccccagactggaaataaaaagccgtcatgtactgtgtgcctactgaatgccaagccctatgccctattctttaatgtcatctttaatgagatgtcttcactcagttcaccacatgatagtagacaggtatttatgatgcgcctactgcatgctgggcacttttctgggccatgaggactcagggaggtccctgctctggtagaagtcaaacccgacaggagacagagactaggggcccacacaccaggaggaagaacccagtgcagagagtgccagcaggaagccacaggggcagggaaggcgctcctgggagggtgggtggctgcgtcctgaggctgagcagggggagctggcctcgggacaggatgtgcgcaggcgtggagcaggaagttcctggaatgatgggcaagagggagcaggtcactgggggcaggtctaaatactgggggctgcattgggatagcagaggcctcggacaggcccgctcagcatgtagactcccctccctggccccttccctaggatgacagtggaggtccatccccaggtggtggtgagggcaatcctgacacagagaccccagcccagctggcaggggaaggggagcccccaaggacccctgtatgttggggcgtgtcccgccaggcggcc

SEQ ID NO: 1127 - DNA, 2496 bp, Homo Sapiens
agttcactgtagcctcgacctcctgggctcaagcaatcctgggactacaggcatgccccactaggctgagctaatttttttttttttttttttggtagagatggggtctcactatgatgcccaggatggtctctagctcctggcctcaagggatcctcctatcttgacctcccaaagtgttgggattacaggcatgagcctccttgcccctcttctgttgtttttttcctatccttgttgacttacttttatttcttaaatgtaaaattgatttaaggtgcatccagagatgtgcacagattcttgtgatggagggaaccgcacagtcatggtgaggagtccatcataattttcaaacgcccctttaagaagtaggcattaacaccctgctccatccctttggaggcagccctgggctgagcactggactcctgggttccaccaacctcagtgtctccaggagaccaagcgcggccgggggtgagtccctgtccccgcgccccccaccacgctccaatacttaccccctgccccaccccccagcctcccgggccttggcttgtacctgtgaaccgaaggggtcatactaggcgtcatactagggtctctggatagctcccaggcctggacttcgttttccaggatatcacctttactggtcaacccattttgtttcgcgagtgcccagtgagtgtttggcacgtaatagagcctccataaatagttgtagaaattagcgtcattttacagtatggaaactgaggctccaagtgggagtggcttgccctcaaggtcccattggtgagagacgctgtggaagggctgccctggcctgggcacacagtaggcgctttgatgcgggctggagaaggtcctgcccggtgggattgcgccctggggcaccgcgcacgggtcggggaagcccggggcagggccgtatgcaaatagcgcgcgaggaggccgcggattggccagcccaggcgggggcggggcgcgccgagggcccagagctggcaggtgccctggcagggacaggtctggtgcccgcgcctgctcgctggaccgcccgccccgcgctctggcggctcctcccgggcgatgcctccgctctgggccctgctggccctcggctgcctgcggttcggctcgggtaggcggtgaagggcaggagggggctgagcccagaaagagcgggcagctctgccctggggcgcccgccgcctggaccctgattcctggcgctggggacccagatattactgttatgaataatagtgatagccaacgtttacgggcctcctctgttgggaatccgagggctcacagatggctgcagccctgcgatgtgtgttgcaagagaccaacatgcaggggggctgcggtaggacagagaagggactagccccagccccatggtgacgcctggacgggggcagatagagagatatttcggccgaggaagcagcatgggcaagttcatggaggggagacaatattgggctgtcctgggaactgccagtccatgggaccagctggagcctggggtgaggggagcctgtgggggaaggggtgaggctggagaccgaacaaagcaaagcccagaacttcaggacctcactgcctttccagagaggctggacttcgtcagggggcgctgggggaccatgggagggccatagccagagaatgaggcagtcagacttgcatgtggggggagggcccaggtgaggaaggtgggacggaggagggctgggccgatggcatggagagatgcttaggaggggcagtggagttcttggcaactgagtgtctgcagcagggagagaaggcagcagtttggcccgaccgctccatttctgagcaggatgactgggcagggggcagtgtctgagacagcttatgcggtggcccagggggagggtgaagcccagggcctggcacacaacacgtgctcagtaactgcaagcagagtgggtgtggacagttctgccggaggtcagttcccatcctcactgcctcctccagctgtgaacctgcagccccaactggccagtgtgactttcgccaccaacaaccccacacttaccactgtggccttggaaaagcctctctgcatgtttgacagcaaagaggccctcactggcacccacgaggtctacctgtatgtcctggtcgactcaggtaagggtcctgcttccctctggctactccaaaaggggctctgacctgtctgcagggaggagggaaggaggcagatagaggaaccctccatgcctgtagtcgtctcattaaacaggtactgcagccacagacctgtccttgccttgcagggacatccagttagtgagggaagtaataacaccaccagtcactgaacacctacaccataccaggcactttgcacaccatagagctagtatctacaaccagcttgtaaggtagctattaccaatccccattacagagcagggaagcaaggctcagagaggtggaata

SEQ ID NO: 1128 - DNA, 2499 bp, Homo Sapiens
attgcacccagccttttctttaatttttttttttttttttttttttttttttgggacagtagggtcttgctctatcaccaaggctggaatgcagtggtgcgatctccgctcactgcagccttggcctcccaggctcaaatgatccacctacctcatcctcctgagtagctgggaatacaagtgtgcaacacccacacctggctattttttgtattttttttgtagagacagagtttcaccatgttggccaggctggtctggaactcctcacctcaggtgatctgcccacctcggcctctcaaagggctgggattacaggcatgacccaccacacctggcctcttttcttttttaaaactgcggcaatcatctctcctctgttgaactcaccaatgagaaaaagtcaatggggccaggcatggtggctcacacctgtaatcccagcactttgagaggctgaggcaggcaaattgttcgagcccaggagctctagaccagcctggacaatgtggcaaaaccccatctctacaaaaaattttaaaaattagccaggcttggtggtgcacgcctgtagtctcaactactcaggcagtcaaggttgcagtgaaccatgatcgcaccactgcactccagcctaggtggcagagtgagatgctgtctcaatttaaaaaaaaaaaaaaaaaaaaaaaggctgggcacagtggctcacacctgtaatcccaacactttgggaggccgaggccagtggatcacaaggtcaggagatcgagaccatcctggctaacacggtgaaaccttgtctctactaaaaaaaaaatacagaaaattagccgggcatggtggcaggtgcctgtagtcccagctactcgggaggctgaggcaggagaatggtgtgaacccgggaggcggagcttgcagtgagccgaggtcgtgccactgcactccagcctggcccacagagcaagactccatctcagaaaaaaaaaaaaaaatgcaatcaactgcaaggcttggggtgacagtttcctggtcattcttcccagtttttttgtgtctttatagctagagatgactaaagcccacctccaagaaaacagcaagtcacgtacaactgaagcccatgggggcaggatgctgttctctccaccggggcaatccaagcacctgagtgtctgacaccacccatcacccaggggatccgagctgaattctaaagactggaaccaaagatgacagagtgcgtggctggagagagggggaagtccacagagtttaggtaaatttctgaaccacatccccaccacgcccacaatgtactgcattgaagtacaccggaagctaaagaccaaaaaggaatcagattttcagctctgccacctaaagcagaaactgagggccttattcaccgcacagactttagcccaagtgccatgcctccagtttcacagtttcaccagcagctcaagcaaaatggcctggacactaaagatggcctctgggtcagagtatcactcatttcctctgtccacaaaccactttgattctctttgattctctctgtccctcatctccccatctagtctttttttttttttttttttttttgagacagagtcttgctctgtcacccaggctggagtgctggagtgcagtggtgtgatctcagctcactgcaacctcggcctcctgagcgcaggcaatcctcccacctcagcctccagagtagctgggaccacaggtacacaccaccacgcccagctaatttttgtactttttgtagagatggggtttagctatgttgcccagtctgctctcaaactactgggctcaagcaatctgcccacctcaacctcccaaagtgttggtattacaggcatgagccactgcgcccggcccatctggtcttattaaatacttcattctctgcaaatgcagacgttttctcagctctgattattttttctaaagtaatgaccccccacctggctagatgaatgcttctagcaaaggaaaagaccagaatgtgaaaattgtactgcaatagaacataaagcccgtccaaccccacctcccatcagacctggggtggtggcagcagcaggcgtcagggctctcaggcctgcccattagtcatccctaaggcccgttagcacacgggttaggaggagcacacactctggaatcagaaagcccaggattgaacccagccctgctttcagtcaaggctttgtcactcactatcactcccttgacctaggacctcacaaaaccttgtcatccgtaaaactggggatgataagttctaccttgaatgttgttgtgaggaataaatgaggtaatgtctatgcagcacctagcacagattcctgcagataaacactcaataaatgttaactatcatccactacctagtcatcagaaaagcacaatgatctggtatctttaagtccttccgcttccaaaaaaaaaaaagaaaagaaaaaagaaaaagatgtgtgg

SEQ ID NO: 1129 - DNA, 2499 bp, Homo Sapiens
tcacatggacacaggaaggggaatatcacactctggggactgtggtggggtcgggggaggggggagggatagcattgggagatatacctaatgctagatgacacattagtgggtgcagcgcaccagcatggcacatgtatacatatgtaactaacctgcacaatgtgcacatgtaccctaaaacttagagtataataaaaaaaaaaaaaaaaaagaaaactggacacttgaatataataatgcagtaactctggagatgagactctcctcttcctcagggtttgctgttttggggttttgttatgttttacattgttgtaggttgtctccatgctgaggatcaacctgagttgtaagcttgaggtcttctcaggtctgaagctgctcctttccctgggcacacactcctctctccaaggatgtgtggtaactttaatttcctctgtgtatgccattgcttttgagtgtcctagtctttaatgtttggctcccaaaaaaggaaaagagaacaacgaaggggaagggaaatggggttctggccttttctatctcctagaagttgcttcagtctggtaagggcttgcagcagtggagtggggagttgtgagcaataatggctgccggcctctgtgtttgcccttccataatcaaaagtagcaatcaacaaccagaacgcagatgctaacacttggaggacagagtgcttatcgcccatgattgttcccacaagtcttagcccaagaagttagaagtggtgctcaagtttgtttgtctgacagaaactgtgaatccacactggcctgcttattttgaggttgtgttgccagagctttcctagcataataaagagaggtgcatacaaaggaataggaatagtaggaggtgggggtaaaaatatcaggtgtgatccacatgccaagccgacccgcactgtgtcccacaggaagcccagaagatgtttctgtaagaaattaaggattcgtttgttggggagggctgctggcatgcttgaaaagtactgtgacggctgaattttgtgggcttggggagattgcagattctctgatttcaaggggaatgatgtgatcctagagttgcaaagaacaagtgacagtggaggcgcttatgctttgtgactgcactagagacaaggaagacacaactagaataatggggagcaggaatggagcggccaacagaatatgtgactgttagggatctttgatgaaggctgattctcagggagtgaactagatcagtgaccaactatttgtctttatataactgggtaatgtggatggattctaataaagggactacttacagcacagcaggaaagtcacaaagaaaccagacagaagagtgtaagtagtaaggggccaagcagtcacctgactagagacagtgccagcttgccaagaaggcaccagacagaagctgtgatcttcagcaaagggacacagtctgcctgtgctgaccctgcaggggcagaggtgggggatacacacactcttctctcacctatcttctgccaccccctccattagctgaaccccaataaaagcatgagggtaagggagatctctgaagtatccaattcaggtgagcctcctaaggaacaaagcagaatgcagaaaaattaagagtgggtctagggaataaaatagagatatgcaccagagtatgatgatgtgtctgggaaagaatatacaaatacttttaaaattactagacaataaacctgagatgacactaatacaggtaaatctcatttaatggtaatatattccaagaaatgcatcattaggtgattttgtggctgtgcagacaccaaagagtgtactttatacaaacctagacagcgtagcctactacatacctaggctatatcgtacagcctattgctcctgggctacacacctgtgcagcatgtcactgtgctgaatacagtaggccaatggtccccaacacccaagccatggaccagcaccggttcgtgtcctgttaggaactgggcacaaagcaggagatgagtggctggccagccgagcattactgcctgagctccgcctcctgtcagatcagcagcagcattagaccttcacaggagcacaaaccctattgtgaactgcccatacaagggatctaggttatgttctccttatgagaatctaactaggctgggtgctgtggctcacgcctgtaatcccaacactctgggaggtcgaggcaggtggatcacaaggtcaagacaatcctggccaacatggaaaccccgtctctactaaaaatacaaaaattagctgggtgtggtggcgcatgcctgtagtcccagctactcgggggactgagacaggagaatcacttgaacccgggaggcagaggttgcagtgagccgagattgtgccactgcactccagcctggcaacagtgggagactcagtctaaaaaagaaaaaaaaaagaaaaaaaagaatctaactaatgcctgatgatctga

SEQ ID NO: 1130 - DNA, 2279 bp, Homo Sapiens
taatcccagcactttgggaggccgaggcaggagggttgcttgaggccagagtttaagatcagcctggacaacatagcaagactttttctcaaaaaatgtttttaaaaattagctgggcaggccaggcacggtggctcacgcctgtaatcccagcactttgggaggccaaggtgggtggatcacaaggtcaggagatggagaccatcctggctaacatggtgaaactccgtctctactaaaaatacaaaaaaaaattagccaggcgtggtggcgcacgcctgtagtcccagctactccggaggctgaggcaggagaatggcgtgaacccggaaggtggagcttacagtgagccgaaatcgcgccactgcactccagcctggacgacagagcaagactctgtctcaaaaaaaaaaaaaaaaaaattagctgggcatagtggcatgcacctgtagtcccagctacttagaaggatcccttgagcccaggagttcacagctgcagtgagctgtgatcactccactgcacttcagcctgggtgacagaaagatcatgtcgctgaaaataaaatcacgggtggggggtggtgctttgtgtacttaggggagctcaggtgtgaaaaactgcgttttgaaaaagcaggttcctgtgtgctggttagaatggggggatgaggaaattgaggggcagtcctccccacaccatcatttgccttggagcagactggaagagtcagcagaatgaggggcaacaagtatggattggagtgatctgggtgagctgaggcaggggctgaagccctcatatggaacgtggcagggatgagcaggccatctggaatccagacttaaaagcatcagtcacccagacattgatttgagatctctgcagagggggaaacggctggggtttcagccacttggagtgtcctaattccccagcagagtctggccgtgagacctagtctctctgtctcacctggcggggtgatgtgtccacttcaaagtctcactggacacaggcaggcaaaccctcaccgggcacttgattcttgcaccaggttttagcgtggacgttgctaagccagcatgtggcttcgcacatgtggagtcttacagttactctgaagcaagccctgggaccccgaatctgaccccgaagttcttgctgggctgactccctactcggtgttgacttgaccttacacgggagtcagtgtagtcatgggctcggaaagcactcagataaaaggtgctccacccagtgatgaagaatgtgttgatgtcttaagatcgtcttcagataaacagcaaaaccgttggttaaaagctggtctaacccaccttattttgttgttgtttgttttgttttagacgtttcgcagcctgaagctgtggttttagtctctttctctagtgataagtggaaaagagggatgaggaaggggctttgctggcccgaccaaaaacaaaactaagaacccatgagtgtattctctcccttgggcacttggacacctctgctagaacatttagtagacgctgacaattccaagctaatgtaaaagccaagtctggagggtcatggggtgggagactagggtgaggaagttgttaaaggaggccaaggggatggcacggccttcatctaatagtgacagtagcattttagagctagagggtctttatccattgtctagttcacatgcatgattttaaaaaaggaagctgaggcaggaggattgcttgagcccaggagttggagactagcctaggcaccttagcgagtcaacgtctctgttaaaattaataaatgaagtcaagaaaggtgaggcatgggcggcctcagtgacctggactaactcacagagaggtagcaatggggagggccagagcctcgcttctgagggattacaccacagctcacttcccccacccaaaggccaaaggaactgagcgttaataaccaacatagcgatcttggtacctggagccccctcgatgtcccatggattaaggagaccagattcctccatacagcttgttgagggacttggtgggtgccccttgctcttggggtcttcctactttggctgctatgctcaacccagacccagcctcttcctggaattctcctttcaacacgcacagagacagaacccggcccggactttgcagccagtagttgtgtgcaatcacctgggacagtgctgcaggtcagcagccggcaatgctagacaccgggttggggtcgctcagcaggtctaagccctggctgccagc

SEQ ID NO: 1131 - DNA, 2443 bp, Homo Sapiens
cgaattcctgaactcaaggaatccacctgcctcagcctcccaaagtgctgggattataggcgtgagccaccatgccctgccactttcagcttcctgacttgaaatgtctccccgcaaataagtattaattactccaccgcaggcctgaggagaaaaaggtgaatgagcctcttcccagtcctgaagctaatcagtctaatgaactggtaatgacaacatattcttatccttctgggccacttctattagcctcatatactgctgagagagtcgaaagtgctgagctaagtcagggaaggtaagagcaggcaggtgactgctaagacacttctgttctacctgtctgacacctgatatcctgcagggacgaaaggccatatttatggatggtgaaggcagtggaaactgtactgacctgggagtcagaaaccctaagtccaagtcctagttctgccactaatatgctgtgatcttaagaaagttactcttctctctgggcctcagtttcctcatctatgtaagtaagggctgagctggtcaatctattaagatcccttacaggccaggcatggtggctcatgcctgtaaacccagcacttcgggaggctgaggcaggtggatcgcctgaggtcaggagttcaagaccagcctggccaacatggtgaaactccatctctactaaaaatatgaaaaattagccaggtgtggtgatgggtgcaatctctgcctcccagctactcaggaggctgagacaggagaatcacttgaacccgggaggcagatgttgcagtgagttgagactgcgccactgcactccagcctgggtgacagagcgagactccgtctcaaaaaaaaaagatcccttacagtgcagtctatggtttttttaatctactcatgccatgtagctaatagtcacctcagtaaggtagcctgtgacctgctttcttacccccaggcctggcaacttccacatccaaaatgtcttaagacaacctttggcccagggtagctgaaatggacctttaatctggagtcagagtccccaccatctccacagtacccatgagggctaacgtttcacttctctagcatagaacatggactcctagccttcaaccacgagactgggttcagggcggtcaccctgaagctttccataacttcccctctatggccttgggcagggacttactcttggcttttttgaaaccacaatataaattaagtagggaacatcgaagctttcagataccagagattttaggttgactgacaggctccagaaagtgagggaaggagagaggactggagctgggatcccacctcagccccagccctacagacagcagccatgtagagggtgtctgcagagccacatcccgggtttgtggttgtggggtaagaaagacagatgtctggctgcctggttggggactacagccaaagggaggtgcttccactggggcctcactctgcccacaaataccagagatatgccctcatttttctcttcatttctcagacccttagaaggaaagaaagaaaactaacattttctgggccgctacttgtgacaagcgctgtgccaggcaccttcacgtatcatatactcatttaacccccagagtaatgttgggaagtgggtgttactgtcgccctttacagtgagtaaacaggctcagagattcaggatcttgcccaaggtcacaaagctagcaagtgtaattcctaagtttggccttttcctaatatatcacattgctctgcaccccaagatctggttgattgcctgataagcatgtagtaggaactctcatgccctagcattctcccacaaatctgagctcttccttccaaggtcccataaatgcaactgggaactcctttcctagatctcaagaccacacacctccctgggtcctaatcccaggtgactgctcctcaattcaaaacactccaggtccccactaagttctcacaagtgaatccctggggaactgtgacaaagcatcagtcagggtgagggttcagaatgaggggtgctctctctgagtcctggactaaacctagcctgctgtgagccagtagggagatactggaggagacagatccagtgggtgagagggaactccccttaggggaggggcctggatttctccaaggaagaaggaggcctggtgaataagaggctttagggctggggaaaatcccggaagtgacaggggttcttagacagttaaagcgcttccataagtcatgagagagtctggggtgaccttggacaatctcaattggtcagagaaagggagaaaggatattctctggagtagggtcatggcagggccccaggagctcctactggtgattgggatggaaagcacacatcaggagggagtcttgtcagttctgtgcacaacactggtctcacgtgacaggacag

SEQ ID NO: 1132 - DNA, 2480 bp, Homo Sapiens
aggtgtgcagagttctgatctttggtcccggaaaaaaggtcagcacagcccggaatgggaccacttcagaaccatactcttttccttctttgtactactcattaccaggggcttcccaggcccatcgagaaacctggtcctgtagacctctgtgccacggccccaccattcctgctggacagcttaggctcaggggctgccataagatccagcccagctcctggggctacactggtggtgtcgtgcttggtgcggaaaaccccaaggctagggtttacaacccttgtcccttatgccctatcaggccccttccacaggccctgcccttctctccaccccatggggctggggaccctccctggccaaagtccagcagactggacagaccctccagaaagtaatggcaggagacgcacgggacgtttgacccatttgtctccctctacctacgtgtgcagtccttctggttttgggcaaggtcaaagccgggcctgcagtcgcaggccaccccacctttgggcgtctcccggcagatgtgggcacagccatggtctttgttcatgcagttcataccctctgggaagagagacagacaagagacgggttgaagaccaggcagagagggagagagaaaatttcaggctgaaaggggatagccaatgatatgtaacaatcaaatgggctgtcattgcatgtatcatgcacacacacgcacttgcgcacacacacatatgcgtgtgtgcagcagccatctacatggatatcccttagggagaaagcaagggcacggtgcctgggtctagattcaggctttgctctgtgagttgcactgtaaatggcacctcgtgacccacggagaccaagctcttgctctaggtcagattgtggggcatggtctgtagaactacttttgtgtcagggtgatttgctcccctctcccgagccacccatggttctagggtaccccccacccgcccagcagactggatctcccctctctgtctgcctggagtggctcatacccccttccgttgacctcagttgatgtttatcttcctggtgatttgtgaggcgtttctagaatttatgaggtcaggggtcaagtgagaggttgtaggtcacaagtccatcaagaggccaaggcagatgaaagggaagcgcctctgtctgccaacccaccagctctgtgacctgccttccacctccacccacaggaagctcaggcaggagtgaagccggctcggggagcggcagtgaaggctgcagacggcgaacacgcacagggcaacctccttcccccgggacacaccggcctcttgttccaagggaggactggctcaatcctgaccccgtccactttaaatacgggtatgcagcaacacagaatagatttaagaacacaaacaccctgctagttgtaataaagacaaaaacgtctaaagttaaaaatcaaacaaacaaatggaaatgaggaagcctgcattttgcccggcactgtaactcctggtttcacctgattttgcgactcatatttcctcaccttgattttctcactaatcaatcaaattgttggaatgacgcagagtctaactaagcaacgagttagcacggaaagcgctttcatgctgctgccctgcacagaagctgcaagttcacacggaaagaccctttccgctggctcgattccaaaacagcatcagcgcctgagtcacacagatagtggcgtgcggtcaacgcttaacagccggcaggggtggaggctgatttgcagtatttaccaatttacgtgggataaatacgccagccacggctaatttcaaggtaccagggagatgtcgccaagggtagagctgggaacaaatgtgcacagttggctctcacaagctgagacaagccagccatagcacgtccctttcttagaaaggtcgttgtaaagtcaggcagatgtaggtgtgaatctggcttccttcctggctgtggcctgggagacaactgcttcccttttctgagcctaatcttagaaggggcaggatcacctctgtctcacagaggagctgtgcaaattaaatccagttacagacaggaaatgccaggcaataagagacgaggtctgtctgtgggggcactggctcttgaggccggtgtctctcctgcaggtctggagacagcgtggctcctccctggggcctggctggaccgggtggccagaggcggctctcggtagagaaaccttcccaggctactgagacatattcagtccctcatcaggtcctctgggagcctcctgccctggtaagggtttggccagtgggtggtggccagcaagccatctccctgaccgttactgacagctgttgtcggcggtgggctgagtccagggtcgcccccttcatccctgttcatttggcttccatggctccctgctgttccagcttcttcacagctgtacacactccacggttcgccatcccacaatgcct

SEQ ID NO: 1133 - DNA, 2487 bp, Homo Sapiens
ccaaaagagccctgcggaggctaggagtggttcttgatgctcacctgaagcccctagacgctgctaggagggggggccctcctgggcccccaatacccctccgcttgccgctgctagcgcacccctgcagtccagcgtgcatccaccccacgcacgccccgtgctgtgttcctgggccctgcccatggcctcaataaactctctgcttggtgtgacattggctgtttctagagggtgctaagacatggggccaggtgcccaggggctgcccattgtggtagggacagagtccccagtggcgggagtgttgtggcaatctcacccttttagctctttccgaaattgtgccgggggtccctgcggtgctgctctggggccttatctgaggtgccgtatctagaagcacccttgggaattctccctagatacactcgattggccacagaggaatccgaggctgtgcaatggggtgtcctttccacgtgcacggactgggggccagcacggctcaggtcagtgtgtagtgggggcatgaactccttgaagaacaatctggccgggcacggtggctcacgcttgtaatcccaacactttgggaggccgagccggggcgtatcacctgaggtcaggagtttgagaccagcttggccaacatggtgaaaccccatctccacaaaaaatacaaaaattagctaggtgtcctggcgcacacctgtaatcccagctactcaggaggctaaggcatgagaatcgcttgaacctgggaggcggaggttgcagtgagccaagattgcaccactgcactccagcctgggcgacagagggagactccgtctcagaaaaaggaaaagaaaaacaatctacttagatcttaaaatggatatttaaaaaattctccagagaaagccagaagaaaataggtgactttttcactatgtgcttaggtgactgcagatgcccggcaatgttccctcccaggccctcctgggtgagcccgcctcccaggcaggggtcagcatggccggggtccctctgtctgagcccaggattcgtgcaacaccaggaagacaacagttgaaggttccttagtgagctaagggaagtatacacaaacttactacataaacattagaaagtgctgtccgtaaaaaacacgtcttcacagagccaacaagcagagaaatagctgcccagtgttaggaagtgcatcatgatccagaggttcagcccgtgtgcagcgcacagacctgaggccccagagagaccgaggacgcagaccagtggcacgacggaaacgcagaacgtttatgagaaaactttcctactaattgagataaagctgtaaagaggcagatagccccactgggtgtgtacgtttgaaacttgtgccccctgggctagggcattcggggtgtggccctcagtcccctgtagctgctgcctggaaaccgctgccacccacccacctcctccctctgctcttccactcaggtgagaattctccaagccctgccctccggcgcccccgtcccgcccctgcccggcctggccccgcccctgcccggccccgccccccaacgtgtcttcaggtctctttccctccagccggcccttaggacggctgttggacgtgctcgtgagtccttcgcctgtctgccttccacctctctgcagctccttctccaatctcatggtcttcttgagcttggccgccctccacgccccatgctgggcttggtcggttctggggtctacctctctggcttcatccctcccacagtttcgagggtttccctgtgctcaggcccctggcagccgccccctgtgcagaccactgggcagatccagctgacctccaggggcacttcctcggctcatcactgggccggtgctctgcagaatgagctgtgagagccactgtggctggccagagggtgccactcacagtcacttcagactcacaggagccttcgtcccgacccctgcattcatctgtgttctgttttatgttttttcccagtcacctgagctgcaggccttggtcaccccagactcctccctcctgtcacccttatcctcaccccagcacctttacgtctgccccaggctccatttccccctcttctgcctggatcaaaccaccctgactttcctgggtcttcgtgcaacagcctgctccggccgctgcctcactgcacctgcaaatccacttgcacccacacccaggccagggtttttaaacagaagcctcagcagatccctctctctggccagctccctgttgaaccaggaagcaggtccctgttgaacctcagcatgacccgcccccacccctgcatcccacttctgctctgggagcctctgggttcctgggcgcacctgctgcccttccctgtttgtcactgggtgacctcccgtccttgtgggcgctcccgggccctggtctcgggccttctgaggacttgctctcctggtagcggctgctga

SEQ ID NO: 1134 - DNA, 2429 bp, Homo Sapiens
aaaatacaaaaattagctgggtgtgatggcacgcacctctagtcccagctatttgagaggctgaggcaggagaatcgcttgaaccagggaggaggaggctgcagtgagctgagatcgcgccgctgcactccagcctaggtgacagatcgagactctgtctcaaaaaaaaaaaattagccgggtgtggtggtatgcagctgtaatcttagctacttgggaggctgaggtgggaggatggcttgagcccaggagttcgaggctgcagtgagctatgatcacacgactgcacctgggcgacagagtggaggtgatgtgcttcctcaaatagccatgagaacaacgcttcttttcttgtcctggctcaggaacctcaccaccatgccacgttgccctgctgcgctgtgctggtgtcgtaggtcggtggcaggacatttgcccacctcacaggctctgctttcagtcttgaagtatggctcctctcgactgctgcccacacggcctcctgttgtcagcctgggctacatatctgggctcttccatccctgtgggcctggtgaggcctggccatgtgcctgtgtcatgccagttgctttcaagatgatgtttctagtaggaccacatgtgaacacagtgaccaccatggccaggaggaagctggctgcccatcaccagcttgcccagggacctcttgcaccctggcggggatcagcagatcctgctatgagagagcagaaggcagcatgctgacttccaggagtgtccacagcgtggctgggcagagcagagctacaaatgaacagatccagtgccgaggccatcctgactctctcaggggctgccaggccgtgggtgcagggtccagcaggcccacttgatcccagcatcccacgtgtgcctgctcggggtggccagctcactgcttcttcacctctagcccaaccagcaggtgccccaccatgagcccctccaggctcaccttgcccatccctgccatgtgacctgggactcttgagatgagatcacagctgcagagcacacagcacagggaggagctcatcagcatcttcccacctgtggtgccctggcccagcctccttccggttggggttggacccgccctggcagccaggttttgcgtcacctgccccacccgccctgtaacctacttgcccaactgctatcccggtggccgtgaggccagttgacagaatggagaggggtaagcattttccgcctggagaggatgggcgtgtggccatctgactgcttctgcaagcctggtggttgtgtgcaggctgccctggtggtcttagccccttggggcaggcggggtcctgtgcaggatgcagagactgggcgtggcttcctgcagatgttcagatgcttctgggctgtggcctctgagacccagggcaaggctgctgactggaccccagaccctcctgcctgcctcttcctccagctgctctttgtggtctggttctggccgcctgggcctcagggccaaccctgcatggctttgaccactctggccttcttggactgccaaggacatgctgagagttggttgggcttggcccaagtgctgagcccagggcaggggtggggacaggcagggcggagcctcacctggaaagccaggcacgattctccctgggacaccaaccctcctgtagagttggccaattcgggcaaccttgagggcgagctctgtgtggcacaagagatgccctgaggagcccagcctcacctggtgtgatgggacctgtggaagttgtgggaagtggtcctggccacccgtgtgcccacatgccctgcgcccagatcaagatatggtgaccaaaaggacaaggactatatccatggctccctcccagagcctggcaagtcagcaggcatgagagggtgttggaatgctgtggtgggcctgtgtggggaccttgtaggacctagggaacctgcagggcttggcttagggagcacacaggggcccaggcaaaggcaaggtcacaggtcgggggaggtgaagctggcagggggagggggagacctgctggctagagctgggttgggggccggtgggcagtgggcctggctcgagcagggggcgagggattggagagaaaggcagttcctgatggtcccctccccaggggctggctttcctctggtccttccctcccaatgaccgcgtcttcgtcgaggccacagcccttggctctgcgcccacacctccagtgccaggctgtccggagatctgtttatggccttcccttggaccatggagccctccctgccactggtgcctggagggctggtctgctgcccctgcaccctggccagctaggatggtggggtcctgcagctgaactgggggtgcctttctgcctgtctgtcctacgtgtatcagtggccagaactgccctcat

SEQ ID NO: 1135 - DNA, 2267 bp, Homo Sapiens
tcaagggcccccatctgcctccccagtcccagcctctctcctgaagaaagaggcaagatgtcagtggaaaataacttttattgagaccccaccaactgcaaaatctgttcctggcattaagctccttcttcctttgcaattcggtctttcttcagtggtccctgtggggagagaggcagtggtcagaggtagaagatgacaggtgacagcagatgcccactctagaggagaccaagactctgggccagtctccacagccacaagagaggcctaaggcatcaagaccacccctaccccggctggagccaaaggcaggcggctgcccaagccaccacacccagcgaggggggcaggcagaggtgctcaccatgaatgctttcttctcctccatggtctggaagcggccatggccaaacttggaggtggtgtcaatgaacttaaggtcaatcttctccagagcccgccgcttcgtctgcaccagcaaggactatgggccaagaggggaagggatttaggattacgaggagccaggctttcctcagcactgttcacagcgcccctgcatctgggaagccacacgatcaattcagcctcccccaccatccggcagatgaggacacactcaaagcagcaaacagcccagcaaggccagactgggaatttcctcatctcaggacttcaaagccagtgtgaaaggactgccaacaccctctccttcctttcctctcccaccacagggccaccagcgtctgtggccttggatcctccctctacaagagcccccccatgacaagtcaggacctgcctcaccttgcggagggtgagcacccgcttcttggttcccaccacacagcctttcagcatgacaaagtcattggtcacttcaccatagtggacaaagccaccctggaaaacgagcatcggatcagcacaggcccaggaggggattgtcgtgcagatgacccctccaggttcaggccctccctgaccacagggctgttctcagaaggaaggcaacaaggaacggttccgcagtctgtctcgggcgctgtgcccagcgcacattccaggcctcatcactgaacagctgagcctgagaccccacttctcaccagccaaccccgacgagtggactcagatgacaacatgccacttacaagggacacagctaggtgttgtgttggcttcagttaacgatcctgctagcagcccctaggaagcagcctatccccaaaagcacgaggcctgggatggcctcacagagcagaacacccattacttaccagagggttgatgctcttgtcagataggtcatagtcagtggaggcattgttcttgatcagcttgccgtccttgataaggtagccctggccaatcttataaatctgaatgaacaagaagggtgtaaggctggggcattagggacaaataacccagacatgccagtgtgctgacctgcaaagcacgctagaaggcagctgaggcctcagtcccagtcacagcgtatcccaaggtcagagcaaaaagctggctggccctccaggttcctttctgtaaggcggctgggctaaaactaaagatcctgctgtacaacacaggcctgtcacccccctggtggtggcatcagggaccaataagactagtatccccagccacaccagtcagccccaccacagccactctacaggatggcaccttacaaatcatcaagatgggccagaactgaccatgagaagcaagccactgatgtccacgtgatgcataagctacagtcagtgaagcagcactgacaggcacagaaaccccactccccatcacgggggcctcttcccacccccagggagccactctcagaacctcaccttcttgttgatctcagtgcggtgatggtagcctttctgcccagcgcgtgccacagagaaggctacacgagcaggatgccatgccccaatacaggccaccttgcgcaggcctcggtgggtcttgcggggcagcttcttggtgtgccaacgactggtgacccctggaatggatacacattacttcacctcagcgcccagcacctcccactgaccccttcctgctactcagcaattaccaaccatggctgggtcatctgagggagtgataagattatttcatgtgcattacccacaggtctcccctgtcaagctggataggctctgggggtgtcaccctgaactcaattctgaatgggtgctttttaaggcatccattagtttaagctcccccattcacagggactg

SEQ ID NO: 1136 - DNA, 2426 bp, Homo Sapiens
gccctggccaatcttataaatctgaatgaacaagaagggtgtaaggctggggcattagggacaaataacccagacatgccagtgtgctgacctgcaaagcacgctagaaggcagctgaggcctcagtcccagtcacagcgtatcccaaggtcagagcaaaaagctggctggccctccaggttcctttctgtaaggcggctgggctaaaactaaagatcctgctgtacaacacaggcctgtcacccccctggtggtggcatcagggaccaataagactagtatccccagccacaccagtcagccccaccacagccactctacaggatggcaccttacaaatcatcaagatgggccagaactgaccatgagaagcaagccactgatgtccacgtgatgcataagctacagtcagtgaagcagcactgacaggcacagaaaccccactccccatcacgggggcctcttcccacccccagggagccactctcagaacctcaccttcttgttgatctcagtgcggtgatggtagcctttctgcccagcgcgtgccacagagaaggctacacgagcaggatgccatgccccaatacaggccaccttgcgcaggcctcggtgggtcttgcggggcagcttcttggtgtgccaacgactggtgacccctggaatggatacacattacttcacctcagcgcccagcacctcccactgaccccttcctgctactcagcaattaccaaccatggctgggtcatctgagggagtgataagattatttcatgtgcattacccacaggtctcccctgtcaagctggataggctctgggggtgtcaccctgaactcaattctgaatgggtgctttttaaggcatccattagtttaagctcccccattcacagggactgactaacataattccaagctcccctttgcagttatcagtaggctacaaagagcaaagggtccaggaacgtgttaagaagttgtcccctggccctccgctatcccagccacttctgaccacaaggctgttctcagaaggaaggcagtagagaatggttctacactgtccgattcgggcgctgtacccagcgctcactctgagcctcatcaacgaacagctgggcctgaaaccacttctcccccaggtttgcacagcaactcaagccaccgcaaagctcacctttgtagcctttgcccttggtcaccccgatgacgtcgatcatctcatcctgcccaaacacttggttcacaggtacctgctgctcaagcctctcgcgggcccagtccagcttctcggccacagtgcctccgttcacctggatctccatcaggtgggccttcttctggcgcagaggaagcaggcgcatctaggagaaggtagacacagctcagctccagctgccagcgctcctcccacagcagaggaactgcagctccatgcggcctgattgatgtcaagcacacggcaaaaagccagtaactctgaacaagtcactgaacctcaccaagaggaaggaactttcatttttgccaacagcaacaacttaactttggatactggtgcctgagttactgtcaggatgagcggacaagacccacaccacaggcaaacaaccagatcccagcccctaccagcccaatgttcctgtggctgtcctttgggtcagttccttttggggtactgcagtggttttacctcagccacctacacttgccctagtgacaagcctgcttttgagagagcacaagctctaagtaagaaaatgcatcaccgggagcggtggctcacacctgtaatcccagcactttgggaggccgaggcaggtggatcacctgaggtcaggagttcaaaaccagcctgaccaacatggagaaaccccgtctctactaaaaatacaaaattagtagggcgtggtggcgcatgcctgtaatcccagctactcaggaggctgaggcaggagaatagcttgaacctagaaagtggaggttgcagtgagctgagatagggctattgcactctagcctgggcaacaagaacgaaattctgtctctaaaaaaaaaaaaatgcatttaagcataaagctttcactcaaggacagcctggcaatgtcctgacaaaatttcaacggtggacatgcactctcatccgtggtggccctcaccacatggggttgcactcagcacttgagatcagccaggataaccagtaacaggacagcaagaggcacccactctaaccaagtcaataaaaagcctgctcagctcatcaactaggtttccaggagagcagccagtacctcacaaccgactttcaggcaggcatttcagtgttactggtgagtcaccagttgaattttaaaggggaatggttcccttgctaagggccagtaaggacacagtgccctctgctggcaagggagaagcc

SEQ ID NO: 1137 - DNA, 2306 bp, Homo Sapiens
cagtggctcatgcctgtaatcccagcactttgggaggctgaggcgggcggatcacgaggtcaggagatcaacaccatcctggctaacacggtgaaaccccctgtctactaaaaatacaaaaaatcagccgggcgtagtggcgggcgcctgtagtcccagctactcgggaggctgaggcaggagaatggcgtgaacccaggaggcggagcttgcagtgagccgagatcgcgccactgcactccagcctgggggacagagtgagactccatctcaaaaaaaaaaaaaaaaaaaaaaaaaaaagcttggcagggagcaggacatttggacctcactctgctgcccccttggctgtgtgacatccaggtcacgttgcctctctgggcctcggtctcctcacctgtttaagaggggttgacagtcgtatctgccccctcagcttttccccaggaaggtggtagccacaattagcatttgttgaggctgaccctgcaccaggcccaggataggcggggcttagggaggcccgtctctcgccacgttcccctgctaggggagccccgaggccctctcagtgtcatcctcatgctacactctgtcccagccctgtgcgtcccaagctagggcactgagtgtgccagcacccgcagggacaggcactggaccctgggtggacctgagggtctgtgactacccccccagctgctctcccctagaggccacttccctcaaggaaggaaagaaccttcccgccacctcctgcagtgcggtcagctcaggccagcctgcacagcagggccagaaccagggcccctggggagggatgcctgcctgcccagtgggaggagacggcacgcccgtgaagccgctactcagccagcctgggggccacgagtgctgcttctggtggcgctgtgcggggagggagggggccgagcagggtgggcactcgcatgcctgtgtcttgctggccttcgacagatgacagccctcctcctagggtctccagtgcagagttccttggggacattatggccactcctgtccagatgagagggagccggctgcctgtgacagcgtcgcaaaatgccgccagggctttccctccctcctcctttctctcttcctcgtccctctctggttggtggtttcctgcaggctcccgtccctgctggtgctggccacaatgtccccactcccagggtttcggcgtcccagccccctgcgcccaccgcgcctgcccgccagaatccctgtgcccttggtgcgtgtggcctgccgagcctcgagcccctgttctcctcagccctctttcctcccgcgtccccaggaggtgcctctggaagccacggagtcccatcggcaccaagaccgactgccctttggggtgaggtagtaggttgtatagtttggggctctgccctgctatgggataactatacaatctactgtctttcctgaagtggctgtaatatctgcggtggacagagcgtctggaaccctggctgggagcgggcagggccaggtttgggggcagccttggcagcagtcgggggcaggggccgcctacactgagaagtctgacaggcctaggtgccacttgctgtgtgaccttggacaggcccctgatctctctgggtctcagtttcctcctctgtaaaatggaggcaaatgaggatggaaggagatgcagtgtggagcatcgagggcagaggagagctgagccgaccccaccctctgccccagccgcactgagagaggcgatccacgcagctgtttgtctgacctctgtctcccaacactccccaacactccccccgccatcaggcccaggctcatgggtggccctgagccgtaccctccactgagcaccaggagaaggcaccgtggggccaggggtggccgagacgtttggaggtcacagggctgcgagtattggcgttgcccatcaccccaggttcccagcacgtgccccagcctggccagctcagtggcagggcctctgcctgtggaggaagggaggccaaggcacctttcctgagcaggaagtgagaggaacagctctgcatacactgggtcccacatggcacaatctgaaggcagacagtggctcctctgtacctggggaaactgaggcccagagagccagggacttcccaagaccagccagcagcagctgccccttcctggggtgccatctcccctgtccctcctgccctgcgcctgcccagccctcctgctctggtgactgaggaccgccaggcaggggctggtgctgggcggggggcggcgggccctcccgcagtgca

SEQ ID NO: 1138 - DNA, 2473 bp, Homo Sapiens
cagtttcgatgtctgagcaccctcaatgcctgaccggattcctcatcccctaccttcctctgggtgatgtcggtcaccctggcctgcctctagccagaatccagcctggtcagcttagacagagtgacccaccctcttagccatcttccatccaccaattccacctggagccttgcttctgaatccccacatttccttgtgtttgaaatggagcacaatctttctcccctgttgcaaaacctcattgcaggggcccctgtgagtagagactgctttaccgtctggaataagcctcagaagaattttattcttaacatgggaagtggaccagagggcagagcccccagggctcttctcctcagctggcagcccatagtcccactctcagctccagaggcacaggctccccactgccgggccaggaatgggaacagcaggggctccggagtgggcagggggccctcgggcaggaggtgcacagagggcatgggttggccaccccgggcctggcaatggccacctgctccctgcacatgatggcctcacagggcatcctcatgttcatcatgctataaacgatgccctaaggatctgaaccgggggtggaactgacatctctggacctccaagctcaggtgtatctcaaaactgtcgagacaggatggctgaggccctagaaccctaaggcgcaacactatctatccagcccaagctgtggccccaaactcctacttgaaaaccctggccctgttcatgtgggtcagaccatgttgggcaggaggacttggtttctgaggacccagctgtccagagtggcccagacccaaagccaaaaggatgcctctcccacctctcccttgggccctgcctcctccccaactctggagtgtgtggccagatgccagccagatgaggtcccgcatttctggacagtcctttgatccccttttccttccaccacgaggcggcctttgtcactgggtcccaggacaaagcctcggggcagcctggatggtgttctgaccccaatccccccagggggctcctagtcaagggtcttccctgcatggaacccccaaagccagtaagaaatagaagcttcctgaacattgctaacgtcctgaatatccagcatccacgaaacccaagcgaactagttaaaaataaaaacgtggtgatgatcatttgctgtgggtttaatccaatttgaggatttacttaaaataaaaccttggggaatgaaaacagaagtcagtagcacacctccagggctagtagggagcacatttgcccagcacctgagtccttgccaggtgccagaccctgttcctgacagctgtgctgggcgtgcgcacacaagccccgggcggaggccagggctgcacttagcgcatatgagatgctacgtgggactggaaatgcctcctgcgctcccttgagttacatgaaactactgagaagttcttgatctgggggccattagaggaacctggcccaccttgtctggaacacagagggaaggctggttacggggaaaatccagaggcggcaacttcgtgctctcaacagacagcatgagtcaccatgagaaggggaaaggggacttggcttccagacacacaccaaggacttcaatgtggacagtggcaaggtgctgtccctgaccctccacccgtcgcccactcaacctggcaccccagggctgtaccggccgagtcatcaccaaggcccacctctcgcctggtccaggactcccttggagatgagggcagacaagtggatggcaccctctgctccaaggctccggggcctcatgaagcagccgttcctattgaacagctccagcagctgcagtgttccttcctgtattcctcagaacctgttgtcctgaagctccgtctgtcaccactgtgtctattcccttcagtcagtcacacagaacaaatctattcccttgtcctcggaaaaggggtcaggtccttggatgtttgaaaatagctgccctgtcctctctgacccctcccccgccaccgccgcaacctaaggcgaggagctgccacttacaaggcacctactgtttgtcgagggttttatttaggtcaggacgcggttattcccatttagagatgaagaaactggggttcggcgaggttaactgcttgcccagggtcacacagggaacaggagacgctggatgtaaactcagccccgtctggttctgaaggctgccttctccccggccctgcagagcgccagcctctcttctataagctggatgcccccggcccaacaccccacagagaaaaggcctccaatgcctcccctgccatcagcgcttctctgcaaaagagcatcctgaatgcccacgccagccacagaggcgcccctcccaccctctggcaggtgggctcctctcaccttccttttctgtatcgattggtatgtattcaggtcaggtagcagaatgcctggc

SEQ ID NO: 1139 - DNA, 2498 bp, Homo Sapiens
taaaacgcaagggagggcatgggtattccccactctctacaaataggattttgctccctacaatccctttaccgccccacctttatttgattaaaccctaaatgaacacttgaggcagacaatcacaagagatttcttccgaaagcaaaatcgagatgaaacctccggtcaaatgggtttgctcaccatagcgtggatttggagagagacgcaagcaagaagaaaagttctggctgggtgcagcatctcacgcctgtaatcctagcactttgggaggctgaggagggaggatcgtttgagaccaggagttcaagagcagcctgggcaacacagcaagaccccatctctatgaaaacataaaacattagccaggtgtggtggcacacacctgtagtcctagataccctggaggctgaggtgggaggatcgcgtgagcccaggagttggaggctgcagtgagctatgatggtgcccctgcactccagcctaagtgacagagctagaccttgtttctaaaaaaaaaaaaaaagagagagagaaaaaaaaaataaaagtccagcccagcactgtggctcatgcctgtaatcccagcactttggaaggccaaggtgggcagatcacttgaggtcaggagttcaagaccagcctggccaacatggtgaaaccgtgtctctactaaaaatacacacacacacacacacaaaatattagctgggcgtggtggcgcatgcctgtaatgctagctaccagggaggctgaggcaagagaaccgcttgaacccagaaggcggaggatgcaatgagccgagatcacgccactgcactccagcctgggccacacaagtgagactgcatctccaaaaaaaaaaaagaaagaaagaaaagaaaaattctacagggtacatcatttttatcctgagtcagtgacccaggctgatgacaaagcagtgggaacagctaccagggattcctacccaccaggcacagcttttaagggctacacatggtttgtctggtaactgcccgtggagaacccgtcaccatatatatgcagagtagaaggtgtgattaatgcgctcttaaatattattagcattgttgccgtgattttgaggagtttcccaacactaacgagggactgatttttccagccctacacaaacagggaatctaagaagtgggtatatggggccagggtatttaaaactctaaggagttccagaaaatgcacaatttttgtctcagattcattttctcactggttggcgttgtaacacatctagccgttgagggaatttctgccagctgccgcggccactttctctttcctgaacggcacccaagaccaccctcctaaattccgcaggcaaatctctcactgcccactggagaatgagccatcccacagggggacgcccactcctctccacttcatgcaacgtgtcatccccctcccctcacaggttcccgatgcttcctgtgcaggaggagaagcatctgtatttatgccaaggcttagtgacgtctgcaatgtgccagacgctgggcggagtgcttttcattatctgtcttaatcctcgccacgaccccgtttaacccaaaagacagatgaggaaactgaggcccggggcagtaaggagatcagtccagtggaaggccacaggcctggcttcctgcactgtcctcctccccgaggtctgggacgtaaaatctgactccaatgcctagccatcaggtgactaatggaggaaatgtgagcatcctcgtgtagcccaccacagtcaggtgggccctgatgtctgtaacaagcctcactcgggtaggacagtggctgaagcccagaccacagcggcccaggcaaatgcaacctacgaaagcagaagctggctaagaccagtgttctcaaggataagggaggaagaaatgaggtgggcggggctgggacaaggaattcccatacaggggcatcccttccttccctacccacccctgcagagatgggggtgaagatccctgaccccgaaccagccccatctgggtccatcccggtccctctgcaggaaatcctcatcacccctcctacacctcaggggccaaaggcagcagggtgccagggtgaccatgatgaatgctgtctctggatggggtcctcaccccctaggcctgggaccaggataggatgcactcctgcaacaaagcacctgtgctccctggcactcagcaggtaccagctataccggcaggcgcttcctcctcactggggtcctaggagatgccagaattgagccactggatagaatagctgactgaggatcagtgaggcagcacggccttgccccaatcacatcccggcccccaggctaggggttcgaaccactgtcccgtcacctgtggggaacaaatgggaagacctaaacagccaacggcatgacctggtgacggccatgaggaggcaagacacagagttggtttttatctccagcatctgttggtaggaaa

SEQ ID NO: 1140 - DNA, 2460 bp, Homo Sapiens
acccttgaggcagcattcattggctttaccgacccctggtagcctagagtgagggtgaagagatgcctgggctcacgtcccaaccccaccaatcatacagcatccctgggcaagttattcatccacaagccccagtttcttactgtaaaatgtgatcataacagaacctgcctcaaggagtgagcctgatgactttttctctgtgtgaaatgctcagtgcctaatacagagcaagatgctcacaatgattgccgcctgctgtcccgcgcactgccttgacctgtgagtgctgctgattgtgggtgagcggctggtgaggttgggctctggatggttcctggatgctcccttcctccctcactctcaggcccgtggagttaccgcagcgcccccattatctgtggtttcactttccttagttgcagtttccagcagtcagccacagcctgaaaatattaaagagaaaatttcagaaataattcataatttgacattgcatgccattctgagcagggtgatgaaatcatgcagcgatgatcgtgactcattcctctgtccagcgtctccgcgctgcaggcgttcccgcccgtgagtcactttgtagccctcttggtgatcagagagaaaaagcctaatccacagagggttccgtactatccgcggtttcaggaatccacggggggtgtcggagggtaggggctactgtaatttcctgcctcccgtgaggtttgcatcaggcagtctcctgtcggtggcctggcccgggctcctgagactgctcctgaaagggaaagggactttgggctcctgggaactgcccaggaggcagggcagagggacccccagaagttgcagcaagtagctgcattatcagctacgaggttgagaaccaaggggaggaaggtgagctgccagctgcatggggctacatctgggtggggggacagagacagagcagcacagcccctgccagcaaggctgtcaacgaagatctaggcagagagcaatttggggtgagcccacaaggtggcggccagccactcacccctctacaccccgtggccatccccaggtgagctgagcgaagtccctggctccgtcacaccttttaaggcaaaggcagctcccgccaccacctccctgttcccacttgctcagaaattcccagcaggtattttttctttttttcaggaggaatggaatgggacttcttgttctgtcaccgcaggattccggcgaggcctgtctaggggttctggtgagagaaaagcgtgacaggaagcgcatgccagcaggcacttggagatgtacccttggtgacatgcacaggcacggcagccgccccacccaccacaggcctccgctcgggacagcggggcacacgcacaatacagacgaggcccagagatgcagagacccccaacaaaccttctccatgctagggagacaggagatccagctgggaatgagcccatatcatgaagcccctccctcaggagctcataccggagcccaggagccttgtcccaccccagggccttcgcactcaccattccctggcgggagtgagtgttccagcacagggctccacaggcaggacccttgatacctttcaaatctcagagaggcctccccgaccccacccacatgactccatcccagtgacctgttttatttcctcacagccgtcttcacttctaaactgccttttttcttgacaggatcttgctctgtcacccagcctggagtgcagtggtgcaatcatgcatggctcactgcagccttgacctcccaggctcaagcggatcctcccacctcagcctcccaagtagctgggactataggcacgcgccaccatacccagctaacttttaaatcttttgtagagacaggtctcactaggttgtctcaaactcctgggctcaagccatcctcccgtatcagtctcccaaagtgctgagattacagacgtgagccaccacacacggcaggcaaggaagggctgaggggctgtcaacagcaaaggctcagcccccagtcaagccaggctgcccgtgagaaaggctttctgtgcacttgggcacatgtggataggtacgggtgtgatgccagcctccacttgcagcctgcaggtgtgtctgtggtactgggtgcctatgtgtgtgtcctgagcctgggggaagacagacagactacccctaggggcctttgttctttgcgtcctgtcatcctggccatacccagaactcggtacagagccctggacaagcagccaggctcggccaggacatctcagaccagcaaaccctttcctttctgggctggtaggcagcggggctccaggcccagcctaagggatggggaagggaggggacaggctgggacccctgcccagtcagcatccccaccaggacgagatctaaccatggagactgacaagaggcagcacccaggagacca

SEQ ID NO: 1141 - DNA, 2300 bp, Homo Sapiens
cccttgccatggggtcatggttggcagaggcagctcctctgaatccagggtctgtcaggctgatggaggaagtcactgcaggacaagggggtgatgcactaccatggggcagggccacatgactccaaagctgcatccagctctaccccagtggcccacaggtgggctgcagcaggacaatgtttaaccctgccaggccagggagggcaaaaccccatgcaggccaggccaggccaggaaggagaacagagccacatccaccaagggcaggaggacccaggggagcccacaaaggccagatgggtgcaggaggcacagccagtcatgttttgcagggtgagcagagcatggacaggtcagagggctatgaggccaggccctggaggccagcagaaggcatgctggggcttcttgcttcccatatgcatgcttgagtcacagtttccagagctacagcttcaaatagacggctctgttttcagtggtggtgatttgagtgtcaggatgccgctttgcccacctgtctgcactccaggctgcaagagtgcaggcaccgctgtgacacaggctcccgaggtcaccaggcaagcaccagggcccaggctgggcactaggtcagaggacaagactgggcttctggcctggcaacacctttccccactgcctcctctgcagttgatctttcagacccaaatatgaggctcttctctaggtttggcctcctctcatcaacttcagctggtcagggtcctgactttgtaaccgtctgtggttcttcagcctcccgctctgtcttgtcccccatctctgagagctgcaggcctctggtctaggaacaaacccacgatgcagctcctgcctcacttgctggtccatcagcaccacactgccagcaccacactgtcccatgctgggccctctgaccttctttatagccttcctgttctataaagattacaggatgggcacccaccatctcctaagcttcacctcctactagggtggagcccatgtgcagtgaaggctcagcctgcgtcagggacgctgggatggagtgaggcggcaagctcaggtgcttcccacgctctgaagcttcctgtctgagcccggaagtgaggtatgtggttggtgcctcctgcaggctttcctgactcctgccagacagggcccagccaagaaacaagaccaggaaaccaggcgtctacacagagattttgttattatttgaggcccatcatctcctcggtgcccactaaatattagtcagtgtggttcccatggtttgtctcaaggaatagaggaaaccaggaagcctgagcctgaaatgcctgcaaagcaaggggagtcctgggcacaagcaggggcctgagctgagggaagggcccacactcgggagatgtttgtctgtcctgatgaggctgccgcagtggcggaatcctgataagagtgtactgtgaggcaccgtgcccacctccagctgccttgtgagataagtacctgagtttccatgacctctaagtcaggaacaggaggctcaaagaggtgtccagggtccccaaggtccactgagaggcatcagcagggaagcagtttagacaccatggaaggggctcctagtgcattgggacagcttgactcaccccaggactcacgggggccacagtcaggagtgtttcatggcgttggacaagaagagtggctgccttggccttggagagagggggtccacgtggtctatcggcccctcccactgctgccagctgagctctccctacacacaggtgccctgcagaggaccagtctggtttagatctgaggcttcagatgaccagtacacgtgaactgtttccgcatcagtgaggtggccctcctgctcctcctcttacctaaattccactgcctgcccaggaggtgatgggctaagctgggtattaaaaccatctcaactgtcatccccaagtgacccatcagggctcagagaggcagacccaggcctagcacccactctgtgcttgtcccctcacccttgaacccccaggtccataccctgctggtggccagatcacgcccttcccaaccccggaggaagccccctaccccaaaaggaccctgccatccctgcctggctctattcctgcagccccaggactcccacctcaagctccatcacctggcatgagagctgatgtggactcagggcgcgctcagcaagtgtttgctcagtaaattaataatacgtgctaatggtcatatctgttatttaactgatgcaaaatttggggtcagaagcatagccccca

SEQ ID NO: 1142 - DNA, 2300 bp, Homo Sapiens
ggtgtaaggctggggcattagggacaaataacccagacatgccagtgtgctgacctgcaaagcacgctagaaggcagctgaggcctcagtcccagtcacagcgtatcccaaggtcagagcaaaaagctggctggccctccaggttcctttctgtaaggcggctgggctaaaactaaagatcctgctgtacaacacaggcctgtcacccccctggtggtggcatcagggaccaataagactagtatccccagccacaccagtcagccccaccacagccactctacaggatggcaccttacaaatcatcaagatgggccagaactgaccatgagaagcaagccactgatgtccacgtgatgcataagctacagtcagtgaagcagcactgacaggcacagaaaccccactccccatcacgggggcctcttcccacccccagggagccactctcagaacctcaccttcttgttgatctcagtgcggtgatggtagcctttctgcccagcgcgtgccacagagaaggctacacgagcaggatgccatgccccaatacaggccaccttgcgcaggcctcggtgggtcttgcggggcagcttcttggtgtgccaacgactggtgacccctggaatggatacacattacttcacctcagcgcccagcacctcccactgaccccttcctgctactcagcaattaccaaccatggctgggtcatctgagggagtgataagattatttcatgtgcattacccacaggtctcccctgtcaagctggataggctctgggggtgtcaccctgaactcaattctgaatgggtgctttttaaggcatccattagtttaagctcccccattcacagggactgactaacataattccaagctcccctttgcagttatcagtaggctacaaagagcaaagggtccaggaacgtgttaagaagttgtcccctggccctccgctatcccagccacttctgaccacaaggctgttctcagaaggaaggcagtagagaatggttctacactgtccgattcgggcgctgtacccagcgctcactctgagcctcatcaacgaacagctgggcctgaaaccacttctcccccaggtttgcacagcaactcaagccaccgcaaagctcacctttgtagcctttgcccttggtcaccccgatgacgtcgatcatctcatcctgcccaaacacttggttcacaggtacctgctgctcaagcctctcgcgggcccagtccagcttctcggccacagtgcctccgttcacctggatctccatcaggtgggccttcttctggcgcagaggaagcaggcgcatctaggagaaggtagacacagctcagctccagctgccagcgctcctcccacagcagaggaactgcagctccatgcggcctgattgatgtcaagcacacggcaaaaagccagtaactctgaacaagtcactgaacctcaccaagaggaaggaactttcatttttgccaacagcaacaacttaactttggatactggtgcctgagttactgtcaggatgagcggacaagacccacaccacaggcaaacaaccagatcccagcccctaccagcccaatgttcctgtggctgtcctttgggtcagttccttttggggtactgcagtggttttacctcagccacctacacttgccctagtgacaagcctgcttttgagagagcacaagctctaagtaagaaaatgcatcaccgggagcggtggctcacacctgtaatcccagcactttgggaggccgaggcaggtggatcacctgaggtcaggagttcaaaaccagcctgaccaacatggagaaaccccgtctctactaaaaatacaaaattagtagggcgtggtggcgcatgcctgtaatcccagctactcaggaggctgaggcaggagaatagcttgaacctagaaagtggaggttgcagtgagctgagatagggctattgcactctagcctgggcaacaagaacgaaattctgtctctaaaaaaaaaaaaatgcatttaagcataaagctttcactcaaggacagcctggcaatgtcctgacaaaatttcaacggtggacatgcactctcatccgtggtggccctcaccacatggggttgcactcagcacttgagatcagccaggataaccagtaacaggacagcaagaggcacccactctaaccaagtcaataaaaagcctgctcagctcatcaactaggtttccaggagagcagccagtacctcacaaccgactttcaggcaggcatttcagtgttactg

SEQ ID NO: 1143 - DNA, 2487 bp, Homo Sapiens
ataaaaataaaaataaatagaagatattgacaatagctgaccctattttttaccccaaaagtggtgattttatataatttaatctaatattaaggtattcttgtcatactgtaccagctcctaaacattatacttttcattttacttctatttctaagctatcattattacaacaaccaagagaaggtaaatacaggtcagagatttgactcctgttttttgtatgtatttatttttgtagattcacaaataacttatattttgcagttttaaggtttctaattatattagaccctgttttttattttatttagagtcattgtccttgctgcctgtccttcacatgtgacaagtcaattcttcatgccatttccttcacaatcttcatgcaaactcatcatctccatttccatctattcttcagagatgtatgattgcagaaaactccccttttttgaaatattgctcaatagagattaaatctaacacccagttttacctgtctatccttgaattacaggttactgagaagtcagaacagatagccatagaagtaccccactaaatccattcttctatctccttcaatatttgacaaatatttactaagcatctatcttgagcaagcattggagtaagtcctcccataaatatgaagttgtgtaaataaggatgcatgcattcatgtaaatacaagtttaatgctggatatatattgttttaagtgcctgatatgtattagtctatttattcctatctaaggggataagtgccattgttgtttccatcttaaagatgaggaaactgaggccagagagattatacgaactcctaaaaccctaactcttaaccacagcattcagaatctatctggttgtagtggaggacccaatgtcaaaaaagcaagtgcttttcccagaccatgaacacaatgtgtgacaaattagcagttcttccccttgccctaagatagtaaatatccacccaggccaacttgtgtctgtcagagaacaaagagtgggcttgtcacactgttttctcccaagagggtccatctgcctccgctcctttggtacacgctaggggacacacactgtccagcatattcttgcagagtcatatcttaccccacatcttatcacaaccctgctgaatgtcaggcactatcaagaaaatgttcactcatcttcttcccgttatgcccaatgtgtgaactgataacacatctaaattcaaagaaaatcaacagacatcacctcaatcaacctgaaaagtctggtgactcattcccacccttctcacggggctcctgctgggctgcctggttctccggaaccagcctccaggcctcctgcagccggggtgcagctcagtgttcgagccccctctctgctgcccatcagatgagtgttgactttctttggcacaggcatttgagttgcatttgaattgcagaacatgctgcccccattctgtgctgactgtgaccccacttcatgtgccccagaggcaggctaaacaagcttgccttggaaaaaataacagggaagaagatgctgactctccaacccccagagtaagttccgtcactctggaggtaaagtcataatatctaaatatggctcgattcatgtcaggtcttataaatacacacacacacgtggatgctgaaaccgtgcatgccctgacagccaaaaaaaaagtcaaaacgacttactgtctcattagcaggacaagacctgataggccagctcaccagaataaagaatacaaaaaatgggtatttaacttctctacacagacacacacacacacacacacacacacacacacacacacacacacacaatctgatgtaacgacctcaagagagctggttgccctggcaatgaagaatcgtttgtatattcaaggattttcttgtttaaatttaagctagccacttgaacttctcgagctttcttgagcttagcttcaggcctccatccccagacagaggtctgacatctatgtcagcctctagcaaggcaggaagcttagaagtcggaccaaaacctcacaagccagccagcctggatttgaatttcagctctatggtttctcagctgtgtgacctgggttagctgcttaaccaccttgaacctctatttcctcacctgtacaatgggaataataaaattaaaacaaacttgcatgggttcattatgaaaattagattgattgatgacataatacatagcaagcatttagagctgtgcctgattccgaatgtgagttatctgtaatagtgacttgaaatgggtttacactgcctggcaggaaaccattcaattcctttttgtttttgactttaatctttgaagcgctttcatctcatttcttcttattttgtgtttgtggagaaggaggatgtttagccatccttggagtacaatcttttattaaaaaccattattaagtctcttcaagtttctcttttgtagtaaa

SEQ ID NO: 1144 - DNA, 2435 bp, Homo Sapiens
catgtaaaaacatgatgataaaacagcaaagcactgttgtgtgcttgagttgctggacagggatgactcagctaagaagacagcgagagaacctcttagaaatatgcttttattatctgcacacagagatatgactgcctccctctaaagcattactatttgggagagggagtcttggggggtgatgggaggtcctgagtcatagcttccacataccatatgggcaggaaggcgtaaggtgcatcttggtgtacagacacggtgactgggccgccaggctcccaagagaagagatgaacgagcctggggggcagatggaggcatcagttgagggccagaggctggatcctgggatccagaggggagggacagagctgaatgcctcacctggggtcatcctggacaaccgtgctctgggcaaagctaaggaaggcggcacagaagttcatgcacacagagggattccagccgtcacggtcattctggagcaggcagaggaggaggcagaagatgggcagtgggggtggtgggaggagagaaggcaggctgttgccctggatgctagacctgtggtcttggtgtttggggatacgggtgggagctgcaacatcgttcccttaccctgacatattcaaacatcttcatggtaggaaaggtcttgagggaagagacaaaaccgtctgggttacggaagccagcaacaacattcgggacccctgggaggaatgactgagcccaccatttcaggagcttgtgtctgacaggaaaagcaagggatcagtgggacccctcgtgcaccctccattctgccttcaccctcctccccaagtccctttcccagccttcaagcctaagctctcgccctgcccaccccgatcctgaacctgtagaaactcctccattggccagggctgtgcatctccttggaggtcttgagctccacatagcaggttgggggctgtgtggatggggcttgggggtctgtgcagtctacctcccctgagaagagcagagggtggcttcccaggcggctgcgtagcacagagcagaaggccacgttggtgttaacctccccagaggggtctggggagcttccaggtttgtctgcacaaggagagaagcagcagcaggcgtggcgggctctcaacctctgggaaggggaagggggctatgaagcaggggcaactcacctgcacacatgtactgctcaaatttgtatcccatgtacataagctcccggaggagcggtggccgagcaagcctctgggcccgagcgttcggtgtctccacttcactcaggtatagtgttccctggaaccgggaggctgccagctgccagccctcctgccgctcatacggtgtcgtcagcagttttgtcaggtgcccccgccacgtcactatggcctctgccagccagcctggacccctgagaggcaggagttacaggctgaaggtctgacacaagcattagtgagatgctcccctcgaagaatagtcttgtttcttctaaggactgattctcaccccggctttggctctcctaattttagagggtaggtacgggtctccagatatactgcctaccacgctttgctcacccctccaaccggcctcggtgttccaggagccagcacagcaggtggtccagcctttcctggacctcctcgtcccggggctggtatcgatccgggtatccgtctctgaggtcaaagttggggcctggaccgttagtggggggtgggctatagtagcgcagggctcgggcatctccatggtactggcgttgagcatccagggagaagcagcccagttccgaagggcgccggtagaaaggaaagggcccagagtagagggcagggtctgtgggcagagaaggtgctggacgaggtagtttgttccgaggctcagctacctctgtcttctcagctcctctcttggtccccctgggatccatgaggtcctaagacaagcaggggtacagagtttccattctacagaggaggcctggagaaggatgactggtttaggactaagcgagccacctgatcgccaggctctggccttgaaacattcaggcccctcagacgccaccgcggccaagctctcatcctgcctctttccttgcccttcacccaccctccctccaggtcctccaaatgcagtgaggttaggaaggacgtctgcgctcagatcaagaatccagttacctcaaagctccccaacttccacctccgcagagctatgacgtcatggcaggcacgccagaggccgaaggatgcaaaagtggttttctgctttcgatgatgcaatcattcagcgacagtggcgggcaaacccctcccggggcgggggaggtgtgagcttcacgaaggaggttgacaccaacgtggccaccggcgcccctccacgccgccaacgagtccccgggcgtgcgt

SEQ ID NO: 1145 - DNA, 4136 bp, Homo Sapiens
ctccagagttctctccatggctcagcaaggcctgagggaagcccatccagacaccagcaggccatgactcttgggtccttccctgttaaagtgctggcccaaggcctggccccagctgaatgtggccacatgcagggctagaccctccccaagaccttgggaatccaggccgcctagatccccaggcagaaaagccagcgtcctgacatcttattcaaatctttcctgcggctgttctctcagcttctctctactatccccttagcttccatgcctgctgcccgcctcctctttctcgagtcctaacacatagtgggcacttgaagatcttcctcccaccctcccaccctcattaatctattttttacccgaatctgggatccctactcccgtccctttttacaacctaatctacctttttctgaaggaattattctggtcctgaccctcacccccatctctcaatagcctgccctcgccccctgtacgctagccggctctactctcccaccactgctcccctagatacccgaggcttcacccagttagcccgtgagctctaaggctgttctgatctcttcatctgtcccttcacctggcccctgtacccccttcccctttggaccccttgaaccctcccaggacccccgctcagccccttcccgcccccaaccgactcttcccgaacgtcccttaccaaccgcgagagccccctactgcgctttggccacaccccctacgcctcgctcccggccccgcctctgcccctgaccgcgcctgcgcaaggcgggcgccctaaagtcctatttcactctgttgggaggagggggaaaggtgtacgcaggcgcagtggcgtctaaatttgggcccactaaatgcgtcggagcatctccgcgcccaggcggctcctcctcactgcggcaacccgggaaaacttgtgaactaatcagaaaaagtggaaggcgggagatcttggggcgctgtccaatggcgcggaagagaacaaatgagctggccaatcgggaacggcacgggggcgggctcgctcggcgcgaagttcgggcccgggaattccgaaggaggggtaggcgctgcccgcgcgcagaggccgcgcccctcctggccccggcttcttggctgtcaaacagatgcagcaacgtcggctcctgccgaggagcccaaggggtcccgggatccgccgcacaggctggcactgcttgaagaggaggctactcggagactgcgccgcgcgggtagatccgaaacggggctggggcggagtgggaaaaggccgggtatgccttgcatgatcgcggggagctccttcctgtttttatcccacctagagaagccgggaagtaggggtttaggtccaatttgttggagtacttaaggactcgtttgcactttcttttgggggatgacagtggattcattgccctcggaggttcaaccagttatgagtgagggattggccagaagatcggggcgcaggcaagcaggagtgctctattaggataagcaagtttgacaggaagaagctgctcttctccgaattacacagaggtgatgtgttcgtattgcacgtagacgtgtgtataacaggacctccttccccgcgccccgccaccccgacacacacaggagctgcctaaagtatccttgccttgcagattggaggctccccaaatattttgtgatctgaggatccagctcaagtgaggtgccataggacgtgttcctgagtttgcattgcacggagaccttcctggaatttttcatttgcaagtcggcttaaccaattttgcattgagtcctaggctgcttgcactctgaatttgggctattcaggtagtgtgctcaaagttgaaaccgcatacagcacaactcaagtttgcatcagactgggaagcgaacttaagccagcggtgcgtggcccaggagtgggaaaggaaatggatgcctgaagtggaagaggtggtgcagagggggcaccgcccatgctgccctgcttccaactgctgcgcatagggggcggcaggggcggtgatctctacaccttccacccccccgccggggctggctgcacctatcgcttgggccacagggccgacctgtgtgatgtggccctgcggccccagcaggagcctggcctcatctctgggatccacgccgaactgcatgccgagccccggggtgatgactggagggtcagcctggaagaccacagcagccaaggtgagcattaagcagggcagctttgcccctgggtggttgaagcgccaggctggaatgagtaaggtctccacaagaccctgctgcctgcctcccatactcccatcagattggatggatagtcgtggtccagaccttcatcttcccaccagaagtgtgcacagtcagaagctctctgccagactgaccctttttggtcccgtttagctcatacaggacctgggatatcatcagaaagatatcacagtggggatgttctgaggccactagaggccaagtttagacttgattcagtttccagctttgctgaggcactctgttcctgggttagggcagttctatgttgaataatgtttttaataatctgggcatgtctttctccgtgacttgaggcagttagcctcagaaagcctagattcacatttgagttttgccactgcctcttggtaaagtcagctgtaggagtgttatggttattagactatagtagccaacattcatctagtgcttactgttatgagccaggccctattttaagtgtattgaatgtaggtggtactaatattatcctcatttacagtaaaggaaaatgaggcacaaagaggttaaggaacttgtccagggctgggcatggtggtttacacctataatccagcactttgggaggctaaggcagggtggatcacttgagctcaggagttcgagaccagcctgggcaacatggtgaaaacctgtctctaccaaaaaattaattaattttttaaaaaaagcctgggcgcggtggctcacgcctgtaatcccagcactttgggaggccgagatgggcagatcacgaggtcaggagttcgagaccatcctgaccaacatgttgaaaccccatctgtgctgaaaaaaaaatacaaaaattagccaggtgtggtggcgtgcacctgtaaccccagctactcaggaggctgaagcagcagaatcacttgaacccgggaggcggaggttgcagtgagctgagatcgcaccactgcactccagcttgggcgacagagcgagactccatctcaaacaaacaaacaaaccaaaagcttgcccagggtcacataactggtaagtggtagagctaggatctgaacgagctggagctgggggagagtgagcatgtttgaaaactggaccttagggcggggcacggtggctcacgcctgtaatcccagcactttgggaggctgaggcgggcagatcaggaggtcaggagtatgagaccagcctggccaacatggtaaaaccctgtctctgctaaaaataaaaaaattagccagacgtggtggcacatgcctgtaatcccagctactcaggaggctgaggcaggagaattgcttgaacctgggaggcggttcaagcttgggcaatagagcaaaactccatctcaaaaaaaaaaaaaagaaagaaaaaaaaagaagaaagaaagaaaattggaccttaggacagtgagggcagggatcctttgtaggaaagcacaagaaacacagacttgttcctagctgacaaggagtgtactgcctggtacctgtcacctgctgaggggcttaggatgtgagggagaatctgactacagtttcatattcttccccagaaatcatacagatttctccactcctgactctggtcatttctgtttttgtcctccatatttgcctggtgccccaccatcaacaggtactttggtcaataatgtccgactcccaagaggtcacaggctggaattgagtgatggagacctcctgacctttggccctgaagggcccccaggaaccagcccctcggagttctacttcatgttccaacaagtacgagtcaagcctcaggactttgctgccattaccatcccacggtctaggggagaagcccgg

SEQ ID NO: 1146 - DNA, 2460 bp, Homo Sapiens
cgcgggaacctccggacccacagcggggcgcggccggggcaggtggggggcccaggcgaggaagccccctctgcgccctgggctgggcgaagggccctgcgatgcgacgggggcagccccagcgcgcgcccagtcctcacgtcgccaccgagcggcgcccccgccccagcccggagccccgcagggccgcccccacccctgcccaccctcccgcgggccggggcagccccccgccagccaccccgcgttcccaggaagagggaccggtcattactcattcatgtcctttcatttcatttcaatattttctgcaaagtcatcgcccgcgccgcatctgcgtggcggggggcggggtggggcggagccacgccgcggagtcgccgcaggtaaacagccccctccccgcggcgggagcggggccgccggccccaggcagggacagcagccgccgcccgcgctccgggccgggatcccgccgccgcccccgccggaggcacgcgccagggcgggggccgggctgcggcggaggcgggcggctccggtgccccccgccgccgccccggcccggcccgcccgccccctgaccccgggggcggcggcggagcgccccccaaaccccgctgcgggctccgcgcccggccagccccgcacccgccgcgcgcctccggctactcccatcccccggagccccccgctcggtcccggcgtcccctgccaccctctcccgcggcccgcggccccgtccccgtcccgcgcccccacgctccccgatccccgcccccgcgccgcgcgtcccctcccgcccgcgcccccctcgccgggccccgccccgcgccccccgccccgcccgcgccccccgccgggccgcgccccccgccccccatgcaccacctcctggagcagtcggcggacatggcgaccgcgctgctggcgggagagaagctgcgggagctgatcctgccgggcgcgcaggacgacaaggcgggcgcgctggccgcgctgcttctgcagctgaagctggagctgccgttcgaccgggtggtcaccatcggcaccgtgctggtgcccatcctgctggtcaccctggtcttcaccaagaacttcgcaggtgaggccggcggccggggcgcggggcgcgggcagagggggcgtccgcaggtgtccgggagctggcgcttcccgcgtccccggcggctccgtccagccgcgcccaccgtggcctggctgcgtccgcggcgtcccaggcaccttccacagccgcccccatcctagcaggtgtcgctggtcgcacagacccctcgtctctattttattgttgttcttccttccattcgtccgcccatggccgcgggtgggactaggcctgtctggacccaggggtcccaaatgtcatgagacacggggtctggtttggagaatgtcacaagcagcgcctgaggggatgcagggtggccaggtggggaccaggaaaggccgggatgggtgttgacagcagagagctgattacaggggctggtggagctgccgggcagggttcccaggctggacttgggtggaaggagggcagagagagtctctgagaggcccaggccctccacccctcaggcagggcgaggcctctccgggtgcactgggggcctccgaaggtttgaagcaggggggctagcatggggcagggccacgtgtcagagcagggagcctggagctcctgcagggagatgggggctggaccagggcagggacccgcgctggttagatcaggacctgtgggggcacttgaagccacccaggcgaggcaggaagatggacagagcagccagcctgcctgtgagcctctgcggggtggggtcctggtgcctctgccctccccaaggagtggggcgagacaggtggagccgagaacttcctcccctggggtctgggccaaggcaagggggatcagggtctcctggcctgtgtggcccagaggtactagtctgcagcggggaggggtgttgggaccctggggccctctcttctgcagcctccaaacctcagcagaccctgcctcagcactggcgcttcccaaatctcccagatgccttgccttaaggagtccccgtggcctggagacaccaggcctgagggtggacattggccaggctgtctgatcccacccaggggtggaggaggcctctgctggtctcctcttcgacactggaggccagaccccggggattagaggacccctggggtgggcacacagcacactctgcagagcagggagcccaggcgtgcggtggggccttggggcaggcccagcatgtccagacaccacgtgtgttctctgtgtttgtagcaaccaagtaccgcaaactaggcagtttcaaacagcagacatttatctctcatggttccggaggccaaaagtccaaaatcgaggtgtcggcagggccctgctccctcccacagctctaggaa

SEQ ID NO: 1147 - DNA, 2474 bp, Homo Sapiens
catgggtcaggtgagcggggtctggccgagggcagccgggcagggggcagcagggtgcggcagcttgcccaccggaacctcccagggtgcacctcaggggggctgcctacctgaagggaagtgaggacgagggtgcccaaaggccgccccctccacccccacccccatccccatcccccgcctttcgggaccgtcacgccctggagtgagtgcagccggcttgttcctcaaagctccttgtctcggccgatcagctgggtgagccctggaactggaacctggactgcccagtgtgttgactttataactccgctggggtggactcccagcctggcacttagctgcctcttaattctgagcggcacccgtggatgcagccggctcctggctcagggatgtttacttacccttggtttgcctgaagaaagctgctgtttttaattttttttcctccaagcaagcccaaaacttccatgagcaaaagagtccaaagaggcaagaggacactggcgttttaattgctctctccctccctaacttccttcttccctctcctcctggctggccccatggattacctgggagataaactcacagtggcccagacccacatgacccagtggatgggcaccgtgaggaggtccttccaggaagccctcaatttggtgaccaccacggtgggccacgaacggacgagtgcagagtcggccagccggacccccttcaagcgtacttcctccttccgacacctggcttcccggagtcgggaatccttccgccgcttctctgctcgcagccaacagagattttcttcactgaggaaaaggcatacagattcggaaccgccagatattgtaagcttattatgttttaaaaaatattaaaacaacactgaaagctcctcccctccagtcctcccagggagggggtcccagacatcaaaccggggaagttacttcttccagaatagttgtcagtcaaagcccaggcacttcctgtcccctgtacctgggaaagaggcacgtagcaataattcctctctcctgaagtcagtcaggacatttttgctggagtcgacgtctgtgtggacagggccagcacgtgagttgggctgaatttgccagttgatttatgtttaagtgtgaacaccccaacccccgacacgaaagctcatccttctccctatttttagggtggattagtggcacctgcctcatctcctctcaccctcctaggaagcacaagtggcggtgtcatgtgcacgctgagttgtagcttttgtcgttccaccgagctttcattggattgccaaggaaagggtcttaggagaccgaggtgtggtgggcgagtttgcccgctggccgtgaaccttgggtttggtgtgagtgggccagggagggaggccttgatttcttactcaggcaggctcgggagggcttggattgggacagcagggtggaatgacagctaatgattaaaaccttggcctgtgtcctgctaggcgacagtgcagaaacaatcgtaaggtccttctgatgatttggagaggtgggactgggcccagaaagcgaaagtgcctactgtgggggaagcacagtgagtgagtggcagagccaggtcccgaaccccaggctctgacctccccattcacggctctttgcagtccagctcccagcagatgttctccccagaccctcccaattaattcagggctgcccaggtcactgaccagacctgagcctaaagagagggcctgccattttcacataggagacttctgccacctgactgtgttggcccagtttatgggagcacttgaggacaggcgaagggctaagccagcccctttttctgggttcctcctagccaggagtgctatagtcattaagggacccagcatttagggaggagccctgagctggccctccctacactcgaggtggcagggctcacagctgccctgccaggtgcaggggctcagtatcccctctgctgacccagaggtgtgactcaccccaggtcacgcagcagccagagcaggcagttgcaaatgcaaggcaggagccgagcacttgggcatgacacgtgtctcgttcacaggacgtctccttcacagtgggtctgtgcttctttgtggcccagaacaaattagtggggcttggatttatgagacagattccccaacctctggaaggtgtgacttgccacagggaaagaaggcccctcattcattctgtctccctctgtgtgtatctctgtctctgtgatgtgtctttctgccttgctctgtctctgtttgtttctctgtcactcctgttctctctcagggtatggggttggtgacaggcaggctctgttggcatccctctttccccaccctggggagtggtgtgaccatgggcattggcatgaatcccctaggcgtcttaccctgtgttacaggttggtgccactggcaggagtggcctctccag

SEQ ID NO: 1148 - DNA, 2827 bp, Homo Sapiens
tcggggtcccgccccgcccaggtccgcacgcggggtccccgggaaccgccgcctttcttcctcgctcccgcgctcgcgcttcccctcccggggccccggcccacccacccctggtgcggccccgccggactcaggagccccggccgcccgggctgcggggagggggcgccccgggccggccctagaagttactttgcaaagaggcagggggcgcggggccgcgcggggcgagctcgggatccgcggggaagaagccctccgggaccgcgcctcggccgcccgagccccccgcgcccgccgccccccacctcggtcgggggcttacctgggagcccgctgcccccggccagccgcccgcgtgtgcccagggccagcagcacgcacaagtgccagcgcacggccgccgcgcccatgctcaatgcgggccccgctgggcgtgcgggcgtgcggggcgcggggacccgaccgaccggccgctcccgcaggcgctgctcgctgctcgccgctccgccaccgctcgggctcccgagccgcccagccagcccggctgatgagctgacagcgcgcgctcattggcccgtggcgtcggaggggcggggcgtcgcccagggccggccaatgggcgccggcctccggccctccgaggaagaggggggctcgggcgtcgtcggggggacccttcccctggggcgggcggcaggtggggggtgtgggcctggccggccggctcgctaggcgcggggtctaggccaggctggggctgcttggaggctgcgccctcccctgcccgcggcgccccggcccccgccgtcgagagtggacgcccctctggggtaacccctcccggcccagaggcagcctcgggggcggggatcctgcgaaccggggatcccgtgaggtcgcccgccatccgtgggcagtgaaacgcgccagcgcgcagagcagactcgcctgcgctgccgtttgctggacgtttcttgagcacctactggggaccgagtgcgggcgaggcagcagcgaaggaaccgggaggggaaacctcgtgaagatcacttgaaaattgacgttcaaaacaaacgaactttttagcactcgtcaaaggacagtggcccgtcagtgtgcttgtcacggggcggccgcaggacctgcgtctggaaccgggcgggcgcccgggacggacaatgccgcttggcggtcggtcccgcgggaggcccccgcacggggctaacctcggccggcgaagttcgctgcccggaatgcgaggccgaggcctccccctgtgacagaccgggcggggccaggaggaggggcagggcgggcatcccggtccgaagacccaggaactgctctggcctggcctggggtctacacctgacgcctggcgagggttggcttcgggtctggtcccaccgggcctgggagggacgggcggctggaaataaatggcccctctcagttccaggcaggacgctttaagggacgaaagttcagcaaaccccaaggcccatctccttgacaaccaccaataagagctccttttttcttctcctgctctccaggcccaactcaaagacaactcttttctctttttgtccactctgcctgcaccagtttgagcccctccacaccagctccctttcctgcccccaacacacacacgcacacacacacacacacacacacacacacacacacacacagtcacacatgcagacacatgctctcacgtgcaatcactcagacacagcctcacaccctcacaccctccagcacacacacgctcacacatgcttcttcacgccctcatccaacctaccgtagacgagctcctcagccctggaaggttaaatctgtgtccagccagctctcacaccccatctgacttcacatcagcttgtggcacgggcctggtggctgaggcaaggggtcccctacatggggatcgggggtgtggggggtccagagatgcccaaagaagaaggaagcgctgcctgttgtctccactgagcccccaccccattgctccagacatttcggtctgcacggctgctcctggctgctggtttaatttgggagatgctgttgacaggctttattttgtccccgtcaattgtgtagctttgagtttctgcagggggtggggagttccctcagaaccacatattatcttgtgcattgggcaacagggcaagcagtgtgaggtggtgggggaggttcttccagggggctctgacctacttgaaacaatgccctctaatgtgcctggtcattaggcacccccccgcccagccctagccaggtgcccctcaagcttgatggcagcaagagaagcttcttccaggctccatccccacaaatcaaggcaggaatggaggcaggttactctgtgacccctcagcccagaggtagctgtcccttgtaccaagttgtagtccccagcctgcccccaagcgattgctcaggtcaagtttgctggtgaattatcaccctctaaggtgtgcaggcagagagaaagtggttccttctaggcagctgttgtctatgtggaggactcagcgagcagaggaggagggaaatggagagaagacacacctgtaagcccctcacaggtgaaggaaaggaggcggcctgtggagcagagaaagaggaggtcacttctgccccagggcgccgtcagggaggcctcttaggacaggtgacctgggctagacacagaacataaagaggatatttgcctaatggatgagaagaacaaatagagaatctgccaaggtccatgagtgaaggcgaggactgaataagtgagccagagaatgttctggaagca

SEQ ID NO: 1149 - DNA, 2265 bp, Homo Sapiens
gctagtgggccacccttgcccatcatgcagcatggcatccatctgctcagcaccctacacaacaccggaggtaggggagcccaccacagaacccctcaccaagaaggtcctcaccatggagaaactgaggcactggaggcggggcctctgcagtcacgctgggtcacgtgctccagtcagccaagctgcagcggccaccaagggtgcccagggtctggcctgttggtcacagtgttgacctcatggcctgaaatgggtcttccctgcccagacaggttccagcccaccatcatctatctgcctcagccctggtgggtagggagtggctgggagaccctgcccctcacaccctgggctttgcggtattcaacgagcccccaacacacattccagggcctctgctccagattaggccacagcctgtctaggcacacaaggggcacccacaccctggaggcaaagagacatgcctatgtgcccgcaggcacacatgatcacgcgcacagacacacgtgcagatgcataccaagttacacacacgcacacaagcccgaggcggggacccccaggacacggaggcaggcaggcagaggtggggcccaggatgtcttgcccctgtctgtgggcctggcctccccactcaacagacgagcatgtgggtgcgggagtggttattgcgaaaggggccccagcatgtgccacccgtggagaccacagcaggcatgccgcgtgcatgcatgtgtggccgtgggtgtgcaggcgggggcgaggacacagatatgcaccctcagagtccgtgtgtgcacccagtgtttgtgcatgtgcacactggggcggcgttggcttgcatgtgcaccagaggtgtgcaagtgtgcagtccgtgtagacaagtgcacgtgcaaggaaacgtgtgtgcagcctgcggcaccatggacatcagcagggcagcctgggtgggcacctggggagcaccctccaggcggggcatgcccaactcacatggagcccaccctcccttgcccgcaccgcgggacctcacagccggtggggcgggggagtcccacgagggctgctagggaggggttgctgattgccccaccgcccctgattcccccagccaagcctctcaatgtccctcgggctgcagatggtgggcgttgctgcctcctctcaccgcccgccctggaggcagcgctgggacaaccctgtcccccacgccctctactgccgccaacgcccccattcatcccactgtggactgacctcggagaaacgggaggttctgagcccagaccgtgaggctggggtggaggcggcccgacacccccacccaccctcggtacccacgtttctgcaaaaacccgctcgttaaccccttggtggccggggcgctccgaggccgggccccgcccttccagcccacggcccccgccctcgacttggcccagcatcggggaccctcggaccgccaccctcggccctgccgaagccgtcaactttcccgggaagcggcaacttttcctgccgcctccggctccgccctcccggggccggggcgccagcggccccagcctggcgcggcactgcggtggctttccctgccgcccggctacgcttccctcgcctcggcagcccgggacgggccctgcggctccggggagggggcgagccgcccccctccgcgccccgccgccggccgggctcgggtgcagcgcggacactcacctccagcggacgccctcttcatcgtaggggttgggcggggcgcgtcggggactgaaagtcgtttcggggcgggcgcccgtctccccgcggccgggtccgcatccaggcgccgccgctacggcccggccccggcccggccgcgggacgaggctcggcgcgctccgctccgcccggctctggctgggctcgggccgcgggtgcgcagggcgcgcagggcgcacagggcgagggcggcggcggcgcgggggttggggcgtgggcggcgcggcgggccggggcgcgcaggccgggccgcaggaggcgctcagcccgcccggtgcaccggcgccgcgcggtcccagacaaaggcggcgcattcctgaagaggcggcggcccctgcaggcggcggaggggatggcggcccgggccggagccggccggggacgcgggcccgagggtgtggcggcctaggctggcccggtccccaagcgggcaagggctttgtcccgaggcctaggaatggcctctgcctgacccactcccttcctggcctcacgaaa

SEQ ID NO: 1150 - DNA, 2459 bp, Homo Sapiens
ggcacctcccaggcctaccaagaccagctctctgtgcactgtgtctcctgactacaccttgggcccctgcaacgtggccagcatctcctggcaccccctcacccactatgttcttggcaagcagctgaactgcaaggcctccagggccctggcccgtgacagggccggagcacccagctgccctgctggcatacccattgtctgcagtgaagatgaccagcgtctcttcaagcagccccaggtcccctatggctgtcatcagggtccccacagctgcatccagctccatcagggagtccccaaatggcccgcggcctgaacgctctgcaaagctctgcccactgaactgagggtagtgggtgtgctgggggcaaagactggagttagcactgggtaggggtcacgggcagccagggggttgggccaagatcacttacgtgagaggcatagtacaggaagaaggggcgatcctggcgctgggcgtcggccatgaggtcatgggcgaaagccatgtagcgggcctctagtccgggcagccaggggggctgcgcctccacggacaggttggccaacagtgggatggggaccaggccctggtcacagccaccgtcgcaaggagtggccggcgggaagcaggtcaggttctggcaggggccctgaggcgggcagctgccgtgagggctgggctggcaggtggggctgcgggagcatcaagggctgggggactttgggaggtgggagggtggctgagggcccgggtggttcctacctggtcgtgggagtacgggatgcctagaaatcgatggaagccctgatgggggggcaggaaggccccctcaggccccaccccaaggtgccacttgccggccattcctgtgaggtagcctcgggcagccaggacttcggccacggtcacctcctccaggggcaggcccccccgggagctgggcaccaggacgccagggtacatgcccatccgaaccgggagccggccggtcaggagggcggccctgcgggacaagtcacagagtccctgagacagacagaaatgtggccttccctagagagagagacagacgtttttcccgcccccctgcaatccattgggaggaaagggatggagggtcggggcggggaagaggcgcggccccctctttacctagagggtgtgcacagagacacaggcacgtagaagtctgtgaaccgcagccctcccgccgccagctggtccaggttgggagtggtagagctggggtgcccatagcagcccaggtccccatagccgaggtcgtcggcaaagatcagcacgatgttgggcggacgggcaacggccaggccagcagccagggccaggaggagggaccgcggtgcccccatggacatgggaccgaggggtctgtcccaagagagggagggctacttggctccagcaggctctttccgataccgcagacccaggcgccgcccttccctgagaccccggacccaaatactccccgaccctgacggccgcctcctgaagctccagagggccggggcccgacagtaccgggagaccgcgggctgggacggaactcctccaggaccagggcaccttcagattctcgagcggagatctgatcctcctcgcctagcggtccgggctcagggtcgggggcgtaagtcacttggcgctgaccagcggagtcgggccggggggaaggcgctagagggagcccaggaggagccggtaccgggctgcgggcgcttccgcctcggccccgccccgtgacctgtgacccttgcggggcggggccgggggcggggccgggggcggggccgggggcgggccggggcgaggggcgttgctgcgcgtgctcgctccgaggccgccgtgtgcgcctgaggctgttggctgcggtcttgaaacgggctctgggagcttcctctgcgcggtcggccctggctgaggcgtcccgggctgcgcgcggggctcggcgctgcgcagtgtccggtgtcctctcggtccggagcttctccagaggaggagcggctcgtgcgcccccagacctccggtactgggagactcgggccctcctgtaagagacctgagcgcggagcgttatgggcacccggtgaatgagcaaatggcagggaaaaccgtgcagccccatggactgcgggctcttccttcacgactagcaaaagctttgacaccctttctcctgcgtacgcgtgtctgtgtgcgtgtaagctgtggctgggtgcggggggctgtgtacgtgtctgtgtgtggtgtgtgtggagtgtttgaggcaggtgtgtggtgtttcaggtgtgtgtgcatgtgtggtgtttgaggtgtgtgtgtgtgtttttgtagtgtttgagggatatgtgtgtgtggtgtttgaggtgggtgtgtggtgtttgaggggtgtgtgtgtgtggttgaggggtgtgtttggtgtttgaggggt

SEQ ID NO: 1151 - DNA, 2731 bp, Homo Sapiens; identical to SEQ ID NO: 860

SEQ ID NO: 1152 - DNA, 2499 bp, Homo Sapiens
ggggcccggggccagtggggagagccaaggtcacatgggctccggatgcggtgaggggtgagggaaggagggcacctttcagtcaagatgaaatcaccatccttgagcgtcggcagtttccccaggctgttgatctgcaagaactccttgctcttgtgctgccctgaagaggaagaagtcagaaaaggtcttcagaataaaaacgctgcacctctacaccctccctcctcctccccaagcggagccccacagccctgagaaacagcaaggtctgggactagaggcctggatcagcctcactccctggctgggcctccctgccctgccacattccggggcagctggggggttttggtgggtggggccaggtgcagcaggtggataaagagaagttttctagccggactctggtgggccaggggaggggaggcaaactggggtggctcatctcttcccatctcttaattctcacaacagtatgtccttcttcccgaggtcttctgggctttgtgaatttatatgcgtgcattccacgcaagaactctgtcaactccattcagtattttctttccatccctacagagcagaaggtaacgttatcctccttttcagaaggcaagctaaggttcagagaggctgtgatcccttcaaggccactcagtccacagcattctctggtggcagacgctgcaggaggaggtgagggggctgtgcgggcggcgagacgctcagggcagagcagggcgggggcctgggggtgcactgggtttgtggacacgcggggaaacgggctgggcccacctttgaccaaatccacggtgcgcagctctaaggggatgccattcttcttggcgaagatgtagacggcgcggctgggctgggacaccaggtcaagaaacagctctaggcccatggcgggggcggcaaggacagcggggatggcagtgaaggcgctgagcgcggtgtgggcagcagctgtggcaggatcccggcgcgccgggaaataggggatcaggccccaccccctggggacagcacccaattggagcgcaccacccccggacccgcctcgccccttcggttcctgtccagtcctgccggccaagactccaccaccagatccgtgcgtccctacagggagggcggtcgctatgaacgcacagctgggagggtggagttggagctggggaccctcgactggcagggaggacgcggatgcagggggccgactgcaaggggaaggggaaccggctggacagggagaagcaggtctgcttttcgggatcccggtgccagggaccctgcccagttccaggcgtcgccctgacccagaaacgactgggcgccgccgtcctggaaaggccccagcgcacggacatctgagggttcgttcagagctctgtttctcggcgctgcatggtggcggaagggagggagcgaatgggatcccctaaaagggatcttagagtttcacccagtgggatgtgacacttgcaggtgtcccaaactggtgggaaccttgactggaaggctggggttaaggatgaactttctgccgtccagactgtcccctgcagagcagctgctgccagacagcgggagctgccagacagcgggagctcccacttcgtgcacaggatgggggcagggagcccgcagccgcgggaggcaggaatgactgtccgggaacctcctttcttctccctgaatcccagccctggcatctcaccagggggcacagtgatggtccagggctgggcccgggactctagctgaatctttcagagtatcccatccctctggccagtggcccaagcgagtgaaccagaatgcttccttgggagttttgaaactggaactggagagaggagctccctatggggaggtaaacgggagctggggccacctgtagtgacatttcctgagttcgaggagtagacgagactgagagagaaaagctgactcagagaaagggagtgataacagggcatgctggcccacacctgcaatcccagttactctcacgggatctgtttctctgatgtctgggtatgaaaggactttctaagcctcagaacagtgggagaactcaacaaagaaaaaaccaatacatatacaaggttactttgtggaggaaaaaatggattaaccttaagcaaaaaactgggaaggatctcggtaaaagatacgtcagaaggaagtaatgtcctttaagatgttcttagaaacccatcagacaggtggggtgtggtggttcacgcctgtaatccctgtactttgggaggcagagatgggcggatcagttgaggtcaggagtttgagaccagcctgggcaacacggtgaagccccgtctctactaaaaatacaaaaattagctgggtgcggtggcacactcgggaggctgagacaggagaatcacttgaaccttggaggcagaggtttcagtgagctgagatcataccactgcactccagccgggccactgagcgagactgtct

SEQ ID NO: 1153 - DNA, 2299 bp, Homo Sapiens
ttttctccaaaaagtaccaaggtcattcatttaataaacaggaagaaatcccaaagtgaaaacacagaggggtcagggattccctcatcaagagttcaagactaggctgggctcagtggtgcatgcctgtaatcccagcactttgggaggccgaggcaggtggatcacaatggaaggggttcgagaccagcccctactaaaatacaaaaattaggtgtggtggtgcgcacctgtaatcccagctacttgggaggctgaggcaggagaattgcttgaaccctggaggtggaggttgcagtgagctgagattgcaccattgcactccagtctggatgacagagtgagattttgtctcaaaaaaaaaaaaaagagtttaacactaattttttgaaagttagaggaagcagaatgcaccgcaagtaataaggagaaacaagattgattccagcgccgcacaaagggaaaccaccaattctgaaagtaaatcatgtgaagggttttttgtgggttttttttatactttaagttctagggtacatgtgcacaatgtgcaggtttgatacataggtatacctgtgccatgttggtttgctgcacccatcaacacatcatttacattaggtatttctcctaatgctatccctcccccagccccgacccccccgacaggccctggtgtgtgatgttccccttgaagggtttttttaaagaccaggtcaaagctaaagatcaagcttttctttccaaacgctttagctaaaagtaggagctaattttcacatctccgaaggtggctccaggactccaagtcacaccttggcaagggtgtggcagctggcagaggactgcaggtccttgtcaggcagaacctgccgggttctggggagtggagactcagatcttgaggtggaagcagagacaagagctgggcacacttacctggatgtggggttgggagcggtgaatcagagcccagttagatcctggaggctggcagcaggctctgcagaggtgcaggggcacctcattcagaaggggccatttattggccctctgtggctaaaaccagctccaagcaggactttttatggctggagtcgcctccaaaggggcgtcggcctccactcaggtgtgactctgagcgttgcctagctgaaaaggcgtgatgatagggagcacacgtgaggccattcgggaagaatattttgccaagtgcagaggccgtaaaaacgtggaacatggctctgttttttatgctctattgaaaatgatcatcagaagcagaaactgggcttgtgttcagaacctgaaaatctgcagggcagaaaaacaggacaaaggcatcttttagtgactgcaaaactaaacctcaacagaaagatgcctgaagagacaggtggattatgacctcagaattggagacaggagaggttttcagaattaaagatcatctatggctacacaaacatttgagaggtattttcattaaaacatccctttcttcacaccaatatcatgaattatatgctatgcacaacctataacagagtatagcagagttaccagtggtttaaagtgctgcatatatgattgttatatgaggtaaataagattctctgacccagagttaagaaaatggaaataataattgctaaggcatattaagaattatatatgtatgtgtgtgtgtatatatatatatatatatatatatatatatatatatatatatatataacatttaatccctacagcaatacatacctataaatgagtatatacaaatatgtgtgtgtatgtgtgtgtgtgtatatatactcatttaatccttgcagcaatcttataaggtagggactattgcaatccccacttgagagaggcgtaccctgaagcacctggcagtaaggtaacttgcccaaggtcacacagctagtaacaagcatagcacggccttgcaggcccaggtgggttccaccacaccgctttccctggcagcaagaaaatggaaggtttttgaagtagtgggggagtcaccgggcacaaggaagcagatccctggaggaacacacaattagcaaaagtggagcccaggaatagacgttaccaggcataagtgatttttccagacactgggaacttgtgttttgaaacaccaaagtatttttaggaagcagaaaagttagctctttcattgaactgctatgtggttttgaagaaaatgtcctaatatccataaaactcaaagctttaatctgcaagaaggaaaaaatgtcatgtgcctcctactaagttttttttt

SEQ ID NO: 1154 - DNA, 2270 bp, Homo Sapiens
gctatactctatgttctctgagagtgctaccaacggaattgagaaaataaccatccagacgggctatttgggggctgatctttaccctggaatcttcctggaaggtgaacggcctatgtcatgcagttgttatgcaagaggtatcatgggacctttccttctgggcgctcatggagccgcggcagagccctgggtgacccagcagcagctgcctgctgtgtggctgccttcactgtcctcccccacaactgctgttgatttctctgcattgaccctgcagatgtttccctggcctcgtggtgttcctttggacttttaagggacctctgtgcatctattttagtcccctttctgctagcaatgctcactcccctagtttccttaagcagttttataaaaaaccttcagtgaaaaatactagccaagaaggcgaaggcatctggaaaatccccagatttggctattgtgtgctgcaatcccagcccccttctacagccatgacatgcatatcaatgcaggtgcccttgagactcctgcaggttcgagaaagcatgacatgctcccagaatcctggatttggacttcattctggacagcatatgacaaggacgaggacccctattctagccagttaaagctggacagaatttttaaaagcaatgaagccagttccttggatatatccacgggctttgctttgagaaggaactgagtaggcagtgagaagagtcgagtgaagcctggcccgtgagtgcctcaacaactgagatgaacgtcgactcgcttgcaggcaagttgtcagtaagtatttattaaatacccaccgtgagccttgtactttgcctagttactaagaaaccaaaagggggaaaaatagcctcatctgctcagagttcataataaacctgtattgtgaatacagaatacagaaaaactggactctagtgaggtgctagaaagagtgtactgcttagctgagatagcagatgaaggaaaaatatttttggttcctccctgccatgcaatcgtaccgggagggtggagtgttggtgttctcagcccatttaatttggatggagctgcgggctcatcagtttggggactggcttcatcgcttgttctgtccagcagtcgcgtcttctcggactccttgttccagcttgaattcctcttttgccctggctccactctaagacgaagactgtgtaattcagaaaatgcagcgcaagtaattatgtccagtgtgatgctaaacatttcccaaaggcagcgtagatctgcagaaactgcagcttgggagaagtgatggtgttcctctccccaccacctcagcctgccctgatcattctcactcacatgatctattgtgatgttctcacaatgtagcctggccatcatctgggaacttgctggaaatgcagattttggcatcccgcctaagaccttaaactgaagaaggtcctagctctctcttgtaactagcaacagatgcaacctgcatggttctgatgcaaactgacctggaagaatggccctggcatttacattttggtccttagatgcaggtaatctgagctgaacatcttcaaacctgaggcatagcatagaaaaaagaatacaaacagtttatataaagtaaaaaaattttttagaaaggacttaagttggctggggcgcggtggctcacacctgtaatcccagcactttgggaggccaaggcgggcggatcacgaggtcaagagatggagaccatcctggctaatgtgaaaccccatctatactaaaaatacaaaaaattagccaggcgtggtagcaggtgtggtagtcccagctactcgggaggctgaggcaggaaactcacttgaacctgggagatggacgttgtagtgagccaagattgagccagtgcactccagcctgggggacagagcaagactctgtctccaaaaaaaaaaaaaaaaaaaaaaatcaggcctaggcaacataatgaggccccacctctacaaaaaaataattgttttaattagccaggttgatggtgtgcacctgtgatcccagctactcaggagggtgaggtgggtggatcgcttgagcccaggagccctcccttgggatgctcttatttctgcctgcagcctcatttgtcactctgtgcagactcattctgtttttgttttgttttgttttgttttgtttttgagacagtcttgctctgtcacccaggctggagtacagtggcacaatctcggttcactgtaaactccgccccc

SEQ ID NO: 1155 - DNA, 2471 bp, Homo Sapiens
caggctgtgggggtggcctctgtgtggtgccaagaggaagccgggaagccaagctcccatgctccatgcatgttgtgtttcaggctctgatgctggtttacacacaggtggacatctctgagttatctaagataaagcccaaagaggaaatagcttcagtggctggggtaagatccagacggattccttccctgggtctcgtctcacctgccatatcacaaggccccaggcagacctgtggccaccctccctggcactcaggcacaacagctgcctggctgtgggacccccaggtttagcgagtcccctcctgtgtctgctggctcttctggccatgggcaggactcctgtggtgcagggagggatacgccagagccttcagcatctcaccctcaagagagggacagagaaccatccagaggggctggggacgccaaaggggcacatgaagatctcaacttccagtttttcagggctgcagtccagaggcagtctgtcccttctttaaaaccaaatctaaacttaactgcacttagaagcccctgcactgggaggcgtttgctcaggatgccccagcctggccctgctcccctagacagccagggattcaggccacaactggttaactcagcgggcgaattcgagcccgcagcagtgctggctgactgtcttcactcagcgctgtaatcggcacatctgcagacaggaaatcctcctcactgaagttcccagtctattatctgagacacctggtgtgggcgggtgattcagagacaaacaatgagcgggggccccctgcacagcaattaactgctttaactgctaatatgtttaatccaccacgtggagatcaaggctgcgtcgaggaaggggctctggtcctcctctgcttccagactgcagggcccacttcgcaatgccaatgtccatggtcctcgccagctgcggccaggcgccaggcacacgggcaacgggcagggccagcactcggccccacacgggagctctgtgcagcacctgggccccttctgtgtgtgtgtgcaccgggcacggaggcatccccccttcctgtcggagcccagcttgtgcggacgtagtgcacacccggtacaggaagcagagtcggagatgttggcattgccagctgtgccgcccctagggcgctttattttaacctcccagagtggatcatcctttattgcaagtagaaataaagcttggttaaaggcttatcgtacaaaccagcagaaaacgctcgcagttgctgacctgggaagtggctcctgaatgtttacaaaacctggctctgagcagcagcgaagtcagcacatgcccgagcggcccccagcaggcgcgcagaagccgcgccgccctcgggaagcagggtcagaggccaaggactgtgaaaagcttccacccccagcatcaatcatgccaggcagactgtctgggggatgctcattttgaaagtacaaaaaaataaaacagactcctagcaagggaggatgggcgtgcaggccacggcagctctgctgagtagggaggggcctcgcttgttgcctgccaggctgacgccccggctttccggggacacagcccccggcccattggtctgctacatccctatgggcttggtcgagggctgcccctcggttcaatggcaacagctcccttatgctgtgggtgaacggaggtgtcagcagacagaggaggagggctagggcgcggtgggagggagaaactcgccacctcccctttagagtggagtttatttgggaatgacagtaggaggataaattttgaaagaaaaataaagtggagtttaggatgagaaccatcagtacactccagagtccaaaatgttacctaatccttcgtagtgtttatcataataaacttacttaaaatctacttttacaacgtggctgagaacattgctcttgctgactgatcacctccgggccaagagccctgcgtgcgctcaggcatctcaggtcctccccggtcatcacctctgcgcttgtgtccactgcacaaaagtgaagcctcagccgctccaggctggtttcctttctgatttcccattccgagtgactgcttcagaagtgcatcaccctatgacacagcttgtgcctctgggagccctcccccaggagacactgacccctggccagccccacgcaagcccggttagctgatggaggtggaggcaggtgatctgagagggaccctggctctgatcttgggctctcgcaggggacaacggaccaggctcagcacagaaaggcctcggagaactaacaacactgactaggttgctcccgccttcaacatgcaagttgacagggtgattgggaaaactaggagcctaaactagacggccaggcaccgaggtgggtaggacatctgagcaggcatgctgtgtgtgccgccacccaccctgacgaggacccgcagccctccttgcggcg

SEQ ID NO: 1156 - DNA, 2343 bp, Homo Sapiens
ttgtccgtacaagttcatgaggtgtgggtgggctcctgggagcgtgtcctcagggtcaagggtgggttttccatggcactgaccacccacccctacccacggcttctcactgccctcagaataaagctctctcgccgcagcccacctggcactgcatccttgattcctgccgcctgcgcgggcctcctcctctgctgatttcactcgctcctctgtgccccaggcgtacccagcctcatgtattcattcacttattcctgcaggttggggtataggggctgaagactggacaggggagtttgagccccagctctacccctgccgtgcactgaacttaaacttcggttttctccttcagtagattgtacacacctgactgcctggcctgggggttcttgcgaaggttaaaggagtgaatgctcatcagtgtgccccctgccacacacctccccagcaccgagccttactgctccagcctggaacccgtccactgctctccatccacaggctcccgtctgagccaggccactgaaggggttcaggacacgccaccccagaatacaccactctggcatattgatttctctgcactaaaggcacttcagaaacagcaggtgcagaaagggggctctgacctccccttttcttcctgaaagcaggagctaaaacgccttgtgaaagacgccctccctatgccaggaggaggaaagacattaccagataaggagagtcgaggccaaaagaaatctgtatgaacagatcttttaatccttatcttcctagttacacaattgccattctatgttcaacctggtacaaaagcctttatgcctagtcacttctttgggtcttggtcatttgggcgggaggcgggggggctcccttgtacatgtaaatgaaatctgtatgtttttctcctgctgatctgccttatgtcagtttaattcttcagcccagccagagaccctaagacagtaaagaagggtttttcctcctccaccccaccatcaccttgtactcccctgcttccaccctcgccccctactcagcagagagagtgagtccattacaaacataagtcatcccagctgcctccttgagaacctcctatggccacctgttcttcgtcaaataaaatccacagtcccgaccgcggcctagggaccccatgtaacgagcctcagcctgcgcttccgccactcggccctcttctcgttctaaagcaccagggcctccatctgaaactcaccggtgccgcgagtccctagcaggccactccgggtccccctcttcaccttcagcctggttaggcatcccctgctctggcagccttctccagagccctccccttctccaacactccctccttcaggattccttatctgtaatgcaatgattttttaatttgcttttattttatcaaagtactgtttgcaagtaaatttagaaaccagtagaatagtccccgctttatgccccttatgcctcggtgcatacatcccaataccctgagtggatgcctgaatccgtggattatagtgaacctgtatatatatgctattattttttcctgtatgatgttttacatacccatggtaattttttttttaaaagaaacagggtctccctatgttggccaagctagcctcaaactccaggcctcaagcaatcctcccacctcagcttctcaaagtactgggattataggcatgagccacctcgcccagcctgataatttttttcttttttttgagacggagtctcgcgctgttgcccggactggaatgcagtggtgcgatcttggctcactgcaacctccacctcccaggttcaagcgattctcctgcctcagcctcccgagtagcagggattacaggctgataacttttttttaaataaaagatctcacctatgtattactgaacccagcctactagtgcagagcatatgaacaaagagaaaaagtaccttcccaatcaaacatgtccagctgtccagatagtggtgacattttcagcttgctatggtaatatgatcacaaccttgatacaacatgaatatgtgtagcatctcatgctcaattccttatagacccagcttggttctttccaatatctccttttggagctgtacctgatgttattaccagttttcatacagatccactggggaatgggacaattttgcttttgtttcttgtgcaggaatcacttgatcctgaaagtcttgtgagaagctgtggcgagaaacggagtcaaccacacaccacgatggtggagaaagataatgtttaacttataaattaggcacagttaagagacgaacagcaataattaataatac

SEQ ID NO: 1157 - DNA, 2399 bp, Homo Sapiens
ccgcaggacacacaggcggtcaggctgagctcccaggaggtgaaatggccctgcttacactggccatggcctccctccttcctgccttgccagcccctcgccggcctggggtccccacacatgtctgctggcacagccctgtcccctctgaactccctttttcttcctttctgttgactcagtgcccccttccgcctgggccgtgcaaggaccctgggctctgtcctctcacctcctcccggtctgtctctagctcccatggtgatgtctttgttgggtggaagccagccttctggggtgaacctaggtccttgctgccccagtgtctggttactctttgctggacacatccacctacattttcctgggacatccttccccccacttctggtccctgaagctggggaaacacctttcctggcaggtgaggcctgagtgatttagacccgagcagctctggacattacactcctccagccacacagagatggacgtgaggactgggtacacagaggggacacacggaaatgttggccagggccctggctttccctctgaacttgtcactgagaggacagaaagtctctggctcctgctaccatcttgtcagtagagggcacccagacaccctacactggaagctggaaagacagcgtgtgtgcctccatcaagccatacctgaagcctggtctgcacttggacttgtcacttctgtgggttgacaaaggcccttttgcctcagtgagttctcaattgcacctgtacgagtatcagttagtataggccacctaaaccacagacttgcaggctgggaaggaggcttacctcctccacctgccttccagaagtacctccccagctgaggcacagctccagggaagggccggtggggatagaccatgggtcaggactgccttgggtcaggacctgggatcttgctgcagctctgctgacctgtagagaaatgcctggcctgtgcaggctcccagcaaccatgctgcagaagtgggtctggcccatcttgaagactctcttctgctgtggcatttcctggtgctggaggaatgagtgtcagctggtgctctctgtctggtctgaaaggttgatatgaattgtgcacttgattttggcagttgactgtgctgattctccagccctaattataatgagcatgagcatgaatgtcttgaaatatagacgcatacgagctgccaaatacggtgagtcatcatattcccaactttcaggcaagcttaggtgccaggggaagcgacctatacatcaaagagatgaagtcctggtttctgcgggcgggggcggggagagggctggggagctgttggctctggggtgggagcgcatattcctgtctgtcagatcagaggatgcctgagaggtgacagagatggggctttttagtcctgtgaaattcgagataggcctgacaaatcatcttaataaaaagttctctgaagagaataattgggggaattgggtggagtcctggcagctcccacaggttggcaggtgccgagggacaggcgacactaccaccccacggggagtgcaggcacgtgtgcgtgagcgtgaacacgtgtgtaaatgtgtgtgtagttagtgtgtgcatgtgagtgtgcatgttgtgaggatgtgtgtgtgaagggtgtttgtatgtgaacgtgtgtgtgttagtgtgtgcatgtgagcttgtgtgttgggtgtgtgtggagggtatataagtgtgtgttagtgtaagcatgcatgttgtgggggtgtgtgtgtgggtggagggtgtacaagcctgcatgaatgtgtatgtgaacatgttagtgtgtgcatgtgtgtgtgttgtggcggtgtatgagtgtgtgtggagggtgtataagtgtgcatgagtgcatgtgtgtgttttgtggggtatatgtgtgtggagggtgtataaatgtgcatgagtgtgtatatgaacatgtgttaatgtgtgcatgtgagtgtgtgttggggtgtgtgagttgtgttgagggtttataagcgtgcatgagtgtgtgtatggacatgtgtgttagtgtgcatgtgagcgtgtgtgtggacggtgtgtaagtgtgcatgtgtgtgcaaacatgtgtgttagtgtgtgcatgtgtgcattgtgggagtgtgtgtggagggtgtgtgtgaacgtgtgtgtagtgtgtgcatgtaagcgtgcatgtttgtgagtgtgtgaagggtgtataagtgcatgagtgtgtgtatgcgaacatgtgtgtgttagtgtgtgcatgtgagcgtgtgtgttgtggggggtatgtgtgtggagggtgtgtgtatgtgaacgtgtgtgtagtgtgtgcatgtaagcgttggtgttgggtgtgtgtgaagggtgtgtaagtgtgcgt

SEQ ID NO: 1158 - DNA, 2431 bp, Homo Sapiens; identical to SEQ ID NO: 853

SEQ ID NO: 1159 - DNA, 2497 bp, Homo Sapiens
ggcagcccttctgttcacagcatgggttaccaggtcaaaccctgccaccaccgtggggaacttgattcggagccccatggccattcggatggattctgcgatgacagccacatctttggatctgtgagacagacagagaagccaggagacagtgcccagcaccgacagagcacaaaccccagagcacaccctccgtgcagggctgggccagccccaagtgtgcaggtcccgtttcccaaacctgaggcacccctgccctcctgaccccaccctgaccaggccattgtgatccctgagagatatgtagcccaaatccattcttatcaaagacccttgctggctctgggggcacctgtagtctctgaaaagtagatggggtcagaggacccacgggaacagttttatttgtctgcgtttagaggaggccaggtggccttgttcccagctctccctgcatctctgtcgggggtgtagacatggatgcagctcaggggcagctctctgtccactgcacacctgcaaagggccacaggtcacccaagtccctgatgggtcggctggacccagtaaccatatggcctcttgctgattaagtcagcaagatcctgggtactgcagaaccctacaggggcaaggcaggcagcatgacaacaaaagccccaaaacacagggtctggcgcaagcccacgacaggctcaaggtctttgccctgccactggctctcctgctccaatcctcggctctgtggggataaagccttcctggcctgccccacccatggcctctccccagagcctaggcaaacctgggggcactgatgcactcagctcagccctcacaccctcctgccactggccctgggaaggggcacctggcaccagggagcctctgagcagaacgtgggcccatcctgcaagctccctcctagggggaccggcacaaagccagagcttagctcctccaggccccaggccccatggaagggaaggggactcaggaagactgggcatgggaggaggctcctggggagtcagtgccctccagagcccaggctcgtgggtgagctgagcagagggagccgctgccggatcccttcggtgcccgccccgtgcctgactccgagggaccccactggctgctgcccttgcagctgcgaccatggacaggtcccagccttagactggctgctctttaaagtgaggggaggggtcttgtctggtaaagtcagaaggacaattaagctgcaaagctttctgtgcttccctgggaaaaagagtgggtctttcacccacgtgccaggccacgcacatggtactactggaggtccccacacgcagacttgagccagtgccactcagggtgtctccgtgatcaaggactcacacacaaccacacacagaacccagaggcaaattgaaaccaaaaacgggccaattatccaaacattcaggcaaaaccattatgctcataaatgagtcaccaggccaatgtggggtcacagccgagaattatctgggaaattcacacattcttcatttcagtttgggggtgaagacctgaactagaagtggcttcaggcagcaattcattgttgggtcaccgcacttacctaggactgtgctctcacacaggcacagcacagctccttggcaccagtgctgggcctctcccggcctcccagccccgcttctcacccctcccctcccagcctagtagctctgcctgcatcccagcctcccaacccgagcttttcagcaatattctctctcacctgtgatccgaataaatgattttgattccaataaactcagggtgagtttccacaaacttctgagctacttcctggtaagtcttcactgaccactcttcgtcatggtgctctccactgagctcatacacctgggaagaaagcacaaccaggagccgtcaggtgagcagtgagagacgccacccccttcccagccacccctgcccagccacccctggccagccacccctgcccaaccacccccttcccagccaccccttcccagccacccttgcccagccacccctgcccagccacccttgcccagccacctccttcccagtcaactccttcccagccatcaacgagctctgggaaaagtagatggggtcaggggacccacaaaacagttttatttgtgtttggattaggccaagtggccttgttcccaaaagtccagccaggctggacttgtgcttcccttgttcaggtcctctacggccttgggcattgtctctgctgctgcatggggaattcctagctggctctgggataaccctgatgctgatgcccacctgtctccttcattgctgggtcactgcacttaaaacagcacatggcacacgcgagggtaggtgcccattaagcatctgcataatggttgaagagcaggtcacggggggagaggatgaaagctagaaagagtgatctgagaatgacgtcattccccactacctgctcacctcccca

SEQ ID NO: 1160 - DNA, 2272 bp, Homo Sapiens
ttgaggtcaaacatttgagatcagccagagcaacatagtgataccataatctcgacaaaaaaaaaaaaaaaaaaaaaaaacgtgaaaaaattagccacgcatgatgccttatgcttgtagatccaactggttgggagattaaggcaaaaggatggcttggactcaagagttcagggctgtggtgaattatgatcaaaccacggcacttctgcctcgataacaaagaccatatctcaaaaaaacacaaaataatcctataaataaggattctaatgccacaagcctttccataggctgtaaatgttttatgctaatttgaattgcattttaaaaagtaatgattcttggggtaaaggccatagaatacagtcccaagaaataaatccacatatttaccttacaagaaataaatccacattcttgtgttacaagagctcctgaaggagacactaaacgtagaaaggaaaaaccagtaccagccactacaaaaacatatcgaattgtaaagaccattgacactataaagaaactgcaaactaatgggaaaaataaaaagctagcaacatcatgacaggataaatttcacatgtaacaatactaaacttaaatgtaaatgggctaaatgccccagttaaaagacacagactggcaagttggataaagagtaaagacccattgttgtcctgtattcaggagacccatctcatgtgcaaagacacacataggcttaaaataaagggatggaggtatatttaccaagcaaatggaaagcaaaaaagagcagggtttgcaatcctagtctctgataaaacagacattaactgaaaaagatcaagagagacaaagaacagcactacaaagcagtgccatctgcttttcctcaggcctctgctccatcagccatcaggtggcagccactcaggatgttggaacctggccatccctgcttctttcagtgggtgaggttggtggctgctccacctgttccaggcacacccttaacagaggtggctgcttgctctttaagccagcttggccttgcctggcatgcacaggccccggggaccgacatgctgctctgactgagaccgtcctgactttgtcaaattctacgtctggcctgggccacagaagcacaagtcccctgggtggtaccactggctgctttctggactggaacataaagtcctcctcaagatgacctgtggtctgcctcttggcaaccaacaagcccgcagtgtcatacgacccatgagacatggactgaaggcccaaagggagtgcacaccatgctccagagccagctgctcctttcctctatatggccccatttgcagcacagttgttgcactgaggcttgtgcatgctgggcaagggcaagctggctcaaagggcaaccagctatctttgcacggatgtgccagcagcaggcagaccagccatcaacctcacacgctgccagtcaggctaaatcagctcttctaccataaaggtagggccacagtgccatctggttttcctaaggcctctgtttcttcagccattaggtggcacccactcaggctttgggaacctggctaccccggcttcctggagtgggtgagctggtggctgctccacctgctctaggtgcacccttgcagaggtggctggttgctctttgagccagcttggccttgcctggcatgcacagaccccagctacggacacgctactccaagtgagcttgtcctgtctacggccaaattctaagtttggccagggccacagaaggcagagtcccgagggtggtaatcctggctgctttctgcacttgaacataaagtccttctcaagatggcctatggtctgcctcttggcaaccaagaagcccacagtgacataagacccttgaggcaaggactggagcccccaaaggcagcatacaccttgctcctgagatggctgctcgtttcccctatatggctccatttgtagcacagtagtagcactgaggcttgtgcatgctgggcaaggctaagagggctcaaagagcaaccagtcacctctgcgagggtgtgccaggagctgggggcacagccaccaacctcactcgctgcaggacatggaacatcagttcttctaacaaaaaggtagggccaagggccatctgcttttcctaaggcctttgctatatcagccatcaggtggcagccactcaggctgtgggaacatggccatccacttccttgactgggtaaggttggtggctggtccacctcctccagacgca

SEQ ID NO: 1161 - DNA, 2313 bp, Homo Sapiens
caggcaggggctccaggcccaggggctcctgagcagggaagaccctagcaggaggcagggagggtgctctctctcacgcacagcactgcaggggtgcggtggggagggggctctctctcacgcacagcacccccggggtgagtctgaggggagtcagtatcaaaggtcactgggacccagggtcctggcagaggaagcgaggtctggggcagaggggatctggcctgggcgggggaggggctgcgaccaagtccagggcaccaggtggaggagggcagagcccggagatggccaccaccacccgggagccgcctctgtccccagctccgaggcagacgcctgtcttggtggggcatgctcaggccacgggaggtgggcaggaccactgtgggtgctgcaggggctgccggcggaggccagggcacagggaggggagaaatcacagcctggatctcattctcagcccaagctacacggaaccgggggtccctgcatagaggcctgtcctgcagcatggctctgagcagctgcacacactcaggcccaagtggctcctccaatcatctctgtgcccacgactgtgcagggaatggccaggaccccagggaaatccctcggacatctggcgctgcccgtccaccccagacctgttcctttgttccccagctccctcccagccggcccctgaggccctccctaggaggaggaggtccctgaggttctctctgtgagggccgacctgaaggcctgagacgcctcctcccacctttgcaggtgacccctcagaggaccctgggcccccagagccgagggtcatggagactcctggggcccattcatggccctgggactgtccctaccctggtgggactaagccacaacctggagcagctcaaggctggcacaacagacacccataaattaataaaaataattgtgaaaacacaagcaaaacaagctcgtcggcatccaagagttctgcagcagcagggttagtctgagagttgctctctctgtcccacctggggctccagggcgctgcagtccgtcaccagagggaccagatgctcgtggccctccaagggcttagtgtggagctactcacccccatcagcacagagaagacccacgtcttgtggctgaagcaggggggcagtctcttcgacagctgcaggtcgctcggcttcgcgtctggggcatagctggcggggtcttgccggccccgctccagcgtgggcatccggtcataggccagctcctctctgaatggctcctgggtcatggcacttggggacaccacagctgtgctgaatgtacagccacgtgtcaccagttctttatctggaataaaattatcatcggctttggccactctgaggaaacttcaataagttgtttccaagaaatattttttaacaaaagaaatattgttcatactgaagtgctctaaatttgaagaagaaaatgagcacttgaatctaaaagtgaaaaagaaataactttcctagaaaaacggacctgaatagtctgggttcagggtgagattctacactttaaatgcctcattgatccatctgggccctccaggtgcaacacctgacaacatccatcggcaacttcgtccatgaacacatcacgccggggactcaagcacgttaaactgctccaattggtagctaaacgagagattgcaaaacatgcctctactcaacggcttaatgtctgagcacttacctcccccgctgctctgccgttgggagcactggtctctgggtgagggacttccagcaagaagtattcacaaatgaaacaaaagctcagcaaacttgagctgaaggcaggggaaggagagctgcttcctgaatatcaatgaggggaggaatcgggtggatcgtagaaatgtttcgtgttggttgtgtaaaccactgcctcggagctgtcagaacccaactaggaaaggaaggggccctgcctgtgccactcgccacagagctcgggtctctcagaagaaagaagcgtccctaagaatagaatcccaccaagtacacattctgagcaggctctgtttctgaaacgtaactgtttactcgaaggtcttctacatctttccaagtagcctttttccatcccccacagccacacggtgggaacctccttcacacggtcacataagcattcacgcactcggcttagctgtgtggccttgggcggctccggattcggccctgtggtttgcgtgggcagcccggatggctggtgggcccggtcctgctgccccctttatctctgctcaccaagcagagaaaaaccaca

SEQ ID NO: 1162 - DNA, 2492 bp, Homo Sapiens
ctcatctatcaagcagggtggtcattttccacctcacaggtgggtggtgtgaggcctccaggtgaaagggtcctgcacacaggaggcgctcaataaatgtctgtggcggctgcaacaaccccccgggggtgaagtaggaagtctgaggggctcagaaatgagagagacagagacagggagagacagagagagagagagagacagagagagagagagacagagagagagagagacagagagagggagagagagagggagagagagagagagagagagagagagagggagagacagagagagagagggagggtctttctttattcccaggccgggcagccaggcccttctcatccagactcaactctccccaccctgggccttgggctccctcctgccttgtccagcatctgggagttgggggttcccgctgtatggctgagtgctctcggggatccttacccccgtacccacccctggcccagcctggctccaggcttccctttccaggacatctgtagccccggctggccctccgtcctccagagcgggcctgatttctgtgccctgggaggaggggctcaggcctggcttggccacccatgtgctcaccttgtagatggccatggtggacctgtaaaactggtccatctcgggggccatggaggggctgtcccgggtctgagcaggaggctgggagctggtggcgatggcacagccgggagcagtggtaggtagtccctcaggtgcccacgactcagctggcagcgaggaagcctcggagagggacctggagatggaggcctgcctcagaggagtggcagcttaattattcaccaactcgggatgtcagaatgtgatctggggcgtaaccagatccggcagggaaggcatcctgtgccgggcaggctcgtgtgacctgcccttcaattattcaccccttggagctgtgggctgatacaagtgcccatgtggatgagccccctcctgggtcaccccctcctcaaggaccccaaccctggggggccccgccctcccacctgcctataccaggcattgcccaccttactgggcgggcgctgcccgatgccctcccccaggactctctctgccagacccagcagcagcagcccctggaggggaacgccgctttacttctcactgtcctcaggcctgcggctcacagtggggccacgccctctgagcttggctcccacagccgctctggcccgcccagctcctccacttgccggagcaggagcagcacaaacgctggagttgcccagccctgggcagacctcggccctgcacacgcgctgcctgtccacgcggagtccccggcctctctgggtgacaaatggggctctccctggtcctccaagatgaagttgaagattgtggccctccttgggcctgccgggggtatgtgggcctggcagctgcctctgcataccctaagggccggtttaggggaggcctagaggaaagaggaggtgtccctgcccagggatcctggaaaacagagtgtccgggtacaaaggaaaagtccggtcaaggccaagggtcaaggccgaggggagccgggggtcaggggaacaggtggatctcacaccactgcacacacaacacaggtgaacttgaatccaaatgatttatttcagttttggctcttaagccacttccattgggaagaagaaactcccaggagtgacctttgagagctgagggttctcggggtggggcagtgtgaggggctgggccagtgtgaggggcaaagtccaacgggcatcccactcctgcggcctgggctttcccagctgatggggtgggggacacccatttctttagtcccagcccccagggaacggagcagagggcagagggagtgggctgcacccaccaggaagcctgggagtgcccttgctgggggctggggcagaggcagcccggcaggccctcagggaggctggggctgggggcaggggtacggttgtgcccgggtacccttaatgtttgagctgatgggggagtcagttgtccttgacagtcagggaaaggggccaaagggggctctagactttcccagcctggaatgacagaaagtgctggaaggcggggttagtgggagacaggccttcaggaccagcctcgggcaggcagcttggcattctcccaggcctggtctatggactcagaggtgcctgggcccagatctgcccgggagggcagtggctgggcttggcctggcaggggctgaatggacgaggtcagctggggccggtgagaggctggggaccctcagggtgagagcagcagctggatgagcttctggaactcctcgcggtgctcatagatgtagacctcggtctcccagagggcgttgaccagcactgtgtcactgacctcatccagcatgatgtccgtccccagctgggggttcaatctgttcgggccagggaggagggggtcaccctaggatgctcaggctgggcagg

SEQ ID NO: 1163 - DNA, 2410 bp, Homo Sapiens
ccataaaagcaacacgaaaacattaatgctgccggcctccatttcctgggaccaactaagagcaacagaacaatttggatagattagaatcacatatttaaagagatctggctttctaagaaatgtcatctatagaaataaaatcaccttaccatatttcagttgccttaaattttattttcgctagcttagtaaggggaagaaatatgtattttctctttcctttttctctctctctctttttttttgtttttgttttaatatttctagtcacctgtctttctctgccttagtcacatatgggcaaattgctgtttgtttagatgtgggctcaatgcaggcagctttgagccattatctctagtatttgtgatgtcactttggtttgtgatgtgggtgtgggtgggtgttacatcatcagattttatagttaaattatgtgggaagaagttctatacggttttgcttctagcctcagaaacttctgaagtcctcatttcccccaaaatggcttggatgaattttgaagatcttcatgttcttaagaagtatgttttgcaggaaatgtagtcaaatatgcagaccagatttggggatatgggtagtgagatgcatccctacatgtgcaaaagtgccctccttcatgtacataaaggaggcactgttaagttctcagaacagctgccaaggttagggaccaggaatgaaagaacacgttcctgcagacctgggcacctttccctgcatgtctctcccgggaagactacatggtttctggaatgtgggtttcttttacatcccatggcaaatgcagtaattagagctgttagcagtgtcaagggcttgaaaggagaacaaagccgcctcttcctgggaactcttgggcaatgcctcactgcttatcaggtgctcgtcctgttggtgggtttgattcttttatttgtaaaatgcctcaggagcctccctcctgagggggaggccagtgaaatgatggaaaaacagagtatgaatctggcaggggctcctggaatcgcatgtgttgcctgcttgcgtttttaagtgttgtccctggagtgaatcagagcctgcaggcggaccgcaccacaggctgtggtggaaccacctccaggcctatggcagctggacccacagacagttgagaggacaattgctccctttcagtggcgagccctggcctcacctcctaagagctgggtcgattttagagcagggctttggaaagggtttgtctttgggaagagtttgcgaatgtctggagactgggcaggcaagagtcttttcaaagctggtcagtcttggaaaaatggcaccgggctcctgggctacctggaaattaccatctgtctttactctgcaaagcagggacaggagggaaatgtcaagcaaaaaaaggcataataggagtaggtcatctgtttctcttttctccttctccatcttgagtttggctttcctgcacctcatctttccacacactcatccgttagatttactctgctaggtcttttactcaatgactctgcttggtcttttactcactctgtcccccaggctggagtgcagtggtgcgatctcggctcactgcaacctccgcttcctggggttcaagcaattctcgtgcatcagccacccaagacgctgggattacaggcgcggaccaccaagcccagctaatttttgtatttttagtagagatgagttttcaccatgttggcccagctggtctcaaactcctggcctcaagtgatccacccaccttggcctcccaaagtgctgggattacaggcgtgagcctgtgctcagcctcaatctccttcttccagcagagagctgttcacatgggcagcacttgatacatactcttcaagttctatcaaattctgccttctctgccttcattgtaactcacttcaattgactatgccacaacaggtaaccctcagccttccttagaactaacccagggtactttgttctaagctatttctcctatgtcaataaaactaatatttattgaatgcttcctgaaggccaggcactgttctagccactttattagcatcatgtcatgaaatgctaccaaccatcctatgagtttgagcactgttccctgttttacagataaagaaactgaggcacaagttgctcaagtatcatgcctcaagtaaccaacaaaggctgaacccaaccaaagtctatactgcccttgtttttgtttttgtttttgagacggagtttcactcttgtcacccaggctggagtgcagtggcacgatcttggctcactgcaacccccacctcccaggttcaagggattctcctgcctcagcctcccaagtagctgggattataggcacgcactatcatgccgggctaatttttgtattttt

SEQ ID NO: 1164 - DNA, 2327 bp, Homo Sapiens
caggccgggcgcagtggctcatgcctgtaatcccagcactttgggaggctgaggcgggcggatcacgaggtcaggagatcaacaccatcctggctaacacggtgaaaccccctgtctactaaaaatacaaaaaatcagccgggcgtagtggcgggcgcctgtagtcccagctactcgggaggctgaggcaggagaatggcgtgaacccaggaggcggagcttgcagtgagccgagatcgcgccactgcactccagcctgggggacagagtgagactccatctcaaaaaaaaaaaaaaaaaaaaaaaaaaaagcttggcagggagcaggacatttggacctcactctgctgcccccttggctgtgtgacatccaggtcacgttgcctctctgggcctcggtctcctcacctgtttaagaggggttgacagtcgtatctgccccctcagcttttccccaggaaggtggtagccacaattagcatttgttgaggctgaccctgcaccaggcccaggataggcggggcttagggaggcccgtctctcgccacgttcccctgctaggggagccccgaggccctctcagtgtcatcctcatgctacactctgtcccagccctgtgcgtcccaagctagggcactgagtgtgccagcacccgcagggacaggcactggaccctgggtggacctgagggtctgtgactacccccccagctgctctcccctagaggccacttccctcaaggaaggaaagaaccttcccgccacctcctgcagtgcggtcagctcaggccagcctgcacagcagggccagaaccagggcccctggggagggatgcctgcctgcccagtgggaggagacggcacgcccgtgaagccgctactcagccagcctgggggccacgagtgctgcttctggtggcgctgtgcggggagggagggggccgagcagggtgggcactcgcatgcctgtgtcttgctggccttcgacagatgacagccctcctcctagggtctccagtgcagagttccttggggacattatggccactcctgtccagatgagagggagccggctgcctgtgacagcgtcgcaaaatgccgccagggctttccctccctcctcctttctctcttcctcgtccctctctggttggtggtttcctgcaggctcccgtccctgctggtgctggccacaatgtccccactcccagggtttcggcgtcccagccccctgcgcccaccgcgcctgcccgccagaatccctgtgcccttggtgcgtgtggcctgccgagcctcgagcccctgttctcctcagccctctttcctcccgcgtccccaggaggtgcctctggaagccacggagtcccatcggcaccaagaccgactgccctttggggtgaggtagtaggttgtatagtttggggctctgccctgctatgggataactatacaatctactgtctttcctgaagtggctgtaatatctgcggtggacagagcgtctggaaccctggctgggagcgggcagggccaggtttgggggcagccttggcagcagtcgggggcaggggccgcctacactgagaagtctgacaggcctaggtgccacttgctgtgtgaccttggacaggcccctgatctctctgggtctcagtttcctcctctgtaaaatggaggcaaatgaggatggaaggagatgcagtgtggagcatcgagggcagaggagagctgagccgaccccaccctctgccccagccgcactgagagaggcgatccacgcagctgtttgtctgacctctgtctcccaacactccccaacactccccccgccatcaggcccaggctcatgggtggccctgagccgtaccctccactgagcaccaggagaaggcaccgtggggccaggggtggccgagacgtttggaggtcacagggctgcgagtattggcgttgcccatcaccccaggttcccagcacgtgccccagcctggccagctcagtggcagggcctctgcctgtggaggaagggaggccaaggcacctttcctgagcaggaagtgagaggaacagctctgcatacactgggtcccacatggcacaatctgaaggcagacagtggctcctctgtacctggggaaactgaggcccagagagccagggacttcccaagaccagccagcagcagctgccccttcctggggtgccatctcccctgtccctcctgccctgcgcctgcccagccctcctgctctggtgactgaggaccgccaggcaggggctggtgctgggcggggggcggcgggccctcccgcagtgcaaggccgggcc

SEQ ID NO: 1165 - DNA, 2426 bp, Homo Sapiens
taaccttcccggggctgccagatcgccgacatacacgcacacacacacagagtgcacacacatgcacacacgtgcagccgcatttcctggtgcgcttgctgtgagggcacaggggtgggtaggctggcaggcacgtgaagttgccatcagccccgagggaccgtgagcgagttgggacttgggggagaaaaaaatgggggcggacgtcagctccctgggcggccgccgccaccgcctccgcctccccgaggcccctcctgcattcctgggcagcgaagcccctcgctaagacgggggctgatgtcatcccgggctgctcagccaggggacccgggggccctggtggctgcctccggaagtgagctagccgcctgccggccgacaggtttggaatctccagccagaggacagaaaacctgcatgggtcaggtgagcggggtctggccgagggcagccgggcagggggcagcagggtgcggcagcttgcccaccggaacctcccagggtgcacctcaggggggctgcctacctgaagggaagtgaggacgagggtgcccaaaggccgccccctccacccccacccccatccccatcccccgcctttcgggaccgtcacgccctggagtgagtgcagccggcttgttcctcaaagctccttgtctcggccgatcagctgggtgagccctggaactggaacctggactgcccagtgtgttgactttataactccgctggggtggactcccagcctggcacttagctgcctcttaattctgagcggcacccgtggatgcagccggctcctggctcagggatgtttacttacccttggtttgcctgaagaaagctgctgtttttaattttttttcctccaagcaagcccaaaacttccatgagcaaaagagtccaaagaggcaagaggacactggcgttttaattgctctctccctccctaacttccttcttccctctcctcctggctggccccatggattacctgggagataaactcacagtggcccagacccacatgacccagtggatgggcaccgtgaggaggtccttccaggaagccctcaatttggtgaccaccacggtgggccacgaacggacgagtgcagagtcggccagccggacccccttcaagcgtacttcctccttccgacacctggcttcccggagtcgggaatccttccgccgcttctctgctcgcagccaacagagattttcttcactgaggaaaaggcatacagattcggaaccgccagatattgtaagcttattatgttttaaaaaatattaaaacaacactgaaagctcctcccctccagtcctcccagggagggggtcccagacatcaaaccggggaagttacttcttccagaatagttgtcagtcaaagcccaggcacttcctgtcccctgtacctgggaaagaggcacgtagcaataattcctctctcctgaagtcagtcaggacatttttgctggagtcgacgtctgtgtggacagggccagcacgtgagttgggctgaatttgccagttgatttatgtttaagtgtgaacaccccaacccccgacacgaaagctcatccttctccctatttttagggtggattagtggcacctgcctcatctcctctcaccctcctaggaagcacaagtggcggtgtcatgtgcacgctgagttgtagcttttgtcgttccaccgagctttcattggattgccaaggaaagggtcttaggagaccgaggtgtggtgggcgagtttgcccgctggccgtgaaccttgggtttggtgtgagtgggccagggagggaggccttgatttcttactcaggcaggctcgggagggcttggattgggacagcagggtggaatgacagctaatgattaaaaccttggcctgtgtcctgctaggcgacagtgcagaaacaatcgtaaggtccttctgatgatttggagaggtgggactgggcccagaaagcgaaagtgcctactgtgggggaagcacagtgagtgagtggcagagccaggtcccgaaccccaggctctgacctccccattcacggctctttgcagtccagctcccagcagatgttctccccagaccctcccaattaattcagggctgcccaggtcactgaccagacctgagcctaaagagagggcctgccattttcacataggagacttctgccacctgactgtgttggcccagtttatgggagcacttgaggacaggcgaagggctaagccagcccctttttctgggttcctcctagccaggagtgctatagtcattaagggacccagcatttagggaggagccctgagctggccctccctacactcgaggtggcagggctcacagctgccctgccaggtgcaggggctcagtatcccctctgctgacccagaggtgt

SEQ ID NO: 1166 - DNA, 2397 bp, Homo Sapiens
aacatcctgaggataattgatcagagggaggaggggctgcaccgcttcctagcaggttgagttaattatcagcctgcattagcacttgacctgtggcatgtgtcaactcattactgctaattgcagggactcagtgacctctccgaacttctgtcacccctgtcacggcccctgccctgtggaggcctgtggaatgggaagtggggaggggaaggagaagggggcggagtcagccggagcctcctggccaggcctggagtcaccctgtcctgccacagctctcatgggtttagagtgggccctggggcagagggtttgcaaggataggggtgggtggctctgccgagggcggtgttctgagtaggtctcattccccagtctgcccagcctggccccaccccagctctgctgccctgttactttgtccccctgtgttcaccctccacttcctgccggggacactccaaggcctgccaaggttggagcaggggtgggactcagccattcaacaaacgcttccttggttatgcagggctgggcattggggtggggggctgacctggaccctccaagacatcagattgtccaactgctcagttttcattggggcaagtgcctcgctgagggtgaagggggctgtgagtgcccatcagggagcctggacaggtcccgcctctcacagctgtcccactctctggagctgccttggtggcagatggcactgtcctagaaaggtgaggctggagctgtctcttccaccaggggtggccaaggacgcttccagggtcttccatgcaggcctccagggtcaccctgggcgtggctgagggcatgcagaccacgctgtgctcccccccaccccccatgcccgtcgcttgcctgacatgctcctcagctgtcttgccccgcagaagctgtgtggtctcccctgtgagtagagtcgggctccatgatcctccggagcagcgccagggactctccccaggcacaattttaaagggggccctaggacctgccaggtccacggaagtggtccttgtaactctctccctggtggcagcctctggtgcattccggcaggggcagcccctcctcatcacagggaccctgtgtgccaggccccagctgcgttgccgctgaattatggatttaatagcagagaagccttgcaggccgcctgtgctggctcgggaaaccggggcccagccggggcctgtcacggtcctggtgccgccctgcttcctgtcggcgccacggagcaagcggagagatttatcttcccggctttaagaggtactaacggaggaggctgagaggcaggagctgaataattgatggccttctctggctcaggatctgctgaaaatgacacggtgcaaggcagaggggctgagagtgctgaccacaaaatgctgagaagccactccagggcggtcacggccagaaggaggacccccactcaggacggggtcacaggcatttggggcgggtgtcagaggctcctgccctgggtcattccagggggccaggatacccagaagctgggcctagaggcccacagggctggctcacccccacttccctctcacacgcctgccatcaccggtgcttcagcccagcaaccccatggctcgttggccccgtccacagcccccactgcctcctgtgtgctgggcgtgggcctctgagctctactctcagcctccttagccccaggagaggagtggaggacaggggtttaacgtggggtgtggtgcggagcggggagggctgtggcgccccctcagcccctcctttcctaacagcctcagcctcccccctggagaatcccctacctgctgggcacatctggcctctccccaccattctgtctccagccgggagatctctacccagtgaaacagtgaaacaggaagggttccctggttaccccgcgcagggcgcagggcatgcagcgggggagtggctcgcttcttcagtgccccaccgctcacacctctaggggagcatacagacgggcaggctgtggggctctgaccccatggcagtgtctgggggtgaatgtttacagctcttgaaaccccagtgggagtgcgttaccgggtggtcttttagtctagcggtctgtaggtggctggtgagagtgagctcaattagacccctgccttataacaaggacagaggaatttctgtatcccagggtttcttgccttggtgtaccaaaaaattggatcacacgtgggcttggagaatgagtgcaaggttttattgagtggaagtagctctcagcagatgggggagccagaggggagatggttttcccctggagtcaggcaacattctcgggatgtccagcagcttgtcttcttccaccagtgtgttcctctccccacacag

SEQ ID NO: 1167 - DNA, 2354 bp, Homo Sapiens
agacactttgcacaggtgtgcgtctctatcctggctgctgtgtgagctgaggacaaaatcctggctgctgtgggagctgagcctgtgggcaggctgagccaggggtgggagtgagagggaggggtgagaggggcctgagcacctactcagcgcatgcttcacagaactagcctgctccaggaagttccggtgcccagtgccacaatgcacactccagccctgtgcctgcacaccagaccccgggcccgctccacatgggtgccttgagctgattccctctgctggagttgctgaagggttctgcaggcctcaatctacagtcagcccccaaccctgtcatcagcaggggccccagcttacagcaacgcagctgttttcactgcaggctaactctgccacagcgttgccaacctgaaacatccagcccagagtgagtttttggggaggcgggaggctgtccaagcatcttacctgctgtgtgggcaagaagcggcctgcatctcatcagagtttggggatccaggacccagatctgctgctccgcagttgtgtgaccttgggaaggtcaggtcccaccctgggtgtgctcttctttcctgaagattcaatccggcctgtgtgctaggagtggagggcctgctggagtctgaggaagatggcagctgggtcggtagcagggtgagcagggtctgagtggggccaggcttcccacactggacaatgatgtccactgtaaagcccatgtcctggatttttgacaaacatcttagcaatcgacctgacactccactatgtccaagttgatttgtttccatgctggacatgtgtctaccaggacgtgctcttggctgccactggcagggcctggaatgaggacacttgttgtgcaccttgctttggagccccagacaggcaaaaaaatatccatgtggcttcacccaggtcatctctttgcttgtatgaacctcaggccacccttagaaagggtctcatagccccggtgtctcactctctgacctttgccaagtcgtcttcagcagcagctggaactctttgaagtggctgccacagatgttggcaaagcccggcctgggatgcctccaccctgcaccaggcacggggctgcctctgctgcatattcacctggaaatcatccacatgccaagcaccgcagaggcaaggggagtctgccattggactgcgttcaacacggctgcagggatacagacaagcacattccctggcagaggcacgggcccggctggctggagctgcagcagctgtgtgtggtcacagagcttccaaatgagggagatggatggcctcgcttcacagtgtgcccagagcatgtccacggtgcctgggaagaccagggactcaccatgcccggctctggtttccctcacagtgaagcctccttgctggtaggatccatggccaagcatgggggcaggggctgggggagctctgtcagtgacttctcgcaggcagcaaggcctctgggagctggccaggaaaacagaaactccatcctggagcaggtgcgcaaaccaacagctcagaaattaacaaggttcccaccaaggaccatgagccacctgtgctgtcctgtttgttctggtacttgcgcaggacacggggtggggggcgggggaagcacatgtcaacagggagctggtggccgctctgagagccagctcctttctcataacttgcttgaaatccttctctttgcagaagatggaacccagcacatctcgagagcccactgcacaggtcaggtgcatttatgtttactgtttctatcagcaaaagagcaaaaccaaaatcaaacaaacgaagactctggcaagattgcttgatcctgccttgaggtgagcacacagcagcatcgggaaagtgcgtaactcataaagatggtgcagcctgcaggtcaggaggggctggggtctgtcgagggcagctggggctttgcagcctgatccacaacactgcactcagagcggggaggtgctgtctccaggcccacctgtgactcctgaggtacaggcagagggtcgggcgtgtatgacactgcataggagtcctctccgcagtgtggaacccacccacgtcgcctgctccctcagtccccaaatgcatctggggtctgagatcagaaacagcagaagctctggtggttagtggaatagttacctaagtggaccctcatctcctgggcattctttgagcacctccctgctaggcactgtttcaggggctggtgacgggaagcccaccttgcccatgaggctctttcggcacagaggtggacactgagggaccgctggctcacacgcatgttgaaatatgtg

SEQ ID NO: 1168 - DNA, 2382 bp, Homo Sapiens
tcttagcttcataattaaccaaaacaaagaataagcaaatacaggttttttttaaaaaaggtttaaatgtaaacacattatatgacactaagtccaaattctgatataaaatatctggaacaactatttagaaaactacaaactttaaaaaataaacctcacttcataaaataaaaagtgtgtatacactattaactagtgtattaggcctaccaagaccatgactattagtaaatcacatctaagccctatcaaaactctaagagcattgtgtgctgttagaggtaaagcattgtgtgaaatgtttgctgagaattgccatcttttaagaaggccaccaaccttatctcctgggaattttccattcaatgccattccctgaacagcccctacacatgtttgaaaccatcaactgtaacagtgtctgtgatgctgaccagatggcacacgtgggtcattcaactttttccagaatatactctgggggtacaaacaccttaaaaagttacattcacagcagtttgtaccacatagaaaccaagactccttttgggagtgagaaactacaataataaagtacaacatatcaggatcacagaaggtaggattcggatgatggatgtgtgaacagagatgatggatggtgaactacagagacaggctgggctctcaggtctctgggccacggaaggagtgtgtcctgtaaccagcacaggacacagctcagtaagaaccatatactccaaggagctcggggcttggagctgggccctgtgctcactgatggggactcagcagctgtgtcctttctggcctggcagagtcccctgagcagggacctgtgtatggtctcagcaggtgcttcctcccagggccctcccaaggcgggaagtaaaccttcctcctcctcaggctgcagtgtgagctgagctccagctccagggctcagggaggggctgggcagtcccctgatggaaacacacttgcatgagcagcccctcctctgcagagggtggggaagaaaaggatgcctggggcagtccagccccacggtgtggtggggtcaggggctgtgtccaccatggacttgactcctcccctccttgtgatcctgtctcactgtacgtgtcgggacgggcctcaaagaccagcctacatcagaaactttgactgaggcccctgagaaatgttaccctgaactctgccttagtatctggatgtgtcttttcacctgatagagttataaagattttcccagttaaaaacaaaagcaaagctctgccagactcgtgttcgtggctccaaatctgcttcagccactgagcaggagctgagagggaagagagagagaagaacacaagatccatatggggaaggatttctatgagggtgtggcagtgagagcgggtggcaagttgccaaagaggcctaagccacagaagtgggtttcatgtgggactttcggaatgagcaggagggcgatgggtggagggtgagggtcagaagattctaatcagaggtgagaacccaaagatgagttattggtcattcaagtcaaacagtgaaattaccttggcctgtgcctccagtcagtggagcagggaaggggccaggatgtgcttcctgcaggtgttactggaaaggggtcctgattcagatcccaagagagggttcttggatctcatgcaagaaataatttgggaggagtctataaagtggaaacaagtttattaagacagtaaatgaataaaggaatggctactccatagacagggcagcaccaaacactgctggtcggctatttgtatagatagtccttgatcatatgctaaataaggagtggattatttattagcttttcaggaattctttttaaaaatatagaccacataaggtaacttgtggatgttgccatagcatttctaactgtgaggacaaccagaggtcactttcctcaccgtcttggtttcagtaggttttggccggcttctttagcgtatcctgtcttatcagcagggtctttatgacctgtatcttgtgatcccagtctggttgacttcctagctcatcctgtgactaagaatgcctaacctcctggaaatgcaggccagcatgcctaagcctcatttaatcaagcccctattcaacatggagtcactctggttctaacacctctgacttagggtggctgcagagctggaggtgcagattggggcagatcagcctcctgagaaaagcacacagagccactgcggggctgtgaggtgggagagatgaactcacattggcatttgatcagtgactctccagctgtaatgagaatagaatggagaggcctgggacaggaagacaggatgtggttgctcatgccatcctggtggg

SEQ ID NO: 1169 - DNA, 2369 bp, Homo Sapiens
gcctggggctgaggctggcctctacttaccggctaggtcttgagcaaacgaactggcttccctgggcctccttttccctgtccttaaaatggtgcaggtgaggacaataggagccccaaggggtgctgtgagggtggccagtacgtgccctgctaagggctccataaagcctaatttgtggtcatgagagggggtgcagcaggacagggtgggggcagctcttgaaagccccataaactaagagaatagaaaggaaggcaccctgtctccacagtggaggccacccctttggccagagggagggttggctgctgcccggccaaggaggggcagagagaatctggcagaattcactgagccctcgtgctggcagccctggaatgggaccctcctgggccgtccctggcctgatgaactggccctgaggctacctaccccacagcttggctcggatcccggccacccagcttccaagaaagcctggaaccaggaaaggagcgccgctggcgtggaaagacacacttgcatcctaaaacacttggcctctggttgtgtttcaggaactgggaggtgagaccctttctggtgactgacagttttgtgcctctgggcgcagagccctgtggctggccctggtatccccccctcccccctctccccgctctccctggccaatgccagcaacaacccagagggtagccccaccacttgccaggttcaacgcagtgtcccccgcagcagccacgtgaggttcctcggatggggagctgtccctcccccctgccccgcccctggccccagccacacagcgcccaccctccttgtttaagggccaggaggccagactgctggggcaaagctgtcacagcagcgagggagagagcgctgtccccctccccttcaaaagccaccttggcaaggcattagctaaacatcttctcggtcccagaaggcttcccctgtgaagtctgcagcgttcaaacgacaaccagcaaatccccagagacaggtccctgggaattagctgcgccgggcgggatgaaagccgctctgatgttctggagcgagagagtagagagaaggaggaagacagacactacctgccagtcgcagggtcccgggcagcagcagcacgccaaggaggagccagggggctgcggggagcccaggagggcgtgggaggcctggcagggcccgccacctcacaggctggttctccatctgggggcctgcttgtctgcggcgactctttagttcacaggaggggacggccggcgctgacagcttcccctttgctttccccacgaagctcctccctggcagcccctgaccttccgctcagaagcaaagctggaacagcccagcagggtggccgccagatgaggaacctggcactgagactggtccaggccacacaaccagaagaagagctggagacgggacccaagcctccccactccaacccctggtgggcttcaccctgtctcggcccctttccagcaggggccccgtccaggagacactggtaactgtgcagagggatcatgggatttccatgagtgacttcgggccttggtttagcctctcacttctgaaacacttttaaaacgaccacaagcatgttcacacaaacttctctaaaatattctgagaatcccttaataatgtgtttaccaaaggtaggttttttggtgaggggtggtagggaggctggggtgaagggcaggagcctcatgttcccagccctagagagggccaaacacccagggcaggtgaaaggcaggctgcccatcattcacccagcgagaacctctgtgggtcccctgcagaggcccaggagacgcctcctctctggtccatctctaacgtcagctcctccctgtggctgccctaaagcttagctcactcggcctcccaactgtgagaccctcgaactgcttccccattggctgcaggtcacagcccctgctctcacttctagcagcatcagccggggacaggaattgtttgctgccgggacccccttccccagcagactgggagcccctcacccttggcacccacacatctgcctgcgtgtctggagtggcagaggaaaggggctggggtgtggtgatggctggtggagctggaggcacctggtacatggaagacgcaggcgggaaggtggctgagtttcagcgcatgctgagcgcttacctcccttctctgcaggtgtcccttcactcaccagataaatgtgatgatcccagttgtacaaaagagaagacctcggccccaggaggcaaaacaacatgcctaggatcagggcaggtctgtggggcgggcatttgaactgccagtggtatgatgtccgagccttctcccac

SEQ ID NO: 1170 - DNA, 2425 bp, Homo Sapiens
tgcactctagggcaatcagcctctgcatgggaggagaggggcaccctctgcaccaccccatggtgttaccaaaagttgaaccatgggttggttcaactttgcagagaagagaccacctaacccatctgtggaaattcactccttagcgatactgatgctccctaagaaattcaatcctgggcctgagtgatggttggtgcaaaaaacaaattcaagatcccagtgtcctccagaagcctggatttccagggatcctgctgtgagtcacaggacgtcaccggtccccttctctttgtgggttgagtgtgggggccatgtggactccctcatgagcagatgccaccagggccactggccccagcttcctccttcacagctgcagtgggggctggggctggggcatcccagggagggtttttgtatgagcctgtgtcacagtgtgtggtattcggcggagggaccaagctgaccgtcctaggtgagtctcttctcccctctccttccccgctcttgggacaatttctgctgtttttgtttgtttctgtatcttgtctcaacttgtggtcagcctttctccctgcatcccaggcctgagcaaggacctctgccctccctgttcagacccttgcttgcctcagcaggtcactacaaccacttcacctctgaccacaggggcaggggactagatagaatgacctactgagcctcgtctgtctgtctgtctgtctgtctctctgtttgtctctctgtctctctgtttgtctctctgactgtctgacaggcgcaggctgggtctctaagccttgttctgttctggcctcctcagtctgggttcttgtcggaacagctttgtccttgggttacctgggttccatctcctggggaattgggaacaaggggtctgagggaggcacctcctgggagactttagaaggacccagtgccctcggggctgatgctcgggaatcacagagctgggacccagagccaggatccagacccagaatgaggtaggaggtggaggggctgccctgggcgtctgggggctgccagggactgagccctgagccagcctgagactcaggaaaccccgtcaggagggagaagggagaagcagactctggacaccagaaagccaggggaagggtcacaaaaggagtggatgtgacggaagggcgggctcctgggtctcttcagaacatatcccctgtgcccagggggatcagaggggcagagtccactgcgtgaaagccccactgctatgaccaggtagccgggacgtggggtggatgccagaaaagactccacggaataagagagagcccaggacagcaggcaggctctccgatccccccaggcccttgccccatacacgggctccagaacacacatttggctggaacagcctgagggaccaaaaggccccagtatcccacagagctgaggagccaggccagaaaagtaaccccagagttcgctgtgcaggggagacacagagctctctttatctgtcaggatggcaggaggggacagggtcagggcgctgagggtcagatgtcggtgttgggggccaaggccccgagagatctcaggacaggtggtcaggtgtctaaggtaaaacagctccccgtgcagatcagggcatagtggaaaacaccctgacccctctgcctggcatagaccttcagacacagagcccctgaacaagggcaccccaacacctcatcatatactgaggtcaggggctccccaggtggacaccaggactctgaccccctgcccctcatccaccccgcaggtcagcccaaggctgccccctcggtcactctgttcccgccctcctctgaggagcttcaagccaacaaggccacactggtgtgtctcataagtgacttctacccgggagccgtgacagtggcctggaaggcagatagcagccccgtcaaggcgggagtggagaccaccacaccctccaaacaaagcaacaacaagtacgcggccagcagctatctgagcctgacgcctgagcagtggaagtcccacagaagctacagctgccaggtcacgcatgaagggagcaccgtggagaagacagtggcccctacagaatgttcataggttctcaaccctcaccccccaccacgggagactagagctgcaggatcccaggggaggggtctctcctcccaccccaaggcatcaagcccttctccctgcactcaataaaccctcaataaatattctcattgtcaatcagaaatcttgttttatctcattttttcttttctcacatataattcctagcctttcctgggttctcaatttgtggtggaaagaaccctgaacccagtgggaaagttgcctatgtgaaggggttctcagttccctgggcatctctgcaggtaaggccttcctcacccagaca

SEQ ID NO: 1171 - DNA, 2425 bp, Homo Sapiens
ggttcccagaacactgcactctagggcaatcagcctctgcatgggaggagaggagcaccctctgcaccaccccatggtgttaccaaaagttgaaccatgggttggttcaactttgcagagaagagaccacctatcccatctgtggaaattcactccttagcgacactaatgccctctaataaattcaatcctgggcctgagtgatggttggtgcaaaaaacaaattcaagatcccagtgtcctccagaagcctggatttccagggatcctgctgtgggtcacaggatgtcaccggtcccctctctctgtgggttaagtgtgggggccatgtggactccctcatgagcagatgccaccaggaccactggccccagcttcctccttcacagctgcagtgggggctggggctaggggcatcccagggagggtttttgtatgagcctgtgtcacagtgttgggtgttcggcggagggaccaagctgaccgtcctaggtgagtctcttctcccctctccttccccgctcttgggacaatttctgctgtttttgtttgtttctgtatcttgtctcaacttgtggtcagcctttctccctgcatcccaggcctgagcaaggacctctgccctccctgttcagacccttgcttgcctcagcaggtcactacaaccacttcacctctgaccgcaggggcaggggactagatagaatgacctactgagcctcgtctgtctgtctgtctgtctgtctctctctctctgtttgtctctctgtctgtctgacaggcgcaggctgggtctctaagccttgttctgttctggcctcctcagtctgggttcttgtcggaacagctttgcccttgggttacctgggttccatctcctggggaattgggaacaaggggtctgagggaggcacctcctgggagactttagaaggacccagtgccctcggggctgatgctcgggaatcacagagctgggacccagagccaggatccagacccagaatgaggtaggaggtggaggggctgccctgggcgtctgggggctgccagggactgagccctgagccagcctgagactcaggaaaccccgtcaggagggagaagggagaagcagactctggacaccagaaagccaggggaagggtcacaaaaggagtggatgtgacggaagggcgggctcctgggtctcttcagaacatatcccctgtgcccagggggatcagaggggcagagtccactgcgtgaaagccccactgctatgaccaggtagccgggacgtggggtggatgccagaaaagactccacggaataagagagagcccaggacagcaggcaggctctccgatccccccaggcccttgccccatacacgggctccagaacacacatttggctggaacagcctgagggaccaaaaggccccagcatcccacagagctgaggagccaggccagaaaagtaaccccagagttcgctgtgcaggggagacacagagctctctttatctgtcaggatggcaggaggggacagggtcagggcgctgagggtcagatgtcggtgttgggggccaaggccccgagagatctcaggacaggtggtcaggtgtctaaggtaaaacagctccccgtgcagatcaggacatagtggaaaacaccctgacccctctgcctggcatagaccttcagacacagagcccctgaacaagggcaccccaacacctcatcatatactgaggtcaggggctccccaggtggacaccaggactctgaccccctgcccctcatccaccccgcaggtcagcccaaggctgccccctcggtcactctgttcccgccctcctctgaggagcttcaagccaacaaggccacactggtgtgtctcataagtgacttctacccgggagccgtgacagtggcctggaaggcagatagcagccccgtcaaggcgggagtggagaccaccacaccctccaaacaaagcaacaacaagtacgcggccagcagctacctgagcctgacgcctgagcagtggaagtcccacagaagctacagctgccaggtcacgcatgaagggagcaccgtggagaagacagtggcccctacagaatgttcataggttctcaaccctcaccccccaccacgggagactagagctgcaggatcccaggggaggggtctctcctcccaccccaaggcatcaagcccttctccctgcactcaataaaccctcaataaatattctcattgtcaatcagaaatcttgttttatctcattttttcttttctcacatataattcctagccttccctgggttctcaatttatggtggagggaattctgcacccagtgggaaagtcacccaagggaggaggcttacagcctccccgagtcatctctctggaaggtccttcctcttccagtc

SEQ ID NO: 1172 - DNA, 2473 bp, Homo Sapiens
aaagcattaattaatgacagaacaaggaaaatggcacaactggttcaaaggagaatttaagcaccacacatagacatgcaggcaaacacaaatgctggcattcatttacaagtagatacgaaatcggtcaataacttgaggataataatcaattgcattccactggacacaattcatttgcatttctatggcaccaagcatttgtattactattggtttttttcttaagcttcgagagttaggaaatagctcaaagatgatgaaaggcatagatatcctggagagttatgctagacagaacattcagcaatctttatagattttttggcccatatcaacatcttttataattttttctgacagtacagtgcagccaccaccatcccagagaagaagtgaggggctatgttgtgtttcctggacctctgtttcttaatctgcaaaatgggcatgataagagcctttgacaatccagagacatgaggtcctgctgggacaagtaccgtgggaaacgtgaagtgctaagggacagtgtcccaaacctcagtgtggccctccttcctgatttagttcacatccttgttctaccttggaagatttattttttttcctttataccaactttgatttgataatacccttgaaatcagagaatgaggtgctgattctgtatgttttttttttctaatacatatgaatatagacaaaaagccattgagataagaaaggtaagttcattcttgtaccaactaatccagtgctctgtgggaagtacaggattaggaagaaattaaatgatagcctacaaacacacacacacacacacacacacacacacacacactccactaaccaccaccaccaccaccgccgccaccaccaatgtattctgcaaattcatatacaatttgcaaacctcctcctgaaataagagagagagggcaattgaaactatctaaggcagcacttggaacacgcaggccaaagactgagccagggagggattgttatcacatgggctgtggggaggcagagctcccctgtgtccccgagagcacccctccccggggccccaccagcccccaactcgcctctcgaattcccacctctccccttgctctgcgcctttggaaacccagacagcggccccactcccgtgattcatccagcaggaatgtgggagttctcgaattgctccagctaaagccttttaattccccttcggtgatgaatgggtgaggccctcaaatgaaatgtggaggctcccagtcccagcccgcggccctccccctcctcggcgtaattatttctgtgcagaacatgtcaagtgccctgcttcccgggaacttgtttcgcatgcaaacatttggtgattaagcgaggcttacttaattaagcactttgtaatgactcttaaaccaaagaacagtggattaggagtccagttcgtgctggtgatgggaaaggcagcttcatatcacaaggaggcagacagtgatctggtgtggggaggcggccgggccaagcggggcagagtaggcgctctgggaactctgctagaatcactcattcattcattcaatcaatttatttttggagcacttcttggagccagagtagctggtgaacaataataataataataatagggccaggcactgtgctaataagtctgctgaataacaagagtgaggaggagccagagatagttattgagagctgactctactaggcatgaactgctagtagtagtgacggcaataataagcattttcattgcagcagcaaatccttgaataggattttgctgtggccctgcgtgccctgaaactgctgggtttctgccatggacttggcctttggaaacagcccccatctttgttgctgtcttactgactcactggcttctcacccaccagtggctcacttcccacatctgtgtaatgggtagttggatctagatcttctctaagatgcttttgggtcttaggagcctagggtgtctcctctgcttctgggggccacaggaatggtggcgccactttgggggcctcagctgcaatattgcagaaggcttcagagcccagccctacacagctccaggacagagcaagggtgactctcagctcagaccttcataaattgtgggaccttcaccaggtagcttgtcctctctgacggacaagtccttcacctctcaattgaaataacccttccatctgcttccagggctcctgtaagggaatcacacagactcatggacatagatgccctttgaaaaccatctacctggtggcagaagccatcatgtctcaaacttggacccacgaacacaccccaatgtattcacttgtctacttgctttggttttctcatttctaccataacccggaaaagggttctaattgccttctaacctgggagatcatcttagaacaaagggcttccatgtgacttcagtgcctgagttgat

SEQ ID NO: 1173 - DNA, 2439 bp, Homo Sapiens
aggaggcggaggttgcagtgcgccgagattgcaccactgcactccagcctggacatcaagagcaaaactcagtttcaaaaaggaaaaaaaaaaaaaaagaaaaaaggaaacagacaaagatggtgactcccttggggaggtgacacatggttaagcaccaaggatgagcaggtcagatggaggagacagtggtggctccagacctctgcaagcaccatgggaataagcatctagggttcacctgcatcttctctccccggcacccagctaggttcccagcacgcagcaggcacatgggaaaatggctcactctgacccattcactcaacagccagcaggatgctttacaagtatatcagccacgtcattctcagctcagaccctgaatgacatgaggccctgatccactgggccccatgtgtccccctgacctcacgttctgcttctctccccgccacctgtgccccagccacacctggccgcctgtttttcaggcctcaaacggctgctagggccttggcacctgctgttcttctgcttggagggttcttctctcagatgcccactcaaaagtccccttcccaccaggtcctccctgggccccctgaaattccaactccccccatcacctcagagccccctcgtttcctcatccttgcatttattctaacacacggtacatcctacttatttgctttggttgtctgtctagaacataaccccatgaggataggtatgttttgtgttttgttcagctctgaaatggtagaacggtgtccagctcttagtatgtggtcaataaataggcagtgattccatgagttaaccaatgagtgaattaatgaatgatcagtaaatgaatgaatgagtgaacgagtgagtgaccagtaagagtgaaccaatgagtgtgtagatcgctgtgtgaccaagtgggccagtgcgaaaggtggggggcagaggccgggtgagctccctgggatgcgggtagcaaggacagggctgtggtgtgaaccaagacatggtgccccctgcccctgtctttcttctgcagggagaggggctattttggtcctgagtacttttaaccccatgtgaaccacgcggacgggtggacagttggagggccagtagcagcagcaggagcctctgcccacttgggggccccgagtgctggcatgatctgactccatggtgtgggcggggtccgggcccacttggaggagcaggatatgtcgtcggaccacagttgggggtgccagactcaggccacgccatatttggtgtcagagcccaagacccaggaatagaaactgtgtatggggccaagttggccgcagcccaatatccaggtgacctcaggcccaaagcatgctcctggcccccgagacgggcctcgcagttgcagcctatgtcctggaccttgtcagctgggcttggcacacccctgctgcctgcccctgcctccaggctcactacttcccgccctgtcaccagggagctactcccagttagcctgttactgtggccactcccctgctctaagcccttccatggctcccatcgccaggattccccatgactcatcttaggcaggaagtgaggagagaggagaggtgcagggcatggccgggcgcggtggctcacgcctgtaatcccggcactttgggaggctgaggtgggcggatcatgaagtcaggagattaagaccatcctggccaacacggtgaaaccccatctctactgaaaatacaaaaattagctggcatgatggtgcacgcctgtagtctcagctactcaggaggctgaggcagaagaatcgcttgaactcgggaggcagaggttgcagtgagctgagatcgtgccactgcactctagcctggcaatagagcgagactccgtctcaaaaaaaaaaaaaaaaaatcgagaggtgcagggcaatggagacagaaggccaaaggctgggtcagacccctaccagccaggttcttggcaccagctctgcagaccccaactaggggcatcagcatcaggggctaggcccaagggcctagaaaaggccctccaagctggtgcttttcatccctacacaaattgcacccccacctgtccctacagtaagggcgctacccctccagccctgtgtccagcccagctcagcctagcactggccaaccatgacccaacaaaacggagtccgcactgagccctccatccaggctgagtgctgacagagaggctcccagagcaccagggttatgcccttggagattccgatgtcctgacgggaacacagaggccccgagaggcaaaggtgtcagaggcgtgtgagccagaccaacaccatcttaaataggagctgagtaaaatgaggctgacacctactgggctgcattcccagacgggtaaggcattctaagtcacagggtgagataggagttc

SEQ ID NO: 1174 - DNA, 2188 bp, Homo Sapiens
ctgtgaaaacgcttttgagagaggggaaggagctgggaggctctgacgtaaagatactgaagagcagccttggaagcccacagaaaacgcgagcttttagaaaacaagaaggaaggctggtgcagagggtgggtccggggcaccgcagcgggattggcctctggtcggagggaacttgcggtagggaaggcaggggaggggaagatgtgagtgggtttgtacatgcactgctgtgagatgagagggtttgcattagtcagggttctgcagagaaacagagccaataggatacacgtacataggaagagattcgtaaggagacacttcgtgcaattctggaggctgagaagtcccacgatctgctgtccgcaagccggacacccaggaatgctggcagtgcaagttccaagacctgagggccgggatccaatggagtggacgccagtcagagtctgaatccctgagaaccaggagtaccaacggccagagggaacggatgtctgccttgggtcaggcagagagaatccaaacgccctccacctttttgtcctgttccggcttccacagattggacgaggcccacccaccttggggaggggccagctgctgtgttcagtccgccattgcaaacacgaagctcttccagaaacgccctcacagacaccccggaagtcacgtacccactctgtaggtgccccggggcacaggcaagcggacgagccagttatccctcagagctcctgctgcctcgcccgctttctctcggaaacgtgaagtgtggcctcagctgaaagtgaggtgagcgtgagtgtggacatgtgtcagtgtgcgtgtgcatgggaggagtgtgtgtgcgcttgatgacgatgatggagcccagtgagccaccgtccgtggagtgtcagagcctcctaggatggccacgccgaaggtgcggaaggaggcggctggcccagcgtcagacgtttccagcatccgcgggagtgaaacggaggctggtgggtggttgtgatgtgtttctttaagaatggatcctgcaggttcttcttcctcccggtctccggtgccggaaggaggacaccgcgagtgttgcttgtttgcttacagagagtgtgcagcagcagcagcagcagcccggggccagctttgggaggactaaggatatttcagggttttaagccaggggatgacacagtgggcttaaattcaggaaaaaaaaaaaaatgcttctggtggcaaggacagggagagactgaataagtttggggtaagtggcaaaatcagagaaagaaaaccttccaggaggtctgagcccaggaaagcaaccttaaggatccgagctgacaaagtcatcctggaggtggaggcatcaggcccagctggagagattgtgagggcgaagaacctacaggaccttttgtgaaagaaaagaaacaagctcagttttgagtattttgcattcttcacttggggggaaaaaggagctataaaaattgcaggcaggtgtgcatcatgtcttggtaatttccaaaggattgcttttaatatgataggcacataaaagattttaaaagcaactgctttacgtgtacattatcgactgctcctggagccttatggcaccaaggcagagctttgccattaaccacagctccatggcagcagagttacgccggcaggtagctgagggaacgtgaggacatcagaactggggttcacaggaggcaaaaacctgcagctgcttgtaggaggcctcaggcttcctgcacccgcctctgttatcctgtggattggggcagccagtacagcaaagagccggcccccggagcccacagcctgcagggagacagacaggaaaacagatgatgagacgccctctcatcatagcaggcactattttaccacggcacggcaggaaaagcacttagatttgctggggcatctgttgaaatgaggtagagaagtttccttctgcacagtctcctgagttctttccaggggaagtgacgaaggggtgacgttgttgttgctcagaaatttcttgacagcctgcttggggcagaatgtggggatctgaagggtgcaagcgtgagcacaattcttcatggattgttgtgtgagatgatgagaaaggaactcacccatctttctggagggaggaggagacatgggggcagggggggagcca

SEQ ID NO: 1175 - DNA, 2449 bp, Homo Sapiens
gccttttctgtcctctgagtaggggctgagggtgcgttgggagaggagggctggggccagggagggagtgggcacgcagaccccagaagcctgggagccagcggctgggccctggatcctgttacagcatcgtggaggtctgagagggctaggccagctcctgagcctcttggcctggaaagggccttcatgtgggtgggccaggaggtagagatggatatcatgtctaggcctggccccacccacttctaatgccaggaggaccgggggaggtcactgagcttctcagagctttagggacctccccgtgccctttcacatctcggtccccaagggacccagaaagggaggtacagtttatgagtcccattttattttattttatttattttttgagagggagtctcgctctgtcgcccaggctggagtgcaatggcacaatctcggctcagtgcaacctccacttcctgggttcaagcgattctcccacctcagcctcccaagtagctggaattacaggtgccagccaccatgcctggctaatttttgtacttttagtagagccagggtttcgccatgttggccaggttggtgtcaaactcctgactcaggtgatccgcccgcctcagactcccaaagtgctgggattacaggcgtgagccactgtgcccagccatgagtcccgttttacagattcgagagctgaggttctgagaagcaaggcctggccaggcctcctggcctagggaggcttagggccaggctgcccccaaggccaggccacaggattgtctggggcacagggcctgctgctgggctaatacccctcttcctgcccgccagcatcgagggggagtacgtgccagtggagggcgacgaggtgacctacaagatgtgccctatccctcccaagaaccagaagttccaggccgtggaggtggtgctcactcagctggccccccacactccccacgagacgtggtctggccaggtcgtgggctcctaggctgagtggttcacaggccagctggccgggggttggggagccacacagggtgaacgggcagcagccggctccatgccccactgccctggctgatgagtccttcggtggcctcagtgtgcacgtctgtctgtccgtctgtgcttgtggctatgagcgtgtgcctccacccaccccacgacccgtgactactgtgcaagctggccaggaggtaggtggagggcaaggccaccagacctggcttcgcgctgtccactgcctctctcctcccctccctgccgcagacacgcaggacccgctcgccctcctgcttacccgtccccacggtgactgagctgcgagagcctgcgctgggctcactccctggcctccgcccctgagctgtcccgtgtcagtccctggcccggagccaggctctctgtgctacttacatctccctcccttggctgaggtcccccgccacagcctggacccttccctcagaagcctggccgatgggtgcttttggggagcctctcagcctctggcaggggaggaggactgacacggaggcacacaggcctctcactgccgaggccagccttccttcctgctctgctctctcagtgccatggagaggcaggaagaggggcctgagggcggaaggggtttggggctcccatttcgccggccagtccctcctcctcagcctggcagtggcgctgggctccttcccctgggctgtactgagccgagcccaggggtttgcagagggtgggggtccatctctccagcttggctgcagacctcctttaccctgactcacaagccccactgatgctctgggccatgcccggctgacggctgctgtggatgccgcgagggacggacacacgtccggggcacccacgaggagggcccccagcctgggagactggccctgcggcctccacgtcaaactctcttcccaaagccctaacagaccagtggccgaggtgtggctcttattgcatccatccctgaagatgtgtggctgttgctgtcacctggagtccttttggggccaagatgtgtgtgcacccggggtcgtggccattcactcccaggcaggggtgagggtggcctggcccaggaggccaggaaggagggccctgtctgcctccacctctgggtgcaccccctgcctaccaccctcccttctagagagcacatcgcctgaccggggagaagtggggccgtggttcgagggagggctggccaggggtgggacccttatgagactcagtctgtgagtaaaactgggggctcaaatgcccaggatgaggggatcagtgactgtctaggaggatcccttgccttgtaggtgccccaagaccgcagggtagaaatcagccgggatgcctgcatcccacccccggccccagggcccaccacataaaatctgggagcccagagctgctgaggtgt

SEQ ID NO: 1176 - DNA, 2488 bp, Homo Sapiens
aattccagggaggcggggcggagacggcggcgaggaggaggccgcggcgcgggacgcatagagctgcggctcgggcggcgcctccctgcggcggcccggcccggctccggcccccgctggggcaatgctccccggggccgcgggatgagccaggtgagcgcggagacccccagcactccctgcctggtgcgcatggacgggggtggggaggcggggcgggaagcggcgtcctcggcctctgttccccggggctgtgtgaccttgggcggccccgcaccctctctgggcccagagccccagcaccggcagggcctgcggaggccgctctgagtcctggccccgcaggcaccggcctggagcgctggggaggcttcttggaggaggcggggcctggccctggccccggatcgccgagaccggccacgctgcgccgcctggacgccgggctcctccacccacagctctgcgaccttcacgagctcgaccctttctgcgcctcagtttcctcatctataaaatggagataatgcctccgcgcgctgagcccgagcgcggtcgtgctgttacactattgctgctgctatgtcgttaatgacggcacagcccttatggaaggggggccaaggaaggcacggggaccttcccgcaggacatggggtgggcaccagccctaagccatgcacataacccactctgaggtcaggacctgggttcctttcgtgtccactgggggccttagccgttgtcttcacttctctaggtcccagcccttcacaatgggcgcgcctccctgcctgagagggaggccccagccaagccccagtttccaccgcaaaaagccacacagcaaacacttaatggaccctaaatttataaaaattatcccatagagtcctatgaggcagggaatgttactgtacccatttcgcagatgaggaaacttggggcaccgacatttcccagagccaacatgtaaaccaggcatttggcctgagtgacagactggtgcaggtggccagcagcttaatttgtactgagcgcttactgggtccccacagcgatcctgaactgtgttcctgcccacagtgactcggccggtccgggcatggcagacccagtggcgggcatcgcgggctcggcggccaagagcgtgcggccatttcgctccagtgaggcctacgtggaggccatgaaggaggacctggccgagtggctcaatgccttgtacggcctgggtctcccgggtggtggcgatggcttcctgacagggctggccacgggcacgaccctgtgccaacatgccaacgccgtgaccgaggctgcccgtgcattggcagccgcccgcccggcccgaggtgtggccttccaggcgcacagtgtagtgcctggctccttcatggcgcgcgacaacgtggccaccttcatcggctggtgccgcgtggagctgggtgtgccggaggtgctcatgtttgagactgaggacctggtgctgcgcaagaacgagaagagcgtggtgctgtgcctgctggaggtggcgcggcgtggggcacgcctgggcctgctggccccacgcctcgtgcagtttgagcaggagattgagcgggagctgcgtgctgcacccccagcccccaacgcccctgccgctggggaggacaccactgaaaccgcccccgcaccagggactcctgcccgcggcccccgcatgacacccagcgacctgcgcaacctcgacgagctggtgagtcccccagcaccaggtgccagggacccgacagcacagccagtgcctgcaatctgtccctgaacctcccagggtccaccctgctatctgcagaacagtctgccccacaaaaagagtgcacatgttgagcaccaaaccgaggaatgtatacctgaccccaaggaaatgggtagcccacagagagggaggtgccggggagatgacgcagcccagccgggcctgggacaggatgcgggctcctggcacgatcttccctcactttgtgtgctaactgtgcctcaactgagcttgtgcattccttcttctggggggccgcatgatcggggcgcctcctctgtgccctccctgcagtcagtcttaggcagatgtacccacaacctcatggaggctcgaggttgagcgggtgctgtgatgctcggttgagacgaggcatggaaaaacctgggcaaggtgcctggcacacagtaggtgccccagggggctctgcaggtctccccactccccaggcacccctgggaagcctagctgggttgctgctgttgctgggagcagggatcctgtttggaattacaggattcgttctactctaagcataggcgttgctgggccctgcccccaagtctctcctctcccaggatctgggtggcccctgccacccctgagggctggaccaagagtttccttcttatcagaaggtcaggactacaatgtgcctgcctgggaggcagatagcggatggcagtgggc

SEQ ID NO: 1177 - DNA, 2379 bp, Homo Sapiens
ggtcacccgcccagctatggaccttcgcgcctaactatgagtccctccatacatcacctatcccccactcacctgtctatactccatcccccgtgtagccacgaatccatccagcaccccctcaccactcacacctctccaatcacccatcagtgtctgtccaccacatctgcgcatcctcccatgtccctaaccacccagtcagtgaccccccccccgccatttaaggccatccacttgcacacacagacctccacctacccagacgcacatcccctggtccacccattcgcctgtccaccatccattaagcacaggaccactcatccatccgtgggctggtgtgggcagccaccacccgctctgcccatgcacgcattcatcctgcgctgcttctctcctgcagcaggagtgggcaccgtacactaccctgcccatgaagccccgagggggcactgcctggctccagccagccccatctgccccgttttcccctgcaggacagtggtgcctgtccattccctctgctagctgccagccctgctgtcctccgcactttctggcaacctcactgtatgaaactccccaaatcctcctccacgtcaagtgtcaaaacagcccagtttaagtgctttcaggatttccacggagcctgaccgcaaagaggtgagcacatttaagcccctactcccagcccagccccctgcatcagagttccagggctgactctgcagaggggaagcagcctcctcccagaggcaggcacacagtaggtgctcaagcaataggatttctgccatttccacacttttggaagaacctgcccatcccccatcctctgcccgctctcaaggaccgtcatcctgaacttggtaaggcggctcttcctactcccactgaatgaatgaggaaactgaggcagggtgcgggggtcgggaggagaggagcattgtccgaggcccccgggggaggccagggaaacctcagtccggcaggtccccgggttcccggcccccagggccttcttctcaacccacccccggcccctccaaggctcccactcacgcggacgagccctccagcttgccgtagagccagccgttctgggcctcgggcaccaacacctccaccacgtccccagcggagaagcgcagcagcgtgtggttggcgccctccgagtgggagaccagggcgcggactctcctggcgcccccgccgccgcccgggcgctcgccaaaggagttggagcgcgagctttgggcgctgccgctgtagagcgaggctgtgggcgggagagcgcggcggcacgtgggcaggaagttcttcctggcgtctgccctcgatccctcctgctgcagccccacccccgcgcctctcccggccctcctgccgccccggggcgggggcactcacaggccgacggcgtgcggggcagggagcgacggtctggctctagctgggacgcgggcctcgcgtcgggctcggtgccgtaggagccggagccgtgccggctgcggggggagctgaactctcccaggggcctcgggggctgcgggggagatgggcaggggagggtggggcgggggggggggggggcggggccgcgccctagtccagcccccacccccagtcccaggcgtcggcgtaggggttctgggggcggagaccgggccaccacgggggcgcggagaacgcgccggggcggaagggcaggccgggggatgcagcgtagagcgggagcctggggggcaggaggctccaggctgggggcctgaggccccgggcccccgcggggggcggcgggggcgcgaacggcggcgggggcgcccagggcctcaccatgtccaggcaggtgggcgtcaggcggcccgaggggtagggcggccccagcgcggggcccagcaggccgggggagtgggcgcgcgacgggctgcggctggcctcagactgctccttccacagcagcacgcggttctggagcatcccccgggcctggccgggcggggacacgggggtcagccaggtccgggcggctccctgaatcctggggacccaaaatgacaccctcgacctgagagctcaggccctaccagctcgggacgaccggattttctagctggaaggagccagaagccagctcaccgtccaacccgcaccctctacttttggcaaaggcacctccattttccacgaagagcttcctctgaccccccgcttcccgcgtcaatgtgtgtgctttgagcggggctgtcctcaccgcccagcttcaggggtaggggtggcacccaggcctggccactcaatcaccccatcctccttcctgcagcgataggctcaggaatggcgcttagatagaaactacgaccaaagaacccagtc

SEQ ID NO: 1178 - DNA, 2385 bp, Homo Sapiens
tagggaagatcctccgggacctaacggcccaggtagctgcgtctttactccccgcctgggcagggaaggactcactccagtcacaagcagcctggagatggatggtttggcagagaaggggaaaccccagcaccaacccagccccaggccccaccttgcagccaggtctgccctgcccagagtcctcgaggggctcagcctgaccctgacaggtagaagagaccccactccaggcccagaagtgagggagtagagcaaagggtccctggcctactgtgtgaccactacctgccgccctgcccagtgggacagggatgccccgcacccagcctcctcaccatccaggtggcctgggggcacccaaggcttcgggcagcccctgagctgggcccaggtctcatggcggtctcagggcaggcagggtgagagctgacagggaacagatgagggaagagcaccccacacacccgggggttccaccataagacttcctcagcgtttctctttccttccaggtcttccacccttggccacctccccaggtgatgcctgaagctcaagggactgtgtccaccctcaggtcagtacagtttgtgaatgttgatgaaaattggggctccccacatccctcccttctggctccaccctctgccgggcgtgcctgaaactggacacacacacacacacagcacacacgtgtatatgcaccagccccagagctctgggggccaaggagccaggcaggtgcttgctgcccattggcacgggctcagctggatctagcccggcctcctgctccttgcccctaccagcctctttctgcggccaccagcctctttctttctgcaactgagggaccagggctccaagcagctgggtttggtccaggtctggccctgttttttgggctcccttctgcctgagttgggtgacactcctgtttgcaaggatccagctgtctcaagggccctgggaggggaggccaggggcagcctaggggaccagtgactacagggcaatttgcagtacctgctgggggctcagcaggtaagatgtcccctgcctgctgctgtctgtcatggctgtctggtggccatggccgggggcgggcttgtcatgctgggaactgctcagaggctgcggccagcctgaggcccctcgccctggcgagccagcccccgagtgcagactgtcgccgatgattcttgcctcctggggcatccgtgcggccatgtgggttgggcaggactggcattctcccctccccaccgttgccatggccaggggcgggcccacctcccgaggctgtgcggagaggaccccaggctgctgcatgtgagcagagcagccggtgtctggcccggacccctctgccatctggggcccggcgtgtttacaggtcggccttgcccgccagactctgcagacgctgccccggggcctttgtgtctgcacgcagggctgagccaccagccgagcggagagtggggagggacacaggtggggagtagggggaggcccctgggggaatcagggaggaggggcaggacagaagagaaaggggatgaagggtaacagaggaaggagaacagcgtggggacaggagaggggcagggactggggaagaggagacacaaggcaggacagggcagggcagcccttggaactgtggggctgtcacagggataccagcctgggggagcagctaaccccaggcatctgacagggacctagtgggtcttggccaaggcgatctggtcaacggaactggggttttcctggcacccaccataagcccaggcctgcccgtgggacctcatcccacctgtacccagccctccctgtatacacagctggccaccacctaatgtaatccctctgacatcccacaggcagcagtgttggtctctagggtccaaatgaaacagaccccacaggcgtgtccctcacacaggactgagcatggaatgtgcccctccctgagtctctgactcccaagcctggactgacatgtccagggaggctgcaagggtgtgtcccctggatcatgggcagggggcaccgtgtgcagctgctgaggctcaggatgtgtgggaaagggcctggagtggaggagaagaggcctgcaggggagtggacagtccagggctgggaccagcaccccaatatgcatgatccgtggaagatgaggctggtcgcacacagaaggtgcttactcagtgctcgtcagatgccagatgctggcgtaatcaccacaggggtcacacaccctccgttaggaccaccagcaaggcagggccaccgtcccacactgttcttgcagagacggagactggggatcaggagcctggccctactctggcctgcagccttgggggctgctgg

SEQ ID NO: 1179 - DNA, 2452 bp, Homo Sapiens
gagtggagctgggtgtcccaggaggatgtcagcccccatcaggtcctcacaactgcactgagaggccagccctgcccagtttacagatagggacactgaggctcaggcaggggaggctcggggcaggcaggttgtgcggcactggcggggccaggtgggtgtgtctgactgggagccactgcctgtgccccggatttgagacagcaacaataatgaccatcacaaccatgagagcggcacctcccaggacccaggccacagcctcagtgatgatgacagcacagcatgtggcaggaacgtggcaacatcctcgggcctggcttaaccctgggggcacagcagcttccctcggtgccccctccactgcttgctcctttagcctgaggtgggccctggctgtacagaggtgagacctgggctgtcagggtgaggggaccagggcccgccacctgaggggagagaaggctcagcccagaccctgtcccagacccctagtgctgatgctcctgctgcatcccttacacgggatttgctgagcagctactatgtgctggggccctgagtcgggctgaggttctggtcgggggagctgcacaccactgcacaactgacaagggtagggagtccagcaggaggacggaggtccagatagtgaggtcaggtcggggattggtgggagggcctggctgggctgaatactggtggaagtgtgtgtgtgtgagtgtgtatgtgtgtgtgtttgtgtctgtgtgtgtagggggtagtgctgcctcctgccgcgctgtgaactgagtgtgcaactgtgcaaggagggccaaggtgcttagagaggctctctacgcctgggaggaaaacccaggacctccacagtgcgaaggagacaccgttaggtgacgaaggcactttgtcgcaggtgcggtgtccctggggtgcctgctgggtcacactgggctctgggccctcaggggttgtcctgactactttcaggaggaaatgacgggtggagtcttggggtcaccagagaagacacagtccagagaatctgagcaagaaacttcacagtctgagttcagtagctactaagcggagggaaagccccgcttctccgtgaaattaaacgaaggcagctgagcattgtgaccattgcaccactcctgacgcccctgctggctcctaactcagttataaatcccacgggcgggggacggcacaacgccccacctgcctggccacgcgattcggcagcacttggattttgcccagccagctggcaggaaaatcacatttcttatgattgatggagtgcgtgtctgtggggaccaagaggcgggggctgtgtggggctgagccactgccgccagggccttcaatactgctgttcagcggtggcctgggggctgcctcggggccctcacccaccaaacccaaggggtttctgagaggggaggctgtgccggcctccgctggggagccgaaggccttgaggctgggcccagcagtcgcccagcttactcctctgccccagctctgggatctgctccccgcccaccgtgggccctcccgctgcagcagccagggtgggagccaggggcagggaactcctgggcactgaggcagtcctggcccccagcacagctgccccttgcctccacctcccctggcatcacctgactgccctgtcctggcagtgccttggcctcctgtctctgtcccccctgcggtggtccttgacccactgcttgggtcccactaagcctccccagaagtggctggcctcattaggagactccaggagctcaggggatgtgggtgtgtctgcagctgtcttcctcctgctgcccctgcacagggagccctgaggagctggagaagctggattcattcgcaggagaaagagctggggtgggcaggggagaaaggcagagaagccacagaggctgggctcataggagacttctggaggtgaaagcagaagtgaagagagattttgaagagcagcggcactcagcaggaggctcctgagagggctgtgaggggaacagaagcctttccaggggctgatgagtgttcaagaacctccctggtccacactccttgcctggacattctccagtgtgcccgaggagggccgcagagggcgtttgtaatggctgtttgggtgccaagtggtgtttcattgactgggacaccacatggaggctgggccacccggggaccagggacctagtcgggttacagtcagagctataatgctggagatgtcctgggtcacacagctgggaggaccttggagtggcaggaaaggaggctcctccctgatctccaaatgaaatcccctctcacgttggttcctcaactggcaaaactgaagcccaaaaaggaagctcctcacccagagtcacgctgcgtgtcaaagagcacagcgggagtgggacggtgcccgtgaatccag

SEQ ID NO: 1180 - DNA, 2482 bp, Homo Sapiens; identical to SEQ ID NO: 943

SEQ ID NO: 1181 - DNA, 2499 bp, Homo Sapiens
gggaggggcaaagtgagagttaaggatcctgctctccttgggatctcattttattctcaaccacaccacaggagaggtggatgctcagggaggccagtgagttgcttaggggctcacatctctgagtggctgcaatagcattgaacacttacagaggcctacctaccacactgagctgcctggtggcactgccacttcccagtatctgcaaaccatgtcccaggtcacacagcacctttataccttagccccatgagaaaggagggtacccccatgtaacagaggctgttggggctggcagaaagcaggaacaggatcagaatccaggatgagaaccaaaggggtccagagactctgaatcagagagaccttgttcaagttctagttccgcccatcacgtcctctgaaatcttaggcaagttactgccagaggtctcagtttcctcacctttagtggaattggtaaggcccctccctgctcttgtgaagtttaaaatggcacacaggaaaggatcaacagagatgaattattattattactattattatgctagtcatcatttttattatcggatagtgcccagaagctgaactcccctgtaacttgagggtacaatgaggcttctcagagaactactcgtgggtgggggagggggaggcggaaacctgttgaaaaccttgctgtcatttgagactcagtgtactcctctaaaatgcgtgtgatgaggacgcctccctccctggcaggcgtttgtggcagtggagatactagtgtgctacaagaccccccctcctcctcgcgagtggtggtccaggctggggagcagccctgctctccctgcctaacatgcgcctccccaacccctagcatcttcgaccgcgaggaccaggccagcccacgggccggcagcctggcggcgctcgagaaacggcaggccgagaagaagaaagagctgatgaaggcgcagagtctgcccaagacctcagcctcccaggcgcgcaaggccatgattgagaagctggagaaggagggcgcggccgggtgagctgcagaagtgggctgggcagtggggggcggggcgtgataggcagtggggggcggggcttgatagttggcccggcagaggcgggaagaccgcgcggctagatctgtggtgcaaaggcccgaaggtcatggaaggcggggcctgggatccactgggtgggcccaccgaggcatgccccttatagtcgtgtgacctggtcctgacaccgcccctacagcagccctggcggaccccgcgcagccgtgcagcgatccaccagcttcggggtccccaacgccaacagcatcaagcagatgctgctggactggtgtcgagccaagactcgcggctacgaggtgagccccgggaggccagggggcctggaggcctccccagaccccagctcaacacctccttcttagcagagctcctattacccagtacacttcctgccactgtgtggcctcacagggaacatggaaaggctcttggggtgaggaaactgaggctcaaagaggacacaaggcaagccctagattccagaatcagtgatgaagtaacagggcctcttgggtggtgggcagggttcaaggccggatcccactcttggagtcccctccttgttgctctgtaggaggccctgagtcaatttctctaaatgagggaaggagtgatgaggcatgaccatagccttagctgggtggcgctgggcctctcagtagctctgtcccttgaaattgcaaatatgggagttgacaggctgacttggaggaggctcatgttccaactattcactcattgtgcaagctacggggcctctttgtgcccagtgccctaggtctggaataacagaatgctgaggggtagacagcaggggggagttgcccccaggttcctgaccagtcctcctacggcttatagcacgtcgacatccagaacttctcctccagctggagtgatgggatggccttctgtgccctggtgcacaacttcttccctgaggccttcgactatgggcagcttagccctcagaaccgacgccagaacttcgaggtggccttctcatctgcggagtaagtgtgggccctggccctgctaatgttgctgcacatctggggctggacatcgggaccaggcccagttgccctgagaacccctggagcgggccagccacattgtcagtcagcggctgagacccccttccccagagagtccccgtccttctccatccccacccccccgctgctgagcgtgccaggtgcccgccggaacgaaggagccgcaggccggcctaccagcccgggccaaagcccaccaggtggccctgtccatatcccctccatcctccctctgcccccttctccctctctctccctttctctgtcctgctctcctcccactatcaccagagcttcctgctcccacgggatcccggctggagattccaaaaggaggctcctggcccgggcaccgt

SEQ ID NO: 1182 - DNA, 2397 bp, Homo Sapiens
gggaggcagaggcggaggcggagtcaagagcgcaccgccgcgcccgccgtgccgggcctgagctggagccgggcgtgagtcgcagcaggagccgcagccggagtcacagccgcagccagagccgcagccaaagcctcagagagcaggagttggagcgcaggccctgctggatccgcgcctagctcgccgccaggcaccggccggaggacgggccgtggtgtcagctcactgcccgggcgctgtgggaggcagcgagcccgcgaccccccgggccgggcaccgccaggcgcggagcccagatcgcccccctgccaggcctggtcacggccagagcacgcaggagttcccagggtctggatctgcgcgcaccctaatgacctggggactgaagagaaaaaaggaacgaggatttcatctaaaagcataacgtgggcactaggcgaggaggaaagtggagaccacctggcacggggcagaggtgcctggagcccacgcttgagcatcggagaccctggcatcctagcagccgcgaccttggctctgccctgtctgagctggaaacacagcttagcttctagacatcgctggcacaggcctggcacaagtaagcagtgtcctcacctgtctgaaacgggacacggggtcggaggaaccaggatctagcctggccccaagcggaactctctggtggcccagaggtcgtcactggggagcccgcctcctgccctagcctcactggtgcggatgtgccgctgcccgccggagcaccatgatggcaggatgacctcagccgaagtaggagcagcagctggtggtgctcaggcggctgggccccccgagtggccccctggcagccctcaggccctccggcagcctggccgggcccgagtggccatggcagcactggtgtggctgctggcgggagccagcatgtcaagcctcaacaagtggatcttcacagtgcacggctttgggcggcccctgctgctgtcggccctgcacatgctggtggcagccctggcatgccaccggggggcacggcgccccatgccaggcggcactcgctgccgagtcctactgctcagtctcacctttggcacgtccatggcctgcggcaacgtgggcctaagggctgtgcccctggacctggcacaactggttactaccaccacacctctgttcaccctggccctgtcggcgctgctgctgggccgccgccaccacccacttcagttggccgccatgggtccgctctgcctgggggccgcctgcagcctggctggagagttccggacaccccctaccggctgtggcttcctgctcgcagccacctgcctccgcggactcaagtcggttcagcaaagtaagtgcctgggtggccaattgagaaggtgggggtccgggtgggtgcatggcctggatggccctgtgaggggtatggctgttgtcccattttacaaatgaggaaactgaggttcatggctgtggaggaagcagaactgaggctcagagagggccaacagttcagtgagttccaggccccagactcaggctctggaggcccaactcgtgtttatttgtttatttacttatttagacagggtctggctctgtcacccaggctgcattggtgagatctcagctcaatacagcctccgcatcctgggttcaagtgattcttctgcctcagcctcccaagtaagtgggactacaggtgcacaccaccacgctaagctaatttttgtatttttagtagagacagcattttaccatgttggccaggctgatcttgaactcctgacctcccaaggtgctaggatttcaagcgtgagccaccccacctggtcagctaattttttttttttatagacacagagtcttgctatgttgccaaggtaggtcttgaactcctgtcctcagcgatcttcccccctcagcttcctgaagttctggaattacaaaccagtatttagtgatagccagtgatctgtgtttgactagccttttatctcactgtattgttcccatttgatagatgaagaggcttgccctgggccacgtggccagtgagcagcagaggcaagatctaaacccagatagtcagactccatgcttccaagagatgtggcctgaggctttggacacaaaggaaagccagaaagcatgggccagggagagaaaaggagggtctgggatgagctgggatttggaaggtcaggggtcaggtctaagtctggggagggctgttgtttactgggagctacagtgtgacaggcttggtgctgagtgttgaccttgagttgtcatggcaaccaccaactttatccccattttacagatgatgggactaagacccagagaagttcatgatttgacaggctgggcatggtatctcat

SEQ ID NO: 1183 - DNA, 2353 bp, Homo Sapiens
agcaggtgcttggggtgagtgacatgacaacacacggcactggcagacaaagcagctgtgccagtctccgagttcctgggactctgccagatgggctgaggctgcagttccacattccaaccccagcagccccaagcctgggccagggcatcctgagcgggcccggctggggtggggatggggtccgagggcctaggcgcaccaggctcctgctgtcagctgtccaagtagacaaagaggatgtcctcatctgtgccatagctggttctggcctcctcaaagttactgatgctggtgctgcacattcctgctgggggtggggaaggcagaacggggtcagtgggttgtgagagagcacctacaccaccgacacagtgcccaggggagctgagtgaggtctgtttcccatccacatggccattcctctcaactcaagtcctccacccccaggaagccctccttgcccatcctggtcttcatgaggtttctctgactcctccccagtaaagcagttggagaaaggcccagagaggggcagaaacgtgctccaggccacatagacggggtaagtctatgtggtcagggcgtccaggggctgtctatgtgaatccagtctatgagagtcagggcagcccttccctgtgcccggagggcagtaggcaggccaggatgggtctagagcaggggctgggtctggccgggcttttctttctgaggaatgtgccggccatcctggtggttgggggaggggtgcagcctgggcagcatgaaagggtaaggcagggacctgggcagtggcgtggggcctgtggtgtgagagggaggggtggccagggtgtagaggaggctggcacagtttgcggcaggtttgcctgcatggcctgaggggtggccacagtgacaagagcccaggaggagcaggggctttggggaaaaggtagggagggaggccctggccacactagattgaatgggtgggaactgtgggcactgggcatacagaacagtgaatgtggaccactctgcctcacccaccccacccagcactcacggtcggcataggctgggttgttgtagaagatgcagccagtggcccggttgtagccacgcagcacgatgaagtggccctggtagtcaggagtgcggcagaagcagtggtggccactgggggtgaagcagcagtacttgacagggctggagcacaggtcacagtgcagcacccccgagttcaccagcacgatggccacatggccctgagccaggtgcgcctggatgtccttcacactcactgtgctgtgggcgggaggggggtcagctggtgctgctgggcccccattccccatccctcaaatggatccctgcttgtgcctgtttctctgttacaaagcttggggatcggctccttttccctttgccctgaactccctgctctgtcactgtggcccaggctcagcctagagccaagcaggagaccggtggggggggtgtgtgtgtgtgtctgaatgtgcacaaagatgagctggctctgtcaggcccttcacggggagagcattcagctccaggtgggtccagtcaagggccactagagcagcacacagaaaccatcctcctactgcaccccagcctggttagtgaattctttttgcccagccctgtctctcctctaccctaaatcatgtgtggtttacattgaaaactgccagccaagcatggctcagacactttcaaaaccaaatgcttctctgaaagagctattttactttttttctaaggctcctggtggcagaaggggctgcccaggaagggctgggccacattgcttccaggggagctccagttcagcaatgacatctacctggagcctccctcactggcagaaggcactgccccatcctgtgccttccactaggcagcaaatccaaatgaaaacctagagcagggctgggcacagtggctcacacctgtaatcccagtgctttgggaggccaaagcggaaggatcgcttgagactaggaattagagaccagcctgggcaacacagcagtaccctgtctttacaaaaacatttaaaaatttaccaggcgtggggcgtggtggtatgagattgtggttccagctactcgggagactgaggcaagaagatcacttaagcctggggctgtagcagtgagctgtattgcaatattgcgccacagcactacagcctgtatgacagattaagaccctgtctcttaaaaaaaaaaaaaagaaaagaaaagaaaacacccagagggacagagggcagatggggctgtgggcagggggagctctaggccaggggctcctgcatctttgctggaggggctgctcaccc

SEQ ID NO: 1184 - DNA, 2483 bp, Homo Sapiens
taggcctttcatgtggttgctggtcagaagcacatttgataaggtgtcccggctgtcctggccgtccctacatgaagtctgtctagccaaggcatttccaggggtctaatgagaagggaactgtggttgggtgatttcgaaggtgatgggaaagacgttgtttttcatttataaagctgccagggccagttggggaaaagcagaggaaagggaaactacaagaaagtagatccaaagaaacagaacctgaaagagctccccaggctgctgcctagaacatctggaactaagctaatgggcatggagggagagcagctgccaagccatctcttggcacgagctctgagagccgcctgagggagctggagcagacgccgtgggacttttcccctgagttattgcagcttcctcctggagccggcccggggtggcggctcaaacatggaaatgtggtctgaatcctcttcccagcaaccgctgctgggcctcagtttctctctgtgaggcgggcagttgagcgaaatgaaattataatatttaattataatattgcgagtgtcagacactgcgctgagttctgcatgtggatcctcttaatccttaaaacaactccagaggtggcaatgattgcacccactttacagatagaataactggtcagagagggtgtgtgtgtgttacctaaggtcacggagccagcaagggcaccgggtgagaatttgaacccagagccactggcttcctaaccacagcgctctcctgctgagcagggacaagtactcatcttcccagctctccctgcagtcagggagccagaacaccctgggaccggaaactgctgcctggatgacctcagccagctacctcgtttcgcagacggggaaagtgagaaccagagaaggccggtgactggcccaaggtcacgttgtgtcccatatcctcctctcattcccggacgtccagctccccaacagccccagcacagagctggggaaaaatcttcagagacatccccttgggaagacagctggaaggcagggctgagccggggtcatttgtgacccagcggtgaggtgatgaggtactgacgaaagtactgtatttcccccttttgagaaacgctttggcatcagatgagtcttgggggagggaggagaggaatttggcagggatctggttataagccatctggagggtggcgtgaggaccggaaaagccgctgcccgttctgtttggtctcatcccctgaatgaggtcactgaatgtgcacgggaggctcagcgctgccccactccagcctgatggagaaatcctacccgaaatcccaaagcagggcagggacattcccaccagatacttttgcagcctttgtcctgtgggacgaagcaagggatgatgacacactcgcctgcccacccggaagtgagtctcaggtcattgcatcagaagggtgacaacctaacacaagtcattgctaagcaactctcgcgtgctcagtattcacattttcttgcttcattctgaccactacactgcacaggagccattattctcaccccccgcctccatttacagatgaggacaccgagacccagagagttttttgttttgttttgttttttgagatggagtcttgctctgtcacccaggctggagtgcaatggcacgatctcagctcactgcaacctctgcctcctgggttcaagagattcccttgcctcagcctcctgagtagctgggactacaggcacctgccaccacacccagctaattttgtattagagatggggtttcaccatgttggccaggctggtctccaactcctgacctcgtgatccacctgcctcagcctcccaaagtgctgggattacaggcatgagccaccgcgcctggcctgttttattttttgttttgtttgtttgttttgttttgttttcagagatagggtctggctttgttttccaggttagggtgcagtggtgcgaccatagctcactgtagcctcaaactcctgggctcaagcaatcctctcgcctcagcctaccaggaactggaactacaaatgcatgccaccatccccagctaatatttttcctttttggaaaaatgaagtctcactatgttgcccaggctggtctcaaactcctgggctcaagtgatcctcctgcagtgctgggattacaggcatgagccactctgcccggccaatctcagagagttttgatgaagttacaaaattctgaccatggagccagaactcaaatctaggtatgtgaggtctgagcccaggcttccaccagggccactgtgctgcaactgccaccacttcctggcacctcaagtgacacccgagcatcattcaagggaaatggcccatatcccggcaattcccccacccgccccactttcttctctgaattagggacttcggcagagacagagccccagcagcctccacccgtcccctcgtgtcggccttgctc

SEQ ID NO: 1185 - DNA, 2498 bp, Homo Sapiens
aactgctctttttattggctaggaaaagaacaccttacagggaatccgataggttaattcacaatagtgttaggctgtaatgtcattctttaagaatcttttccagtaaacatttgttactttttcaaagtaattgggagctgttgagtgtggaagcgaaaaccaagttaagaagtcctgttatttgggtgagtccagttcctataaaagttctgttggatgtgtcttaaattgttcggtgcacctcagctctctcccgcagggatccggagaaactgcgccattgttgtcttacagagaaacaaccttctaacactctcttcgccgccatctttttcaagattttaaattgaaaatactttttttgacggctcttgccattatgtctggacgttttaatttcaacaaaacgaaataatagtgttaagttctttgagtcaaacccgatattacagaggtagggattccaggatattagaattttactataacacaaatgaaacacaaagttccttatgcttaacagtgtatcttagaaaaccttgtttgagtgaattagccttgtactctataatgaaacgaggaatcattgagagatacttaggcaacggattttaaatgagtgaataaggaagggaaaaacttcaggaaaatgcagaaaaaagcagcggagattttggaaaaaaaattctaaagcactttctaacgcaaacacattcgattttttatagctaaacaggataacagatcagtctattaagttaaatgatcaatgtctttgcaggtcatggtctacgtgaaacatcaaagaaacctgtaacggaaaacgacttgtttgaaagagccagttctctatccaaatttaccaatcagaatcttgcactgaaaaaataaaccaatcgtgaatctctacggccacttccggaatttagcaaccgatcactaacagggatcgtccacaatccaatcagagtgattctgttcctatatagaggggcaaaccaatcttcctaactcatttactttgcagatgaactatggcgcgtactaagcagacggctcgtaaatccacaggcggtaaagcaccgcgcaaacagctggccactaaggcagctcgcaagagcgctccggccacgggcggcgtgaagaagccccatcgctaccgccctggcaccgtggctctgcgcgagatccgtcgctaccagaagtctaccgagcttctaatccggaagctgccgtttcagcgcctggtgcgagaaatagctcaggacttcaagaccgacctgcgcttccagagttccgcggtgatggcgctgcaggaggcctgcgaggcctacttggtggggcttttcgaggacaccaacctgtgcgctattcatgccaaacgcgtgaccatcatgcctaaagacatccagcttgcccgccgcattcgtggggagagggcgtgaattgttttgagtacaaaccttaaatccaaaggctcttctcagagccaaccactttgtccgtgaaaagggctgtaatcctttgagacgcattagaccactaaactgcactgatccaaatagacatttgaaatagtggcattcagttccctcgatgcttcatttaaatttccaaatttaagcgctccctcaggttttcgcctagggctgggcctccctacgctgttctccattggtttagctggctttgttttgctgttcaggccctctgctgctttcttgtacattgttctcgttttctaaactcctggccacttaattgtaccctgcttaacccatcctcttgttttctggctcaacgctctttcatgtggtggcctgcattttaggtcttaactgcataggctttcaacgccttggttttgcctttccttgatgtttatttgaccttgcccgaggggccagcgcttttgatctgcatcaggctgccttactccactagtgttttgagacccagctacttgccggcgacggtcggtgccttgggtgcggtcaacgttactctctgtgcgcctgatactggtctaaggctaaggttattagctggaacacctagacccgtggcactaacacacagctcttgcagacttgacagccttgcataggttctaaactgcaggagtcaaagcaacgaaggtgcagatgggtgtgtctcaaacctgagtgcgaaaggaaaatgcagaaatcatgagccttttcaactttccagttgatatcttttgtttgcttttttcttttcttatttatttatttatttatttatttatttatttatttatttattttgagacggagtttcgcccttgttgcccaggctggagtgcattggcgcgatctcggctcaccgcaacctccgcctcccgggttcaagcgattctcctgcctcagccttccgagtagctgggattacaggcatgagccacctcgcccggccttccggctgatatcttaaaagaacttttcaactttagtaaataccctgtcttaatcaaa

SEQ ID NO: 1186 - DNA, 2433 bp, Homo Sapiens
aagtctcctgtattattgactgatgccgggcaagcaggtgtgcatcccagatagacattgccagtgctgccgtcagaatggcccaggtgaggccgagtgctaaggggctggtggggaacctggtttcctgtgtaagctccctctgcaagtgctggcagacagggcaccatgcacctttggtgttgaccacaggcaagcacttgcctgcaggaggctccgtccctggccctcccaatttataggtagggaaccatctaataatgatccttctagtcacacagcttggagaaagctgctttcttttaaaatattaaaaaatgattcacaaatctaacagaaataattagagcagaatcattctcatgaaatacaggtcccattggtaatttgagaattcacagagttgttctaaccctaggacacagacagcaaacaattgcccttgatattttttttaaatgtgcatatattctattttccagaatctacctttcacccaggacaattcataaggaattttaaaaatgcactgataaaatgatctaatctagcatcattttaaaagaaaacgtaattctaactttctaaaaggggagcagcaggagaacaaagggaaggggaagaaaaaggcatccacacaaaacaccatacgctggaaatgatgctcagtttctagaagaacactgtaagctcactttgtgcatcctcttttcctaaatcctctatccctaaatgtccactcacctgcctttcttagacatctcgtggacttctcttccgggccagtgcattctgctttcagtggccaaaacccatccccaccacaaaagaaagatgccaaatctcatatttgggacagccaacatgggtttccaaattcaaacagctctctccagaaacagcaaaaaggaaaagattgttctttttctctcttaagacattattggtctgttcattattagaaggatgtttactcatgcaaaaaaaaaatcaacccacaggatgcaatctggagagcaggagaaagcaatttccactaaacctataaatcctcctacgtcagatgtcagggattttctgaactgaggttgaattcctgtgtcccagtggaacaattattttagccggtctaaattagttcatcgtcaaatgcagtaaaaatgttggtaaaagtcttattttctggtgcgtcgaataaaaggaagtaaaaatggaccaaagcaatttccaagaggagtaaggccagaggtgcggaactgctttctatgttcacgttaatgagctcctccctggatctattttaagcttacggccattattatttgctttagctgagggctggatttggacagcttcctgcccccacttcctgtggctgaatccctgaaaccccagggctcggtacctgcgtgggctgtctatatggctgagattgggagggcaactggggaagaggtttttttgtctttgtttggcgcagaaacaagtaaatttccttgtcagttgcattgttcttatcatgaaccttgctgcactgtccacatttgaaaaataccagtaataaattaactgtagcctcaagtctgtgttatttgtagacagtttttcttttgctttgatgcttactttaagactctgctataatctacaggccggatcttgtgtcttcatcaaaagacagtctcagagcctcgtggaagagaccgcattaggtactccaaactattgactcttcaaagctgagctgacatggttttggtaactttcagactgtaccggtaaactgagtcaggattcccataactctatagctgaaaagcggtttcacacaactgctaacccaagatccaatagaatgagaattaattacacaagactgaaaaaaaattgatgagagaaatttttttcgggttatttgaaatgcagttgttttaaggttctgttcccagatcgtaagaagccttttctttctcttcttgtgctatctgtaattcacaataagcttttaaattctgcttttataaaccagaatgaagtattcttaaattatatatgattctcactaacacgattcttcttatttgaattcagaaactcttacccagtctctctacatttcttggcaatatagttgtttgcataggtttagtaagaatctgtcctcccttttgccaaaatacaactggaagcatcaattatgcaatgaaagccttgccttgaatgccctatttgagaataatgttcatttaacgaggtgtgacaagccattttaaggaataaaggttggctgtacttacggaaccaatgcctataatgtcctctcaggaaacctgacgtaggtccagtttatagtgtccagtcttacagttagtaaggaaagtcacttctaggcaagtacttggaggtatttttctgaaacctctagaagaaagg

SEQ ID NO: 1187 - DNA, 2461 bp, Homo Sapiens
attaatagtaacagtggttttaattttagataaatcatttgtcatttataattctatgaagaaaaatgctatgaaagacaattatatatctgacttttgtcactctataatttggcctatgctctcagatgtaagcaaaaatgcaaaacaacatttgtactccttactcatatatactactttccacactttgcctctgtgaaaaatgctacatttcaagttcatgactacaagcgttaatgctgtgaattggaaattacaacatacctcattgcatactccattaactgtttccacttctccaacaatcggaagccagaaaggcttgatttctagctaaaaagcaaagcgagattgagggaagttcagagacgccatgaaggaactggtgaccagagtcccttgctgcttatggaacccacaagaataaagatagccgcttttcggaattacgattctaattcaggatttgtggagtttactctaatttggtgctgttctggaaaaggctatgtcgaaaagaatttgtttctagagattttcaggaaagtagccaattcaaactgctcaaccctgtgagatcattcctggctggtagcaagaactttctgtcatgtggggcttgcttgagagtgaagagtacccgcatatccactgcttctgaattcatacctgttggggcttatatgcacacgtacacaccagcatctgggtcttcatacccgcttttcacactgatcgtgtgaactgattcacaagccttcaagtgtcctagttagaccaatttagtccagctctgaaagaacagataggtaagatagactgtcacattccatcaagttaatttctaatttcacaattgaggttttaataggacgtctggcctattaaggtcttttactctgttcaagagcaaccaaacaccgctgccaattctatcattaagatcaagctgctgttcagcgaccctcccctcggctgcccttccgtcttggggccttcccagcctgcctatggttaggagccgtttaaaaagttgcactcattctagttacaccctgccacacctccaagcctgtggatgatttcgtctgagttcccagcagtcttaaagctttgccaacagcagacggaggtatcacgctgagctctgtggagagaaagctttgcactgtgcaagtgacccatttggcaccagagagggggaggggaagagaaatcctgatgggctccagggactcctcatccatctacttctccccgggatcctctcctggagggctcttgcaaacacagttgccccgccacggtggaggatcatcaacagaaacccacgaaacaaggccatgccccgtggcactctgagtcagtcccgtagcgtgatttaccagctctctgaaaaaagaaatctgctaggacctgggctggaaccgtaagatgtaaagatgtcaagttgaaaaacctagggtgggcccaaacctccaactccccagccccgattcccaccctgggaaaatcattccagtgtaaacatttctttttacatttagtatatctgtgcaagaaaaactactttattactcaacattaataacattcactttgaaccttaattctgaaaaccacagaattttttaaatgctgtaaatagctgacacgggtgttcttcccttgctttcaaaggaattgtttttgtaattactgagcagggtgaagctgaatttcccctgcagtaaacaggagagtgtgtaatgagatatcttaactaaaaacattaatcatattcagattaattaataatagaaaactttcaggacattcttaatgctttaaaaacaaaaaagcttttattttttgaagttgttaggtctccattctagttctgagtacaaataaatgcctgacatatggtctaagccaaattccaaaatgtagcaaaaacagtgcctgcatatttggcaggaatttaaaccagttcaggtcagtgtctctttctgcccaaagaagagtttctgcatttgcactgagctaggaaaataacacaggaaaacatggggaacaacacggaatattgtaagctccagtacccggctggccaaagaataatgtttggggcaactctgaaattaccgcccaggctgcagtttgggtttgcataacgtcttggaggactgtgagcaagacagaaagtaccgattgcattgttgtaaggaaattgccttcccccttctaaagctctcaccttgcaaatcaccccctcttagcaaaagcacatcttacttgttaactcttcccctgctactaaccttttcaatcatcccccttcatcattgcagaatggcctttggaacaaagcagcattttaaagcctttcccactaaaagtttgcccctccccccctttaaagaggcagtgtgggggtaattttctttcttcctttctttttttgtgtttttttttt

SEQ ID NO: 1188 - DNA, 2440 bp, Homo Sapiens
ttttctcccctagtaattctcccatcttcttcttgcaggcataaccctgatagcattctttctagaacttcgccaaataagcggactggaataatattcagactatagactttcacgtaaccttctttttttaagaaatgaatcacagctcttatctgggcccggttttcttgcatccagggtttttgttattctgtattgttagaaagtaaaattttagtctgtcaaggatggggaaggggctatctctgagcacctagggtgtaggtctctatttgtttcttaaacagaattttagctaatacctatggacttttagctgtatactctacttccataagtacttaatgatttatgtttcaaggatccccagaatcctagtgttatttggctcaattttaaggttttcttaaaatagtctggggtttctactgtgtcatttactactcatccttctgcttcttgattttcttattaaaacaaaatcctgttatctcctctccctttttcattaatctcttaaacgtgctttttatcttcttttaaaatacgtttactgccaattttggaagaaaaacgtggtaaatggcatgccttcattcctccacattgatctggaattccttctctgtcttaatttggttcagcctatatccacatacaccaaggctagacttaaagataaaatcaattattttaattttaccagctttggtcaataattttgtttctatgtttttctgacttagtcagtttttatgtaagtcaaggtggttgagtattataagtttctattactataatgatttcatattcaaacactggataggaaaaattgattatgggcttggcatctatctatacggttttacagaaagagagaaaaaaacacttttagatagtggtatcaaaaaaggttgatatatattttttatcatctcctctccttccttgtttgcaagctactaacagtcacacccaaggataaaacattcctatgcatttacaacttttcactagcaaagacctgactactaaacaaaggcagcttgaccagaccacggttttatgatgggcttgagaggggctttgtttcacattctggttgtattttcagtggggctcattcttaactgtttcatgatttggggagacacattgctgattttattgttcagagcctttcttctcctttttcttgtggaatgagtgatgttccacacggaagattaagatatataataacaaaacagaaactctcacgtttagctgtagttagatttatggttaagtttatggagattacttagggctgggaacacacgtccaagaacgtctctgcagttacaactgtgcatggagtgagatgctgttacagactatggacagtaaatacctctgaggttgtgtgtcacttcctgtaggcccatgagtctttctgatttaagtaggaaggtgtctgttagtaatgcaaacaaaacctagtttaacctctgattcccaacatctggaatatttatctctttggcaattgtgcggttcactgaacactcaccattccagtggtccactgaagaaggattttggcttgaaaagagaccgccatgggaaaaaaaaaatctaattcagagtagttatcactgagaataccaaaaggatttgtgatagcaatatccctttgactccacagctggtctgcgtggattgtgctctagtgagagcctgttttcctaatgccgtgagaaaagacatagattcttcctttggaccttattacaacacaagattttttttattgtacactttaaagactctttaatccgaaaacttagtttcaactttttatttctctgtatgcctctgaatggaatccaaacaattcaacatcgtttttttttctttttctctttcagaaatggatgagagattcaagtatacttttttgatgtcctgtggacatttttgcatttttatattcttcattaaacataaaacaaagagctttggttctgaatacaagagaatataagttgttaagaccattaacaactcgttaatggtcacaggcattctggatcttttcccatagcttctggggacacactctttctcaaatgctgggtagaacagtaagtgtggttaaggctgacttgagaatgaagttggaattggatgcagcagtttcacaatgacatcaaggtccaaggtcagggaagtggcaagacctttacccagcagagttaactataagccataaaagtatctaggagcagacctgagtgaagcacgtgttcagttagttattgaaacaaaagtatgtagcttgtctcaagttcctggtaactacttcagggctgattgactaggtatttctgtgtgtatgtaattgcttttctccatttaagaataaactacaaggaacagatactatatagcttct

SEQ ID NO: 1189 - DNA, 2334 bp, Homo Sapiens
actacatctttacatcttacagctgaagaatctaaagccaaaaaagagtgagtagctcaacatcatccagagttagttaataaagatcccccccagcacccttcacaaagcattttacagtaaggagaaaggttttggttttcaacacagttgtatgaaaattccagccctaccacttcaaaggtatcattccttatcagtagatttcctttgtgtgtaatggggttatctggataaaacaaaaccgatctccacttttaccaccaaattgggattgatgtgtgagtacaaaattttagggcaatgtagttttcaatttctctcacttttctacttttgcttctttctgccctagttaatcgaaaaagggagttatttgcatgttgctggagggagactatttctaattgttctggcctattaatagcagatgtatagcaaagcttccaaagaaacacatgccttcaggacctcacagagtttcaagagtagtattctatgggttcattttggatttcaggtgattaatggatgtggacgaaacctttaaccttttcaattgtctgctcctgcttctccagctccctctccaagttcctttaattagctaaacttaaagcccttttgaatcacctaatgtcacacaaaagtacttgccctaggcagagaaagagaagtaacccagtttcggggcaactgatttattacatgcagggaaacttcttgttagttttccaaaagttatctcttctcttgttatttggaaagcacagcagttttccacttcattctccactgatggaaaacagatttgtctgacgcctagaagaagctccatttgcactggcgttttatttatttatttattttttttcttggtagaccactacaatcattggctgtgcacacctatattggacttggctactgcaccatactgcacttgcaaaaatgttcttttctagacatggcaagaaaagcctctataagctgaactaataccatctgcctctccaaaatgccttaattgtattggcaaaaggagcacttcttattttttaaagcctactgtaactggattgttagagcagtaccattaaaaggataatgacggtgttaccctcaaatagattttcttaaaataattgcttttccttactgagtgctggcacggcactcgtgaaattctgatggggtcagcgggttctttgatgttgcccaccagaagattgtctctttccgatccactctctctccttttgttttttcctcatctacactcacgttggttttatttagctactgcaacttgtctttgcacctgaatcaagccaattttttttaatgatataaacaggtagctttctcattgggccagtgtttgctgcttctttattttgtcttgatggaaatctttttattgtaggagtcaaacattgactatgagagtgtcaccatctcagaaattgacaggttgaccatgaaatcacaggtctgcatattctgcttcttatcttgggttatcctaagaagttggcaatgactggcatgaatgggggtatctgacccctgctaggagggagtggaccccaggctcctcaggctgcctgccagggctgttactctggagctggagagggaaatgagaagcctggtttgtatgaggcttgattgaggctgtggatatgaagcaacagggaagcgaagcccatgtctctgataaaagaagacactagaaagggaggtctgaaacactaagctaaaggtgtctggcagagaactgcagagaagcaagacagagaaaagtagagagcttaaagagatttccggagacgaatgcatgcagatagagaggatttcatagccacccactgcccttactctgggcaaggagaaagctgtttcaagagtcaatttatacaggagaaaaataggagtacatattcattgttttattttatgcccaactcaaactgaggcagcctataaactaacacagaatagacttaatctctgtgccaacactgtagctcagtaatggtatacatacagtcagaaagtggaaagcattagcttaatttttttgacgtcgggcttcagtttagctaatgccattgaattgacagaccacctcttcaaacctgtctaaagttattaaactaatggtttctataatgtaacataaagttattccctccttctctccgtttagaatgatattctaaatacagatggagtctctgaacacttggtttctccctaagtgatgcatggaggacggatgaaggaaaattgaaacacttttctgctatgttaccttttcaacccatttgt

SEQ ID NO: 1190 - DNA, 2308 bp, Homo Sapiens
cagtatgtatttcaaggaaggaagaacagcaagggcaggaaaatagtgagttttcagggtatttggtgagcttgacacaatatttgttgaataaatgaatgaatgactgatattcaaatcttattgcacatatataagcatttcactgagaaaatgctagtgttttgtctggattagtcccaacctgtttgaccttgactgcagcttccttgatagtgaaacgaggattccatcactcttaattatccatggctaaagtcaacaaattatcaaaaacttccatctagtgaatcattttaactcttccattgctaaaacttttaccagagttgtgattcaaggtaattgggttgagatatgctactgtcaattttctagctgtatgtaggttaatgctgcattcctgtggggaaacaaataaagggtacagtggctaggagcaaaaggccccttgataatcagcccttgaataatttagagttgactgtatcatgcaagtgcacctctcaagatagggaagatgaggatcatgtgtatgctttggattcctgtgttagtgttcaaattattcctatcccattgtaaactggctatgtgaaaatgctaataataataatacctttcattaaaatttttagagtttatgaaatttattcacattgattattttatttaatatggtcttcatataactctgggaaatagcatattagatattaaatttaaagagctgaagttcaaataggttaaatggctttttcaaggtcacatggcttctaagtacttgagccaagactagtactaaggtcttctgactcctaatccaaaattctttttaatgtaaattgccttttagcatattcctacaaaatttccctagattgtatcagaataataatgcctgttaatatactacttccagataccccaatgacaggacatacactctcttcctgctaaaagttactttttcaagtccacatttttggggacactcaatgagttcttccctaaccctgagaatctgtggttctaaaagcgtggatggcccagtaggggtaaaatcctagctttgttttacagttcttgccgtcatgaggcgagttgcttctctttgagggtaccagagggctccatccagtcaggcactgtttcccaagcatgtgtttcatgtgctggggcaggctcaccactggatcccatccatgtcttggcagccagtgggcccagtggaatactcgtgattgggaacacggtgatactgcattgacttggatttccactctcctttctcacagctgcatacagaattgtgggtgtagcttacttctgggcctggagaactgctcttctggccctgccctcccttttctctggagaaggggagctcccgtgtcttggtggttaccacagcattgaccctgctctggccacacatgtgtgcattcatcttccaactctgtgctgcctttccccccacagagacagcctctggcccttggtatggtttgtgacagcacaggcattactatggtaacagacgtgttataaatacaggataatagctttgcttttgctttccccctcccccgcccccatgcagtgaagggaatcaccatgatccttaaataataatcacagacttttttgcagactctaggaaatgaacagaataaggctttgccatataggcaagccatgaagaaaacttataagaatattagaaaataataaaagtattgaccaacactttctttttgtgcaaacatgtctttattctttcagtttgaacaaatgtaaaaacctccttctttgctaatttaaaaaatcacatcatgaacataatctgaagtggcaaaaaatatgtcagcaagaattttgaaagataggttaattaaacggtaactttgctgtaattcatctcatgttagagattttagcatgggttcaaccctttgagacttcattcgaagatgatcatgcctttaaagggcttgggcatggattgtaagaactgtgctgtagtgagtcttcattaagatatttggccttctctggttttaattgagctttaaatttggttccctccaagtttgatgattgaggtaaagcactcagaagggattttgaatacatatctttgacaaaggccttataatggtcttcactgctttacaagtgtaatagcccttggctgcattgactggccatcaattttctgcagaggtagggcaggtttgggtctccccaccttgtcaacttctggtcaaagtagccagggtagaccctggcccagttgagactcaga

SEQ ID NO: 1191 - DNA, 2496 bp, Homo Sapiens
atcttgagctggctgtaaacaaaacatctcaagttatcgtttttctttccatttgattgagccagttattgtatagggaggtgacacaaaacaaaacttcgtgtttctgaagccgagattttgggattgtactttatgcaaagttacttataagttctgattactttgagagaaaaatattacagtatccttaggaagttttatgtatttgttttaaagctaagcaccaccctctttttagttaaaaaaaaaaaaaagtttggaaaatagtgacatgtcagtacaaagggaatactgctctacaataagaaggaacacgccacagatacatagcatggatgaatgtcaaaaacattgtgagagaaaaatgcctgaacaggagagtaactattgtttgattccatttctgtggaattctagaaaaggcaaaactaacttatggcaacaggaagcagatcagcgattgccaggggtgatggggattggaggaggttgactgcaaaagggcagaagggaacttttcagggaaatatgaaatgttttatatcttaattgtggtggtgcttacactggtgtaaatatatttgcccaaattcgtgtaagcatatgcttaaaatgggtgcagttttttgtatgtaagttacacctcataaagttgatttgaaccgaaaaaaggggttagaaaaggctgtggttggaattttttgtgtaacttaaggccaaatagtccatttacgccagtttttacagtattgtaagctatgccctttgtgttcacatttcttcagttactcctttattcgtcatcacttaggagactttgcatctcatctgccttcctcctagctccatgatttgagcaatagaagttcttggctttcaggaacctcacagttcttgttagtcataagcaagaatgcattttaaattcacttcaaattattttttaagtaggggttctggtggttttctggaatggaggtgtggtggaagcttgagtgtgtgtgggaagaggctgggtgttcctcagatcattgtaccatgcttcctcacacctgtccaagcttctgtgcgaatactgaaataaagtgtcatgaattttgcttctggcatttgtcggccacagctgtggcttcgggttgcacatttgttgtggtttcagagtctctgagaagccattggttgggagggcgctaagaatggttggtgcacgtggtaattgagtgcttaaggggaggaggatgattcttagtgcactcattgctctccagtctttatctcaatcctgttataatttagagagacgttttcctggtgtgtccacagagagatggatgcgtgcttaggaatgcataatttagtgagcagtttgaacatctagatgttgggaatattgttgagtatttatttttaaagttcaagttctccatgtctagtcagtgttagcctgtaagaaagaactagttgttcttaatggatcatgttagctggacttggtacaagtgttttttcttagaagggaggattacacgtttatagtaacaagatgttcttttatttcctagtttatcaaaagattgtgaaatagggtgtgcagatattttaggtagtactattttttaaatagatgagcttgaaagagtgagaaaaggttgtgtcaggttaattgggcttaaggaaagctaaataattggtgggagaaggaaaagtaaatattaattttttcctttgctgtgtatttcttttttctttttttttttgagatggagtctcgctctggctggagtgcagtggcacgatcttagctcactgtaacctctgccacctgggttcaagtgattctcctgcttcagcctcatgagtagctgggattacaggtgcctgccaccatacccagctcatttttatatttgtagtagagatggggtttcaccatgttggccaggttggtctctaactcctggcctcaagtgatcctcctgcctcagcctcccaaaatgctgggattacaggtgtgagccactgaacccggccgccttgctgtgtatttttcttttcttttcttcttcttttttttttttttttttttttgagatgtagtctcgccctgtcacccagtctggagtgcagtggctcaatcttggctcactgcaacctctgtctcctgggttcaagtgattctcctgcctcagcctcccgagtagctgggattacaggcatgtgccaccacaaccagctaatttttgtacctttttagtagagatggagtttcaccatcttggcagggttggtcttgaacgcctgacctcaggtgatctacccgcctcggcctcccaaagtcctggaattacaggtgtgagccaccgtgaccggcctttgctgtgtatttcttttggacatcttttggctttgtgtttgtgtaaactttgaggtttcttaaaactaccaaagcagtgaggagaagatggcagaaagctgtgtgctgatattcttttt

SEQ ID NO: 1192 - DNA, 2472 bp, Homo Sapiens
taggtgcatttttgaggggcctatatggtttatatagtgggaattgatactctggatgtaacacatttaccatatttgtgtaaatctcttagagaaaatttaaagttagccaaaaaaacattaactaaatgggttattaaaacacaataaactagctatgtccaaccatacatctcagaaaagatctcatatttatagagatgagagtaggaatagctccaatataggcaaataatctccaaagtacataatcttaatgtacagaaaaactaaaaattaactctaagcatgatactgaataagtattattcctcataaaactatcttcctcttttattagtcaaacaaaatcaaggttaaacaaaggcttaactgactgcttgtaaacacatccaaattatttttaaaaactgaaaaatacaattttagaatcacagaactttatgttatttgattgattataaattacattacctgtaaatagagatggcgtattttaagccttagattaaataaacttttaaaacggtcaatttttaatgattaaaaaaccccaacaagcgaatgaaaagtacataaaacttatgatttaaaaagaaaaaaaaaactataaagaaaaaaaaaaactatgaaaaaaaaacccaaccagcaagtgaaaactacacaaaactcttgacttctaaattgcatgaaggatacgaatgtcaagaaaaacaagacttccctgaccgggaatcgaacccgggccgcggcggtgagagcgccgaatcctaaccactagaccaccagggaacttgcacaacgcttcttcctaaatatatttgttgtgttaaaaatctgcacttaattcctctaaccagtaggggatagagtattgcgtctaagccacacccactttgttcttgttctgagtcctggtccctgaatctatttcctgaaattgaagcaaattctcggaagcgccgggatggccccttaaggaaaaaacctataccctccaaatctaatcctcttcctattgccatgctggaaaatatatcctggaaattctcattctttacgtaacatgtaaatctctttaccaagacaagtgttgtctggacgcgtactgtccagagccttgtaatttgctttattattttattaaccattttagctgctctttccaaatctaagttctgtccctctccgtctttcttcgttctctgtcacgcggatgttaagtccctctaaacattttactaaatctaacgatagattgccaccagctgagagcgtttctcggcgaagagccggagcgacgcgctgtcctgggtgcagagcgcgtgctcaacaaatatgggtgatgaagggtcacgtagcctcatagcacgcggttctattttatttatttggcacacgcaggctaacgaggctgagagagctgtgggtggtatgcctagtgaaggatcaggacatctgcccaaggctccaagcaagtccttcaaacccactgtgtttgttatcctcctactttccaaactgtgttattatctgggcaattgcttcacttctccgcgttatatactagacacggccaggaaatgatgcaattaccaaaggagtcaagacaccttacagcccagccttaattcagaaaccctcataaagtagatgcagagggcagtaagatataactcaactttgaaaatgtcagccgttatagttgaagaaatctgacccaagagacttcgctccgctgcaagatggaaggaagcttaagtaagacataaatttgtaatgaacttgctcacaacatccgccgccactgtgacttgcagtcatcatccattaccacaaaattaggtgagcctgtgcttgaatctcgtttcttttttttcagcagctcagagatggagtttaaatcattgatatactttatctgaaaatatgtaataatatgagaacaggaagatttaaaggggttattaagataataagatagaaaaatcatcagaagaaatttctacactttattgtattttaagtgggacccttttttcctatcccaaggaatcttagatcaagttcagtaggtggagctcttaactcttacttaaggggttgctagacctcagcattagaccatctggttttgaataaaaagattaagcagatattagtttaaatttgtataggtttagtcacaatattttacacaaagtacaaaagggtatggtgaaaaccatcctcctactcactcctttcttcttcccagaagtaaccagtgttaccagcttcttctgtatctcccagaaataatctatgcacatacaacacatatctggttcattttcctccaactttttggtttcgaaacatgtcaaagcaacagaaagttgcaactatagaacattgaacacacatatacccttcatccatacctttgccttccaatttagagctccagcaatttgtggctattaggcacta

SEQ ID NO: 1193 - DNA, 2241 bp, Homo Sapiens
tcttaaaggaaatgttagccttgaaactttcttccagagttagagttagacattggtttttagctgcttaaagatatatacatagcaaatagcagtactaattttcacctgccacttaaatcctaaagcaaccatttctctgtcacacccttagagcagatgaagcagagaatgtgaactgggggaagacatcttggatgcttattttgtgggtatcattagctgctctgaggaagcagcatgagaccctgggaagcaactgcagcactaaccagactttccagatgctcttgaatattctcacccctgtgctagaaggaaaagagctttttggaacccgaccactttctgcagcttttgcagctgctgtgcctgaggagcagaggatggagctgggacaaagtctagttgcaggagctataaggaaaacacatttcctttcatagggctttgagtaattctgtgaggaaaaaaaggtctctaattttaccttatttgaatatttctagggattatacaattggacaattatggaattggaagattcctcagatgtctgactctctagttttgtaggcaagagaattaagatccaaagagggtaaagaattgcccgactgtggagccaagtttgcgtaggggctgatgatttagtcttcattgatttttgaataattttcatttagaaaagagtcttaattggcaaacacaggaatttgggttctctaccatgttatgttatgctatgttatgttttgttgtgttatgttacattaccacattatgattcatgctattataatgctcgattgttgaaagcaaataaaatatcatttctggggctgttctcacagtctagagttcacacaacaattaatacctgcttttccaacaacagagctactttcttttccttttctaaaaaagttcctcgtggcattaaacattaagtagagcttaaacaagaagcagagtgttatggtccctaaaatgtggttctcctctcttgtcaatacttgtcccagagtgcacacataggtctttgccagagacattcgcctgctgggctcttacgcaaatggcagattgaagggtagcgtgattgttctagttcctaatgccgtatcacatactctgagtccttggttctctattagacctcaaggaatgacttcatgtcttgtggtttggggtcctacgtatttagttctgcttgcttttcctgttctctccctccagtcaggcttctcaccactcagcctgctctttcccgttcactgagagagtgaatgtatccttctcttgtctctatttctgcaaaagttatcctttaaaatgcttcactatgatagactattttatgtctttgcaatgaaacagttgaatctcacatttcctgttatcttgttaatattatcagaactacattaatgagaattggtaaaataacctcatttgcttaatctcagcattagtataaattcagagggttttgctcttttttaacaacctgacacaatttaattacaagttaaattattgattttgcctttatttaaatagctccaactattgctacaaatgacaacccatttaagattgacagttcaaaggtacagccagttacccttatagaaatttttattttaccctaaagtcatggtgaattgatactcttttgagaactgtttatgtttttttgtttttaatcattacaacttctattttagattcagtgagtacatgtgcaggtatgtcacatgggaagactttgtgatgctgaggtttggggtatggatgatcccatgacccagtaggcagtacctcagccctccacctccttgctctcttccctctccagcagtccccggtgtccattgctttcatcttttttccatgtgtacaccatgtttagttctcacttataagtgagaacatgtggtatttggtgttttcttccagtcttaatttgcttaggatgatagcctccagctgcatccatgttgctgtaaaggatatgattttgttcttttttacggctgcatagtattccatggtgatgtaccacatgttctttatccaagccactgttgatgggtacctaggttggtacctaggtatgatagattgattccatgtctttgctattgtgaatggtggtgtgatgaacataagtacatgtgtgtttatggtagaatgatttattttcctttgggtctatacccagtaatgggattgcta

SEQ ID NO: 1194 - DNA, 2395 bp, Homo Sapiens
ctatggcttcgaggattctcaaagcagggatctttatattgataaaaacaatcttttagtgtttttgtggaggaggtgaggtaaacgacaaattgacattcattttgccttaaaccaagtgtcaaagtctggcttcccaaagagaatggccagtattttgggcgcagctgtcaaatcttcccaatttacacagatgcaacagaacctgtgaattaacctgtggcatttaccaaagccaacccctgccaaaaacaaatctctctcctcctggcatactgaataagagatagggatgcattaaacatttacgaagacacttcaagagagtctcaggtaacaggaagtgttctgagattgatttgccatgctttgagtgcacagaagacagagggagacacacagggaatgttcctgagactttttcttttcaatcatcctcctctgtgacttttaccctataatttatttttaaagaggcatcatagttttctgggtgccataacaaaatctaaaataaatgttttcacctagataagcactattaaaaggaaaggatactgaattcatttgaatacatttacagaagattgattttcccaagggaatgtacctatcctatttctttaattattcttgaagttttgcctatcaactgacaatttcttacagaaaggaagcaaaacagcctggctttcgtgacagcgaagaattataatactagaataaaaacaggtttgtcactttccttatctcttctaatgtctgagttactgggagtcagaaatataataaccccatcccagtaacacagttattcagaatatgttaaatcgaaaggtaaattcaaagtcaaatttctctattttttgaagatcagtatactcattcctaactacaagcatccagtatgattagttataaaacattagagaaaatatggtcatattcactttattttttcaactgattatcacctgattagaaagaagaccattttgtttcacatgatttactctcagcaaaaaaactgtttacttaagcataggaaagccaaccttcgtactaaaagagaactgagaaatttaaacagcccatgatcttcattgctttggcctctgctgcaaagcgtcactgtgaaaaattggtcctgatcccagcaatcaatgctttcccactgcacagagatggcctggcgtcattgtgccattgtggctgctaagggcagggttccttagcaatgcataatggccagaacaagtcctccccaaccctgcactaagggcaggcccccagtcccaaatcatttccccatcttattccagtttctcttcgggagctgtggtttctttctgtggttgaacgtggttcagcttttcctgaaccctgtcctcccccaaaaataattatctgttggagagtggtggtggttggacaacattgtgaatgtaaaataccactgaattgtgcatttaaatgggaaattttatgctatgtgtattttactacagaaattatctctaatgtgtattcccaggcagccgagaggtcgtcttctcagaggaccctgagctgcctttttcagcaggtccaccacctctgtatctttgcatgctaacaaagactttttctttttttttttgagatggagtcttgctctattgcccaggctgaagggcagtggcgcgatctcggctcactgcaacctctgcctcccaggttcaggcaactctcctgcctcagcctcctgagtagctgagattacaggcacttgccaacacacccagctaatttttgtatttttagtagagacagggttttgacatgttgaccaggctggtctcaaactcctgacctcaggtaatccacccacctcagcctcccaagtgccgggattacaggcatgagccaccgcagctggccaacaaagacttcctgtgctaatcacagatataccaaatgaaattgtccctttctgccctttcccttctccatcaagggatgaaatataattttcctctccttgaatctatgtagacttatgacacacttgacaccaatcaaatgtagcagatatgatgctggacaacttctgaggctcaatgattacaagcaattaattcatcctctttctcacttgcttgaactcccacactggatctctgaactgcaattgcagcagttcaactgccctgcagccaccatgctgcaagaaagcccagactaaagcacacaaggaaaccaatggagaaacactaagactacatgaagagccacggagaggtgcagccctctgttccagcttccgtcgccgtctgactgcaacttataaaacccacagctagaactacatagtcaaatccttccccaattccagactggctgaaaccatgaggta

SEQ ID NO: 1195 - DNA, 2258 bp, Homo Sapiens
agccaagatcgcgccactgcactccagcctgggcgacacaaactccgtctcaaaaaaaaaaaaaaaaaaaagaagaaaccctgtgttctttctcttgacatagtgtttagggaatcagtaagattccatcaacataagcatcatattctcttatttttctgcaaaatcatcagcagcaagtgctttttcctaacattaaaatatatttattctggctgcgcacggtggctcatgcctgtaatcccagcactttgggaggacaaggcaggtggatcacttgagcttgagagttcaagaccagcctgggcaacatggtgaaaccctgtctctacaaaaaaaaaaaaatacaaaaaattagcagggtgtggtggcgcacacctgtggtcccagctatttgggaggttgaggtgggaggattgctggaacccttgaggtcgaggctgcattgagctgagatcgtgtcactgcactctagtctgggtgacagagtgagatcctgtctcaaataaataaataattgaaagttaattatacttctgtctatggaattttttacttcacataagctgagagaagtcaaacttgggttattgaaatgctttagaaaattgttaaactgtttacttttttaagtttttagtctgtcttagttatatgtgtgtgtgcatatatgtgtgtgtgtatgtgtgtgtgtgcatatatatatatatatatatatatatatatatatatatatgtatgccactgcactctaaccttggcaacagagtgagaacctgtctctaaaaaatagtaaaaaataagttaataataaaataagttggccaggtgcagtggctcatgcctgtaatcacagcactttgcaaggctgagacacataataatgcccaagagtaaaaattaagtaaacagttataacatgattagtcattttatttattttattttgctggattggagtctgctgttatatcatataaaacatttgctaggattttgtatttttaacacccatgcacatttatgggaattcattagagggggaagcctggatttaaaatttccctccatgaaacagttaaagatcaagaggtgaatcgtgtgggatatgaagcatgtcatggctgagctgctgacgaggcctcggctgtgctttgcatcatgtaagggctcagcaccctgagaaggtgcctggtaaatgccactggctgatcggacggcagttctcggaaggcctgctgatcagaaacagagcctttggcagaatctcaatggcaaagtcacaaacagtaacagtccctaaaataacaactgcaacctcagcaaaatgaaaaccttctatgtgggaggtataatgggaaatgtattgattggtatttttctccagatacatgaatagtgatcacaagtagagatgctccccttttctacaaaggaaaaggtgtaaaacattggttttacaatgtaggaaaaccaataaaatggtggtataaaacattgatcaccatcagcagattcttctagcaagaatggcagttcaagccaatagatatgtttcatgaattttgtggttgcaagtggctggaatggaatgaaaatcagctttcacgaatccattctctcattcttctcattttaatgagcacctactgcatgctaggcattgttctaggtatgtgcaggatatcagcgagcctagccaagattaaattctctctgctcagatacagaaaataagggatacacatcatacaaaaatacataatatgttagaaagtggaaaaagtaagtagaaaaaagaaaaagtacagcagcaagggaaattcaagagtgccaggccgggcgcggtggctcacgcctgtaatcccggcactttgggagtccaaggtgggcggatcacgaggtcaggagatcgagaccatcctggctaacacggtgaaaccccgtctctactaaaaatacaaaaaattagccgggcgtggtggtgggcgctacacgggaagctgaggcaggagaatggcgtgaacccgggaggcggagcttgcagtgagccaagatcgcgccactgcactccagcctgggtgacagagcgagactccgtctcaaaaaaaaaaaaaaaaaaagagtgccaaaaaatggtgggcatggagcaggggcattaggtgggcagaggcagctctgctgagatggtgataagtgaacagagtcctggagcagaaaaccagtggatgatgggggaagagcattccgggtaaagg

SEQ ID NO: 1196 - DNA, 4090 bp, Homo Sapiens
ggttctcaataactactgaatgaaatgttttctaacatggcatctcctgtactgctattcagttttctctagtgcaggcctgattctgatttccctagacgtgaaattcgctgggacaaggactagatcctacccatctttttatctctaccactcgctcttctgcttaatacttatttaaaggggaaagaaaggaaagacagtgaattcagggcattgacaatccagaaagcgtggaggtgggggtcagtgagtagagagttatttggatttcaagggtgtgggtaatcctggagaggaacaagctactatatttatttgcctacgaatttatttatacctgcctccttccagaaagggtttgaggtggctgacaaaaatacacacaatacaaggtaaaaaacaagtcgctgaggaaatcaggccgagaggaaaataagagtaggaaaaataagatcgagtcggcttgctacaagtgggccaaaaagttggccaagttttccacagcccactcgaggcggaagtccctctcccctccccgtctcaggggcggccacacgtcccacacggacggggagagatgtacccgagagagagggcggacaggaccctctccgcacctccccagccgccaggccgccagcccggtgcccgggcctagcagcctccgcggccttggagagcgcgaagtggaggggcgcgcggctctggggggcagcccgagcccagacctgggtcccaaggtgctggcggggagcctgtgacctgggacggggtgctggaggctgaggaatcgcgcctccatgccacgccgcagaggttcccgcgctcgaaaccgaacgccctccagccaccaccactcacggcctactaagcgcgcgctccgggcccagggcacaaagatggagggagcggcgcgatccacccgccccacccccacccaccagacaaaggggcaggccgcccctcccccagccttcttcgcgggccccgccgccctctgctcccctcccctcgggccgccctttggtgacttcctttcccctccaagggcggccccgggacttctcaggaactgcgtttcacctggacgtggggcggggagccggcgcgcagagggcggcctccgggcccacccctaggccgagccggccccaggcccgcgccctcccctttgaacccgcgctcccggcccctggcgccttcccgcccaggcgcccccgcccccacccggtcaagcacgtgctgcccgggccccgagcgcttcccgccgcacgggtgggggctgggcccaccccccgcccgctccccacccccaccggaaacattcctgccacattcctgcaactgcaaggcccagcccgccgctccccaccccgcctccgcgccgggcccagggctttcctgcgtcccctccaccgccggctcgccccctgaggagggggctgggccagggcctcggctgaccggggaggaagaaggggagcagagaaaaacatgagtcacagccgtgtgtcactggagcgcatttcaattccctgcatcacaggaggtgtggaaggccgcctcggggaccgggcgcgggaggtgcgcccgagaaggccccgggccggcctgcagggcgcgccgctccgcctgcgccctttcctcccccaccgccctccccgccatcttcccctttggcttccttctcgctcggtgcaacaagtctttgttaagccgggcgccgggcgggccaggcgtggcggagatggcctgcgtgctcggcccctgccctcaaagcgcttccaggcgacctctggcccaccttttatttttatttacagtcccaacggaagggcccaggtccccaagtgggcctgcgtatctccagaacaccatctaagtcacctcaaggtatgaagcctcccttgggtgtacctgccaacgagccaatcgttggtttcgctggaaggctccaccttgatcatggctcgctggtggccattaataaaacactttggatttcacaagtttcacgtttgaatttcacaagacttgtatctcaccaatcagccacacgcgggttgacactgaaaggcacatgctgacacctgtccgcccaggggaaatctaccatctctctattttagttagggggcggcgtgtaggccgcggaattctctaacgagcgcgtttctcttcaccccctgggcccgcgtggacccccgtccacccccacacgccctggggggggggccgggcccacacgccctggaagcccctagaggtgactctccctgggacccctgtaccagggaggaaggataccgccacccgtcaccaccccccgccagaagctccttcgtgactcctctgcgcgtgccttcccacacctcctccgtccgggactgcgaggagtgggcggtcgactcgagttcgcagcccaggcctcccacacgcccctccctgccgtcagcacccacccgcgcggcagcggcggcggcggctggcgggcggccgcccttttaaatccccgggctcatttgcatggccccgccccctgagtgacacggctggcgcgggcgggcccgtcccccctgcccctgggtcgctctttttaagctcccctgagccggtgctgcgctcctctaattgggactccgagccggggctatttctggcgctggcgcggctccaagaaggcgtgagttcgcggccgctccggtggcttcttttttttatatctataatttaattaaattatttatttattgaggccgcgcacgggccgtgcccagcttcctgcccctcgccatccttcgggggagggggaatatttttgtccccccgcctggctgtgacacataaataccccgcgggggcctgggcggcgagcacgcggcggcggcggtctctgagcgcctctgctctctcccggtttcagatccgcatttgctaccagcggcggccgcggcggagccaggccggtcctcagcgcccagcaccgccgctcccggcaacccggagcgcgcaccgcaggccggcggccgagctcgcggtgagtcgtccccggggcccgcggcggcggcggcggaggggggcgcccgcgcccccgcccgcacgtcgcccctcctgcgagccgcccggggctgcagcgcgcgccgccggctttattcccaggccggggcggcgcgagccggcggcgggggagggccgcgcggcgcgggggcgggcggcggggcccggcggcgcggggaggacgcccgcaccccttcccccgcgccgcgggcgccctgcggggggcggggacccgggaaaggcgcgcggtgggggagggggcgcgcagctgcggcgagcgcgagttgtgcacccggcggagcccggaggagcccggcgcacctcgcgcggcggccgctcccgctggagccggagcccgagcccgagcccgggcccgggtgaggggcggggagagacacgggctgcggcgcggcaggagagtggggggtcgggcgccccccgcagctcagggaagttctggaagtgagggagatggggaggaacccccaaattcggccctacgccctctcggcctttctctcgcgccccctccgcagatgaggccggagcgcgggcctgggtttggggcttcaccccgaccccacctctggcctggcccgcgcctcttcagccccaggggccgggcctgccctccgcccccacaaactggtttcgctgctttgctgggctctgttggaactagtccctttgactccccgtttctattttattttcttctggggctttattttgcggggaggggacggagggagggggctttcttcctctcccccgcgcccgcgcgcgccaggtttcctgccccaaggcgggcttgggtgccccctctggcaggaagtggggccgggtgcacccgcgtggcggtgcatgcggtcggggtgcgctgctttcccgcgcctgcaggagcggcctgcgcccctccccccgcgcgccctggccccgggtcccgccggccggcctgcaacggccgggcgcagacacttgcagagtcaccctcgggccgggtctggagcctgatgcctcgggggtttag

SEQ ID NO: 1197 - DNA, 2380 bp, Homo Sapiens
tcaccttaaaaagctctgtgaccttcaaggaaatagttggactaaggatgaaaaagaacatcagaactcctgataaccttttaaatattagtatatataagaatatagggcagtcacggtagctcatgcctgtaatcccagcactttgggagcccaaggcaggtggatcacctgaggtcaggagttcaagtacagcgtgggcaacatggcaaaatcccatctctacaaaaaatacaaaacttagctgggcacggtggcatgcatctgtggtcccagctactctggagactgtagtgggagaatcacctgagcccgggaagtcaaggctgcagtgagacgtgatcacaccactatactccatcctgggtgacagagtgagaccttaactcaacaacacaaaagaatatatatttatagatatatgtaatacacatttatccatgacttttatcacacttcatgtattcctggtctacacctaatcgatcaatagcttttaaaataatatttgtgtaaaccacaatttatactgtatgattaacttcaaactgaaaccttcactaaacttaaggactcacaatgcattacatatacttttatcttgtaattagaatgaagtgtgaagtatataatgcatgctggcaaggaattgaaaacttaaatttgttttcagattataaatttattcgaaaacctgcaaagccttaatagcacatgagtacatgaaggccactaatactctgaaaatagcacctagtccctgacccatttatcctccatcctccatctgtaccagaaaaggggaacaaagatgttgaatttatggccagttcctcaaaggtctgctgcttcttgataatgagcaaattgttcttttcttaactttgttcttacttttagggaagtccttgctctaattttgagaggaaagtagaattctaactgtaaaataaaggttcttggctactctgatacatatatcatctaaaagtgtaactgaccctgacagtggccctgtctcctaggaccccctcctttctcatagaatccagtacactggagagatggtagagatggtacctgatctgctgctgatgtgatcgctccttccaaaatgtccagattccgattcattaatgccaaagcctcctcacgagacactggtgttagggtggcattgggcaatatcgctgcatgctcataaacagctgcagtgaaagtgtcctggcagctggctcttgagacatagaaaagcaaaattgccacgtaagctggcaactgagtagtcatgctgaagtccaatgagtgctgaaaaacagagcatgtcctggtatttatagaaagaagacacgtggtgtccagaacttagtaccttaaactacggaagttaattaagaaaacgctatgatttcatagcattgttacataacaaaagaccctaccttattgcagtaatttgtgaagattaactcaagaactctatgtacattagttcgctagggctgcctaacaaaatacaataaactgggtggtgtaaaaaataaaaaatttattgctttgcagttctggagggtgggagtcccagatgaaggtgtcagcagagttggttcctcctgagggcggtgaaggaaagatgtgttccaggcctctctccttgacccatagatggctgccttctccctgtgtctcttcatatgctattctccccatgtgtgtgcctgtatccaagttttccctttttgtgaggacaccactctaatctttaacacagggaaagggaaaatcccagctctagctttttttgtcatcgttgttgtttgtttattgttgttgttgtttgagatggagtttcactcttgtcacccaggctagagtgcagtggcgaaatctcggctcactgcaacctccgcctctcgggttcatgtgattctcctgcctcagcctcccaagtagctgggattacaggcgcccgccaccacgccaggctaattttttgtatttttagtagagatagggtttcgccgtgttgggcaggctggtctcaaattgctgacctcaggtgatccacctgctttgtttttatgccaaataagggcagaagaaaaaagccaactgaaggtcataaacccaggggtacaggctcactgaaagactgagactcaatcataggaccaattcgatttagtgcccactgtactccagtataacttcatcttaactaattagatctgaaatgaccccttttccaaaaaagttacattctaagatactgacagttaggacttcaacatataaatttttggaattcatatattttggaatgtcaacacaagacattcaaataattttaaaactttattattattttcatgtgaatatt

SEQ ID NO: 1198 - DNA, 2405 bp, Homo Sapiens
cagtcaaaacttttgaagcatatactcttccaaatttctaaacttcaaattatgttcggccttctagtcccattcctgcctgagtctaacactagtatctcaccatcacatatggcgtaaggcttctttttgacatattttacttacattttaagaaataattctattattctttacaaagtacgtgaaaccacaggtatcaaatatatatgcttacccaaattttaagattaacttacttacatgccacatttaattatgagtatttcgtgaaactaccatatttgaaaggaaattctctaaaatgtactttaaccagccagactgatgttacctggatttaaacaggaagattacacctctcctgcttgtaatgcaattttcacttccatgtgtaacccttaacataactaacatacataaatctagtttgagatagtctcgctcatgtcacccagactggagtgcagtggagcaatcaatcttcgttcactgtaactttcgcctcccggactcatgaacaaccctcccaccgcagcctcccgaacagctgggactacaggcctgcatcaccagacccagctagtttctgtggggacagggtctcaattatgttaacggtcaagccccaggcttgaacgaccctcccgctccaacctccactgaagtgcaagtactgactgctcacaagcgttaagccacctcgcccagtgacatatataaccaaaattacctcaaactaatggccgatggaacgctccttgaaaattcagtccccgtacattcccgaaatgcgcttaaacgggcatttgtgacaggcaagtaagatggctggttaacagcagtaacgttttgtaacgtacagcctttttctgagacggtaggtggctctgaaaagagccttttgttttttctgacacagaagtctttttaccaatgacaaccttaagttacttgctttgggctttatggtggtgactctcagtcttcttgggcagcagcactgcctgaatgttaggcaggactccgccctgggcaatggtcacgccgcccaaaagcttattgagttcctcatcattgcggatcgctagctgcaggtggcggggaataatgcgagtttttttgttatcgcgagacgcattgcctgccagctcaaggatttctgctgtgagatactctaacactgccgccaaatacactggtgcgcctgcccctatccgctctgcatagtttcccttacgaagcagacgatggatccggcctacgggaaactgcaaacccgctctagaagagcgagacttagacttggcgcgtgcttttcctccctgcttccctcgtccagacatctcctcgcatcaaattgcagcaacacgagaaccacatttctagggctgctactgggcctatttatagtctgactgaggttggcatttgctatctgattggctgatggccgtctacccaatcagaaagtcgtactagaatcgcctcatttgcattcacgccacttcccattgtccaatcagattttggataccgaacgcggcgtttgagggccgtgcctataaataccgcatctttcatcctccagttctgtttgtttacttggcgagacttggagctgaggtcatttggagctgtttaatactgaagagctgttgagcactggaaagtgctgtgtaaccctggaaaagaaccgtgtaacgctgcagaagtgtgtggtagctatgccggaggtgtcatctaaaggtgctaccatttccaagaagggctttaagaaagctgtcgttaagacccagaaaaaggaaggcaaaaagcgcaagaggacccgtaaggagagttattctatttacatctacaaagtgctaaagcaggtccatccggacactggcatctcttcgaaagctatgagcattatgaattccttcgtcactgatatctttgagcgtatagcgagcgaggcatcacgtttggctcactacagcaagcgctccaccatttcttccagagagattcagacagcagtgcgcttgctactgccgggagagctggctaaacatgctgtgtctgagggcaccaaggctgtcactaagtacaccagctccaagtaagcctgctaagtaaacgtcatttctaacccaaaggctcttttcagagccacttaaacatactgaaacagctgtgggcttcgtttttgtgtagtttctaaccgtaagggttttttttttttttgaggcggagtctcactctcccaggctggagtgcagtggcggaatctcggctcactgcaagctctgcctcctgagttcacgccattctcctgcctcagcctcctgagcagctgggactacaggctcccaccactacacccggctaatttttgtatttttagtagagacggggtt

SEQ ID NO: 1199 - DNA, 2500 bp, Homo Sapiens
cagtgctcactaaaccttatactggatcaagtgcccactttcctgccttccatgcaagggctgctaaacataaccaacaaatttcagtgactaactgggccaaatgagagatgtaataaattttctattttcctacggaacttaaataatgttttaaattcaccaagcaaggaggtaagttcatctgaccattttccttacaatctaatgtagtaatcattaaactgtcaacggacatactgctgcaatatttgatgcagtaatttgaaatagcattttagtaaaaatcacatccagatacatttcctctccaaagaaaagcagctttaacagaagcctttacagctttaataaaattattggcttgctctaattccatttcaggagggttgtgaggaaaccataaatatatagaattgaagcagaggtactggtttaagtttaattccagaaagtattttcaaattatcaatagcctggtttgcattgtaaatagtaaatgtgctaatgccatgcttatttagaaatcattttaaactgcatttattgataactaaattagaactcaaataatgtattacccaatagtctcgaaacatttaatttaatatggagtgtagcaggttctgataggcgttgggaacctagctaatgatttatgaggtcaccacttagcacccctagtaagaagaaggctgcattttaatgtccctctgcttggatttgctacttagtttttctttaatcaggatagggtgtacacataacttttaggtttcacttgtgcttataaaatccggttaaaatgatcttagtgtgtcttttacacttccttttacattttgaggacatttaatgagctcttttggttgcatttaacatcattcccaggacagggagaaatctccacgccagactcagcgatggaagtagatcttttagcaattgagacagtttactgtcgtcgagaggaagatattgttaatggtgacattcgtctgatttatctgtgttggtggaaatggtaatgcaggcattgtttgagggagctccagaaaccattgttctggggtagaactcgcaactactttgtgtggttcctcaaaacgtccctcactctccgcctccgaataaaatgtttttataaggaaatactagggagaacccgggcccaccgactgtatgttccaggtatcctttctggggtaggtaagtagggggctgtgttccctcccgcgctggttgcgcggcctcttaccgggacctcctcgatggcgtgaggtaaggagtggatcgagaggtctccgagtcctgagctgagcgcgtgtgggccgtgcaggaggtcctcgtgccgcctgtagtccctgcgaggatccaggcccgacagctggtgaggcagcccccggtgcgtgtgcaggagcccagactcctggctctgcctctggccgggccagcctgggtgctgcggctgcggctgggcgtgcagggggttcaggctgtaggggtcgttgacgtgggagtaaggatcttgcgactgggggtagataggctggtagggtggggggaagtatgggggctggaagtcggcattgggggtgtgggacagcggcggggcgctcgtgtagggagattgacctacagtgcccagctggggcaaccgtgccgtcccgttgctggtgccgtcgtgacggtcctagaagagagcgagaggaaaggtaaagaacaaggaatcaggcgtcgagctacaactatccacacaaaatccacttgacaagtctgcgtgggaaatcgcccgttcccgttggctggccgccgggaaaaaatcagctctaagttcttttcaggaaataccctcaagtgaaacagaccgaacaacgcagagaaactgtatatggagggggcacaagagactatttaggggtttctttcaaagagaggaaaagatagaaaagggtctcctggaacacagcccattaaactgcagcgtgaaatctctcttaagcaaaattaaaattcctcctaaatactaaacagcagaagcggccttttcttttcccccgatttgaacctgtctgccactgcgttattgtttattctcttccatttatttggagagaaaaaaatcataaacgttcaaagactgttaccgtttcatgactacttaaatagaaacatatttcgcagaggggctgtaacaaaaacacacgtttaaattaccagcttaaagaaggttttaactgcaggatcggggtctgtctttttcgcttcctctgttaggagcctttttctcgacagagtcgatttatggtttggatagggaaagggggacgtcaagtcaaggtttaaaatagaaagattcagccttattgggtttaaaagagagaggtgcaccccggggctgtggccccccccccccgccccttccaccccagccccaaagggcagaagaaacgcctgactttaggtttctctattgcaattcccttgcaaaacaagcgaa

SEQ ID NO: 1200 - DNA, 2475 bp, Homo Sapiens
ggggggctgtaaggtctttcccttcccacgaggccgtatctcaggttgtctcagtggggggaaacctggacaatacccaggctttcttgggcaggggttcctgcggccttccgcagtgcattgtgtctctagttaatagagaatggagaatggcgatgacttttacaaagcatactgcctgcaaacacatttttaccaaggcacatcctgcacagccctagatccattaaaccttgattcaatacagcacatgtttttgtgagcacaaggttgggacaaaagttacagattaacagcatctcaaagcagaacaaaatggagtttcttatgtcttctgttttctacatagacacagtaacaatctgatctctctttcttttccccacatttacttcatcatatgatatcaacactgactctttcatgtaaaatgtcagtcctaggttccttccacccttgtgtcctgcctgtgcccccaagggtgtaattctttgttccctcttcccatagtcagtgtgtgtgtgtgtgtgtgtgtgtgtgtgtgtgtgtgtgtgtgtgtgcgcgctatattctgacacatcattagaatctaaattaatctaccttgttatatttttctgccactgataatcttctacttagtcatgttacaaatgtattttttaaagtaagtgtttgaagagacagggtctcactgtcgcccaggctggagtgcagtgctgccatcatagctcactgcagccttgatctccttggctcaagcaatcctcccgcctcaacctcctgagtagctgagactacacgtgcgtgccaccatgcctggcacacattcatttttcattatctgtgtctgtatgtgcccagaggtacagataacactaaaatgaaaagaggtggcagagaacaggaagagaaagaaaccagaggagccgatatccttaaatgctgtggctcctaaggactgccagcaggttgtggggctagccagaaaaaacagagcctctgattctagaaggcttggagaaagcgtgagaagggagatcagatcagaatagattgatggaagggaaaggcggtgagggtgaagcaagagaaactcggctccagtgaaaaggacccatcattgcattccagaacgtaatttgcatttcatatgtaaatgaggaggcttcctagaggctggactgggctgggcttagctgagcctttgcaaacagcagggattcaaccctggggaactgcagaccaaagtgagagagggacgcaccgcatctccaggcacatccaaaaaggatggacgagacaccgaagcagaggatacaggaggattaaaggattcaggaaagcaagcagccctccggagaagctgtcgaaattcaagactggcaagagaagcaaattcaacctctcacaccgatcatttctcattccctgaaaagaagagattgtttccccagggaagtgaaaataatgaacttttggaggtactgcttttttgctttcactctgctcagcgtggtcatttttgtgagattttacagtagccaattgagcccgccaaaaagttatgagaagctgaacagttccagtgaaaggtattttaggaaaactgcctgtaatcacgccttagagaaaatgccagtctttttgtgggaaaatatattaccatcacctttgcgaagtgtcccttgcaaggattacctgacccagaatcactacatcacaagtcccctgtcggaagaagaggctgcattccctttggcctatgtcatggtcatccataaggactttgacacctttgaaaggctctttagggctatctatatgccccaaaatgtctactgtgttcacgtggatgagaaagccccagctgagtataaggaatctgtgaggcagttactgagttgcttccaaaatgctttcattgcttcaaagacagagtctgtggtttatgcaggcatttccagactccaggctgacctgaactgtctgaaagaccttgtcgcctctgaggttccctggaagtacgtcatcaacacctgtggacaagacttccccctgaaaaccaaccgggagatagttcagcatctgaaaggatttaaagggaaaaatatcaccccaggggtgctgcctcctgaccatgcaattaagcgaactaaatatgtccaccaagagcatacagataaaggtggcttttttgtgaaaaatactaatattttgaaaacttcacctccacatcagctgaccatctactttggcactgcctatgtggcgcttaccagagactttgtcgactttgttctacgtgaccaaagggccattgatctactacaatggtcaaaagatacctatagtcctgatgagcatttctgggtgacacttaatagggtttcaggtaggtactaatttccattctgattgatagattgagtttgctaacattctgctcgcctagagaactgactcatttgaaat

SEQ ID NO: 1201 - DNA, 2426 bp, Homo Sapiens
ttaacttttgtatttttagtagagatggggtttcaccatgttgcccagaatggtcttgatctcttgacctcatgatccacctgccttagcctcccaaagtgctgggattacaggcataagccactgtgcctggctcaagggataatttctaagaccccctgtggatgccggacactaccgctagcaccaaacaacctgattaccatcaatcagaactcatttctgttcctatcttccacccacaattgtaatgccttttccattttaaccaagcacttattatatactatggccataacttttgcagtttgaggtatgacagcaaaattagcatacatttcattttccttcttcacattttcatagatggaagagtctttcttaccacagatcatagcaacctcggcatatgacttttttctttccctattaagtcaagaacttttatcttgacttttcacttaaaggaagcactttacagcttctctttggcatatccaaattcccaacatcactactcttgcactttggggctgttgctaagtaaaataagggtgacttgaacacaagcactgcaacaccaggacattcgatctgagacctgagccaactacgatgtaactaacagtcggggactgtgtacagcatgggtatactggacaagaggataatttcatcacactactgagaatggcatgcagtttaaaacttatgaattgtttatttctgaaattttccatttaatatttttggaccgtggttgaccttaggtaacagaaaccaaggataagtggggggtattatatacatatatgtatatatgtatgtttatctgtatatgtgtgtgtatatgcatatatgtgtatctttacatatatacatacatacataaagatatagaaggatacatagcagggatttcaaactggtggcccctgaagtggaaatcaatatttaaaatctctctgacttttgaattcgtttacacctgactttgtattctccattacttcacagattcagacattcctgattttttaatgtcaaagttcacatatttgtattaatatttatataaattaactcaccctatgcacacatttatattaattttactaccacccaattcacatttatatcaactgcctggccccataagcatttagttcgtgactctgaatatgcccaggcattaactatggttctctctaggtcatgagtcgtttttaattttttctttttcctggtctgccctgtctaattttgctaaaataaacaaacatggcttttgtaataatggagaaagacgccattttaattaaaaagtaataacaatgtggcctgtggccctctgggctgtttgggccacgctccactggcccccactgagcctggcttttctgggctgctgctcttcctgcctccccagcctgcctcaaatgtgtcgccaagtgagcggctggggtcccttcctttccctgtgactggggtccagtgagagctggcggttggatactgtctgaagaatgggcccttcctggaagcgtttggaaacccagttggggtctgaggtcctttcaaacgctgaactcaagcgtggggactcagtccctggaaatgccaactgctttactctgactgggactgttgatagatatattgcttcatgctaatgtggtattatcacaacacagttccactctcagctactgcaagtcactaagacaacatctggtttgaatcttttctcattatggcctaaaaaaataaaagctgaaatccaaaccactcctttaacactctgtctctcttttttcttcctctcccttttctctttcttttgcactccagaaacttcaaatgagggggaggagtttagaaattgtccatcttatgtgcccttctccccattttacagatggggacgctgaggcccagggaggagcagtgacctgctatatcacaaaccttgttaaggtaagcagctcaagtctcccaggtttcttatctgcaagccaggatggcactgacctctccccacatcacctttaagggaccccctcaaggggcagacaggatggggcatggtgatcagtaaggagcctaggcaagcattagctgttgccaccgtccaagggcttctagttaattggtagcagaattaggtctttctagaatctgagtcctctgatttccaatggtaatgtactctacaatttactcgggaggaaggactaagatcataacactaatatcttctaacgtgctggatgctccactaagtgttttatgaatagtgcaacatcacagaggagagcaacgtgctggagcccagctacgaccttgagcaagcacatcactcttgaaacctctttccacttgtgaaaaatggaaacagtaatggggtaacgagattgttaagagga

SEQ ID NO: 1202 - DNA, 2422 bp, Homo Sapiens
ttgtccaagggccataatcttttatggcctcaggttctccacatgcaaaatcaggataataatgttctctacctcatgaggttatttaaaggaaacggtgagatcatgtgttttgatagaatatattttaaagcctctatcatggttcttgacacataggaggtgctcaggaaatattaggtactattgtcattgcaacaattaggaaaacttctgccactatttatatgtgatagaattgagggatattagatctggaaagtagctgggccattgccttggatgacctgctcattttatgtttgaggaaactgaggcccagcatgcttgtccaagttcacacagttaattagtggtggagctaagaatagtatgagtctacattgaaaggaggccagctgtgtttacatcaattctatttaacttctttaattaagctgttgattccttcagtgacgtcacccacttgttttagaaatgagttacataagcgcgtctccctccactatttatttgctccctctgagaagagtatcgggctgtcccaaaataagcaaagattcgagagaatacccctgtttcattgcttctgctccctgctgctgactcatttactcctgggcctctgagctcgctcacatcaatcacccatcctcagaagaacacactgcgtccggcctcacaggccccgtgcagctggagctctgcaatgccacccctgggaggcttcattgcaatgcaaggaaaggccactgtcaggtcctcccctctgcacagagcatggtacccagctaatgatcatgtccagctaaaaacccttttggtttttaaaattcaagtcaggcaatcccaagaggaacggcatccaaacagatgtgtcttttaaccacacagttttaaaacaactggataaaaagaacatttgttccatcttcctactaccaggcattcaaactcagttttaaataggtatacaaatagctgggcatttcaggttgatgatatccactctcagggcaagtggctaatttccttcctaagctcgaataataaatgcctaatcatctttttatttttcctaaacagtaatgtgctctgcatccagtctgtgtctgtctgccggtgcagagctgacattacctgatcctatttcacagagaccctgtgtttgctagatgtccaaataagtggttgattcagggcaaaaatattagtcaagccatttgtttcactcagttaaagaatcagtgcaggtaaagtaggcgagtcagtagcccagcgtaggcaaagctgcgtgtcctcgaatgatctttccagccgtcattcctgggagggctgggcttttggggcactcctaaaggaactgccttgggctcaaggcaacattctctctcagcagcttctccttccccatttccagtggttatctcaactacttcaacaggcaaccttaaagccagccagaagcaattttagtttatcaagcttgaatgtgaaaaggagcaagcaaagacctgagctttctcttgtttcttttcttatgagtaacatgtgatcttttaaaaattattgtagtaagaacacctaacatgaaatctaccctcttaacaaatttttaagtgtacatgagcctttaaaacaaaacaacctgactttttaatgatcgccattctaactggcgtgagatggtatgtcattgtggttttgatttgcatttctctaatcaccagtgatgatgagctttttttcatatgtttgttggccgcacaaatgtcttcttttgagaagggtctgttcatatccttctcccagtttttaatggggttgtttttttcttgtaaatttgtttaagttccttgtagattctgtatattagccctttgtcagatggatagattgcaaaaattttctcccattctgtaggttgcctgtttacaatggatgccagagaggatgtggagaaataggaacacttttacactgttggtgggagtgtaaatgagttcaaccattgtggaagacagtatggtgattcctcaaggatctagaaccagaaataccatttgacccagcaatcccattactgagtatatatccaagggattataaagcattctactatacagacacatgcacacatatgtttattgcagcactattcacaatagcaaagacttggaaccaacccaaatgcccaccaatgatagactggataaagaaaatgtggcacatatacaccatggaatactaagcagctataaaaaaggatgagttcatgtcctttgcagggacatggatgaagctggaaaccatcattctcagcaaactaacaaaggaacggaaaaccaaacaccgcatgttctcactcataaataggagttgaacaaatgagaacacatggacacagggaggggaacatcgc

SEQ ID NO: 1203 - DNA, 2365 bp, Homo Sapiens
aatgcaactattaatgctatctgttataggctcaaaacatttcatcacccccaaaaagaaaccctgtacctattaaacagtcacttgcactctcccctgccccaagcacctggcaacagataatttgctctctgttgccatggatgtatctgaatatatacccccaaataattgaaaacaggtattcaaacaaatacttgcatatgaacgaagatccaattttaaatgggcaactttgaaaaaaatcagtctgtaggtcagttaatcttagaaagtgagtctataaagaacaggctgggtggccacaatgcccattgaatttattaaaacctgtttttattttgtaccttagttcagactgttcttagtgccaaaagcagaatcagaagatcacaatggcttctagaaacaagatgaattaatatgaatggtgagttctgagtgagccaggtcataactttcagtaagaaaaacacagaatccaaatttcattgttttcagcttttgttttaactgttttataattgggaaattttgccctcaaatgaatactattggtaaataatcctttctaattgaaggcttaaaatgtctgggcaaaactaaaaatgactccctacccaaggtttagtaatagttaaggcattcaaacaggagcaggctgaagaatcgtcttcaggtttggtcttagcaaacctgcaattactcatctccccatccagacttaccctgaacaaagcaaagggtaaccaaagtgcattaatcgctcactgatgactcaagataaacaaaaaccttataatctttgtttcaaatagtgtgcattgagatacatagagagagagagaaaaaaaaaacagtccctcttaggtggtgaataaccatttacccatcagatcttctccaagtcaagagttccactgcctatgtcaggcttttggacaccgcacataaaacaaattaagctttattaacttagtggaatatttggaaatactaattttacaggtgcatgagagaaaactgcagttccaagtattagagtaccattaaatataatacactccgtatgcaggggcagttatttaatattaaaccaataaaacattaccagtgccggtgagagttttggttgttgacagcaggctaggtgtcccacagccatgccgtctttctgtttgcaggccaattttacacagctgctttcttctggaaatcatgcctcatttgaagccttcgcaagtatgacaaatagcctctctaagccttagcgacggtggagaaacttgaaaatatttaggagcatttattaactagaatatgaaagaagatttagttcaactgcagcttttgactgtgtggaggtcttgttattgtaagaaatgctatctgtttgggcgtgtatatcttttgcaggacactgtgtaaaattatcaccctgagggcaaagctaagtttaaactgcatagaaattctaacgttgatctataagtggacaaaattagaatcaagtctttactttcaaactcagctgtctggtggtactgctgatccacatgctgccattctacgtatcacaaatgtcagatagagctccttgtacagggagcttcaaatctgtgcaggaatttaggatttataggaaaaagatatagaaaaaaagaaagactaggtgctaattgaattgttcaaaccaggcttgcaacatgcaaagcacactgagactaaagtcaggagaggtggacccagctgttggagtttgggatgaataatggaggaagggaggacataggcaactggcaggggctaaggatggggtggggtggctctgtgcacacaacatgacatattttgagaaaaagtgaaccaatatggctaaagtggagagttcatgaaaagtccatggaggcaagtagaaggagagaaatgtagatacattgaatggtcccattacagaggctcttgaacaccaggataggatatagatcttttatttaactacaggaaatgtggggtgatgagggctttgggaacatgagtgtgacataagaaggaagggtttggggaaattccattacaacagcctcttagattaattgacatggagagaattgagaaatgcccagtatgcttagaggattgagtaatgagagacctgcacgaggttggaattggcagtgataaaaaggaatggaatgttttaaagaatcatttgaaagagagaaacattttgaaggaagtatttataggacctgagaactcactgggtgtagagagtgacgtgtgggcaggttcaggcggattctgggactttgagcccaggccacttaaacaacaaaataagaaaactcaaagagtaaactga

SEQ ID NO: 1204 - DNA, 2356 bp, Homo Sapiens
tatgtaacgggaatgtttttatccattgtcacaaatattacaggagttataattcaatcttttaatgaattactactttgaaatagcaggtagctgaaaagacaatctgtagggatatgaggaagtgtccatgaaatttcaaggttacatatcctactatcattccagaaatagtatgcttgcagtttattttttgtaaattcaagaaaatcttacaaaattcttatgagactgagtgattcaaaacctctttcctttcaggctcatgcaaaattctcacaggtgatctaaaaatgcaaattttgattcatgggacaagtagaatccttcagatcttgtagttggcttgagtgctagcatatggcctatagtattaaggcgaaatggagaaaaaagcgtgaaaagacaaaagacaatttatgcgagcctcaggacgaaacttggaaaaaaactcagtttctaccttcttaattcaaacagccattaaaagactaatgactacataatatagcattaaaatatccatgcacaaacacacacatttttcattattttacccacattatgcatgtgacctctgtacataaaatataaaagaatgtcagaaatagcaaagttgccaaggttacacagagactgctattttagatgatctaaaaaattttaatgatcgcacacatagatctgagagatgcagaggcacacagctgtagccttagaacccagctttatttaccatctgtctgttagcaccatgaatcttggctgagagctgctctgcagatctgagaattctgtcttcttttccaagcactctgggctgagtttttcaggggattaatggaacctagaagtaatgtttccctgctcccaaacttggggcaaaacaagggcaggttattaacttcaaggcaggttattaacttagttatgggctcttcatatgcttttgcttgtaactgtgtggcagactagacatttagtcacttaccttctgtaagggaagtcacttaatgtagatgctcaaggaatcccacgtccaaatacggtcattgctgaatttgatgggagaaaaaaaggactgtatttttgctggctaatgcggcatttctggatgttcattaagctgttaaaaaatgtgaaatgatgactcactgtgaagccttcccaacccccttccctgctccaatttgcctgcggcttgaaggaatgtatactgacttgagttaaagaagaaacttgtggtttccattatagtctgtaaacatcgattgctgaaagcctcaagtgtgctatcatctcctgccacacacatgctttatatacagttcatcttggaaaacagattgggagagcaccgtgtttacaactccagagtaacccaactaatggggggctggtctgcctgggggtctcgagaccatcactgttaacagtggaggtcccctctgatgtcttttaagccaaagtatcaagagagaagccaaagacaagcctcattaaagaaagatcttcctggtacccacagtggttctttgctgctttatcatcagcaaaagagacataaaaaaatctttgcttctcttttaggttgtatccttaggccttattcttgatgtcattgaaaagttggtttatctattatttccaaggccactggcaatgctatcatttttgattaatgattagtttatggctaagtagtattccatggttaggtgatggttatattgaaagcccagatttcagcactatgtaatatagccatgtaacaaaattgcatttgtaccccctaaatctatttttaaaaagtttaatttaattatgcaggagtggcagcagaatgcaaaccatccagggaattattctggtagtgcctgatggatttaaataataccaagagaaagactgcagagggtatcctgagatttgcatgacatcctgaccagggttgataagaagagctaaatggataagtttcttctggaaggagatatcatggatgtggtatgggtagaaaaagtacaagatgcagcatcagaggattcgaatgtgccttctggctttgacattcagtggctttgtgacctagggcactgcttcttagacattaacatgggtacatatcacctggggggtttgttaaatgcagattctgattcagtaggtgtgggtggggcctaaggctgcccaccctggtcatcttgcacctggctgtgagaaatagagaacctggcaaggctcctaacccacgtaagtctcagtttcttctttaataacacggggtttagaatgatgccaaccttccagggttattgggactcatggcactggtaagagttcctggcacaggcac

SEQ ID NO: 1205 - DNA, 2474 bp, Homo Sapiens
aagtttttttgcaaatatttataaccccatataatctattaccatctatcaggtacattttctaacttatatgttctgaaatccccaaatcctgaaatgttagaagtaaacttgggaatcatttagttctaccacccatttaatgatgaaatttcaaatcagatacttttttagttgactgattgacaagctttctactcttttttaaaaataatgtttctttacaagctcctttaaattatctttacccacattcactaaaagcagtaatgaagtcaagggtcactgttctgggcagatgcctgtggatatcagattcctaggaagaccaagtttaggaatttagctttggaggtctaaattccttggaagcaaccacattcatgtccagtttctttagacccatgagctcaaacaaaaaccttcttctgaggcattacccttttgtttgtagtcatcattagtactcttgttatagcaggtcatttttcttgctgccttttctgctagttttactttttttgaaatacataaaattgtttgggatataaaatcccccctctcctcagccttgtgatttggactattctctatcacatactgaaccttttcgtattctttggaagcctgatggcttgctctagaattcagcaaattgggcagagtggatctttcaaaggcaagtgagcattgtgagtatcaccttttcaaggtgaagagtgtcctcttattcagagagcactgaccctgagaagtcacttactgtttctgctaaagcagaccttgagctcaggtgttctttagatgtgactctgaagctgagtttctccatttcctaagcctgattttggacaaactgttggacctttttcactctttgctttgcccctctgtgcaatgggaaccaggatgccgagttcagtggttgccatgagagtccactgaagcaatgcgaaatattcagtgcagtgtctggtgcctagtaggcattctacagccttgatgcctttggggcaggcttactttagaagttttaagaaatctcaaaatgagttctatgatgtttgccgtgcttggacacaaaatgagaaacagaaaatctgccttctcaccctatgggtggagtgttgctcctctatattttaattctttttaataagaaaagggcgtcttgaatgtggtgggaaagggcagaccacatggtgggaagtcatgtaacacaagatacactttattgcatggcgtgtttctgtaccacagatgtgcacacagatgtgatcatcaacagagataactagtttacaagccctccctggaaactcctcatcgtttttagtagaaaagtgattttcagccaaggcctgagctgaagctcagcccatgattaaagcatttccaactgttccacactgaaaagaaagaaaagagaaatgaccagcagtggttttccagccaaggtgtgagaccagaggtcacctaaaaggcttaagtctattaaaacaagtatctgctgtggccttttctttctgcctttccctccttccttccctccctctttttcctaccttcatccctactttcttctttcatttatttctttatcatacattttttttctcctgctctcttcttcttctttctcctctctccttcccctttattcttcatagaaaaatatcaccttatgtcaaggaaacactgagcaacatctactcatcgttgagcctgttaatgtggagagggcatatttgtttactttctaagttgtgtaactttattattattatttttattggtgatatgtgatggaagttttatgcaaatgtctaaagcagcagtttagtataataaatacaatctttttaggattcaaggaaaaacctgagttcaaccctggttcataattctcaactatgcagtattctcaaatacagtagctctgcggactaaataaaataaatgtatgaatacaaggtatctctataatacatatggaactacagcttaagtctcattctctataatagaagtagggcctgagaaacagattcaggtgcatgtcattttgggtggtaaacatctcaggaggaaggggagtgaaggaagcagatggagcaggtggaggagctgagcttaggatgtggtctcttctggagtctggatttaccctaatcccacagagagctctggagtgtgaattacacacatgaagtttgttcctaccttgatgtggttggctggtcttttgtattcttcatgtccattagcccttgcaggtgggctgcccctgggctgggggtggcgaggtaacctcccaggcaaatgtccaagaggaaatctctggagaagggggcagttatgagccattagcagcctccgcttgcagcacctggggcagaggtaccagtctggtaaagggcgttggttgtgatatcagcagcatccactatggggctcaataaatggtagctaaa

SEQ ID NO: 1206 - DNA, 2412 bp, Homo Sapiens
agggagcttcaagaaggaaatagtggctggtaatctttaaactatggaagcggtttaagtttaaaaaatattctggctgttgtagccatttggctcttagcaagatctcttgcaggcgcttgagtggaggaaaagatggaaggtgtagaggatgatattggtcttctgtccacatccctctggaagtcactcgcatattccaaggactgcttattatgaacacctgtaactccttgcttggggcttttatttattttcattattttatggctgaagagtacccttagcctaagcacagagcaagccaaaatgacagagagtttacgtccccagacagctctgaaacaatgacaaacagatatttgataactaaatatcccaatccactggtcctcagttggaataatgctgaagaatgtttcacaccgtctctcagagctccccagagggatcaactggtttgataatcttcaagaacttgctgtcctgtctttctctgacatactcctctactcccctaccagtgtttctgggaatcacctaccaaacaaattactcactcttgaatccttgcctcagtggctgcttctgggaaaccaaaatcatatagaagaaaagagttagaccagtaagtataaacttagtgagaacagctgaaaaggagtatcaggaagagaaacacagtcaaaaatggcttattataatcaagaaagagtgctaagcttatttgactgagggtggaaggaatataagagacagaggggagagattttataggaattcatatgcagaaatatttttttttctgatgctgttggttaaaatataaaaggagaaaaaagaaaagaaaaaataataaaatttgcattataaaacttaggaaacctctttctagataagataaaggcacaaaagtttcctcttcaaaagcataaaagaagttctgatgttcttggacctttgtgtgtttaggaatttccaccatctctagaatccgtttaaccactccatgacacatttttttctctccagatgtaaaaactgaggagtcagttgtcagttgaatactctagtattattttctcagcaattattttaaggaatgcatttgaataaaatgcagttttggcatcattttaaaaaatggatgatgatttatgcttttcttgcggggacaagatggctgtgggcatgagtcatgactgtacgctgggaagattccgatgggaaccttgcttttgctggttgagccataacttacacggacttgagactgtgcgtggcttttattaacatgttcattttgcttgttaaggctcgagcttcatctttttcttcccgactaaagccctgtttgtatttcacacacacctgattcaaaatctgtgcttggaacccagagtggcttgggaatagtaatttggaaaaatttgattatttgtcagttaaaatggaatgatgtgttctcagctgcagctgggaaatgggctatttctctgcaggggagtaaattcaaatgatagacaaagttctaactcttccaacatccctgtcttcgtggagcaggtttggcacaaatcaaaattgtttataggccaaggaaggtacaaatcatagcacagatctgtgcttttctcaactgcataaagagctttcacatataatttttctggtgaaaaatccctgtcccggagcagatgttccatggaaacaacagtgaagtttttaaggggccaaggtgaatgaactgtaagactggttcttgaagttttccaggttaaaaccatctctctcattgtccttggaactggttttcaaaatgtgttttacagcattgcttctcagattttaacatgcatacaaatcacctggggattttgttaaattgcagactttgtttcagtagttcttgtgtggggcttgagatgcatttttgataagctcccaggggatactgatgccgatctatgtttatccctgaatcctactttgagtggcgagtaacagagggatatagaaagttggtcttgaaagattctctccaatacaaagattctctagtctaataagttcaaaaaaattcacatttttgtctttctctctagaattccgcaaattaacaaattaaagactctgagaagatttgcactgataaagtctgcagtcaatgctgtctcctaacaacctatggaatttgattttgtgaaaggaaaggataatctgatgtgcgctattcttgggaatatttgttcaggcacttaaacagactgaagggggatttcagaaaatgtttgactctctttgtggtgacccttgcaacttttctcaggtgagtgttactgcttctccaaataagcaagattctaagtccagctctcaatatccccagtagaataataaactttccaccta

SEQ ID NO: 1207 - DNA, 2464 bp, Homo Sapiens
actctccatgatcatgtagtgttctatttagaggatcccagtgttgttattagagcaccttgcatataccaagtgctcaataaatgatggctgaatgcagaataaaatcattactgacactttcttttttaatccccaagggcatggcacaagtttcaataaataccaggtgatttctactgaaaataattttactgtataatttacaaagtgcttaagtatccactacctcatttagtccttactacagttctacaagctaagtagttttatccacattttaaggtgagaaaattacgcccagagaagttagatgacttgctcagggtcatcaacaaataagacatcatgaagggaatgaattcaaatttggtgcctttgcatcatccactttttgtgtagagttgactggtcaaaagtctgtctctcatttacaagtcaaggtgccaggcatacagtcttgaatgttgagcctcaggcctccaatgagcaatttgtattataaccaaatagagttgtttggccattttaggtcagcatttatggtatttacacctatgaacctacccccttttctctttacaaacttataggttgacaatttttttgtgtgaaaattcactgaaatgagattatctcatttttgcctcttgatttttggtgtgctttcttgttcttgtttaaaacatttggttttgttttgatattaagcttcagtgtcagtcctgtgaagacgtaagatagaagctatacatgtacaacaatataatccatacttccaaagctacaataagcagtaacacttttggagcgaaaaatcttggtaaagcaaacaacacatgttttggggtttgagatctaggtttgaggcctagccacagcactctcatgttctttttgacccaagccaaatcactcagcctgctgagatctcagttgttttttttcatcctggacaatgggcatgatgctgactgtccctctgggtggttctgaggatcttgggaggatggatataagtgcaacttaaactctggagccctttacaactgcaaggcagcattattcactcaaacataaaaataggtcattaagcatcatcaaagggaaaagtaaatgttcagggatcatctctgctgcactgttgctggggaaagaggctctttgtccctttaagagctttcagacacatctctagtcacatcctaaaagccttcctagttgtgtagcttaggtgcatccggtagcacagccgtgttctgatcttcctggcagatgtcataatttactgtcacccccatgcaggaatgcagggcgaggggcccccatgccggctctgtgatccattgcctgacaagtcctgagtgtcaacctcaggcaggcccagcggaggtggaacaccatttacctgatagtgcctgtgataaagtgggcaattagacgcacttggaaaagcctggctggaaactggctggcatttacacaacattacagccaagtcaggcttcataaaagttaatggagaaaaatgaagtccttcaagatctaccttgctctctgaggaagtcaggaacacaggactctgtagctttatttctttttgtgtctctcccaccttttcactctatttcccccagacagggtaatatattctcattggagatgggagtaaaggaaagcgaattgagagttgaggtcttaagtgtttgatctcagaggcatgttatttctttagtcttcaatcctctctcttcccctcctctctgtctctctctcacacacacacatgcacacacacacacacactctatacttctatagagtatacacactctatatttctctgtctttctgtctctgtctctctctcacacacatgtgcgagcacacacacacacaatcacagtgctaggatttaacttggcaccttggcttacaatttgcctctcactggagtttctggagtttggtgccagttcaagagcatgatctgtttgacatgaattctacagccctctcttcatttcctcctaactggatagcttcagtttgccgatgattaatgagtctggaaggtgagcgacagttatcttaagggctctcaaaagtttatttcagagactagccaaactctcctgctacattaactgcagcgaagtttcctgtttaacagcccatggaaaataactgcctgacccccgccccccccccaaaccaagctgccatgagcgcagctctgtttattggccaacagtgtgcatgttctctctatcgcttcctttcaggcagacgaacattttacctatgagaagtaggaagtccattgtgaggctggtccaatactggacctcatttggatgtggaggatttctgaaattggaaagtcaggactgatctggaaaatgtgcttacagatagtggaacaggaaaatgattcgctccccaaggccagttcctcctcctc

SEQ ID NO: 1208 - DNA, 2429 bp, Homo Sapiens
cacaaatattcatgtttatgggttgtttatatgtgcatttacatatatatgcatatattattatgatagcttaataggaaagattcctgcatattataaaacttagatttatcaccaactctagttttatgacattgactagaaaggaaggaccagaaataatggttctctttagctttagattgggtgatttttaccatttatgtatattttatttgattggcataatatagtggagcacatgagcaggtcatgtacataattctcttttttttccctgaaggccaagcatataagaacataagagtgaagttctaaaagattttgtagataaatgattgcaataagatgactatcgatatttaggtatgttttaaaaggacagaaacttaatttgttgtttcttattgtattgtttctttaatatttacttaattgctttcattattaaatacctataattaattgattgcatgaagaaagcaagaaataagtgaataaaaaatatgtctataccaaatgacatatataaagtataaaacaatgatcagttagatcataaatattttagcttctgcagttcatacagtctctgttgcaactagtcaactctaccattttagagcaaaaacaggtatggataaagtataaacaagtgagtgtggctgtattccaataaaatattgtttactaaaatagtctacaggctgaatttatcccatgggtcatgctttgtcaagagctgatttaaggcatcaagggcagccctttattctcaaaataaataattagcttataggtattttaataatttgcaagacttcatgaaaggatcggctcagaggaaacacaattcacccaaactttctactgacaagtcatcagtatatagatggtgtacaggaccaagcaggcctttagactttctctcctccctgccactaaattccttttggccttgctgtattttatgagttattcttgtttccagcctaatacgaggaaaatgggtagatggcataagaggacattgaatgtactgaaggcagcccaaatattccatgcattagtcacttcggatatccagtggagtgaatgcggcattcattaatgcccaatgtcggcccgggcaaagtccagacagtctgctggcagcaagaaagctaaaggcaagaaggcctgtgtcgattgtcgtctgtacttacgaggctgagaaacagtagctatgaatcagcctgtctgagactctgctgtcattatttgcagcagtaaggaagataatattttaaaaagctttcaggaataaaatgagtcttaaccactagaggaagaatcacagtctgcagctacattgcctagaggcttaatgatgattcattgcaaattagaccaattaagaataccccccatattgtagtcttgagtggcttagataagatcattggttccctttgactcctgggatcctaaaataaatgggatctcagagatttctggttcagggcttgtggaatgttagaagtatgaggcatctcactggagatctggtcaacccatttctttacagatgcgtaaactgagctctggtgaggtaaatgacatccagtgattcataattagtcggtggtgaggtagaaattgagccagcactcttgattctgggttgatagtttgattcttttattaagacaattgttatgtattcaaccaatgtagtttgcacattgttttccaaagtgatttcatcagagaaccccttttgtttcctcacatggttcagagaagaccagagttctccagaacctacttcaggaaactctttaatgactacccgacaccttcaagccctttcaactccacccacacatgctgttttcaagtctggaaaatgagatccaaagagactaggttgttggctcctgaccttgcctgtatattagaagtacctacagatcttttaaaaattccaactccaagccacacccagaccaataaatcacaatctccaggggcaggacagagacatcatattttttgacgtttcccaggtgattttaaagtacagacaaattttgggagccactgggacagggcatttctacctctgctatatctcacataggaaggcatcatccattatggtgaaaacatgatttgaggacattagaagagatggaataacatttcttgaaaggatgccctgccaccattgtgaacacacatcagagtagttctgaagaacaaaggaacaaatataggtgaaagtgctctagaaaactgaaggatttatataatatattcttcttttattttaggaggtattcagacttgagctagctgtgaatgctgttttatctaactatttactaggaagaattattctgaaatcagagaatcagtaaattttcaaaagcacttaacttttgaaa

SEQ ID NO: 1209 - DNA, 2431 bp, Homo Sapiens
tatagatgagaaacctgagacccggaaagtttacctacttgcctgaaatggacaatggcaaagccatgattaaattcccaagttctaagaccttgtccaatcccccagtgccctggccttataagaagaaagtaactgatttgggattctccattcataccttttcttttttcttttcaatgtaaaaccacctgactgaacttggtttttaataaagcaatttagagtcacttgataactcctgcattgtaattaatatccttctctcttttttttttaaaccattccaggggaaagaagggagcaagacagagatttaaaaatatatatatgtatagtgccgggcccagtggctcaggcctgtaatcccagcactttgggaggctgaggcgggtggatcacctgagatcaggagttagagaccagtctggccaacatggtgaaaccccgtctctactgaaaatacaaagccaggtgtggtggcacatgcttgtaatcccagctacttgggaggctgaggcaggagaatcacttgaacctgggaggcagaggtttcagtgagccgagatcgcaccattgcactccagcctgggcaaaaaaatgtgaatctccgtctcaaaaaaaaaataagaagagatttagagacagaaagagggcctgggtctgcaatttcttgttcttctgtgaagtaaacttttcaacttaccaaaaacacagcatcaggaaatgttgtgtctttaagtgtcagcgtgtcccttcctgacccctgattcatgtctgcccatctgatgaagttatcagtggcttgcagcctgtacaggtcaggagggttccaatgacccaggacaccttcgccggatgctgtggctgaaaccacagcatttctggcagcaaagtgaggggtgtgtgtgtgtgtgtgtgtgtgtgtgtgtgtgtgtgtgtgtaggtaggtaggaggagcaacttaaaagagagactttagcatgagggatgattatttctcaaaacccaccatctaggcctctgtaggcaatattctgaattcaaaatgactttcagccaagtcgtgtttgcacctgggaactgtgagaagtattgaaagcttcataaaggagaggaaacctgaccacgacaggaagtgacttacagcccctgaggctcagatgtattgacataaggtagtgaagtaggaaagaattacggttttcaaaaagaagtaggatcttggtttctcttttatcccagtgtgatgtgtgtgtcctagaacaaaatcctctaaccacagtgcaaaagtgacattcatgcaacaggagtggtctaaatcccttgcctttgtgggtctgatacagaggaaagtcagaatttcctctatgacttgttcatcgtgtgtcagtgttgtggtttccaagtgctgtgcaaacctgattttccaagttccaggtgggctatgtgggtgatggcagcgtccaaaagtgcggaagaaatgagctaaagccagcaagttacttggagactgaggttgtggctgcccgattcatagtagtacatttctttgtgtgcacaaattgtcagatattcttattctctagcatttcttgttgcttgattcttctttatgaacatttcttgttgctccacttgaagcaacaagggatctgatatccagcagcaggtgagtatacaaaaagctgagtatgaactgcattgctggtgtgtgaactgtcttggaagaaccatgtcactggaaaatttgatattcttttgaaaagatgatgggccttaccagtgagatgtctccactccagaggaagctatttttttaatgcaacaccttgcctgacatactgcttcaagatcaatctcaggagaatcttgagtgtagcaaaagcattctgcaccatttcccagcaagtgatttcataataaataagaccattgaactttacctcttgagccaggcctcataatactaatttctaccagtgttcttcacatgtagctggggtgaaatgtgctcagtttgttttcccctttcagttcacttcttttcgtctccttcatccaaaacccagtgttagagggacagtttgaaacaacctgaagggatggcatatgatgacttttgaggccgttcccttgatccccagatgtttccctgttctgcatgacctgccatttgggggtgagcgggggaagccagtggaataaatatatttctatctgcaaaaccgagcactggctttgaattaacatgaagggacaaatggaaagcaaggtgaaagtatatgatgtaagagagttgatcaacatgaaaatactggtagaaagtgctgtaacttcttaagcggcttgtacaggagaaaaagctgtttatctttaggtaagattggctaaacatcgtgggccaagttcaggccccacgtacatgtgg

SEQ ID NO: 1210 - DNA, 2460 bp, Homo Sapiens
cctgtaatcccagctactcgagaggctgaggcaggaaaatcgcttgaatccggggggcagaggttttagtaagccaagatctcgccattgcactccagcctgggcgacatagcgagactttgtctcaaaaaaaaaaaaaaaatggataatttttattccatttgcctcaattcctcataagtgccagttagactcctggaggggaaaagaaatgagtggtagaattcagtcaacaattcagtcacctgaattcagaatggcataaggcagtggttttaagagatatttgcgcccccaggagacatttggcaatatctagaggcattttttgttgtaccaacaggattagggattgaggagggtgttgttaccagcatctagtgggaaaagaccagaaagactacaaaataccctacaatgcatcatccaacccaaaatgttgaggtaatgacaatgttgggaaaccctagttttaaagatctatgccaaagtgttaacagcagcttgtcttctattttctatatttgtaatttttctacaatatttgtgtgttgctttactaaaaaggaaaacaataaaagctacttttacttttaagacaaagtggccatagcatgtcagaagttcagatgtggccaaatgttggtgactgttgataaagaaaataataaacctggttcttaccaacagcccttggcactctttggaaccccccgtggaatgaaaatagtgactaagaggaagagagattggatttgatagagtctactcatagacatgcattattaaaaaagaaacttagcaaggcaacccgtgcctagagacctagcctagtggatttcacgttggctgactttttttctgttcactcaaatggtatgaatttttagctgctgacaccactgtatgggtggtgtggggcatgccagggagcatctagttctggctccataggtttattatggctggccagtcctaattaaaagactccctttgtcttgtcttcaggacttccagacatggaactggggctttatttttggctctgggcatctatgctgcttcctgttatgttgccagattcatacgtaagctaaggcagccctagaggaatatttccctccctttattcttattccttagtacagttctggatccacagccaatcaagcgtatcatagaagagccagcaactctgacgtgcaaaacgcccatgtcctgccacccccaacatgctggtatttttgacagtcctcaattagagcagtacggttaacttcagcctgtcatttgtgtgggttaagctgtttgaaaaatccttgagggatcagccagtggtgggaggatgattttcctataaacaaatgatggaacctcgatgtctggaagatactagctgtggtttggttcctggggccttttgaggggacagaaatgtcagctcccttcttccttggctctctgggctgtctcacagctgggactgatgctctccattccagcattggaagaccctcaggaggcctccggaccacagagatatctggttccagtttcattttatcattgctagtgctaaaggtgtaacatttatccccaagtgactatataaaataatttcttcaagggagatcctgggtatgaagttcatataaacacttcagaatagctagaaaagtttattttgattttagaataatgtttcacaaggactgagtcaccaaaaccactcttcccataagtccatttcactgggagaatatttatacaaaaatccttaatattggggtcgtgggagggaaagtgtgcagataatgtaaaaggattttaattccgaaagaaacaaagaaaaaaagaagaggaccagcatatccagttttgttttacgtgatctgaaattttatctgatctctcagtagattgttaccaaaatcctgatattagaaagaagtctctatccattcacatataacatgatagtctatgtagaaatttgcaagaaatctacaaaaaagcaccagaattaatacatgagtttatcaaggtcacgggatacaagatcagcatttaaaaatcaatcatatgtctatacattagcaatcaactactggaaatcaaaattttaaaaaataatacggtttaaaaattacatagtctggacatggtagctcacacctgtaatcctagtactttcagaggcaaaggcaggaagatctcttgagcccaggagtttgagacctgactgggcaacatagggagaccctgtctctataagaaatttaaacattagccaggtatggtggcatgcacctatagttccagctactcaggaggcagagcccaggaggctgaggctgcagtgagccgtaatggtgcctctgcacttcagcctgggtgacagagcaaagtcctgtctcaaaaaaacaaaacaaaaacaaaaacaagatgtaattatgtata

SEQ ID NO: 1211 - DNA, 2489 bp, Homo Sapiens
caaacttggaatagaactctagatcatagtggccaaagaaactgactttgcttgtaagcaagttggatcaagatctatatgagagctttggggctaagggaaataaagcattgtcccaagaaggaagactttgccttgacaaaacattctcttacaatgtgattctcctaagaaaccataaaagagcagttagggatccatccatgcattttaatatttgaagagtttcagactgactgcatgtttgacagctataggaattttatttttataagaatttatctataaaaataaaagtatatctactatctctaaatctatatatctgagttttaaaaatatagcttctctttagcttttgctagcatatgctgtcaaactccttcatgctgccagactcatccaaaaattaattcttctaatgcatgccatatttcatgttgttttggctgcttttgtacattctgaagaaaacagggaagataatggtttccttttccaatttaacatatacatgcgacagagaaatgtaaggatgttgcactcccagaggatcaaacctaaaatgacaatagattcgactgatttttttaaaaaagaatcctactttatgtaatctggacaataaggcacacatggttggattaaaaatattgtgtttttaagatctctttctaattcttactttataaccataaagaaatgaggctatgtgttgttgcaagaagtcttattgcaaacacatgcatgtgcatgtttgtgtgtgatttgtaaatttagctctagaaaggtgtaacaataaaatggaattgaatttagccatggctcttacgagcgtgagtaaagtatgcatgtggaaacctaagatgttaatgaaatcagcatagactttaatggcattctggtgtcttcaaaagatcgccaccaaataaagcttaatgtgtcaaaatggaaaccccaagtaagagaaatgtgggaagaagttcaaggaacagaaactgtttggggaagatgatttgaatgtcttccaaaaccttcgagaagcattaagctcaagctcagccctttatctttgacaaataccacactgtgtatctgcttgttatttcgtggtcctgttgctcctgtcagcttgttaaatggaactctggtttcagtcagatgaaaatgtggtaatctctgtgctttgcttgcctcggcgtccgaggagcggctgtgcccgactgtgtgaggccgcccagtgccaagggtaactactggcacctgcactgacagcaagcagtctgcagcaacagattgaaaatgttcttttcagatctttagattggaacttcagctttacttttaaaagtttcatgtccacagcacggttgacaaaataaattactaaaccaattgctttgggagcttccaagctgtgacattaaggtagctgcgagtcatcattcttgatgaaggagcagcttcagaaattgtgtgcatctgatggaggtttggcaaagtgtgtaagtctgcagacctatggtaaacaggtctcatttctaagcatttattttcagaaagggaaaaaaagagctgtccattctcaatttcggacttattttaaattactcacagggaaatgggtgccccatttaatggcattgtttattctcacagagaaatgtttgcagtgaaaatgcaaaataccatttcttttctctgctgaggctcctcatcctatggtgcccactttactctcccagcagagaatgcagaaaagcaccaaaggcagcatcatgaaacgcagagctgttaattcccaactccgtcagagttctgccctccttcccatttggggagctgaactgagccattagaactttccttttacactccctctagaatacaagtcctgacaaaattaaagggctttatacccctaaagcctcagaaattctacagggtacggtgagggtaggggtggggttgaagggatgggaaattcataggttaaaaacaaaaacttgggcgaaaaatccaggctctgccagttactatcagtgggacctcagctagttacttagacatctggccctctgcttacttgtttgtgaaatagaaatgatcatatctgcctcatgtgcttgttggaaacatataaaacaagataacttcaggagcaaagtgatttatatctgcaatgttgaaatggataaaaaataaaatagatatgtgagtgcatagatgataaatatgtcataaaacaaaggcagcaaagtgttagcaattgtaaggagagatgtgggtgtatgcatgtttgttatataattctctcaacttttctgtgcatttgaaagcatcttaatcaggaggaagcgatttagaagggcaaatcttttccatgtaagtataattcccgtattccctgcctctagttaaattccagatgtaggcacacggccatactgaacctcagcggagaatggaaaaaaatatatctttttcat

SEQ ID NO: 1212 - DNA, 2500 bp, Homo Sapiens
cagtgataccacctgggtggcaaggttattgatgaggtaaatgttatcctattttttgagctataacttctaaattttctgcaataaacatctatcacttttacaacaagaaaaataaataaattttactagaaaaaaaccctaaaatataatgcaaggctgtaatttcctttttttagatcccactgcactaagcatgtataaaaggctcaagaaataatttttggctcccttaaatcctgtgtggaaaggatgtgtgtaaatgcacaggtgtctctgactgcatttgtgaccatggaaagacgtcattacattgagtggctttcttaggttgtgctcactttatttgagaagtgatcccaggaagcaccaatctgagagcagggaaatgagacagacagtggaagaaagccactactgggcaaatggggcttcatcttactgggacctctgagagaaagagggacacactgcagcgttattctccctgaggagcaaggaagctgggggtatttctccgccgctcccatctgctattggtttaaggatgatcccagagcatgtcaactatttggcacttccagcctccatgcccaggccgagcacgctccagggacctgagaaactctttaccttcccaaaaccacacagcacttgccattggaaggcaccgggttgacacacggaagcgtgatgagtgttgaggggatatgggccaggtaccaacaaaatccactgccatagcattctgcttttcttgttaagcaccacctcagcaatcttactgatgattctgtcctggtggggctgggactgtggcgggaagggagcaggaatggtagggatgtagtaggtccataagggaaatcctgtgactgggcttggtgttatcctgtctcctgtcaaatgcttgagtgttcatttaaaaggctgaccctgcttgatgactctgggaatattcaaaacaaaagatgtgaaatccaggtttcaacattaacccagtatggccagaggaattgaagaatgtaccatgaaaacatgatatcagaactcagagatgtttatttatgagtttggcaaggttttaaaaatttttttatgatgcgtttgagttcttctgcatacaaggcaaaattccatcaacccggccagcctataaaatccctcacaaatcgttttatgatgtgtttgaaatacctcaggctgagttatttgttgacaatttgtcctttatttttgacacctcggctgaggattatcttccccaaaatagaattgctaacttcttggagacctgtgaccactgtgtgctagcaatgtcagtctaccaggcacataaatattcatttattggtgttaagcaggtagcaacagaattctggaccttagttgctggagaagaaacaaagacttttagaactagaatcacaaattgtttattttatggttgaggaaattgaggccgaaggtcacccagccaacttgatgtggagctggaatgaaactccaccatctcgtcccatgaagccgcctctgcacaaggttgattggcggcccattctggttggctgatgaaggacactggttctataattcagcgattcgttctaagtgccagatcagtctccccatagtgggatttgatactctcctcgtattggccactgagtggttggcagtaatttcaccctttatggcttttctgggccttttagttccttagattctaaattggtcaggactgtgtacttcagaaaacactgaccgattacctaagaatattgctaatcagctagaacgaattgttatgggatcctaatataatattttggagtgtcagatacagagagaagacatagctgggagctggcacacttaagttctctggcctggtcctcttcccatcctggtggaggcaattctgaagataaataaattatgtgagcaaaccaccctatggtgaggttaagttcattagagattaaatgctcagaggggaaaagggaagttgacctctttgatgattcaaaaagaacgtcagctgaagtcaaagtacaacattctagggctacccgctggctggtggaggaaggcatggctttcccacagggcaaggacagacaagacaggcagataattacagcttgtgcttgggcagtgcatgtgcaaacagggcggagaacttgtaggttattaagccaaggaaataacttctctctgctgccatgcatttattagtaaaattggaataattttcatttctttttattgcttggaaagattaattaggataaaacagaaaaagcacatagagaactaccaagaatgtagtgtgtgctgagtagatattatctatgtatctgtcatctatctctttatctatccacccatttatctatctatccatcctatcatctatctatacatcccatcttcatctatctatatctatctatctatctatctatctatctatctatctatctatcatctatcatct

SEQ ID NO: 1213 - DNA, 2460 bp, Homo Sapiens
agcatctcacacaaaagcatctagaggcttttcatttgtcttgagtatgtttcagatgtacaaatattatttactttaaacttcaaatcaaaaggtgcactgtaactgttttaaataaaacattagtcaagactgaaatatatataaattcaaagcaatactttttttttccatttatgtgaagggagctcagttaacaaattttaggatacacgtcggaggaactgtttagcaacacacttcaagcaagcaagcacttaataaaggaattcattcccagtcctccaaagataaatattacaaacccactctacagctaagctgcgaagttagttttctgttgcagactctcttaaatgtttgcttgaataagatggggggtaaaattgattttgaagaagtgaagctcatcagtgaaatgtacccagggtgctcatctgggggggcattttgaaaaaatgaagaaaaacattcagctacaggctcagctctatacaaacctgtttgtagtatgagggtcatgaaggctgatgagtggaacttcagccctgggagaaaacccttttctgtgagcatttaaatcaatatattagaaattatagtacatcctagagaacatggcagaaattgtgaaaaacagagtaagatctctttttgcttttaataataataataataagccccaaggaccatactaacaaagtagattgatccgtttaggaataaaattctcaaacaaccctgtgaaagataagtattccctattgtagcaaaaacaatgagtatgatctttttttcccgatgaagatcctgtttaatgtcttaaaaatattttgtagtgatttttattttcattccttcttcctccagctcctttcctgaatatggaaccagagtgtcccttgttgtgaagcattcctgggaaagaggcgctaaccttgtatcgcttttgagtgtaatatacatttttcattttaaatgggagctcataatgacattgtgtggaagggattccaggcctctgtgattatcaccatgtctccttgagctgcgcctctggaaaaaaatgtgaaggaggtagccctctggaatgaataaatcctgccgcctgcctgtaattatttattaaaatagattaaagaaataggctaaaaaggaacccgccacccatgttagagatagcataataagagtacatagaaagggaaaattaacaccagggaggaaggaatgttagatatgtgctttcaagaatacggccatgtctgcattgttggcttacacgcagacacacgctcgggtttttcatttggcagggtgggctgtgctgatgaaaacgtgggttactaatactgatgtgtatgtctctaattaacattagaattgagtggtaaacataactaggagagcattcaagagagaaatgggctaaaagagaagccaatgtgtagagaggagggggaagagacgggttggagagaagaaatcggtcagcccttgttcagatgggtttaatttagtcacttgagtcaaaactggaaacctgttttctagtacaattgcttctgtgtttagtgggtgctgtccttgcaggcgcctttcattgcaggtgaattttataaacagcacaccatcatcaaaccatcttgggggtcaactttttccacttgtgcctttagctcttacgcaagtacttttatagtgtcttctaatatacaggatttatcttcggttctgagaagagcttttaaacttaatccctcactggagtactaatttgtttcttcatccttaaaccagtactttcggttaactttcatcagaaacggtagatttctttagtatggccactcgagaaacataggtttgtgttaattttttgttttgttttgtggctgtttttgtttgtgactgctgggagaacaacagggtgggggagattttgatgatggtcgctgatattattcttgtatttctgtttcttaaagttcaaagtacataactggaaatacctgtggacggttgccttaaaaatatttctaatcatattcgcctaaagaaaataaaaactactacctatttttaaaaaaaggaatgccagaacttatttttgcttttttattctggcttttcccatgatatttgagtggaataatatgctatgatgtttatgtatgaaaaacagaatacacttgcatatgttatgaggaagaaagctgcttctaggaaaacgaactttttttttctttttttatgttttaggaaatgatttatcaaagtaacaaaataactcattgggaaagcagtgttatttataaaaacaatcagcctttgacttcctttcatttttataaggctaatgtaacaaggatgttgcagaggcaaaaatgaactcgaatccttttaaccatatgaacacttatgaattttattgcagctcctatgtaaccactttattta

SEQ ID NO: 1214 - DNA, 2463 bp, Homo Sapiens
tcatgaagtgggtggggaggaaagacagacttaaaaatttattagcatctaatcctgttaagattttctccaccatatgccagcacaacaacccatttgaaatgtgtactaattacccctgttgtatcctgtgtgtacgctttctacgcagcccctgaccttttcgttaataactttgcgttgcattcgttgacctgaaacaaattgaattcagtggcactcactcaagaattgaattacatagtcttcttaattggtgtcttatttaaatgtgagaaagtaacggcttgccacctgtaatacgtttccaacaaaataaaattagaattctaatatttttccccattctagggaaaggtttggccatgaaaatatcattcttgtatgatctcaaaaataaaattctctgaatttttttcattgccaatgccgtgaaaactgcctatatagacacatattaattggagagatttatgcaaatcagctgggctaggaaggcttttcctggaagtggcccttaaaataggcggcaatctgtctccgttgccaacagttatactgcctttccctccccagctcttggatttcggattatgtgatttaatatacctccggctggcaaaataggaagcgttaagacaggaatatgttaagcatctgaagatattttccactgcatttgttagttttaagtccttgagccgcattgtctgttggttggagggggcagaaatctaatttcaggagtttagtgatgttctcctattgacggcttcacaggcaatagatactgcgggtaacattgttcttaacaccgttcactcatgtctttcctcggaggattcttgcaagcgatcgaacagataggagcagctggaaattttgggctttgctctctaattccagtgtgaaattaattgtcccaactgcaaagaacgacttactcctttacttactatatttaacttaaaaatgcaaatgttattagtggactgatcactgataagggtgcctttgtgcccggctttaacctctattagtgaggattatgaggacgtagccacattggcattttctaagtgtcaccgtgacagcacttgctgcacaaatgcctagctgtcaccgtgagttttatcactcagtttttccctccgaatgtagactaataagcccagaaattacaattgcctccctgccgaatctgtgataggcggaaataatgatatcagtgccctgctaatcttcttgcctctgcgcttggcactgtcctattgagtcacctgtcacactccgctttgatgaggcgaattcaatctccctgctgtaatgacaatggggccattttaatgtttggaaatgattatgtggaagcttcaccgtgctctgtcttggcaagcaaaccaaggcactgtgcacgccaggagagcgggctctggctgtcaggcaggcagtggagatgctgagttattattaggatttagacgtagaagtcggcttcattttgagcctttggtggtggccttgcaggagggaagaaggatggggaggggaaaggtgggatcactgctgcagaagcatagccattggctaatctcttagttgtctgcacaaatttgcctctagaagggtttcccaggccacctgtgttgttcaaggaggccagggtggctggagcttataaacaatcgtggtgacactaccaacatcatttgctggggcttttggtgtgtggattgtggatttcctcttcaggacattaactgaatcaaattactcttacaccaggcctgatctttcctggttctttgagaataacactgctgcagaacaaaaaaatacacataacttggaaaacactaggtgtcaatgaggatctggagcaaccagatcccactactgatgctgatttctaaaaccacctcagaaaagcagcagtctctactgaagccagacatatataaacccagcaaattttgtattgatacagaatattttacatatttataaagtgcatgtgagtatttgttacatgcatagaatgtcaaaaccagcaattttgttcctaggtagataaccaacagagatgcaagtgtgtatttgacaaaacacatgaactagaatgttcatagcagcatccttcatgataatgccaaactgtaattcgtccaaatgcccatcaacagtagaatgccttaggagttggtttttggtggaataccatacagtcatcggaatgaatgaactacaactgtgtggatggatctcataaacaggatgttggatgaaagaaaccaagcatgatagagtacatatgtaaagaattccaggttgggcacgttgactcatgactgtaatcccagcacttcgggaggctgaggcaggcagattgcctgaggtcgggagttcaagaccagcctgaccaacatgaagaaaccctgtgtctactaaaaatacaatatatta

SEQ ID NO: 1215 - DNA, 2499 bp, Homo Sapiens
gttgcagactgagattttctgtttatttggagggtgaatttggggtgctgaagggcactggggtgtctagggcttcctatgtcttcccttagtgctacctctgggactccattttgtcagagttcctgatatttcatgagaaagctggaaatccaggttttttttttttttaatcagaaatgtcaggatttaaaaatataagcagctaactaaaaattcaaaaatccctaaccattgtgcaagccaaatgaaataggcataataaacatgagctgctatgttcctaggtgcctggtcagctgggatacaggtgaggggctgacggcaggtgcaggtgacccccttgcccactgcctgtccattccatgtgttgttgcttggacccattaacattgtctgcctcatatttctgtttgaagaaagttctgctacgtgggtgagtcttgtctatattgagagcagggttgagctgcagtcagttataaagtctaccttcagtgggatattataagggttcacatgaattgaattaacaacatttttatatctgaggctacacaatcctaaaggaaatgtgacttctacagagagaatgaagatgttcctagcactttcaaatatatcgagcgttctccaataagtgtatttttttcatcttgtgcatcttgtgtatgaaagctttctgtgaggttatgtccatgaaaacaaacgcctttttttcttttcctcataaaagcggaataatgaaagataaggttaaggttacaccatggctacagtggttgtcaacaagccttttgagattgtctttttctgttgaaatcagttaatgaattggagttttccactgagctcacagaaggtagcttttcagatctgggagcagataatcagagagacactttttccatgcagcatgttgaagggcatcatttggtcttgtggctacaccagctgagtctggtccaggaccaatctcgctaattaccacaggtggacctttggcccaaggaagcaaacaaggctttggggcacttctccatggccgccttgggacccttcagaagtgataagccgccaatctggaagctgcttgggtgataatgattctcgaatgggcttttatgtggacgagcaacatgacctaaggcaccagggataccagaaaggacactttttatgcagcttgaaatgtgagtagagagcaaaacagatttcaaaagacgagcaccgccgctctctcgacattataaagtgtcttctgagtgacaacagtgcatccttgtgcatgaattgcacttaagctttgtatttttggaaaataacaatctgtgttttctggttactatagacccagtatgggcctagaggttttatgtgtgcaggacctcattcgtgtaaccctttcagtgattgggagaggcaggagtggttcttgcccccattttacaggggaggagacggagatccctaagctagtgaaggatccagctgggactctctagctgaagtctgtggatcccaaagcttgtgcttgttgaggatcaagagatgatagaacttgcagtggcttggatgtggcaggaactcatttcacttatcttttctcaagacatgggtggtgggagtcgtcaggctgatagagcatctgacgggaagttaaaagaaatttagcctggttagtagtgtgtttggaatcaccttgtagggtttaccttaaatcatggggattgttgcagattcattatctatgtaaaaaaaaaaagcctctcagtgatgccatgggagggccattgtggattactgcttgattaatcacggctgagtagggagagttgctgtcattttcctttttctcttgtttctgtgaagttcctcaccttcctatctcagccagatgtcttcatcaaccccatctcctcccagctccttgggaaacttaccacatctgttttctttttacttttgaatagtctttttctgtcaactggactcttcttattttctttttcaccaatgttgcaaaagttgaaagaattgtacagagaaaatcacgcacttaccacccagatgccacaactggcatttgctgtatgtgctggatcacacatctggtcttctgtccattcttctaaccgcccaccaagactttaaaaaaatgcatttcaaagcaggttgcagacattatatactcgcttcctacacacttcagcctgcataccactgaccagatttcaagattcatttttgttgctttttctgttaagtaaaaatttacagtgaaatgcataattctcacatgtagcattgggcaagttttccccattagcttttaatacatctgctaatctctcctattaaaaaaccaagccaaatctgccctcacctcaggcccattcagctactgccccgaattgctcctcctcatttccaatcagacttttcgaaagcactgcacccgtttcttctctccagcctctccctgcacccatctggccc

SEQ ID NO: 1216 - DNA, 2323 bp, Homo Sapiens
tgagaattcatgtttcttaaaggctctaggtgactctgcacaaggggtttccgtcatatcagctggacgctctgaggctctccggagcagaatgaggtgctaaggtgttgtgtctaaacgcatggcttggtcaagtgtcccagtgcagtgatcctcagagggtcagatgcagcgaaagtgaaaatgagcatgtgggttatccagacaccccaagtttatcaccctgtctgggccagggtgcatgacgctcactcctgcaaaacagagtgagcaggcagggctgtttcttccccctgcagctgggaagccccagccagcctgctccattgaactttcagctcccggagttggctcattccctcccagagaaaacagccctattataaacatacaaacttgagttggggcgggggtcacaggctcttgcctaagtccatcctgcaaaattgacttttctgtcaatgagaacacagctctgcttttacctctcctgtgtgctttggcagtttctgcttggctgtaaaatttatccaaggaaaactggcatttatcttgggttcacttgtactcagcaaaactgataaacagatgggggctggccaggccacgggcaatttggttagcactttacaaaatacaaatgtcatcctttatttttacagggattatttattgtgaattaggaagttattggtctgttatattctaacaggatcattcactccagttaagggatccatgtccctattataaagtggtggggggtgtcctgggtggaagagactttctggcattgttggcaataaaggaataaaatggccctgctgggtttgcgtatgcacacacagggcacttatctgtgaagactgtgaaaaaagaaagaagcaaagaaagaaatcaacaagatttgatggggaagcttgcaaaggagatcagaattcagatcaaatgtcccaccccagtgtctctggagttttttttcttttgtgtcccagctaaaggcactgggaggatcagagacctcatcccagctctgtttactttgggaacaatcgttggtgtatgaataataatgcctccctctgaccatgactaattgaattgcagcctgcgggcagtggggaggggctttgccgggccagtccatcacggcgtttctcaagtagccaccgacagtgatggatgcagcggcgcttcccagagtgcatcctcgaacacctaagagcaggggtatgaacctgcattccgagtttctattagccggggcctggcagagaggacgggaatggcggcagttaaagatgagttggttgattaaaaggaagaggagaggcagcccttttcctaacctcctcctcccacacctgattttaagcaagttttgttcatggggacaaatgagaaaatattcatcgtgtgaccatgcaggcctcagtggggccacctctgctgaggccgtgcctgttaaaagtactgggcttgtttggggtgcagtgggaaccctggcttggaaaacaaaaaaggcaaaacagccaaagatttgtcctgttagaggatgtttagaagccaacaaatgaggtagaagaggagacagaaagacaagagagaagtaggggcagttggaaacggagtctatggccatgtctataatccaacaatggatcacacagggaccctaacatttggtcgtcctgttgtctgcgctgtgtttacacagcagaaccatgcagctggggccctgggctcagtcggactttgttctcacagcatgaaggtgacccctggtgaactgcgatccgggaagcttgtgcagcccagcagtctctatggtggtctggacacaggggaagtcgtccaattacagggtcactgctttctatctcagtcggatttagtccgggccaaaccccagattggcacctttttatgagagctgtgcacgccaccctggctccttttggtggcagaggctggctgaaactccaggcggattttggaggcagatgctggctttaagggagctttggttggcctgctcctcttggaaagccctgataaaagcattcggggcaggggctatacttctcttgtatctaaaatcctgaaattttaaatccctccaaacagtttcttataacttttttgttagcttactatgctttaaaaattatccataggtcttagtaccaacagtcattttactgcacagaagtttctcagctcccttctcttatttaagaatgagatactctctgcccattctgaactttacaggaataactcagggtgtcttgttcttataaataaaaaatttttaaaaaat

SEQ ID NO: 1217 - DNA, 2466 bp, Homo Sapiens
gtttgaaataaataaataaacaaataaataaagggtttttatgtatgatgcttgtgctctaagtaattcgggcaagagtgacaccactgcctgcctatcagcacttgcaaagaaaaaccaattactgtcagcccccttcaaaaaaatgtatctgctaaaattgcttgatgacatggaaatccacactgaggtgcttatacccaggggcaaccaagtctcccctgcagctggggcctataaccatatttccttcatttcacaaaaatcaaaagtttaggaaccacgaggaaggagcaagaataaacaccactacaaacctcaaaccaacagcgctgagagattacagcagcctcaccctgccatttggggctagagactgctcacatttattctgtggtcagcgtccattggaaagcaacgcagcacacaccacggctgtgtttgagctgatattcactaacactgaactaactgcattccaatccaaagacttcgcaagtgccctctttcttaactgggaatctggcagaatgttatatttaaatatcaaacgttgttaatcatgtcagcggtactttagtttggataaaatgtctttcctattgtagctaattgcttgaatatctgcagactgatatactctttgtagacatttatgctgtcctctttttataactttatttcattttctcttcatttctggtgttgactcaaagggcctttatcacctcatgctgataatctgtgctttatggccgctggtgtgattgggagcagttgaagccgcgtgcaataatacacacatataaatatttgaacaggaaaaagaaggtctgtctgatgtagaccaaggaagaaatgcatttaaacaaataatgccactagagggaccttgactctgaaccacgaataggcagggtcagacttggaagggcaccctctcattgcccggcttgtacgggtgggcgctagtgccacggcccattttaaaaagcaggttcttccaggccccatggcacagggagccgagctgggtccatgccagcaggcttatgacgtcattgttgtagcttgcttatttggtcaggatcactaaaataattccctttgagaagaataaatttgctcttgcagaaagttaaagacctgagaggttttaattagtttaccctgccctcgcctttggtcgccaaacgttattgcagagttcaaagaacatgatgttgtgtgtctccctttcccatttttgcgtgggggccttttccccctttttagcacctcctgtgaatagttgaaaatgagtggcaaaatgacattcgacttagaaagtaagagcaccaggaagcaaaactggaggcaaacacagcagctaatttcaccaggcatagctggtgctgtccgcggttgtccctgacagcgcggccgacacagaaccacctgtgtttgctcactagctttccccaatctgcgagaaaatggcccgggccggtcacatggcagccagataggccaggcaccatgggaatacaaaagccggagcttttagcagagttaatcattaatgcgccttttctttgtcccattcaggagtgctgacagggctttgatagcctgtatttgccatcagccggctgcagtcctagccaggtactaatgagacccctggctccaggctccctggcagagcccagagcccagcctggacccaggtgctgccatcaacctgaagcctgcctgccccctgagctccctcctgctgcccgctgtgcccccactccttaggccttgttctggttgatcacccacctgcctggaatcctgcacgtttctgcaaagcatctgcctgagttcagcgaagcaaggctaggaaatgtgtgattataaagcccataatcctctcttcccctgtgtcatccttcccccagctaggaaaaaaaaaaaaaaaattagaaagctaagctgaattttttttttgtttgtttggatgtgtaccaaggatggattgttttgccctaacatcagtggggtgttttctttccaaaacttagcttagagagtcacccacgggtatattctaatatttccactcagcaagtaaaatgcaggtgtccctgacagcaatttttttaaatagaaaacctcaccttaacatccttaatggtaagtagcttgtgtgtcaacatgactggagctagggtgaatgagaaccacattaaaaccttccagctaccagttcttttttttttttcttttttcttttgtgatggagtcttgctctgtcgcccaggctggagtgcagtggtgcgatctcggctcactgcaacctccgcctcctgggttcaagcaattctcctgcctcagcctcctgagtagctgggactgcaggcgcatgccaccactcctggctaatttttgtattattagtagagatggggtttcaccacattggccaggctggtcttgaac

SEQ ID NO: 1218 - DNA, 2473 bp, Homo Sapiens
cctagttcataatcagttctcagttcatggtggccccccttcatcccccaaatgtcaaagtctccagcttcccatttcccttccattcctgactctaagtccttaaattgggtgaccattaatattactgctaggagcattttcagagcactttacatttacagcgttttttccttcccaaattgttctcggtcctttcttcggaataggtattaaaaacacctcattggacaaattcctttccttagaagatacatcatgaatatggttggagaaggcaggatcataattcggagaattcagggttgatttcccttaccttcctgctcttttgctgtaaagtccggagccccaggaagtgccgccaaactaccccttattttccctccaagagcagggcagaataaattgctattttgtttggttttgtttctcatatacaaggcctcccaggccctggaacctaggctactggcattttaattaatgttaatgactgggatgacctcctccccattgaatctgagtaagggaaataaacaggcaaacccgaacaaagccatgtgcggatgtggtaccctctagaaaagctgacctctccgatggctggccagggtctctaaccaggcccatactccttcctcatatacccccaattttgaatttttttagttcaaatagaaattggttgcagggggaagcaggtagatttcctcctttaatacataaatgattctgggtcctcggaatcagaatccccactttcttattactaggagcatttttactctgagatcaatacaaccagaatgtgtccaaccataactttacaacaacagaaaagatacatagcaaatgccttcaaatacctggaatctggccttgaaatcgacctggcatttaaatcgacatgtatatcccagttgggtcaaaacatagtcaaggtttcccccagagatactctgtttcattttccttttcaagtaaatttctatttttccccccaacctttacagcttaagcgttttatccagtttaaacgttagggatttaaattgctattttagtggaagaggcttgattaaaacctgtgtcctcatcaaattattggacagtggttcttgggctctgtttacattagtgtcaaccttaatttaaattccgcataactatatttgcttcgctaaatgcattcaccaggaacacaccacaaattactttgcattatgagccgagtctctttgtctattgcaaagtgttttgaaattagcaccataagtaactagctgtaagtgtcactccatctccttaatgcctcattaatcaaactccatggcagctgatgtgatgtccaagcccctaacatataagatcagtatcatttactccttgcatttgaccacggtctttaaacttgatttgttatttgtgcatttgccctcgctggagctctgctcctccctcagtggcctcccaacacgtggggctttgtatggataccagttgcatgtgtactctttgcagaaattggaaataaaaacccatttcccatgttgtggaaatgcatagcctcaaagtcaggaaattcttttaatggaagaagagttccacttattcccctgagttatccacagtgattccccatgattttcagattaatgctaaaatgccataatggaaaaatttccctgggcaagtttttctctatgtcaagaattagagaaaggaattacgttcacccaggcagactacaatttccatcttggcctcagttccccaaaaaaccagatacatttagtctaagcacttaatcaggaaaaaaaaatgtatttttcccttattatgtgatacgaattattctgtactaaatacaaaattttagaatttatgcttgcaaagaaatacagaacaatttatacttaataattttattacatgtacacacaaaatcatagcaaaatatgatatattttataggatttttttgtcttttcatgatgccatcgaatatttgcaaatgcctaaatggaaccctttcttcattctccacacaagtccaaaaacacaaacacacacgcacacacatacacctatacacatgcatccttttaaccaaaggtaatactcactggtgttaaaactaacagctctactggacaatggcttcatggacattttagaggcagtcttaagtctgctgtgggcacaggcatgtcggatatgatttccctgcagggatgccctctcggtggctgtgggggatgcttgcggcccctcgcctgccagcgctgagctcagcctcacagtgagccgagatgaacaggtgctctcttctctggcggcggcggcacgtgaggtcggctccttgcagaacagcgtctcagtgggagacctttagcttcacggcctttccttctgaccacccagcaggaaaaatatacgaaagcgtttttttctgccagttttgtcgatg

SEQ ID NO: 1219 - DNA, 2437 bp, Homo Sapiens
ctgggaaggctggggaggcagagctggcttcctagcagcctggggtttcctcgggtggtttttgtgcaagttaaatatgctaagaaagtttggttgtaggatcagtgcctgaccagatgcctttgccttttactggctggtgctgccacacacacacacacacacacacacacacacacacacacacccctgatgctgtgagacttggcagctacaggctcactgggcatccttccctggagaactgcccgaggctggcagaaccacctggctccaaaatgcctggaggcccagcttcctccactcaccctcagctgacccgatgggtcctccgctgtgccccttcctcaaggcaggacttgctgtggacaattcatccctcacatccttgctcggttccttccactctcctatccagctttgctcactcccttctcctcaataacacacaagcaccaaatccctgccttaggatctgcttccaggagaccacctaagccaagtggtcatttggcttagtcaacctccaagactggcatttatatggctgtaacacgtagaactgtacatttaaaagggtgaactttattgcttttcaattatacctcaataaacctgcccttagaaacaagatgaacttcatggaaaaatagttactgctattttggagaaaatatccaaacatgttaaccaatgaaaaacctcagaaaagcaaaaagggaggcagggaaaagctatcctgcatttaaaatattctcctggcccaccggcttgcagctgccacaggtggaggacaagacaaggggtgggtctttccagggtgccccaggtgctgactgagcagccagtatgtgataaaatctccttcttgagagaaaaggaggaagcacaagacagggaagggaagcgcagctccaggaaaggggtgggcggaggggctatggtctctgctgtgccattcaaacgcgtgtcgcagggacctctgagggctgtgctctcatctgcctggctgccctgtgctcacagggccagcatgtgattatttgggatctggtgtgggttttctcttggttgttttatttttcacttaccagctgcgtgttaatagaaagtcccctgactgaaggatttgcccgggatttctgtaataaaaatagaaggatttgtcacaaacgctggaaggaccctctgcaaaagtggtatttttcacgtgatcatgagccccagaacatattgtcatcccgggctgcaagcctggcctcctcactgagtggcagtgacagatgtcccctgttaatgtccagtgattgaatgtcactgcagaggcccgtcctcacccacacaacctgttcctttctttctgcagccactgtgtcacgcttgtcacaaaatccacattttctgcacattgttggccttctccagcagtgagcccttgtgccaaccctgccctgctccctcctcggcccatccccgaggacactgggggacaaatagtaccatcactgctaagtgataataaaggctggcaggaacacatcctcagcttggggcggctacaaggaaggaaagaaataaagaaaaaagctcatgaagttgctggagtcatagtctcctcctgggaattcagcccaagaatacaatttatcagaaataaaaagctctatttagatggagatttattgaagcacttgctatcataacaaaacactgagaacaacttgaaaatccttttacaggtaaataaatgatgataaattctcttgattggttacggcaggacccttaataattatggggcactggttaaacgtggcaaattgagcagcagtttttgttttcattgcttccccaagtactaccaaaataaaagcaaaagggaaaagtatacaaatgcacagagacaaagaaaacgggaggggagaaaaaggcaaaggaaacagtagacaaggaaggtcaacaaagatggaaagagcgtgaacagaaaaggcccaagttcctgaggaggggacaccactaaaatgtgggtcatcgtgtgccacagaaacccagaaaggctcaggaattggactccccaagtaccagggaaagcaggatgaggctggagctaagagggaaagtctgcaggggaaacaagcagatgcctagaagacactgtcagggctccagtggccccagaaccatcctcccccagccgtcgggaagtgggagtgtcttctctggagaaatgacttagatacatttccaaggtggagacatccagcagtgggggcaggactaaggcaccagacagaaaggagtgattatgacagaaaaatgtgagatcactcaggcctaggtcactagcctggtgcctaatgacctgcaggaaaacccacaggtcagcaagtgcccccaccacactcacgtgcacatcctcacatgcactcatacagac

SEQ ID NO: 1220 - DNA, 2215 bp, Homo Sapiens
aggggcccagactggtaggctccagcctcccgtccattgttctggggcctctctggaaaacaggatgggaggtgaaaggtggacacaggcctggacccccacactccctgaaacaacccaggggcacagcacagaatccttaggagggagggcctggggacagtccccattttgtggatgagaaaactgaggggtttcattcctattaaaagggagagagcctgaagccccacaccctttatgtgcccacccacagcctcctgccgggtttgggggatggaaaaatgacaccccagaatggaaacaaaacggtctattgtggtttccatttctgaatgcttaccatgtgctaagtgcagaagtgtcataactctgcaggttaagttcatattttgtacccattttgcacaggagtacactgaaccataaggcaacaatttattcttcaaaggacactactctaaacattactgtatttcaagtagtacgctgtgtgaccttgagcaagttgcttaccttctctgggccaggccctagttcagctctgggacacagcagtgaccaaaggagccgtggttcctgctctcttagagcccatagcctgggcagggaggaggaggcaaggaatggcaaatacacaagaaaacaaagatcatttctgatggtaatgaattcagtgaataagagcaggagaatgtaaaagaaagtagcctagggggatctgagaaggcctctggggaggcgacatttgacctgagacttgaagaatgaggagtctggcaaagacctggggctgatcagtgttctaggaacaagtaacagcaagggcaagggccctgaggcaggacagagctattaatagtttaaggagggaggcctctgggctggtgagagaaagggaaggggcccagttgggtagtgggcaggggaggagtttggatcttattctccgtgagatgtgctggttctggtggtagtgggggggcctgtagtctcctgttacaagggttgggggtgtggggacagccagagccaaaggtctctcccccacagctccggcagtcccagcccagaggcgccggcctggcggctggaagattgcactgtgggcacatctggggagcagctgccgagccagggccagagtgggtcacgtggcacagggcaggaccgtcctggagcctacaaggccaagactcctaggaggggcagtggagaacactctggacgagaacagtgcgtcaacgaggaggaactgtgcactgtagacgtccaggcacacggccccctgcagccccacacagcccctgcctcaggacagagtgcctgggttcaatgccacctcccagctttgtgatctgaaacaagtcactcaacctctctgggtctcatggcctcagctgtgaaggggacatgatattactaccacagttccacaggctgttctttttttttttttttttttttttttttttttaattttttgagacgcagtctcactctgttgcccaggctggaatgcagtggcaccatctcagctcactgcaacctctgcctcccgggttcgagcgattctcctgcctcagcctccctagtagctgtagtagctgggactacaggctcccgccaccaggcctggctaattttttcatatttttagtggagatggggtttcaccatgttggccaggctggtctcaaactcttgacctcaggtgaaccacccacctcagcctcccaaagtgctcccaggctgtttatttctaattcaacaaatattcgttgagcacttcccacatgccaggtgctgcatgaggctctgcgtgacagcagggaacaggacctccgtggtcccttcccttctaagcacacaattaatgctttagaaccaggcctggcattgaggaaactcttagtaaatgtaagccatttgcctggagctctggaggccagaggaggcaccctggaaggcagagaaggaggtgtggtgacagaaaaatcctaaggaaagtgcactcccttttatcaccaggtgctgcagttggctcctggtatggctcatttcactctcacaaccaccctacgaagagggatgagcattagctccaatttatggatgaggaaactgaggcccagtttgtcaatggcacagccaggactggaggcagtgaagggctggtccctttttctctctggggctcaatattcccatctgt

SEQ ID NO: 1221 - DNA, 2431 bp, Homo Sapiens
cacactagacctactgagtcaggcacgctgagggtggggcccagcaacgtatattttaacaagcactccaggggacagtgatgcgtgcctaagtgtgaggaccactgtgccaggagagggacctgcaaatcctgacagacaacaggtctcctaatgcaggtacccatgggccaaggagccagcagccactctcctgtgaccttagtgcccagccagtcaagagcctgtctcagggtgagaacatcttcctcccttccacagccccttgaggggtcacctttgtacagtctgactgagttagacacgggagagctgctgagcttgttgagtggatgttttatctccttagccaagactccattcccagaatgaagacggagggaagaatgcttttccatatgttcttccaacaagtcatatgacagatgaggaaaccgaggctcagagtttaagttactcatccaaagtcatgctgctaataaatggcagagtcagaatttggacccacgtccatctgccctccagtgtcctttctaccgcagcaacttgcatcccttgaccagagccagctccaggaggatagggcctggctttttctggatttgagctggagccctcactgaactcttgaccttgctgtgggaacctccagctaagcttctcagacactgggaggcaggtcctctccttgctttcaccctgtcagcacagcgggcatctcggaccatgctggatcccgtcagggatgtggcagctgccagtcagttaagtcacaagcctcagcaggcctgaatgatagccaaggtggtcaccgtgccaagtggattgcagccaggaggtgccttgcctagcccacccctcatcctttatttggaggcccctcaccatctcaggcagggtcttcttcccccagcagctgctcagagcttgccatgcaccccctggttcttatggtagcccagtttagcaaacggacctgaagttttataaatagcgcaatggcaggctgggaagctgtcctgtgtaagaggacagaacatgcattctctgctcctcgagccatttcctgggatcgggtgatgggagtgacttctagtgcagataaagtcgaattactcttatcttctaggtctatactccacacttggtcttgcttctactgtttggtatgtctgtggtttccccctactgcttctgcctttatgtgatggtgcttccaagtctgctcccgggacgtttcctgttcttggaacagctgcaccagcctggggtaccctcctgctacttgatcctatagggaggtgtccagtggctgtgggcaattttcagatgaccttgttcgtctgacgtcattagatcgctatttttggctttgctgtttatgctgcagaagttgggctggaatgggagaggaggaatgaaggaggggctgctcttggtttcccattgttccagggtcctaccaagtaggtgcatttattcttccacatttacagagcacctactgaatgtcaggccctagggcaaccaaactgattcttcactcacttatgaatttatttttcaatgggcattgctttgtggtacggagtagtaattaaatgtgagggctctggagcaagagagtttggatttaaattccagcccgccatttactacctctgaaactcctctgtgcctcagtttccttttggaaatgggagtgattatagtatctacctcataaggttgctctgaagattaaaagagttaatatctctgtctgacacattgtaaatacacaatgaacgttagtggctattactactaaccacaacagcaccacgtattgtactaggtacttgggatatgaaattgaatgtgatgtagtctgcatctgttttgcactggcatctggactccaagggtctcagatattgggatggggtacccagtcaacaccgtcagaaagaatacctgctgtgtgtactatttttcctaccttatgttggagggcattcaagggaaacagaaattgaagtttctggctgggcgcagtggctcacgcctataatcctagcactttgggattatagggaggccaaggtgggtggattgcttgaggtcaggagtttgagagcagcctggccaaaatggtgaaaccctgtttctactaaaaatgcaaaaaattagctgagcatggtagtgtacaactgtaatcccagctactcaggaggctgaggcagaagaatcacttgaacccaggaggtggaggttgcagtgagcagagattgcacgactgtactccagcctgggtaaaagagcaagactccggctcaaaaaaaaaaaaaaaaaaagaaacatacaaaaaagaaaatgaagttcctgtcctaggaaagccttagatcagtggctcttcaccctgccacacatcagaatcttttggagagat

SEQ ID NO: 1222 - DNA, 2460 bp, Homo Sapiens
cctgccctgggagaccaagcctccctctgcctccagggtggcccagacaaaggcggcggtgtgcccggccccctggcactcgggctgccttcttgtcctcctcctcctcttgctccagggcactcgcagaggttcttttcacaaaggagctggaggatggggggcagggctgggcagccccaaggcaggggaagggagcactggtgaggccacgccctgccaggcctgactcctctcccagccccgtcacacaggcacccagtgggcaccaatcgtggcctgctgaataatgaccattctgagtactgagtgtggccagggtggggccctggcacacgtggacaccactaatcctcccgacaagagatggggtttcacacttaggctgaggaggggagcgtgtcaagggagctattatttccccagtgtagtcaagaggaaactgaggctcagagaggccgagccacctgtctaaggtcatacggttcaaagtgggacaaactcacccccgacccaggtctacctgattgccacagatggcatgctacccgctgccccaactgtcacctaacaaacaattaataataaaaagagaaacaatgaacatttagcaagcatttaatatgtggcaggcactgtgcctaaggcattacctatattaagtgatttaatcctcccaacaaccctatgaggtaagaactgttattatatccatttcatagatgaagaaactgaggctggcaaggtggggcaatgcaccaaaggacaaacagcaaggatttggtggagtgggtttcaacccagccctccagaacctgtgcgccaaaccacagttctatcctggacggctggatgggggacggacagactgacggatgggactgatgattgacagctctgtcccacctgcaccaggcctgaggctgggcacccagtaggagcttagccagcatcggccacaagaacactgggcattctcacgcagtgcctgccggaggggcctcatgtccccagcagggccggagcttgggggcggtgggcagtgtgcctgggctgctgggggggcccaactccctcccgagcagagccacggcggcatgacggatgtgcccgccaccgcggggagcccagggtatagcagttgcctggaaacaggctgctctcgcggcccacactcagacctttgtcaccatctcaaggacctttttttccctcttcctcctttcacgatggagccagaccctgcacgcaggtgagaaaccgcagccaaccccaccagcagccccctgtcaccagggaccatgggggcccttggggcctggttgcgggtggggaggtaggtgggtgccgggaggatgaggggaacctgcagcgggaagtcagcgctccacgggcggcccagccgaggcttggaaaaatcccgacgctggaatgcttctctcactggctttattttccccaagcttccctgacaaaaaacgaggctgagtcctttttcttaatggcgcaatacaagaagcatcagcttccagagccgagggtgtgcccaaaggatctgggcagggctgggcctctggggggcccagagcaggggacaggtgtggtgcccccagcacagcaggcactaattggctctcatgccggtggccctgagaggggattaactgggccctggggaactggctggggatggggccacgccccagccagggttgggcttggggacaggagtgtggaggagcaacagtgaggactctggggtcaccccagcatgggcccaaatcccagctttgtctcttgggcaagttatttgtctcccctgtgactcagttttctcctcaatgaatggggaggacctaaaagggtggttatgagaatcaaacaatataattcgtgtaaagtacctagcacattagctgggcatggcggcacgtgcctgtagtcccagctattcgggaggctgaggtgggaggatcgcttgagcttgggaggttgaggctgcaatgagccgtggtcatgccactgcactccagcctgggtgacagagtgagactctgcctcaaaaaaataaacaaataaataaataaaatatctagcatatagcaagtgctcaatgaaagaccacaggcgcgcttactccgagggccatggggtgcctggctccaggcatgccgtcaggactatttcattctcaccctaagcactcagggaggcaggaagtccacagtccactcactggccataggcagaactgaggctccaggaggaatggcatttgcctagtgacactggggagcatgagatgtcagattgacttccaccccccacccgcccatcaggcttccggcttcactgtctcagccactatctcaacctccccgattagcagtgctgaacgctgaccctgaaaatcagacctcaacgccgcctgccccaaacattcctgggctccccagtgcc

SEQ ID NO: 1223 - DNA, 2408 bp, Homo Sapiens
agttgcttctgaggtgtgaggataggaggggctgctgcctgaggccctctgctcactcccacccactgggacctcttgtctggcccaggctctggacaggtgcgccgcatcggctgcagaggtggccttgggctgcacaaggctggagctcaccattctgggcttctctcccatcctggctcctgccaccaccctctctcactgcctcagggctcttcagtaccttaaaaaagtttgtttaaaatttaaaaaaattatcaacttttctagatcttctcagtagggagggttggtctgaaaccacctcacttgctacttttttttttttttttttttttgccagggtctcgctctgtcgcccaggctggagtgcaatgggaccttggctcactgcagtctctgccttccgggttcaagcgattctcctgcctcagcctcccgagtagctgggactacaggcatgcaccaccacccccagctaatttttgtatttttagtagagacagggtttcagcattttggccaggctggtctcaaacttctgacctcaagtgatccaccctcctcagcctcccaaagttttaggattacaggcgtgagccactgtgcccagccttacctgctactcttgcattataacaatggtcatggtggcaaaatgtttcattgagtggcatggctgtccttattctcaacagttccctacttagggggcagttagtttatttcttatttttttgacggggtggtcatgattaatgttgtttcagtaatgtcttttccatatagggattattttctttggctagatcctgataagtgccatttctgagttaacaggtcttcaccaaacgttccagtgcgttccagtttgcactgccctgtgatacagggcagaggaggtcctgttttcaaaagtggcttatgctgtagcagggggccctgaacgtctgttttctcagtggatggaggggaggggccaaggcaggctggagaccacccttgggagtggaggccccggcctctccagcagcccccagctgtgtgctccctacaggtggtgagtggctgcctgcgcggcacagtgagtgtgtgggaggtcgtgacgggcaggaagacgatggagtttgctgtgtctgggggccagcacgtggagatgaccgccatggccctggatgagtcagagcggtgcctgctcacaggtttgcgggatggcacaatgaagatgtggaactacaacattggcaaatgcctgttgacctttcccagtccggaacagctggaggtcagtcttgcttgtcaattacagccagggacggcctcttgggaagcaaagcacagctcctttgaccctgggatgcactattttttgtacctctctgaaagggtgttcatcatagtcaggtggcctggcttcaaacctccctgagcctctgtgtcctcatgcatgaaatgaagacaggtaacagtgcctggactaatgggtttccactaaggttagctactgttgctctttaaatttgctagcacttctcattccacatactggagctttggattgcatttctagcagtgggatcagttaattcacagccacccatggtcacccctatttgggaaatgcctgatggtattatagggccagtccatgggagtggcatagggcaaagccagcagttccaccctaacttctgtgacacagtcctttaaccaactcagaaagtgtacttagctggccaggcagtggctcacgcctgtaatctcagcactttgggaggtcgaggcagggggatcacctgaggccaggagttcgagaccagcctggctaatatggtgaaactcccgtctctgccaaaaatacaaaaaaaattagccaggcgtggtggtggctgcctgtaatcccagctactcgggaagctgaggcaggacaagccgggaggtggaggctgcagtgagccgagatcccgccatcgcactccagcctgggcagcaagagtgaaactctgtcaaaaaaaaaaaaaaagaagaagaagaaagaaagtgtacttagccaagatgccaggggttgagtactgctccagatcctatcactcagtagtgacttgaccttagccaggtcacttgcccatttcccagctatcctctctgtaaaatggacatggatgcctaccctatctcactcccctaagtccatcaaatgagggaataggatgtgagaacatgatgacaaatacatggtggtatcacctgtaggtgattttcgtcatccagagatttgacttcttgcttggcacctttaggaagacatttagggcccagagccattttctctgataagttttctagttctgttttctttcatcttcaacagattagtgggattatccatatgaacaaagtgttctatg

SEQ ID NO: 1224 - DNA, 2461 bp, Homo Sapiens
aatcccagctgctagggccaagatcagccacgtgctcctttcccttggccatggctttggacactccaagctggcagtgagtgccaggtgagggggctgctaggagccggcaggggggatctcacctttgtgccacttatgtccctaatcaggggcaacctccccaaatctgcacccccaaatcccctccccagcttgactggagaaatcactctaactcccaatgatagcaactccaaatcatagcaataataatttactgagtgcttacagtgagccagacacagtgctagcatcttgtaccagcagttctcaaactttttggcttcaggaaccctttacaccctaagaatgatcaaggccctcaaagctcttgttcatgtgggttgtatctatcactaattaccattttaggagtcaaaacaaattttaataatatttatttataatttatttaaaatagcaataataaacactacatgtgagcataaataatatattcctatgacaaataactatatttcacaacacacaaaatttaaagagaaggaagtgtggctttgttttatatttttgcagatctctataatgtcagccttaatagaagacagtttgatttttatatctgcatctgcaagtttttgagataccacatgtcatgtagcccctgtaatattccactgggagttttaaaaagctttcactgagagcaaaaaacccccacaaataacatgtttgtattattgtcaacattattctgaattttatggaccatctgaaagggtctcagagaccccagaggtgcccataatacactgtggaaactgctgcctgatatacatgatgggtagcttccaatattgccccatttttacatatgaggaaactgaggcacaaggagattaaagtgacttgtccaaggtcatgcagccaggcatcaaagctagctggggagtcacttgattttggtgtccagggtcccagcactgagccctgaaagagagggtaggaactgggcacagaaaaagccggaagggcaggttgggccatgagtgggggagctgggtgtgcagtgaggggtgggggtgggaggggaccgggggatcagttagtcaccaagtggtcctggtgacagggctggagatggcagctggcggcggatgtagcctcgggctggaaaatcaataggtgatcagcggtccaggggcaagctgttcatcaggtgcggcagaggggcaggggcaggggcgggggggctgggaggaaatatcactgacccccggcaggattgatcaaacagccagacacccaaggccaaactcactaataaagtgagacattcagctcagcccggcggctgctgctgaaggtcttaaaaaaaccgcttactggggagttcttgataaactgtctttgtttcttgaggcaagtgggagggaggacagactgtggggaggcctggctcggctgccgtttggcctgggactcatggtttgccccaggtctggaccacagaaccctggtgcttgtatggcatgtgtgcttgcactacagcacatgccatttgtacagggcatgtgcagacacatatgtgcacactatgtcgcacacattcaaatgtgcctgcacatgtctttgcacgcccgtgcacatgctacaacctacatttgcttatggtatgtgtgcacacatatgcatgtgctacagcacatgtgtacaaatatgccttgcatgtgtgcatagacatgcgtgcaccgcatcacatggcatttacacatgcatatgctatggcacatatgtgggcacaaatgtgccttgcatgtgtgcgtatacgtgcatgtgccgtagcacacagaatctgcctttgaggggtgagcatgtgtgcttgggggttaaactctttctccattgtttcactgatatcaccactttctctgcctgtagtcccaaaggtgccacatttgtaatgacagtcatgattattatggggtggggagatggacggaaaagtagggactggaaaactgtatctaaaaggctaagctgtacaacagagagaggcaggtgtgaacaggaagaaagagggggaggaaaagtgaagggccggcatggtaagggctaaacatcgtttggactgggagttgagggagagaaaatggcaggattcgggggtggctgggtagctgttgggggagcaaattaaagaataaaggatatgcaaatataatttttatttttattgatttattttttttaagacagagtctcattctgttccccaggctggagtgcagtggcgtgatctcagctcactgcaacctccacctcctgggttcaagcagttttcctgtctcagcctccagggtggctgggactacagtctcatgcagccacgcccggctaatttttatatttttagtagagacagggtttcaccatattgctcaggctggtctcgaac

SEQ ID NO: 1225 - DNA, 2417 bp, Homo Sapiens
cacagcctgagtatattcatccattttctattacttatatcagaatacctgaaattgggtgatttatgaagaaatagaacttatttcttatagctgtggaggctgaggagtctaagactgagggcatgcatctgttgagagccttctggctggtggtgcagagccccgaggtggtgcaaggcatcacatcatgaggggcacttgtttgttacagcagcaagcataacccaagctaaccttccctgcccatggagaactctctgccagtaagagaaatgaggcattcacccaagtgtcttagtacagagatgacttacaggaacttcagactctggaggatgatttctcacggtgataccaggctgttctgccatgtggcacaactgcaggaggagccattcacattttctatgtgaacagcactccccgtatttgtacaacctgccaccctgggcaggattcccagaggagtgggcctgttgctgagactccaaggatgagtaggaaccccacccatggagatggggaaaagccactgcagctggatgaaacagaagggacagagacacagcatatggaaaaccagaggcatgcatgcgtgcagcagtaatagccaccagtgtctactgagcaggaacgataggccagacagtgtgctaagctctttacatacattagctcactcaatctcacaacagcctgtgcaaattcagacactctggctccagagcctgtgctttaaatcccccaacagatcctgcctactatcactaacattggtacagcactttacagtttacaaaactcttttggactcatgatctgttttcattatggcaacagagcaactgttcccattttacaggtgaagaaacagtactaacggtcttgtgacttgtcaaggttacacagagagtaaattgagaggccaagacttgaaccccatcctctggccttagacaaaggatgccacagcaaggtgtctgcaaagcagtctctttcttcctccctgctctgcagggaggtgaggtgtctatatttagatcattacaaggagctgctgagagaatgtcctcaggctatgaattcagccttacacgcaaattcactgcagatccaggagaaggccaggaataaacgggtgggagaaggtccttgactccaaacagaaactgagctgatcaaacacagcctgagcacacgcagaggctgcaggagggaaacgagattaatctcaaaccctgtgtactcagaagctttccccagaacccaggtcccactggcaggaaattgtcacttcgtgcatttgtttatttttcccatgtcttctgccaggctccgtgtttcactgagtccttatcttctctgtgcatgtccacaggctgctgggttggaaatagcccaaagccattcagaccatttcaggcactgagttgtatcaaggatatttcttgtgggtagagcaaagatacgctcccactctccagttgggctcactgaggcctccccctattggggaactggctgggctcctctggcagagatgcctgctacttatcaaaaatgcacgttccccccactgtggtatagagttgtctctgagaaacacagcccaaccaggaactacatttcccagctaaccttgcagctaagtgaggtcatgtgacctgttctcaccaatggaatatgaacagagtgataggcttctcacctgggcaaaacagagttgatgtgctttctccacattctcgctcagcttctgcctggattcagaccctagggaatggtagagccacaagatgaaagtaaactgggtacccataaagagaaaatacttgtgttagtttactaaaatgatgagagttatttgttatagcagcaagcataacttgaattaatatatcttccttcctgactcttggcaactttagctccccatggagacaggggttggaataccacttgttcccccaaagagagctgtaatctattgttccctgttgtgtgctggcttcaccctcacacctggtttcctgcctcagttttcctgaatagaatagtagattccccttaagacagaggtgactcttatccaagtccatttgggactgactgcccagccttggtcaacatcaaaatgcgctaagactccagtgttataattaatgtccacctaccccccaattcatgtggccactgctcagcaaccctgctactgtatttgttccctttgaggttgctactggctgggtttgggccccaaacagtctctagctgtactggtggcttgataccagaaacttgggagaagaatggtgtaagaggaagagtgtattagtccattttcacgctgctgataaagacatacctgagactgggcaatttacaaaaaaaaagaggtttaattggacttacag

SEQ ID NO: 1226 - DNA, 2486 bp, Homo Sapiens
gccaaggaatctggatacttgcagagctcagttagattgcatacaacgctagctgggtgtggtggcgcacccctgtagtcccagctactcaggaggctgaggcaggagaatcgcttcaactccagaggcagaggttgcagtgagccgagattgcatcactgcactccagcctgggcaacagagtgagactctgtcgcaaaaaaaaaaaaaaaaaaaaaaaaaaaaagattccatacaactccaaatgatggctgtttgactattttttcttcacatcacggatcacccctgccgttatacatccatctgttgattgtctttccccctactagaaaggacaaggactttgtgctgttcactgctgtgtccccaacagccagaagagtgcctggctcacacagacactcaataaatacgtattgaatgcatgactttactggcctgtgtcctctgcttactgagttattgaaagtcagggacctgttggattcatcattgcgtccccagggcctagcacagagcttgatgcacatgctgtttaataaatattgaaagaataaatgaatggaaaaacgtcttccccaatgtgttacacactcccgcagggccgggactatttgatttatgtatctagcgcccaacacattgcctggcagaaagcagaccctcaataaaggtttgttgagctagacaagagtctcttctgcatgcgggcccttgtcaggcctgtcatgggagctcaaataaaggcaaccagaccctatactactggatcaggcagaaagagataccttgttggcaaaggatcttaggaccctggagtcataggctgtgcaggcaggatcagcctgcatgtgtagggtggccagagagaccaaagagggcttcccgggggtcaggaatcctgcctttgtttatgtcccctagcactgcccttctctggcaactggcaggcagccccaccaatgaggtttgggcacagctgggggtggaatgggatgggacagatggtgggagacaaggaaacccccatgttttcctccatctgttacatttaattgacttcccgcagaaagaaaaaaaaataaaccagttgcaaggatgaaattgctaattaaaaggccctctgattagatagacaaatatttaccaattatgcctgaccctgcctgtccccttttacgtctgcgaactcccccatcagcactgtggccacatcatacccagctggtggctcttccaccaatcactctcttggggctcagactggctgcgggtgaaatagggtagaagaaaggtgaatactgcaaacagccgttcaacaaacgcgatgcctgttgcatggtcaggcttagtgctgggcccctggaagccatagcagaatttccatggacagcctttcaagttgtgtgctgcacaaaggtgcacctgcaggagagtgggggctccccctgtcaacctgggacccctggcaccaggcaagggggatttttattttctttgcgcaacgggtcattagcttgccaagctgaatccacaggattttgcctgcccagagggggtacctttttctaattcacacagaatgggctagtggcagctctacagagatgaagatagttcagttcctgatcctcaagggctctagggatagtgggggagaaaaatatgcctatgatgtataaacattcatgtgtgattttttttcttttttcttttcttttttttttgaggacagggtctcactgtgtcacccaggctgagtgcagtggcacgattacgacttgctgcagccttgagacccctctctccccagcagcctcctgaggagctgggattactggtgtgcatcaccatgcctggctaatttttcattttttgtagagacaagatctctctatgttacccaggctggtctcgaactcctggatgcaagcaatcctcctgcctcagcctcccaaagtcctgggattacaagtgtgagctaccatgcctggcttaaacattcattcaataaacatttcttgtttactggccactaatgtttgccaagcactgtactagattctgggagagagagagatgagtaatatatgtttcctgccctccagaagccgggctatttgggggagacagagatacttacctgggtctgcccttcctttttccccttcccttttttaattccaaataatcttcacctgggaggtatgaataaccgctctggactctcaccattcaaatcctggctttaccgtgtcttggctgtgtgaccttgggcaagttatctcacctctctctgcctcaggttgcctctctgtaaactggagataatggtaactgcatcccagggttattataatgattaaataaattagcacatggaattcatgcctgacacggagtgctcagtaaaggttagctattgtgtgactgtttcttttttttttttgagtgcctactgtgtgccaggccctgagtcctgg

SEQ ID NO: 1227 - DNA, 2463 bp, Homo Sapiens
agtcctgctctaccttgcagatgctacacccccatcccaccttcttggggctccatgggcacagtgcaccagctctggactggatggtaatgtcctctagctctagctccatgatatccttggcatcaagtgacagcaattgttgctgcagacttcaggtcaggagtggccttgcatgctcctgagcccaaggtgctcctgatggtactgccagtgtcctcactggggcattttatcctgcatatcctcctgaaaggcaattttatcctgtatatcctgcttctggccaatccagtagccccacagtcttctctgagaccttgagtttgcaatgaggttcccagagactggaacctcacagagttcctggttattgctttgaatttgcacctgtggatttaactcctggtgatccaaaggcaatcaactttggggtggaacttcatgagttggcttcctaggagagaattggcagtggcagctagaggaagtgtgtgagaggctctgttcagcagggtgagcatatgccttgctcattcgaggcactgacagtggcagaaaccaaaggaaaggagcagaggcagagtggcttggggcattacaatgatccgtgcagttagatgtgctcggtgttgatgctagacgtgctcctcccattgatgatagtggcaacaacagtactgatccctttaacattattgaggtctattatgtgccaggtattgtgctaaaaacacctagtctttatggaagtcttgtgatgtaggctctattcttactcccattgtacagatgaagaagatgaggcataacaatttgtgcaagcccacacagttaatgtgccggagtcaggctttgaactccgacagtctgactccagaccacctcttcctcccagtatccatgctctggtgcctcctgtggcacactcagaagatggcctgcatgtgcatgtgctcatttctgtgtgtgtgcatgcatgcatgtttatgcaggactgggaatgcaggggagttagagtccagttaggaaggagagaggaaatatgatctctttgttgcatgtgggcaccgtaactccagccaggcaaagtgctggtctgttgtagctcatttttatgtttttatttagaagcttcaataccagagctgatggcagaaaatgtgcagtaaaatgcggggaggccgctgggtaatggcccctgtaaagtgttaattgcctattgagactgcagactttgtccatgctccaggatctgaactattgacaggttctaatttatttcgggcccacaaagcgggctcctcctctaaacaggcttccaatcagtcacgcttccctgggcctgccaagaagctccagtcgataagtatgtttgctgccttaaccctttgaagctggtcgtgtggtctgattctggcttgccttaaggaaacttccatgcacaatggtcttggatgaaaatccatgagaatcaagtgctgactccgtgctgggctcccagctgggtgttttacatgcattgtctctgatccttaccgcttagagaagcaggtagtatctcttcaaggacatcctaacctcagagaagttgaattaattgtttaagtgaccactatgattatacttcagactgttacgggctaaactgtgttccctcaaattcatgctttgaagctctagctctcagtaccttggaatgtgaccgtatttgaatatagggccattaaagaggtgattcagctacaacgaggtcttagggtgggccctgatctaatcttactggtgttctttcaagaagaggaaatttggacacagataaatacagaggggtgacccactggaagacacagggagaaggcagccatctacagactaaggggagaggcctcagaagaaaccaatcctgctgacaccttaatctcaaactgcaagcctccagaattataaggaaatgaattcctgttgcttaagccacccagtctgaggtattttgttatggtagcccgagcaggtgactacacacacccaggacttggtgtggccttgaatttatgcacatgaccactgtaagtatgaaaactctgttctctggcttatggctccagttagaataagaagcagaaagtgggcaatattacctctttgcagtaaatttgttcttaggttgggtcctcaaagggcccatgcctatccattagaaagaaaaagaaagctagatttgggattctaagtgcaaaaagaagtcattgactgtttctaagcagagtcagtaacacaatcagaatttctttctttttttggaaaaaatagtctcctctggctactgtgcatagagaatggatggtagaacacaaaagtgaagcaaggagaccccagaggaggctgttgcactgcaggcaagagatgaaagtgacttgatggagagtggtggcaacagagaaggaaagaggtgaatagatt

SEQ ID NO: 1228 - DNA, 2461 bp, Homo Sapiens
taccatcgaggataattgctctctgagctatatttccattaccaggtgccatatcacagcaatgttttatattatatcattttattttatttttgtgaggcagggtctctgctgcccaggctggagtgcagcagtatgaacacagctcactgtagcctccactttctgggcccaagcagtcctcccacctcagcctcccaagtagctgagaccacaggtgtgtgccaccacccttggctaaattttttaattttttgtacagacaaggtctcactatgttgccctggctggtcttgaactcctgggctcaagggatcctctccccttggcctcccaaagtgttgggattacaggcatgaatcatcatgcctggccttactgcagtattttaaacctagattggaaaattagcaattaaaagtgttaaatatagaactatcaaatagatggactaaagacatatcaagctcttggtaagaacaacagtcttggactgacaacctctgagttaaaggacagccgtgttttcagaatgagagcacaactagataattgattggttcatcctcttccctctggctggtgttgcattttggttgtaaatatgcacgaagtgtgtgcatgtgaatgtgggactggagggaaaccatgagtatctaattaggcatgtttatatgtgacctgtgtgcttatgtgtgtgcgtgtgtgtctgtgtgtgtgcatgcatgtgtctgcgtgtctctgtgtttctacatatgggtctgtgtgtatatgtgtgtgtgcctgtgtatatctgtgtgtatgtgtgttgtgtgtctgaaggtaaactccaagaaggcaggggccatgtacttagcatagtcactggtacagaataaacactcactatttgttaaatgaatgaatgaatgtgtatgcgtgtctgtgtgtgtgtgtgtgcatgcatgtccatatgtgagtgcgggtgtttgggtttctgagagtggggttattaatgcttgagtgggtgtgagggtcctacatctgattatgtgtttaggtttctgtaagtctagaacttgaccatgcagagacaatgaattttcttgcactcctctgacccctacctgtgctcccactcatcttccttagggctccccttgcctggggagctaccctcctcaccagcctgtagccagcccccatttggacctttacttctgtgtgtcttccggaggacacagatggcaggagcacggaatcggaagcacttggcaatgaagcagcaattcattccgcaatcccttcgtattcatcgcaacaatgcctgctctgatgggctccgcgcgctgaatgcagctttcaatgtgcaatccagcgggaattgtggtgctttgtggtcctcatcacgtccacttattgtcaagtgttgctgagaattctcccactcgggatgagggaaccacttgttttagcaactgatttccgaaaccttctctgggttggggtatctgcgaagctcctggtgatgtgttattgttcctggtttgtgttttggacactcatgtgctctgctgaagtatgtaaattgccataatgtgaggaaatgtgatataaaaataactccggggcaacaaacaccagaggagctccaagattggcacagcctttcctggtcctgccttggggctagggagcatctcttgccggcagtgttggcagcaaaggcctgagatgccctggaatgaccactgcccatcctcctgcagctgcccagctggcctgctggagaagggcgggtgagacccctcctaggaaggcaggaacagctggatgtggaccgtctccttttttcgcagctggtcaacagaaccacaggctttgctctggctaaagggaatctgccacccctgactattcaggtggctgcacacactcaggggcaaattcacattcattgttggccgcccacagcccgttcatcttgccagcagggggctgtttcccaggatcccaggtcaggtggcttcagctgggatccactgggaagcattgatggggagtggaggacagcggaggggaggatggagacaggaggagctgggaaagtctctgtttccctctcctctctgactcagataatgtcttcaggagcagctggtctcctctgtggatccagaccctaaaggtgacctcctgtggtcttagcttctggcagaagacccttgctcctggtcatcccatctctcctctgaccctctggcctagcggtggtggtgatctcctgctgttgtttatctctgggttgactcactggcccttgtttggcctctcagctcttccattacccatgtgacagattcctggcatcgaagtccctctgttttaagtgttcagtagtttctttttcttgtttagactctgatacttcatcaaggacgtcttggactaccagatcttcctccatggcctgtcgaggaaa

SEQ ID NO: 1229 - DNA, 2495 bp, Homo Sapiens
accatgttagaagggttagaaaactttgaaagtaattattagttcagcagaagctgcaagaggcttctacaccatgaatagcctaattttgataaatagaacttgtctatttagtgatcctaaatgtatctaatgatgtcatgacagtagtggccacaacagtatcagttcctgacagcagtgtggacacaggttctgagaaccccatacaacagctgactagataatgtgacattggtgtgaggatgtgtgacccagaccactgctttagagtgacccagagttggctgtgaaattgcaaggaggcatcaaggggcaggcactccagatcctgagtcatgtggaaagtgttgagtcatatggaaagtgctgacatccaggggtgggcctgggtgtaccacgaggtcagtactcagctgccctctggatgcaataaagcctggacatcaataacctaatgattcttgacttcatgggagtcagtggacctgctttacaccatttctatgtcaaaccatggctcacataaggacgtcatttagttagagacccatatccgaaaaaagaccactccggaaatttttaaaaattaacatgtgatttggaaattgttctaatgtttcataaacgttgaacatcatgactcgtatgaatgattatgatgttcagttagtagagtactaaaaattctacctatgcttttgtcagtgttgtaatttcactaatactttttattactatggcaatgctttttaaagttgtttaagactcataataagttgcaaaaatagtgcaaaattcctgtgtaccctttactcaccttcctccattaataatatcacacataaccacagtacagtgtcaaaatgaggaaattaacatagtatcatactgttaacttgattacagaatttgtccagattttaccaggacttacgtgtactcttgtgcgtacatgtatgcgtgtgtgtgtggtttacctctatttttaaggactgtctttccttacaatctctatgccaaggtcatggagttttagccattgctaggcagaggtggagctatacatgactgcgcccccacataatcacattcctttcatttaagaatattcatcccatatggagaaatagaccatgtttattaatcactccagaaagtatgtaatttcattagatcaagctctgtctctgggcattgactaatagagggaacggctccccagcgacccagaacccctacgacacggtctgtggagaccatactttggggccagctgctcaaatgcactgctggaattccaggcagaaatgtgtaatggcatgccaagggctgctgagctgtcatagtccaagcagggttatttgtggcttccaaagagaggctgtaaccttttatggtatccacaaatctcagccttcaagagtcagggagaaaatgcaaccatgctgtttgaccgagctaactctttccccaccttgcccctctcccactcccaccatcactctacccccaaccctgagtagtctgcatagctgtcccagggcaaagaacatggcatgagacattacctttagcattacctcagggccagataaaatggccaggcatcccttctgattcaatgagggaaagtcccagaaagttgttgacaaagtagaaactttctaatttgaggtcctgaacattcattgttctttctgagcaagacagaaaagttttacttattggctggggtacttttaatggcagctgtaggccagggacagtcatgtctacacatgtactctcttatcattgatcaggcccattagaatgccagagctaaagaatatctctcctttgctttgcaggcacatggagaagggtttcctgttgtcccttttgacataaacacagtgcttgaagtatcttttctggcaacttctctgatccacttgtatgtgtattcacttatttcattcaccaggagagtcaaatgagtgaaatggttacaaatggtggctctggaatcagacagacttgggtttcaatactacctctaacacttattggctgtgtggccttcatattaggatagaaagttcacatgttgaacttctaatccccagtacttagaatgtgactttatttggagatagggtctttacagttgtgccctttacagttgttcctaagaacacctaagattggtgtccttaggaaggggtgacattggagacaggtacatataggaagaacaccataataacgcgaactcagagattggggcaatgcttttacaagccaaggaatgccaaagattgtccaaaaatcactggaagctaggaaagaggcccagaacagatcttccccttactaccctcacatggtgccaagccctctgaccttgatcttggacttctagcctccaggactgtgagaaaataaatttctgttgtttaagtcaccacttagtatgtggttctttgttacagcagtcctagcaagccaat

SEQ ID NO: 1230 - DNA, 2425 bp, Homo Sapiens
atgcatcctgagtgatccaggaaaattgccttctttctcttctcctcaatctctaagtacctaaactaagcctcctcctcttgcaacgttttatctctggtgttcatgggagttgagaacacaccattggagaatttcctcagttcaaagacaccagatcaacaaaacaatctggatgttaaccctgaagccagcctacaataatcagggcttctggctcaggttcacaatgagcaggagacctctgccacctccagtgctacctctttgtaaaacctcaacaagctattttatgtgaaaatattaatcactgctcattgcagcgttcaaaatcagtcaaggaagcctctttgaaggtggtgacgtaggggtttatataagggatcagctgatggaaaggagaaagatgcgcgttccagagagaagaaacaagctgggtagttttgcaaatggtttatgcccatgtggagacacgccaggttagagcaggtctgtgtgggagagaagttgtggttaggggcatggaattggacagagaccaaaaacatgggtcctagaaagtcaaattggaggactttcatcctgcaactccaccctttcctctctttttttcttcgaaattaaccggacttatttcttattctcctcatgggagatttcacagctattatttccattttctcaatagctttgggaggtataattatccccatttactagctaaggaaactaaggcttaggagggttcactgacaggagcgggagcagcttgggctcatgtcacgtgtcttcatagtcagcacatagcttcatctgtcctatcctgcacctgctgtgtcttactgcatttagattgcagccagctttctctctgtctctttgaatttcagcacaggtaggtactgcacttacccattcttatagatggcaaaccgaggctcagagatgttaaaccactcctccaatgtcacattgctaggaagtcgccaacacattactaaacctggggacatctgctcttcagggcagcactccgttgcctcccaatacccagtagctgtgattgttagatgatgatgatgattattaatagagttattgcttttggggcaacactagcagtgcagcagcgagcaggctagcagggcccagggcagcttgctcggccacatctgccctggagctgctgtctgctgtgcaccaggaacccgccgaagcctgagagctgtcagcacagattccaccagggagccagcaacgcccctcacttcctcaggcctctctgaaatccagccaaggaacaggcgctgagctcacagtcagatagctcccggagcctccggccctgggcacggtgccctagctggtggagatggaaacagcaaggcccttctgactcaaagactcctcattgcccctgacacctcagacttaaaacccaccatcactgtcattcagcatccaccctgccaggcatgatgcagggagagaggaggggataaaaaagggaagggccgtacagagccagggcagagggaggaaccgagctggagaaagcattaaggacccacttgtgaaaatcctttggagtgctgaggctaaaagcccatctgggtgggatcaaaggggagcccccaacacagcccatgactggaggatcagcaacttgcaggcctagttaggccttgatttccctttttctcagcttttgaggagaactacagtcactgcctgagaaaatgcagcctcaggacacaggattctaattcagtgcctgcacagccttccaaccagaggcctgcaaatggtagagtcgtccatctggatcattctgcaaattgtgaggtcaaattgcattaataaaaaaaagcattccccttttaattctctttctctttcagtttctcatcagattgggatgagatgcagaaatgcatcagattgggaaacacacctaatcctttgctaagctcccttttaaacaacaagcccaatctctggtaggcaagggtgtcttggtaaaacctaaatagaattgcctagtttccattatactcattttgacagtgaatcctttagaataggaagtatttcttgtctaaagtttctgtttagatcctatacatgaagtttttaaaagcaaaaggaaatcacagctcagccctttgcagatactctgaacatcttgaggagaggcagggacaaccggaggtagggaaacggggtctcggatgacaagcctcagctctgggaaagttctggaggtggcaggacagccaggccagagttgtccggtggagacttggctcctgaagccagcggggcacccctgagcagcaggcctttctcagagcaaacatcagtctctctcctctttgtccttaatgaccacagctgggtaggggggagaggctttaactcccaa

SEQ ID NO: 1231 - DNA, 2488 bp, Homo Sapiens
cttttttctttttgagacggagtttcgctcttgtcgcccaggctagagtgcaatggcgcgatctcggctcactgcaacctccgcctcccgagttcaagtgattctcctgcctcagcctcccacgtagctgagattacaggcatgaaccaccaccacacccggctaattttgtatttttagtagagactgggtttctccctgttggttaggttggtctggaactccagacctcaggtgatcctcccgcctcctcctcccagagtgctgggattacaagcgtgagccaccgcgcctggccgaaccattggctctttctaagcagtggaataacaatggttcataacatttagaagatggggttatacactcaccagatctatttccctagagcctatttcagtatctgatacagggtagattttaataactgttgtcaactaataaatatatatttttaaatacattgtcagcaatgtggaagatacactgaagaaggaaaagactagtggcaagatataagccaggtggtaaaatctaaaagaaaagtcagtgatagaaaagaagtttgctgagaatgatggtttccagcttcatccatgtcccatgtatacatatgtaacaaaccagtacattgtgcacatgtagcctagaacttaaagtataataaataaatatgtgtgtgtgtgtatatatatatatacacacacacacacacaaagaagttgatatgggagagacatttgaggtagaattgacaggtcttggagacagcatgactgtgtggtctcagagagagacactagttgagaacaactcccaaaattcctatttgtgtgtgatcctccatgggggatacagaagggggagtctagtcggggattttgagttccagttgcctttggaacatgactgcacagatcgcggcctgaaaggaagtggcagagaagaaaaattcaaaatggctgccaatagtttgccctctggaggcctcagagttccgggggccatggatgcatggccacgcagggtgagcaattgtgatgagagaacagaaaggaaatccaaataagagaactcaaagcagagatgagctaaaaatcagcaacacgaaccatcacaagtgggtagttacgctcggcaggagatccaggcaaagcgagggcaaacttcttagccttttcctgtggaaaatttataaagctcagattggagaaaacgtactgatagttttgaagctggcattttaagttggaatgtcttctcaaagtagcacataacggcacaattcaataactctgaccattgtggaaaaatgccatgtgccaacagcgattttccataattttgttcagaaaatctgaaagaaatgcaaaaaatggatttgcagccctggcagcaggcagagaaacagtagcagagggctgcaggccagtaattgatgtttcaaatatcactgagtgctttgcctgtaatttcaggggagaatgataataattaaaagcacaaacttacaagtcatttctgaggaggaaaatgctgaatgcacttaaagtgaagggggtttgttgaaatgcttaagtttttccagcgagctttcagatatgcaatgattagttttatgttcacagagtgactttctcctcaaatgttccaaagtgccacaaaatggaatagattattaacccatgagattccctgggagccagtgatgaaactataaccatatgacattcccacatgttcagaccttacttgattgtaccggcctttgttacaaacagcacagtacactgtttaaaaggatgaaatgaaacctttcctccttctcccaactgacttggggctttactacgaggcagatttgagcttgagtctgcatccaccctttttagtgctgtgaccttaggcaggtcactctattcctctccacttccattttttcatctgaaaaatagatagaacaatagcacttaacatctcatagggtgaatattgaggattacctgagagtaaaacaatcaatataatttcccacttataatctacgctcaataaatattagctattattgatattattattactgctaaaatgacaaaggcacactatttttataattatttatttttgctgacagaatgtaaatttggccacagattgtctaaattttcctgatattttaaaacaaacaaacaaacaaaccagccagagattcaactgagcagcataaccctttcctgaaaggaatcccccatggttaaacaaattcagggactgagttttccatatcccagaccctattacccattgtattacaggccctggcatgcagtgagcactctataaatgtggagcacatatattgctgaatgggtaaacagttttatccctcctgagaagtaaggacctctggtccctcaccactttctgatgactaatattatgcttgtgcccacacaagttagctgtgacatctggatttttttca

SEQ ID NO: 1232 - DNA, 2378 bp, Homo Sapiens
ctgaagtcatagtccaggctctgacccttactggtagtgaaacttcaccttgacccctgtgcttcccactctgtaaaatgaaggtgggaacagctcgctgagtgactgttgtggggattagatgatatttgtggaagaactttgtaaggggtaaagaggtatcaccttataaggtaatgtcatcatttttaaggtggggcaagtgacagtcagacactcaagttagagcaaagccaggagaaggttgcactggcatggaaaggggtaaatagcccacctccaccagcctctctggagggtcaactccaaagttattagagttttaagttttgggtaaaaaatgtttgtccttagagtaactcctcacttcttcagagttattatgtccaaggtgttttgttctgtttgtttgttttggttttggtttttgcttcattttgtttttctgagacagagtcttgctctgtcacccaggctggagtgcagtggtgcaatctcggctcactgcaagctctgcctcccgggttcacaccattctcctgcctcagccacccgagtagctgggactacaggcgcccaccaccacgctcggctaatttttttgtatttttttagtagagacggagttccaccatgttggccaggatggtctcaatctcctgaactcgtggtgtttttattttgaaaaagggaaaaatacgttttatgccctgaggtctaatcacaaaataccttcactcttcaagtctgaccaggagccacttgcctcagaatgacctggagtgtcgttcaaatgcagatcctcaggccccatccttgactatcacttaatttttctgagcctcagtttttgagttttgaggcgtgacgtaacttttgctttaaacctcagtaagagagtttcaatagaaaaaaatgaacaaatgaaaagatgaatggcttgcaagggagaggtagaatatgtatccagacaagatgactcctattgtcccatccaaatcagacctccattatcccaggtccccaaagatgtcttcagtctcaaacaaccaacagagtggccccattcctatccactgtgcatcctggccaagtgcacagtaagtggacctcttggccgggcattctgccaatgctggagctgttaggaaataagaatgtgtgtatttattgaagaaaataaaaatgttcatgcgacgttgcacagagacgatttatgagattttatgaatgtgtcaccaaaagacccactcagtcactgccaatgttaggtctgcaaacacctgggggctcaggcaacaaagctccctgatggagtcagtgggcaggacgtgcttgtggaggggagtatgagccctgtgctgcaggtgcctgcacctgtgagttgtgtggagccaagtacacttaaatcataagtgtatatatgggtgtaaataaatgtacacacactagtggtgtgcaagggagtatgcatatatgtggaccccatgagatcgcatagcatgggccactcctggtgtgactaggaagagaggctaagccacagtgcagaagtggacccattactcacactaccttcaaaggacacagagttctcgctgctcaaaggaaggggttagtcatcacctactgctaagaccaaaagccttggggcatcaagaaaagcagattatcaagagaaaaatgtctctagccgagcatgcaagaatggatagagtctgaccaataggaggaagagcagggtcccatcttgctcacctcctctgctgggcctgaacttctcattgacattatagcctattagttccaggtctctgaagcctctctgagttctgtgaaccaggtttatgccttaccgccctcctgggagcattgtcttgtgctctccagctgccaggctggtgcaaaccacagaatgaacaagctctcctactaagccccttggagcctagagtagttcactgttttctgagggttaccttctatgggagaaagttcaagaaaatgcatagaaggtatgttattaaaagaaaagggaagaggaagagaaaaggaggaaggagaaggaggagaaggaaaaggaaagcaagaaagaagtgcttttagggtgagtccctgaatcacccagagtccatcttcataaaaatagccttaagaccccttgtgggccatgcaagaaggaggggtgcctacttcctccctccctttcattcctctgcaacaaggagagaatcataggttttgcaagagccctttgtttgcctggggcacgccatcatcacatgcatcttctcaggcacgtgagggaggtcacttccctacgagacagggaggaaccctgggcaactgtggcttggaaatgaaaccagccctttcaa

SEQ ID NO: 1233 - DNA, 2432 bp, Homo Sapiens
gactctcccacctgtgagtttctgaagaactctgtatataatgccaatatggtgctggtcatattctattctgatttccactgtgcctatgttctccaccagactgtgagctctttgaggacaaggacttggttttatccacccttactcctaggttcaccccaatttggaatggagtaggtgcttaataaacacttactgaaatggacatcaaacctgaataagttctgaggactcccaagtccctcagggctggagagaggaaccaccaaattccctctgatatctgggacatacacatagttcacaacaattaaaataactaaatctggatgactcaggacacctgagctttccctcctacattttccaccactttggcaaaccccttaacctctctaagcctcaatagcctcatttgtcactctgaagtaactcatgtgccggccagggctaggtatgtttagaaacgccatctgttttagccctcacaacaatcaaggtacatgagcacttgatttccactttatagatgagaaaaacggaggttcagagagattgagtaactttcccactttacacagctagtaagcagcagagctgggatcagaccaggcccctcaacccagagacattacttattcatttaccgctcctctcagaaaaatctttattgagcacccactgtattgttggcacagctctagatgctaggggtacagcagtgactaaggcaagtgattaaagtgtccccatatttatggcatttacactttccttctgtcatgcacccccccaaagctggtgacacaacatgagaggggcaacaggactgcagtggccccaataaggtccagcatacacagcagctttagaatgagagcagcaagactaaccagccaacgctaacccccaccacaggtggagatggagcctgatgtgaagccacgtcctgcttgctcaggacagggcaggttgaagttctttagcacctgtggttgggctgggccaggacagagaggggagaggcaacctggaagctgcaggtcacaagtctcctctcctgccactttgtgccccctccccagtcctgtcctcagccaagcacaggagcagtcgctcaagtttacgatgtgctgcgtgcaggttgcagacctaccatcatccataataggttgttgtttttactttccatttatagaggtggctgagttaccacctatggtcaccgcagccgttaaactgctccgggggctgagatttacatagcagccatgtgagctgccacaaacttggggttgggaggaggatgttttcaatcgaattagagctgatgattgatagacagggacagcagagaccagcctcatcaactccaaaaagcccaggaagccctcacccagaatgcactccctggagataacagtggtggagcccaggccatgcatgagataaagaaaaaggctcagaacaagtgggtgcacattcgcaccctggaatagctaggaagacctgggagtgggaattagaggatggacctctactcctttcccccatgatatcaaattcgcgtagtaattatgtcttttacctgaacagtggttcctaacaaccagctaataacgggatataatctccatagctttcaatcccaagatctcaaaacatattatgaataattaaatgccattatttagtgatttgggtaatcaaagacctttttaactgtcattttttttcttttgctgtgcccagaacacagctcagcaccatgttctcaaatgaggaaactgaggcacagagaggccaggtgaactggcacagatcatctgatacctcatcgtggctcttagtccccactccacactctttctccagggccttcagcactgtgcctctgcatgactgactgcccccttctccccagccccaaatcccacccccacctttacccatcctagacaccattatttaaatgtttcctgttgaaatcaccctcattcccactggggcaggtgcagggatccagcaggacaaattggccacctcccttcctggcctcaccttggcccctctcttaccatttaaatcctccaccctgaacaaagtagcaaaatgtaccccccttctcatgcggtttagtataaggacaggtttggatccctacaatgaaagttcatgtttctaacaagtgtccacagccagtgccctctgcatccatttaactgttgcctcctgaaagctatcattttctatttcctgtgactaatgtgcactgggagctaaattcacacgtgtgtgcaggaccctacttccaaagacatgtttcatcatcgtccattgacagggctctcaaccccaagccaggacccacgcatgccagaggctgtggcgagccacgagcattgcgtttactcatgcatgggcataaa

SEQ ID NO: 1234 - DNA, 2475 bp, Homo Sapiens
cggagagcacagtggcctcctccaggaagccaccttgacttttactcagacctctccctttgtgccaggcactgtgcttttcccacagcctctctcacagggtctctcctcgacacaactggcacctgacgctcttgtccttttgaaaacaaggaaacagagggtcagggaagtaactggtacctagtgctgttagggccccgccccttgcagatgaggagacaaagggccagggaggcagtgggatggatatgttgaggtcgccaggaaaagacagcctgatgtgcacctggagctgtctctgaaggtctcacagaacctggcacagcgtcaggtaacccggctgcctctcctgccacacccaccaaccccagagcccacaccttggcacagaaggaagagatccaggctggtgctgggtcgtaatatcccagggaaaggggtaaggagccttgacctgctcccatacctgcctgtctccaaactgggctggatcctggctgggtggccgctgggtggtagccttgtcccaggacacccggcagcaggacaaggtgggggagccagttgctctgtgagttcccctcaggaccatcccttcctgctccgctgagcagagacacagctccccgaggcctgagtccccatttttcaccatctttatcctcgttcctggcacagaaaagcctcagtatcactttgtcgaatgtggtattgagtgcatgggtgaggcactcctccaagcaacttactacagtaactttttaaatgtttacatagccctctgagaaggggactattattattgcccgttcacagatgaggaaatggaggctcagagaggttaagtgacttactggaagtcacacagctggagctaggatttgaactcaggtctcctagctccagcgtgcacattcttgcccacatgtctctgctcccagggtagcagtgagcctgaaatacgtgcagtgcctggcaggtagtaggtgcttttccaagcccttcttttgcttcactcagccttgaggtcagcggcccgttctgccctgtgcctgggaggaatgttcgtggtggccccagcctggatccgagaagaaaggcagccttgtgggcgaaaggtgagcggctgggtgggcgcgggcgtgtttatccagggccggcgtgtggctcggggtggcgccgctgtcagccgcgccggctgccccaggcctgtgctggcctccagatgtgagctggctccagccggccgggcccccccaccccacgcacagaggggctttatcaaaagcggctgtgaggaggcccaggaggccgcctggctccagcctgctggctctgagccccgggcctgcagaagccaggccagtcgcacttgtgctcttgtgccctggtcttcgtgtgctccacggcccagctcctctgttctcctcgagtcccctgggggcccaggcgagggacagcccctttgccaggaaactgaagctgcaggagcagtccgggaggggtaacaatgccagaaccctcctgcagcgtttatttttctgcattccaggggggtagaggtaacccacacggaacaaaagtgcaaaattcatcaaaattcagagagtgctcagtgagacatcaaagtgtagacactcgtgggaaggagaaattgcagattcagagagccagttcttagcggggaggagagtaactggggttggggggtttgcaggggctatgttttctctgcggtattttcttttttaggtgggggtgggggtgttattctttttctttttcttctttggagacaggatctcgctttgtcatccaggctggagtgcagtggcgccatcgctggctcactgcagcccttgacctactgggctccagcagtcctcccacctcagcctcgcgagtggctgggactccgggcacgcaccaccacgcccagataattttttaaaaatagagacagggttttgccatgttgcccaggctggtcttgaactcctgagttcaagcaatcctcctgccttggcctcccaaagtgctaggattacaggcgggagccaccacgcctggcctccagggatgctattctgtatattttattcagtggcctgaactattttgtaataataaatcataataactgggaaaaaaaacagagaaaaaacctgagacatccacctgctcccgaccctcagccctactcctgttaaaaatggcttctaatgctttctagagattgtctgaacacccacaagaaaatccacatacattctctgtcctcttttgtttttggttttataaatagtatcaaaatatagtctgagcacagtggctcacgcctataaacccagcactttgggaggccaaggtggacggatcccctgaggtcaggagtttgagaccagcctggccaacatggtgaaaacccatctctactaaaaatgcaaaaattagtcgggcatggtggtgagc

SEQ ID NO: 1235 - DNA, 2456 bp, Homo Sapiens
catttgtatacaatgtaagacatggatacaatatgcagtgctagcctgtattttcctatttgaatatcccacataaattactacagataggataaaaaagacacatatctatttaaatgacttcctagtttccattccaaaagcagaagatatgtacttaagcagcacatgctacagtgtcttctctttcaaactatctgttcctagcctctagggattttgttttgttatgtttcattccactgcctaagaaactaagattttgccagcaagagggccaatatgacaaatcatcgatgattcttagcatggagccaagaagcctgcctccttgatcagattttcagctggaaagatatccacaccttgcctagtccaatatttgttaagtgagaatataaaattcaaagatgttctgtcacactctagatttgtattaatgtccacaaatattaaagattcacatgatacatatttaggaaacacatgctactttgttactgtttgaactctcaggaaacaatgttcccattggtgctccgaattgttactattctctgccatcctgaagataactaatacgtacctatctgtgttcaatctcagctttagattatggcactggtgtgtgagaaacaactggttcaactaactataagcaatatattaactctgcttttttttttttttttttgagacggagtctcactctgttgcccaggctggagtgcagtggcacagtctcagctcaccgcgacctccacccccggggttcaattctcccagatactcctgcctcagcctcctgagtagctgggattacaggcgcccaccaccccacccagctaatttttgtatttttagtagagacagggtttcaccatgttggtcaggctggtctctaactcctgacctcgtgatctgcccgcctcagcctcccaaagtcctgggattataggcgtgagccaccgcgcccagcccaactctgcttttacaggtattggctctcattccctagccattggttctccccttcctgtaattcaggcctgcaatataatttcttagtcccccaaggaaaacagaactaaagacttctaacagaagatctcagtctactaacatagctaatagctattaaagctactcaggcatcggcttaataaaaaactaaagggctgcagcaagtgatcagattttcaccactcatctttgtgagatgggtctcagagggccccgtccctgctgacaccaaccattcttaccggtagcctgccaacacacaagcagttcacagtagaacactgcagactgcagggcattttcaggctacatagcctcaagttcctagaacaggaactgaggcttggaagaaggtcagtgcagcgcactcagcgaatggataaactgaatcatcatttcacaaggctgcaagcccatgtactaatggaatcaacatggaaccagagttaaattactgccttaaatatctaatgcatgtcaagaaatccatctaattactaagtaccgaaattataatactttcaaatgaattcacaaagcaaaacagctgaactaatgatctgtaaggatctcctggcagataaatcctactgggaatcaatacaccactgctaccaagaaagcaggtccaacaaatgaataaaagaaacccagccaggcagagaggttcttgtctgtaatcccagcactttgggaggctgaggcaggaggatcgcccgcggccaggagtttgagacaagcctgggcaacacagcaaagccttaaaaaaaatcacctaggctcggtggcctatgcctttactcctaacactctgggaggctgaggtgggaagatcacttgagctcaggattttgagtctgcagtgaactacgatcagaccactgaactcgagcctgggagcaggccgagaccctgagaccctgtctcaaaaagtaaaaaacagaaatgccagtttcctttactcagagctaaaagccttcacctactacccaatcccatcatggctccctcccaaaagttcactggcataccatatcaagtcagcaagcccccttttttgtagcagggtctcactctgttgccaaggctggaacaagccctcttcaacaaagctaagatggtccatattactcatgtggatgagggtgttgaaggacatttactgccttccttcatggtctcacttcatgatcaaaccaagatgcacaggaaataggtttgacaatttacctttaccaagaaagacgattcagcaacagtggtagagctgcctgtttgaacttaaccttggtcatctcagtttgaaatacaaatggcagcatggagagcaggctgcccgctttttggttggacatttctttcactcttgagtttgaggtacagcaaatttcccaaatcattcagatgtaaatattccaatactcagaccaggg

SEQ ID NO: 1236 - DNA, 2488 bp, Homo Sapiens
tagaagtccccttaggtgcaagcgctagggaaggatgctgagataagagggagccagtgaagactgaaggaagagtgccagacagaggggtcagcagatgcagagctctagggtgactggtggaagaaaggccagtgtggctggagcttggagggtgacagggagaggggcagaacctgaggccagagctgtgacctggggttgatggaacaaggcctcatgggccaaggtaaggaatttggcttttattgttagtaagccaaagacctgttagaatgttgagagctctgatttgtgtttgcagagatggatgagactgggtttagtgtaggctcaggatcgggggatgtgtggcttgtgacagggtggcagagagggcatttaggagctgtggaaagattctggatacactttggaggccctcaaccactctcatattctgccttccacagtagagcttttctgtcagtgactcatgtttggttctttcatactgtggcttgagcattagagagtaatattgtaaagttcaacctcccacagttcactgcaggaatgaccccattcttgcctccaaggccagcatggtggagggattccatggcatgagtttctatgatgacatcagacattggacatcaaggagtgcgatgctcacccctggtttttagtgatccttgggcacagtctggacacaaaagccagaacttgtttgatggttttttttttaagaaaaaaaaaaaaaaaagcaagcaagttcagggaagcagtctcctttttcctggtcaacatgaagccaagtgtttcactattgcccagttttcccccaaatacaaaaacattaattttaaaaagatactgtaaaaagcccaagaaacatgtatattgaatttgatttatgtatactattgtagctaatattttcagggaaatttctaaatgtctgtcataggagcttgtcagaaaaagaaagatttatttttggaaaagtatgtttcctggtgttcattgagcttggaaattatggaaagtcattgtcagaagggaggcagctgctccagaggcggagtggaagtcaggactggagaaggttgtcctactgtgggctccagcgtgcctcttgctgctagctggtcaagagtctcgcagcagccactttatacctcactagctccaccatcgcaattatttctgtcaaaacgaaacacaaaagaatggcatgtctatgaatattcttcacagaaaatatattcgtttgactattttccataaaatgtgaagtcaatttctttttctatttttaatcatgaaagtgaagcccggaagcctcaatttctttgtaatggaaagatctgagtttgtggccttgtttccattttccacttctcctttgctaagtcaggaacatgatactcacataatatcccccgggcagtggctctgttcaggaattgcatggctgtttgactgcagagggagggcaaaggctattattaaccattcgtgtcattgttgggtcatgaaaccttcaggggataagtataagttctataaaatttcattttgaaatccagaccagatctggccttatgctctgaggatttttttttttttttaagtttcatgttgtccctttgccccccttcattttctcttgggaagagtctcttattatcataattactacttgaaaaaaaattccaagcaagaaagcagtgtattaactggaaagtaacaatttagaaatgttattttttaatagtaagcttttatagtattcctgggtagaaaggtatttttatagaaacagttattttcctatcttttttctcatgagtccataaaatagcatttttatatcaatttttgttatatctaatacataaaatcagtattcttttaagaatttagaagtttaagatacactaaaaatatttttgacaataactctcattctcagaggtagcgccgttaataagttctatgtatttacttccagacttaacaaaaatatgtttacccacatttacacatggtatctctgggtgggtatatgtcagaagatttttttaaattgtgtttaattatacataacctaaaatttttaggtatacagtttcgtggcattagtatattcacattgttatgcaacttttattatcaccatctatctgcagaatttttttttttttttttttaagacggagtctcgctctgtcacccaggctggagtacagtggagtgatctcagctcactgcaacctccatctcccagattcaagcaattctcctgcctcagcctcccgagtagctgggattacaggcatgcgtcaccgtgcctgactaatttttgtatttttagtagagatgaggtttcaccatgttggccaggctgatctcaaactcctgacctcaagtgatctacccgcttcggcctcccaaagtgctgggattacaggtgtgagccactgctcccagcctatctaca

SEQ ID NO: 1237 - DNA, 2471 bp, Homo Sapiens
tgcaaatgaagccatctgtcaaaccaggggccaggcgcccagccctcactcacctgggctgtgcctctggccaatggctgaggtgacctcccaggcatccatagtggagtatgtttctactttattgaacagccttgaaaatcagagaagctgaggaaaccatgtcaaaatttcctgagaaatttctctcctgcacttggtaaaggtgaactagaatttgccatgtgagtgaggaggacattttttaatgaggcaagagctccacaattcccacagctgctcagaaagttctcttgcgtgtcttgagagagactgaaataaagggaagtcgaggacagcctggctttgttctttgaaactacttatcaaagtaagatcatcctaacccaatatgagaagtatatgtgcaactgtgtgagtgtgtgtttgtgtgtgggggtacacactgaaagaaaataaataaggatgaaggaaagaggaaaacagaactgtttcatggaatacattgtgtaccccaattaatgcttcctatacttttattattttgtttgtaattttatttattattaatgaaactgccaacttgggaataacgttttaggtgctaggcgccacattcaataagaacccaaagagtgaaaggacaaatggagggctatcagtgttcaagatggcttcctgctggttgtcctggtgaagaacagtaacataaagggtaagagaaggattaatggaaactattgaacaaagtgaggcttccgagtcatctccagattgccttgtgcgctgctgtatctgtaccgtagcgtggataatcgtggcaggctatcgttctagccctgctgcgagacagattccaattcattatttcattccccagcatgagccagccaagggaaaaggatattcccagaaccagagtgttccaagttttctgaaaggtcattgccacttttttttttttttggtagctcccagcaaagcagaaacacttggaagtcaaccctgtccctttaacactgctgtgagctgactccatttgtctgagataaaacttccctcttgatccagtagcgttcacggctgagttggccacgagacagaggaccctgtgttcctaattatttctggatgaaaagtcctgcaggcgagtggagattcggggcaaagacggccaggtggagccgtcaccagcgagcagtggattgtagaaatggagagataattaaattaaaagtgccaggtgcaggcattgaaaaataaccctgggtgttaattatgcagttcagtgttagcagaggaaatgccaccggcctgtccatcacgtggcagttgaaaagcttgggaaagacacattcatggtttctagagaatttgccagggctgcctacttgggattctggtgaagcagagattatttattagttggagtgtgtacatttcccccattttccactcagccaagttgggcatttggtgggtacttggtgtgtgggggattaactttgatccacatgaaaatttgaacgttggagtgtgtcacttccaatttaggcacttaggagtatttcttctctttctgatttgaaatgaatttgattttaggggtcagaggtagtgtgtccctgtcatgaagatggaaggataaatggtggcgtgttcagacaatggaatagagcacagtaatcaaaaggaggggaccccagtagcataatagcagcatgactgtgttacaagcacagttgaatgaatgaaagaagccagacctcaagacccattctgcatgaatttattttggtgacgttctagaacaggttaaactaagctatggaggtggatgtcaggtctgtggctgcatcagggaacttttggggtaatggggtaactttcttgggctgaagggcacatgaatgtaaacatttttcaaaatctgttgaatgcacgcttaaaatctgtgcatattcttgcatggaaattatccctcaatgaaaggaatgtgaaaagatcttcccatgttttgtccttccatggattttgaaccctggtcagtcagttcatttcaaaaggtgataaggattaatctgtttgtggtccttcctgaccacccagccttttcctgttcacagacctgttcagaaaaggctttcattccaaggaagcagaatggaaaacagggtggcccactacagcctttgggccaaatctgctcaatcacatttttgtaagtaaagttgtattgggacacagccacatggccagtcatttatgtgtcttctgtggctgctttcatgccacagtgacagccgaggagcttttacagagactgatccaccacctaaagtgtttactctctatccctttacagaaaaggtttcctggcccttggtctaaacattcatttctttttggaacttctcccttcagatctgtgtgggtggaggttttggatggagagtgctctccaggaacga

SEQ ID NO: 1238 - DNA, 2495 bp, Homo Sapiens
ttcccccacgttctttctctctcttgccgtatgtttcacactttcagtgtgtgtaaacatcagagcaaagctgtaggctgaaaactgcagttccaaccctgcaagaatcctttggtgtctcgaaagaggcagagggcatccagccccatctccttccagaggccgtgctgcctcaagcatcagaggctttgtgttctgtggaggggagaccacagacctcgatcttaaaatggaagggcagaaacaagactgtgagccgggatctgggaggggacgtctaatctgaagtgagccatgtctgatgtctgaagccttttggggttcaagatcaatgctgttgctaccctttttcctgcctccctagggggcttttaggcaatggtgtgctggagccagcttgctctggctctcaagggctgattgttaaatcctcaggaactctgcaaactgcttgttaaacacagctattattaaaaattaaattatagaaacctacagtgtaataaattatattaaaacaaagttaataaatacttgaaattcatcaccttccatttttttttactattctccatgttcttgagggtttttttttaaatgtctgggtctctatacagtagatataagaaataatggctagctactgcgcattccctcccaactacatgtttagtgagatcacactgttcacttgacattgaccatgatgacagcgcttacacctcagaaatcggcaaatgctacagatctgggcttttcccccgcaaatgctgattaggcatttacaggcacacgttactttaaggcaaccactgtcaaccagaggaaacagaaagaagtccatcaagtttgtctttctgaacagccatggcagttccaggccaggcatgcagcatgcctgagggcaaggctgtgccctgtgggaaacccttactactgaaagggtttttagttacaaggactttctttggcttgatagctagtttggaggagtttggggccatcacttcatacaagttccttgtcataactgtaccctggcttaccttgacatctggtgtttactccaagctgaggttttagggaagggtagttggaggccagcggcggctcctagtgacagatgggcagagcgtctgctttggcatcatccagggtgtgggcagcagtggtccgagtaggcaccactgacctgcaggcagggaaagcctgccaggtcagccatgcgcttggcatcaggaggagaggatcagagccagcagtggtcacaatgagggcaaaaccctcacagtggaatattgtcacccaaaagggatgggtggctgtagggctttttggatggaagcataaatgagaaaatacacacgtttctgtaaatggacctgtttgggaagacaaggccacagtacacatagttttctagcaatctaaaccttatgtgtcatgatgtagatatttacaggacaagcaagaacaacaaaaccttcagttttgttctccagtataagataattgaagacacttgtggtgaaaagtacttctgtcaccaggaagatagataacagccagcaatcaatgcctttctgttgtacaagttaaaaagtccattaaatccatttttttttcagtgcatacacaagaatacatttggatactcctgcaaattcatatttaagaatagtgtttctcaaatcggttatttgaaagaaactcaaaggaaaaagcagacacttccacaatatgtccttgctctgttgtagtctgtaattgtgaacttttgtaaattgttacaaccctggatgaatgatgggaatataacaggttgtagaattggagaacgttaaatctttgttcctaatggcaaaacatgtttttctcattttcatcagaatgtgtgatccatgccatttgaaatcaaattccaaacacaatgagccattagtgtaatagctcattactaacagcggtcttataaataatacattcttatcatacacatgcagctcgctgtgaagccagcaaaaggtatttcaggccatcgaagttttgttgcgccagcgcggctgtagattagaaggacatctccatgtgaaccaagatggatgccaattttccctgccgagagtcaggctggccgtctctttctgcacatatggtagatggattggttaatcagcgtctgctgagtcttgggcctgaaattacagagaagctagacaactgcggctatgcagcctttgttcacgagtgcaaacaagacaaacaatcacttgttatttgggaaaaaaattaaaatgtttattttggacttttattaaagtgtcaatggctttataaaacagctgtgtaaatccaggctttttcagcaagtatcattttagggggcctgtaaagaaaggaatatacatgaaaaaattaatttttaaaaattcccctcatatttcagtattgagaagaaaatagaggaggtctcacttttattttgcaaacacgtt

SEQ ID NO: 1239 - DNA, 2364 bp, Homo Sapiens
catttggaaaataaatgtcaaagagaagatcataatggcctagaaggttggaaactgagtagctagcaagtgtgagagagggaccatgagacataggacccagattgtgctctatcacccactcattgggtgttcccagtcaagctatttctctttgcatcctccatatccccatctgtaaaaatgagttaggcattgtattctccaagtgcctcttcagggctttctgaaatttcattggccccttttttctggctcttgtgtttgtactctagcttttgcctttggtactgaggatttcatttatgagaaggctttttaaccagccaggctttgtctagccctagagtatttagaatgctcctgaaactatgatttcaggccattcaatttgcatctagaaatgccttggttcacctgatcctactccctcatttaacattgagagataatgcaacagagaagaaagactacaggcttgacaaatgacccccaattcagattcctgccagtactagcttaatctttctgaaccatatcaccatcatttaaaagtgcaataatgggctgggcgcggtggctcatgcctgtaatcccagcactttgggaggccaaggaggaaggatcacgaggtcaagagattgagaccgtcctggccaacgtggtgaaaccccgtctctactaaaaatacaaaaattagttgggcatggtggcgtgtgccagtaatcctagctacttgggaggctgaggcaggagaatcgcttgaacccaggaggcggaggttgcagtgagcagagatcccaccactgcactccagcctgggcgacagagtgagaccccatctcaaaaaaaaaaaagtgcaataatgataatagattcagcacacagagaattatttagaagaggaaagaaaaaactgaggcccaagaggtgaagtcacctgttcaggttcaggttcacacccgaatccagatctcttgtgtctcattccagagtttttttcccctctagagccaaggtcagttgtgcccatatggatatggtagcaaagattggaactgaaagcatgtcagcttttttaacatctccgccaacagccctctcaattcccctgtggcacgtgtcaataacacagcccgtacttgttttagaaacaagcgctccataagcactcctgtttgatttgctttggctggtacaggatccagatgctcttagaatagcacaacagactctccaaatcagcctattcccattccgagccactcacagctctgatctgctgctggctggggttcatccccgagtcttccctacctatcatgtgaatcacgttcagacttttgctagtttgtcctttccctcttgagtagaagtaacatttattgtgtgcatactgtgtgccaggtattgtgacaggtactttaaatagattatctcccttaatctttataactcattaagctattaatagctccaaaggggaaagctgaggctcagtgaagtgaatgaatttactgaagccacatatctagtctctgaaagagctagagtttgaactgagtcctgaccccattgactaagctgtaaggtaagctgtttcctgagtatcatactgcctccctgtcctctggccacggcccttccaggagggtagagtgtttgggagtacccaagaataggcgtttggtgccctgagtgtaataggaatgtcttccatgccttcagtgtattttcctgagagtttctgcactctgtgcctcaaaccaacttctctagaactcagatatagagcccagagatccaagcactgagttagaagctatgtttccatcgtgatcatggaacagagtccctagtgaaaagtatatttgtccttttcaaagttgaatagagagagtatttcaagcaataacccctacttgtatgaccaactccaaagtacagggaaggaaagggaaagggtctgtactcctcaaccgtgataagtctcctccagggacctggcaggagtggagacatgcacacacaaaagattttaggactaagattgttctgataggttctcaaatctgtactcaacagtttgcaaagcagtttaccttcaagaaaccgtactgtgaagaaactgaaggaatctgcctttatgtgacagagccaggggctagagtccaaatctttagtcttgataatgccagtgaggctaagtcttccctgagagggttttctctctggcgttgggcgtacccagtctccacttgcaaaaggagcaggcccttagtctctgtctttttctcagccttcctctgccctcttgtccccctcctcactcattcatactcaattgctagggacttatttcaa

SEQ ID NO: 1240 - DNA, 2472 bp, Homo Sapiens
aggagtagaaaaataatcatcagccagatggaagaaattattagttcacaaatgcagtgtgctcagtaataaaatctttcaaaatgtggatgacataggtgcaatagaatataaagaggccttcagtggaaagcttgggaagctctgcagagatgcagtggaccttgaaggttaagaatatggagtcagacaaaactaaattttaatctctattttgtgaccttgggcaagtaacttaacctcttttggactcagattcctcatctgtaaagtggagagaatgatgcagggaagggaggggagtgggtcaccgtgcagattcatggaaataaaggatagacagtggacacggtcagtttggctgttactatcatctgccagtagcctcagttacaataagccagaggcaagattaacatctcttcctttttctttctaattcttctgctccccacattgccataactactcccattttctctatctctgtttactcaatggcggccttctatcagtcagtcacataaaagtattcttattgcagtcatttacactttagtatgaatgagtcagcacttttttgcagcaattttcattggaagccagtgggaagtgaaaggctttggccacccctcataatatatgacttaaagcctgcttgcaatagagagcccttgcagagtctctaaaagaaaaggacctgccccctgaagaacttctgagaccatagacctcatggtgcccagcttttcctggttgccatgtgtcatctctaaagacagccatgaatatctgttttggttgacttgagccatttgaatgtctaaaacccatcttaataacaaaagctctttggagggaccctaattaacttctttaaattgctttctctaaacttttggaattaatacaatctgttcccttgttattaaaaaaaaaaaacaaaaccctaggatacttcgcaaaacttcccccaagttacttggcagctaacattttgtcaaggaggcatggtggccaaccttcccctgaatgggattggtttctatatagtcattccttccggctcatgactttcttctccatttgctgcccacggacgccgaaaataacttgttttctggcaagcttgggatgagattccttatgatttaatcagatccataatgaagctctcccagctttcaggagaaaacatcctgaactgcagggctggttaagggcagggccctggtgaagaggaggagccccctgcctgagcagcacatttggagccaggagagctgcaacagggccatgccacccacccagtggggtgcccccattgtggctgagactcctggcagtgctccaaggtgtgtaccatgtaagctgtgccttcccactccctgcagcccagactaaaggcctcaaagataataggcaggacatcgcatctgtaaataccagctgcttggtccaggaagagacagtttcctacatatatatatatatatatatatatatatatatatatagagagagagagagagagagagagagagagagagagagaaggaggaggagagagaccaggacagacttgccctggctgaaaccaggattcccttgatggttccaaactgatgttaaattagaggataactccagatatgataacaagctgggggtggcaaagtaggtgggtaatcagggagcatctgagtaggtgacagagaattggataatgaagaagcaggtaaggtgatgggaagtagctggggcaagagggagtagccaggcaataaggcaaagtagctggagaatgggagagtaacttgatgatgaaggccaggcacaaagtgggagttactgcagtggggcaacagaagacagccccagacctggggtagaggctaccctgacctgttccagttgccttcattttgccacttccttaggtcttgctgctgagaagtaaactcagcctaagtctgtaccagttagctggaatctgggctgttgtaaactgttgtggtgaagctccctgggagtgaggctgaggttgtagcagtagcaggtaggtgtggtgagtttatttccttgagggaggggctctctcttctctcagcccctcaaaggatgggtgaggttgcctgccagaggtcctggcacaactcacatctgagcccccaatttccccatcatcaccttcatccttctctcaaccagatttttattggataacttaagcaccaggcattgtgctaaaaatctttctatgcatcaactcattgcatcctctcaacaactctataaaataggaaccgttagtaaccccatcttacaggtggataaactgaggcttaaaaagtctaacaacttgcccacataagaggcgtagccaggactgtctgacttcagaatctgtcctctaagccttatgccacagtcatggttacttctacatggagcatttctccttcaaaagct

SEQ ID NO: 1241 - DNA, 2397 bp, Homo Sapiens
tattcattcatccattcatccattcattcaaactttgtagagtgctttttttttggcggggtgggtgctaaatactggcaagttattagatgattccaaagctcatgttcttcacctggaaaacggaaatcataaatccaaaggaatgatgtcacacagattgaatgagatttacgtgtgaaaaggccagcaaacaagagccggaacgtaagcctactggcagggcagaaacacccctgactttgttttacgtccttggcactggtattgtcgctggcacatgctagacagtgccactccagtgaataaaacaataaattcagtcccgtgttgcagatagggaaacagaggcccagagaaaatggcctgggcggggggggggggggtggggtggtctggcagcttcatccagggccctatttattttctccccaccctgaagtcatgtatttgaaaagattgggaagattctccacttcatcagtggctcatgtgcttgatatgttttctcaagagatgatgatggtttctgtgggagttacagctgttttcagtgcagttacaagcaagagggaagagggcaaagaccctggaaaaagcaggacaaagccttgcaaacatggatatcatgcgtgcattggctgggggggcccttcttccgagggccttttcctggccagtagaatgttcagaagaggggtctgggtgggcataggcaaataatttattttccaaaagccaaactctctagctgtagacagcatcaactttgagccatttccagacatggaaaaacattgaggctttgagagttaacagacttggggctccaatccttggctcccatttctgagctacttgaccttgagcaagtgatgaatgaaaatactctgaccccgaggacctcatcagaaaatggggatgagaatacccacatgcaaaatgggacagtgcaagtccagggcccgacatggtgcccaacactcagtgaatgttagttttcttttctttttccctgtctctgtgataaacgctctattaggccagcacgcctgacaaagccttatctgaaaatatgttcgagatccgtgctcctgccgggtttcagggatcagccggcaatccatttcatggataacatcatcctttaccaggggaaacattaaaaattaacccagaggacttcatatttttctgctaggagcaaagctgctatggttaccagataatgcactgactgggctggaatacagataaggacgacttttttttgtttttaatatcagaaaggcaaaggccccagtgatggctcacaggagaaatgccctgtggacaaagagaatacaatcagcatcagagcttggcagaaggcatttgactccaggcagtatctaacctattaagtagaggccaggagcttatttgatctttgcctggatgaggaaggcagggagggggtgttgggagaagtgggagacaaagctaggaggaaattggaagtatgggcgcacccctaggctccatttctcatcacactcacacacataatgcacacctacatgcacacatacacatacatgcgctcattgactttagaaggctctaagctataagctaatgccaaaggtcttctctccacctctagctacttgctatgaccaagccaagactccctgattctgaacccagagctagggtttttacagaggatatgggcactctgtggacagaggccagggcaggcccctagagagctgggataggcattgaccttccatcatcaccctcctgcctctaacacccagacccttgggagaaacttcaagaggattagaggtcagagaagttgttggccttgaccccaggagaaagcatcccatgtttctgtctattctgagtgagataggagggccacatgggctagatggatgtgaactcagatgggctggggaggggaagctggaagggctcattatatcaggcaatggtgttcttggttttgagcctcaggaggtgagatgtttgcctcttattggatccaccaaattgcagggaggctcaagaaatgaattccagagtgtgacccaggagctctgtgtgtgggctgtgccactagctccctgggtgaccttgagcaagtctctttctctgtctggcctctgttttctctgctgaaaagtgcatggctggtagtagatggtccatagttccttcctactgcaaacacctgtacaccttggaggggaagtgatgataatcagaagtatccgaaaaacgcaggggagaagcttaggctcgctggaccaggaacatgaccctaatcccaaaccagggtagggtgaagccccttcctggacctgatgacaagaaagtggggggcagtggccctcacaggac

SEQ ID NO: 1242 - DNA, 2466 bp, Homo Sapiens
tctagatgccagtagttccccctactcccaggcatgtcaataaaaatgtctctagacattgcaaaatggttttctttttgggtaggcagaattgcccctactactggcatagttaggtaaatgtaacagtttaacatttagcagatactaccatgtgcttagtattttaaacatagctccgattttcacaacactaacaaggtagtgattatttcttttgttttataggtgaggaattcagggcccagaaaggttaatcctaaactcgtaaaacaggtaaagggaacaggtgggatttgagcctagctcttcagcctgctgagagcatgctctcctcctcacccaacttggctgcctttctttaatagcaaatgatcggttaaagcctcgtaaatgtctaacaatagggaactggttcagtaaattatagtgcatcccctggatggaatattatgcagccattaaaatgatggagggccattaaaaatgaaaaccatgtaacgacatggaaaaatgctaactggattacattaagttaaaaaaactagaaaataaaaatgtgtctacattgtgattacaacgatgaagaagtatatctatgtgcggatggctcatgtgttggattgaggatattaaggataattttcctttcttctttgatatccattattgttatcagagtgtcttcatgatcctaatttctaagtagtagcagagtaatgataagattcaagatgttaggtttgccctaggcccttcttccacctgaattagaatgaagacttctctaaactctgactatagcaaggggttgatttacccttactttccctcctattagcactgttgcatgtatgtttgtgaccccaggcccctctccttgcactgaccagcttctcccaagcacagaaagctggaagcatagaagaaaacaactctgaaggcattggtgtgaatcactctgggagccagggctattaggaacatacagtcttagagtagcagatggcatctgtctgtcacagggtactgagcggtgcactgtctcatgcattatgcatcaagagtggcctagcaccctggcccggctgtgtgggacaagtcttgcaaaagaaacatctgatgaactgatcgggatgtcaaaatgtcattaaggataaattaatggatgtgttactttggctgtaagaggcagtgccagcaagacaacagacagccggtgggctgttctccagcccaagacagacggcgtttgcaatggagattcatggtctttatgcaacgtgaggtgctttgcagggagaagaataaacagaaatgctccagcacttaagcgccataaaatcacaagcatgagattaattaattagtgtacactaggaaggcggctggtctgtctgcgctcctggggaaagctagaatggatggcactgggttagagatgacgggtccctgcaccagcctcctaaagaaaagcaattgaatttaatgtgcaatcataaactgccgctgatggaaagataagtctggtcggtgtttgttttttcagggatactatttctgcctactgcttcaaacactttgtgtctgtgggtcaagtatctgagaggactggggagacctggaaactagttctgcttataacgccatgtgggctatgaagggtgttataatctcaacacatagagcaactctcagggaagcctgactccccctgcgcctttctagatagggggttgtccattcttctgtgataggaggctcaccacttccctttcaacctgacccagtgttagataagcattgttagagagttcttccttagacttccctagcctcttcctccttataacttaacaacaacaaagacaagaaggagaatagctaatgcttactgagtgcttgctgggtgccaggcactgggctctggtcaagttacaatgttatcatgtattatctccattttgcagtgtaggaaaaagaagaccagagggtgtgaaagacatgctgaagatcgcacagctagtatatggtagggccaagatccaaacccggggctgcctgaggccagggcttgacagcttaactatcacatggttctaagtcctgtaactaccattaattggatggagcctggcttttagagcaatacagaatatgacaaggcaagacagatgagaactcacatgtagcacatattgggcactgctaagcacctggcctgggtcagcctaacacatcgttcatgcagtagccttttttgagtaacgaaattatttccccatctgagatatctattttcttatctttttaaaaaagttatatatatatatatttttcaacatataaaaatcggtttcacttctgtgtatttataatgaacaattagaatctgaattttcataaatagtacaatttacagtagcacccaaaaaagaaacattcagatataaatccaccaaaata

SEQ ID NO: 1243 - DNA, 2496 bp, Homo Sapiens
taatcatcatggaatctcagaatcactggaggagcaggatcccccaaaacccatctctgtgatcgctattggatgccaaaatcctccgcacatcttcatctagtggtcacccagcctctgatagcctccaggcttgaaactctactctgaaatattaagaagggaagctgtgttcaccactcagacacccactcctatttcacctccctgaagaaaccttccctgtctgccctctcagtcactctctaataccttgtctgactttgccttcttaatagatgtgttaggtgctgacccaggcatggaggttctgactgtgatgtcatgtagcttacttattgccatttagactgagctggcgagctcatttatctaatctgttaaaaccagatttggtggaaagtgaggacctcaatatttccacatttgctgacaaccttaaactctcatcgaagagtgggaagttgttgcttggaatcacattaagattaataatgacaatagagataatgacaactgcaaatatagcaactctcccactcacaatggcagtcccgattgcacaaagaatccagtaccaggaagggacacattttaagctatcttggaactgtttcctaatctgtgggataaagatagatcaaacaccactttgcattttttaaaccttgaataaataggtaaatagcccctttgttaagtaggagaaaatattgggaggagacgagtttaggcttctcaatatgtttccatctcattggccagcaggtctatggttcagagagaggttgaagctggagacagggatttcagaattatctgtagagtctcttggttgaggccttgggaattaatgaaattgcagtaccagagagtaccggaggagaagggaagtggggagctgtcctagagaacaagctagaatagaaacagtcaagacagccaaagcaggagtatccggagaccaacgtgaagggaaagaagtgagagacatgtggaagaggtggcaactcctgccaaaggggattaagaacaaggagttctaagaactttctgcagggctgttggttggagacgctgcctccatgcaaatctcatttgccgctgtcaatccagatcctgtcccaccacgaccatttctgagaaacagactcaagacatgaaaaaaaaccctctttctgtaaaattggttcgtgaaacagactacaggcattaatatcctttatgagtgacaatttagggccaatatttacactttgtaatgttcgttctctttctctcgggacagaaaagaatgttgccaatatcaatgaataaacattaataaaatcaaatataatcttgttccatctggaatcaacctttaaaaaaattcttaacatctgtatataatatacatacacctctatgtacaatagggaaatcagattttgcctgagagatgtgcacagtatttaatgccaatttatttggttccaccttttctccagactgctttagaagggtagcgtccctagaattgagattctgaattagtttcctctgactctcaggtacagaatgtccagctcaagccaagacatatcaaatatttatccactcccagattttcaaaaatccagctttctgtctcctcctgcagctgacctcctctggcagaaattcagcctcaaactgggagaaatgagtggatcaccagaatcaaagctgacgtcagtggtactgtgggttggtgtatgacgtgggaaccctgacaaacagaaatgaatgtttataaatgttagatctcaggtctgcaaggaaagatcttgctgtacttcacaaatggacttgctttttaatatgtctcctgtttcaggacaagtaatgttggtcagaactctgggggtgaacctaggggctcgtaccacttggggctgcgttgtcactcctgtcctcagcatcgcagaggccaaactgtacccagatgagaccccagggaaagagaaaagaatcttgggcacgggggtcattattcaaagaacctggtgtagtgcgtgggagatactgcatgcacctctaactcagacatatcattaattcacaccatccctcttgtgcctactaaaccaggatttctcagcctcaccaccattgacattttgggccagaaaattcttttcttgtggaactgctcagtgcactgtaggatgtttagaagcatccctggcctctacccagaagatgccagtagtactgtcccggttgtgacaagcagaaatgggtccagatacggtcaaatgtcctctggtgagagggtagcaaaatggcccctggttaagaactactgcagtgaattattcaagggaccatgagtgaagttttgaataatccacacctgagctaagtggtgccagagagatacttgcaggacctcagctttgttagtctgacatctctcctataagcccaccgactggagaccccaagcatgctgcagcccctacctaacagatc

SEQ ID NO: 1244 - DNA, 2474 bp, Homo Sapiens
tttggaattggatgctattaatacaaagagaaaaatgcaaaatggcaagcagtaagtatacttcagagtgataatgaaacaagggtcctcatctttgcagcattggtcagcctgccctcattctcacctcttccaacctctcctctatagggatccttccaaaccccaaatctgaccaagcttgccctatttggacccatcccaggctccctgttgctctgagaacagaatctaatctttaatctggccctcaggctctttctggaccagactcccccatctgtctggcctctttcctgccttgcacccaacagccttgcacaacttttcaattcctccagcctggccaagctaattcatacctcagggcctttgcacaggccaaaccttcagccaagaatgtcttctgctcccctagatctttatcctgccacctaccaacccaatttatttgcctgctcagaaaggcctttatttatcctccctagttccctgcaaataggatcaatttggtctcccacagagcacaagccttcacttcactgtattgcaatttttaaatatatttacatgtttgtgggccacctcactcttccctgaaccctttgataacaaggactggaatctaactatgtttttccagtcccgagcatggtgccgggcacaaagtaggcatacagtgagtgtttcctggtctattgattgattgattgactaaactcacctcccccaaacccttcaatgtgagaatacattttcttcaaagtttttagccattataaatgacagacaagatgtctctttgaatttccaaacgcttatctcaaagcttttagttttgtctaccagctcatgccaccaaccggatgagcctcagcaaggttcctgtcaaagcatccctctttttgttgatttactttaaaatgcaactcagtggcttcaagtcagaagaagaagaggccacgtcttcagcctctccttaagcatctatcaccagccagctgagaagatgtgactgtcatcctcccaacccgacaagatgatttttctcaaccataatacaagcccagtgagccatacaatcatggtgaatcccctatcagctcaacatcctatgcaatttttcagagaatatgattctatctgaaaatacatgcaacagtctggaactcatttttccccagtgcctaactttcagattcctataaataccagatggccttccaggcagtgacacacgttggaattatcgaacaagcatcgcttatgactttgccttgggcagtgtcaaaaggtactgagaatttacccatctcattacggcgttgctaacagggtctcaggcagtttgctgggcctggaggtgtgtcaaattgcagtgccatgaatgcctcaaacgagagacagagaaagagaaagagaaggaatatgtgaatgtgtgtctgtagctgagggaaacaacaagagtaaagggaattaaactcttttaataaaggaaaatagttttcaaacaaagaaaaagaagtctaatggttagctactgctgcataacaaaatttccctaaaactgagcagtttaaaacagtatacatttattatctcacattttctgtgggtcaggaatccaggcagagctcagctgggtcctctctgtcagcatctcacaaggctgtaatcaagatgtaggccagggtgtggtcccatctgaaggcatcactggggaataatatgcttctaagctcactctcagggttgttggcaggactcagtttctcaggggttgttggacagagatattagctctgaactattgaccagaggcatccttcagtcccttgccttgtgagtgtcgctatagagtgtctcacaacacaccagcttgcttcatcagcaagtaaatgagagggtaagagaaagcaccagcaaagagagaatgctagcaagatgaaagccatagccaagcatggtggctcacatctgtaatcccagcactttgggagaccaaggcaagtggatcacctgaggttaggagtttaagaccagcctggccaacatggtggaaccacgtctctattaaaaatataaaaaaagaaaaaaaaatctgggcatagtggcggtgcctgtaatcccagctattcaggaggctgaggcaagagaatcacttgaacccaggaggtggaggttgcagtgagccaagattgcaccactgcactccagcctgggcaacagagcaagacttcatctcaaaaaaaaaaaaaaaagccacaaccttttgcaacctaatcttggaagggcgtctcattgcttttgccataatttttttttttttttttttttttttttttttgcccaagctggagtgcagtggcatgatcatagctcactgtaacctcatattcctgggcacaagcaatcctcctaccttagcctcctgagaagctgggactacaggcacgcaccagcacacccggcta

SEQ ID NO: 1245 - DNA, 2460 bp, Homo Sapiens
ccttgggggatttatgttttatagaaagcactcagcacaatgcctggcatattgtaagctttaagtaaatagaagctgctattattattaattattttttgagatggagtctcggtctgtctcccaggctggagtgcagtggtgcaatctcggcccactgcaacctccacctcctgggttcaagcaattctcctgcctcagcctcccaagtagttggaattacaggtgcccaccaccacacccggctaattttcgtacttttagtagagatggggtttcaccatgttggccaggctgctcttgaactcctgacctcaggtgatccgcctgcctcggcctcccaaagtgctaggattacaggcgtgaaccaccgtgcccagccaggagctgctattattaatagttaccattgtcacagctatctggtaaactaagtatgattgtcaccattttgtagatgacaaaaccaaggtaacaagatgggagtgacctgtccaggcccacccaactgggaaccatgcgactagaagcatttcttctccatcatgcattcctgtttttccaactgggcatgcaagcccattcattcatccattcggtaaacacacatgcctactgtgtgcctggcctgtgtgtgctgcaggtatagactgggccctgccctcatggaaggtacagtttcccagggaagagcgatcttcactgaatactcacacagacccatctaaaaatcataacacgtgctctgtggcatgaagggaaaagcagggtgctgtgagacgtgacttggcctggggtgacccagatggggaagcttctggcgagtctggttaaccctttgctgtcctggacatctagctattacccctccagatcagcttagggctggatgactcttgagagtgtggctgggtgccccccttggcactcccgcctcccagtgttggttttccaagtctcccctagaccccccccccacccagtctctttgaagactgtccctttacaactgccctttccaccgaaggattcagacacaaattgtactttaaattcaatatcagtcattaatatttcatgattacaaaacgttaaagataatgtcagtggaaggagcgtctgcatgggcagaatggatgactcagaagttcggggagaggggagccggcatactaagtggctcgggagtctttgaggtaatccagtatgacaggcggtggctcctggctgagtgcaacattctccgaggtgctcaccaagcgccgccgctgtgtataaatatttcccctctgattcttgtcacctcatgtttattatgaccaggagcaggtggggccaccatgaccctctgagtttcccttctgtttttgaggaagccaaatggacgctttggcaggagggcatggggctgggtgggcagacccgatggccatgcacctggggctctggctggctcctgggaagccggaggtcttgggtcaagcctgcccctgccaggacttgctctgtgatcttggggccatccctgttcttccctgagcctctgtttcctcatctgtaaaatggggataataagtttgttcccatctcatggagatggtgaaaaggaagagtgggtcagttatttgtggcagctttttttttttgagacagagtcttgcctgttgcccaggctggagcgcaggggcatgatcttggctcattgcaacctctgcctttgggttcaagcgattctcgtgccttagcctccccagcagctgggagtatatgcacacgccaccatgcccagttaatttttgtatttttagtagacatggggtttcgccatgttggccaggctggtctcgaactcttgaactcaagtgatctgacccctttggcctcccaaagtactgggattacaggcgtgagccactgtgcctggcctgtgagagctcttgattttgtgccagcaccagggaaacaggactggaggggcagctgaggagagccgggctctggagtcaggcaggctggggttgggaacctggacaaatgacttcgccttgctgagtcaggttcctcatccccacagtgaagatggcagtagaatggacaccccttaggggtgaagatttcatgagctcatcacaagaaagggcccggaacagagtcaagacctacagataccatcaactgagcacttactaagcaccaaccactaggctaagttcttcccatgagctatgctgtttgatcctcccaccagctctctgaagcaaaaccattccttttcccattaattaatatcctgggtgaggagtgggcaggggctggggatcacagctcagagaaggggggtctcgagcccagtggctagtcttctcctttcagagatacatctccttccccacagtcagttactggggttgatggatgggatgggggtggggctcagacagcagagagtgcccagaaaag

SEQ ID NO: 1246 - DNA, 2410 bp, Homo Sapiens
tttttatggtataaagctatttaaaaaaaaaaaaagaacagaggggagtcagagggaggggacaaggggtggagggtggagttgttagagcttcatggggcataggagataaatggatatgtactggctggaaaggatagaagctgtgattttcttagtcacctaactggggaaatcccagaacaggaggcctctgagttcctactagctgacaagtgataaaagctgagagtaataatgacaagtgctaacactgattaagtgccaggcacatgccaggcaactatacagagcatgttacaggtatgaacccatctgctcctccaagaagccctttgaagtggtattgggagataattctccatgggtctctccaaggtctgcatgtcttcagctcaaaagacactgagacctttgttctagactatcatctcaaggacatctgtgtagcaaacacacttggaggacagagacaatatctctctctggagcagaaagaagaggatagagttgtttcccaaccagtacaataatgtctctatctgaggcaaaggctagacaggtttggcaatagcccctttataagattgcaggtttcctaagctctgggatcctccattgagacacagatctgctgctgtgtgtgcagaatccatttgggttgttttcattgctctcatggaacttgggagacaattagaactgacgcaaatatgaagcttgtgctgcttgctatactgtgactaataaagtcctttgtctctgacctgggatctcgtgtcttctgccgtcatgtatggcattgtggcaggctaactcattagcttgtgagcagtgcaaaatctcggacccttcgtagttcttccgtcatactcacatcacccctgttttacagatgaggactttgaggcccagagaattgaagcttcttgttcaagatcacacagctaacaagtaacaaagctaggactgttacccagaccgattgggaaaggaaggagagatgagtaggggattggagaagagaaccgctggaaatgacaggagctgaaggccccaaaggtacacagaaggtcatgcctctcagcttcccaaacccacacacccccagatgctgcctgtccctacatccggctgctggggctgagcagccaatttgggacgaccgtgatatatttaacggtgagtcatgctctcccccagcaatcagcagtggcaggctcgggaggatgcagggagcatctctggaaatccgtgcctgagggtcgccatgacaacgccatctgagtcgcttgccagcagctgggatgccagtgcctgaaccaaggcacaaaatagtctcacaggctgagtgcggccgaggacaggagcaggccccctgcacggcatccccaatgggtttgccagggattgatgggagggatgtgaggacttggtgacaagggagattcatgggctcactgtccaggtcacagtactctatggaagcctggggtccctggctggtgggaatgagcacacttggcgtgatgggtattttggtgagcaccatctcttcctgccttggttcttcttggtttgtctgtctcatagttgctctcccagaggccctgcccaatttgaggcttctatccaagtgtcacaacctctgaagactgacagcaacttgggaaggtaaccaagatcatcttccaggataattctgaagacttcagaacctagggcgaatcagccacacccacacactaacaccaaatacgaatatcccatgaaagcagcttggaatccattcattcattcataaatccattcatcaccttgtcctctcagttgttcattttaattagaacctgggtcctacaggccctatgtagaagtggatttggttatcccgtcctcatcccctttcactccccctctcttattctactctagctcactagtcttactgctgttcctcaaacatacagttgcttttctgcctcagagcctttgcacttgctcctccatctgcctggaaagctcttcccccagaagggaagctctccctttaggtttctgctcatatgtcaccttctcagagacacactaccaagaccaccctaggagaaagcacctaattcagcctcagtgataaggccaaatatatatatatatatatattatgtataatatgacatatatctgtgacttagtttcccccatccgtacgaagcaaagagagacaagctgaaaattggtggcctgtaagttgaatctaactcacagacctgttttgtttggtttacatagtgtttcaagaactgagcaagttgctaacagttataaagttgagagattttgttttagaatgcaaattttcaatttatctcgaaaaactaaggttgggtgtggtggctcatgcctgtaa

SEQ ID NO: 1247 - DNA, 2489 bp, Homo Sapiens
aaatggctaccaaactgcccaacccaaatggccggttcatggacacgttttgtttggtccatgtttgtttaattcttaaaaaaaaattattatttgcattctttgccaacaataaaaataattgggacagtgtgccttaatccaaatttcccacttctcttcggtaatcagaaggtttgacagcattgtgcccatttttctgcatggcagctatttacaggagttgggcagtggctgctccttttgtcaggatacaagtgccccatttcatcccagtgccctcctggctatatcactcttgtacagggctgcctggccccagcccagctgatgggacacaggcgtgagtagtgaggccatgcagggaccacaagcaggacactctccctctctcttggaaggaagcaccttggttaccatagcaacatgctgctgtttgtaacacatcttccacctgaaaaggagaggagatgacaagtacatctctcttctcagcccaggcaacatcagctcctggcaccccccaaaacctaagagcgagaagggggagtgtgatctgtcttctccaatctgggccccaaatgcagatgccccaaacacccccatttgttcaaccaacccagagatgaggcgttgggaggggttgatttagattccatcttatataaaaagaccagaacatttttgattagtgatggaggaaggtgtgggagtctgagacagtgctttgtttctgggcaaatgtacacattccctgatgcctctcttctctccacgtcctctaaagtagaagcatagactccctctccttactactcctcacagccaaattcccctcagccaggaccccagacctttcccaatacccaggagcccctagggcagcaggcctgtttctaggctacctacagaacctgaaggaaataagggaatgaaataagagaatcagccagaaataaggcagggcaccgtgcggtattttcctttgaaactaagaggctgagagctggaacagcagcagaaatcagaagaaatctcattgagaaaagaggcacagagaggagtgccaattagcacccaggtcccctcctgggagtgtcaatccataaatattaataaccgtaatcatccagtattagttataatgccttgtaaattaaggtcattttccgtggagtaaatagctgcgttaatggcagcaaaaggtaacggcgttgctggctgcatgccagttgatgcctgccaggatgacagtataaatcaggaaggacacgtccaatctgtgaagacaggcagtggcatgggggcaggtggagtgacggggcagagtgtggccgcagacacacatcccacgcaaggcccttgggccgatctgatctaacagggacctgctttagacaggtgatgtctggggcagatgaagctcccagggtcactaggtgtaggtaggaggggagagaaggggccgggtgggtagggagagggtgtctcagagggaggtggcaccaagacttcagacacttgggttaagagcagagggccacgctttgagctgctgcctgtggcatttcactgcagaccttggcgcctttgctaagcgacacagacattctcttcttcctctacctcctttccctcctctccatcttccttctcttcctctcctctcctcctgccagggctgacttctccattaggcccaatagacacagcctggggttcacactacctctagggccccttctccaatgttttaatttcttttataattagaagaaaaaaagaactttcagcaggaagaaaatgttgtaatactgtatgtgatattaatatattcatctttataccaatgtagccataatatagcatgtttgtttttttttcatggagagaggcctaagtgcccgggggccacaaaattcatcacatggccctactttctgctccccacccctcctcccactaaccacggggccctaagcaattagcattgccttatggagtctcggtttcatcctttgcaaatgggctaataatggtgatgccttcccaagcaggatgaagtaaaataatattagaaaaagctttggccacaaagtggtgtttgcctccttttcaggaggctctgggatcctgggagttaggcgggtgatgtatttgaaaatctcagtggatggagtccctggtaatgctccctatgggctccccaagctaaatgcaccgtcagacccttctctcgggtctgacccatcatcttcctgggctccctggtttctctaaagagcaaatgcttttcttgaccctctgagaaaactcacaaggcacttgagtatactagatggatcaaataatgcctttaaattccaacggaaagaaagcagccattatgacgggctccagcaaggggagggagttgggggcctccttgttcctttactgctgggactggacacactggggtttgcaatacccagtgcagatgaaaatgt

SEQ ID NO: 1248 - DNA, 2494 bp, Homo Sapiens
gcagcctgtttctcagccaaatgggtcggagctggatatgggaaaggtgcaaccaacaccttgctgtgggggccaggtgtgaaggggcccacccggccacaccctctcccgggtccgccccctccctagccagacaggatgttgtcagaccccccgcctggctctgaatccttctttgagaactttctcaaaacttaggctgatgtttctcttctgtgagcctcattttctctatctttcagatgggcatgagaacagcttttggggtttctatacaggctaaatgcaggaatgcatatgggaagcacctggcaaagtgccggtacctgctaaactctcacaaaaatggttccttggcatttgctctgcttccttgctgtgtgactttgggcaagcaacttaacctctctgagccttaggggaaaactatgatagcatatgttttagagagtggctgtaaaggtggctaatcactttatagtaatttattatacccgaacggttctcaggtcggcttccccacccccactgaatcctagcacacagaccaggaaacggcatctttggggcagaaaacacaatcacgtcttttgaaaatttactaaatgtgtaaaaaactttctggacatggagaaaaggtagaactttttagaacttgaatggtggcagccactgtgcctggagctgctctttggagagtgacagttgagggagaagattccacagggttcaagctggccaggttctgccatttcctggcctggcgcctgacctctgagcggtgagggttagtgaggtgtctgggaggactggcaattcgcgggctttattggcatcttattcgactaaggctacccatttctcttccttcgtgcaccaattgctctgattttaacatgtaaaggtccaactgcctggcctcctgggtgcctgcccagctcacagggctctattttgggacagttgaacccctcagggtgctgcagtcctgcctgcctctctcacctcccatctggacattattttaatgtaaaggcatggctgagacacagaaatccccttgaaatgtatcattgcggtcctcattgactcccattgtgtgccttaatggtgggcccagtgggtgggggctgggaggggtggagcaggtgcatggggcagcggtgcccagcacctgttccagtcacagctgctggcccactgcatggcaggcccctttaatccggggatatcgcatgtacagtgcccccctcggcgccctttgtccccgccggcctggtgccgatttcacacttgccaggagtaccatgaaggcgtctggggggcgagggatccaaggagtgggggtctgtgcctcctgcgtgtgcacacagcccccgcccccagcccatcatgtcctagaatgtctccttccccttttgtttgggttcaggtctcatcacactttgggcacttactgtacaggagggtagtgctcaggacttcaccaacagccctgggaagggaagggaggtgctgtcctaactctggtcttacaaatggactccagccccttttccagatctccagagtcagcccttagttcacaagggtgaacttacccttctcattcacatgaagacttagaatgcaatcaacaaacccttcaggcgtggcgtgtggaggctgctgagtaatggcagagtggagtagtgctcaggcacccctcccccaatcctctatgtcccccaccctttggagtggcgagtttccatttctgccccatgagactgagtccagctctcaggcgctccataagtccctattgaatgcatgggtcccattggagccatcctctggactctctcctaccctggtagctcagtgtggcaccctaggcacccaggaggtgatggaatgaattcactctcagctcttaaattccatccagcgctgggatttcacaggcgggccctgaccttgcgggcatatcagactgggcgtgaggggattggagaattgcatgttttttaaaaagactattcagtattatggaatagtgtctagcacttagtaggagctcagtagattaaaaaaaaaattatagacagggtcttgctttatcgcctaggcttgtctcaaactcctggcttcaagcaatcctgcctcactcggcctcccagagtgatgggattacaagcgtgagccaccacacccagcctcaatagatttttgtttaatgggttactgttatgaccttttatttggaaaatgctgcatcccccagaaaaaaacaaatcaacattattggtgtttttggaactatatagctttttggttggagcagggattgttatgaggcatgagtgagggggcagactcctctgaggcctctttaatttttaaaacagacttatttattctctaagggcttgttgaggatttactgggcacccagctccatgtgcaagacttttcccaacacagccttggccaggcagatggtgtgtcaggg

SEQ ID NO: 1249 - DNA, 2472 bp, Homo Sapiens
attaaaggcatgagccacaacacccagcctatgatggattctgagttaatttatgtttgatgtgcgtgaagggtcaatgttcttctgttttttaaattttttccgtatggttatccaattgttggtgcaccatttgttcaaaagagttcctttccctgtgaaattacctcggcggttttgtcgggtatcaatcagccgtctgtgtgtggccctgcctcctgtcaccctgctctgacgccttccttctgtcgacaccaccctgtcttgattcctgtgcgtttcaagtgaatcttgaaatctggtagcgtcagccattcgactttactccttccaaaattgctttggctcttctaggtcatttgcattttcctatgaattttagaatccacttgtcatgtaaaaaaaaaaaacctgctagaattttgactgggattgtcaaaatcactctcaaaaatcactgaagttgactctgaaatgcagcatgcaagggtttgggtgtgcaacttgtacgtgagttctagtgcacaaaagaaagtgagagccagcaagccgggctagaggggataaaggagagagtggtggcgcatgtgcccaggctcccgtcggtccctgagagctttcctttccctagagtgaccacagggtgggtaggaggttccctaggatccctggagggtgtgtccctttattaataatgataaagggtgtgatgtagactccttaaccttactacatgtgaaaagagtgtttattgctgaaaggattaaataagataagacgctgagtagttgagctgcaaatgcttgtggattgaagtctaaagccagcttacatagacccacccacctgcccatttcctgccgtggcctcctgtgtcccagccaccaccatcgtcccatggcgcatggctgacgtgctgtcctgcaaagggccaggcgttaccctctagcatgtaccactctccactggcttcgttcttggggctcatgatacatattatttggttacttccaccttggagtatcacaggtcaaatcagccagtaactcgtggaactaacccacgagtggtgtttacccctggataatggcccagtggaggggctggcctgcagctcacacccaccatggttttgctgaatggtgctcgttagactttgcataatcgaatttagcccagctctatgaaggctctgcacaagctagtcccctctctccgctatttgatggaataatagatccataggagaattcatttgcaactctaagccccgagttaaagacgtctcaagggatgaacgtgggtgatttgtggaacactgcgatgcatttatgagatagattgcacgttcaccgcggcgctcaaagaaaccagatcgggttgcattagaggcggtgctgtaatccggctgtcctctgggaaagaatgcaagcttccagtgtgcgaagtatgaggggctgcagaggaaattgctttggtggctctggtcctgggagcaagtacctgcttctcgttcatttaagcacattagcgagcttcataaacacttaagtggctcacgagatgcttcacttccaggcctcgccccacctcctccgctgtcacacagaggccaccagaaaccacggtcttctgggtttgacagccaggcagacaggaccaggccaggctgcagctgctaacccctgcgctggcaacttccagaccccctgcacaatgtcaccgtccagtcattcctccctgggctgcctgccttcatggggcccctgcaattaaaaaaaacaacaacttattctcactcctttcttttaatatgtcttattaataactgtgtaaatttgtttactttttaggactccatcatgatgtaaagtagataaaacaaccaatttgtctttctttttcttggtacatgggtgtcctgcagccttcattccttccaacccccgcttcacgttcacgagtatgaagttgaattaactcatgctttgctgaagccggattgtgagattgtgtaggcagacgtggcttttcttctgagcctgcaaagcagcagaattcatgacaatgggttccgtagtaacagggactgactgcgccatgctgtctctgtccatccttacagcgctcaggagtttgcatgccattactgggaccattttacagaaaacagaggctcccaggggcaacgtaacctgccccaggacaggcagccacaaggcagagaaaggagggttggacctgcacctgtgaaaccacagccctggggcatggcttctgagactcatagctggggctgaagatccctaggggggctctgctgggctcactgctctccagagtggtccagcccggctgcagggtgctgcttccagcttggtgcactgcggccggaggaggtggaggatggaaagtaagattcaaagacagggagtgcaaggggacagtgatacttgaggactccgaggagga

SEQ ID NO: 1250 - DNA, 2474 bp, Homo Sapiens
ggatttgatcagtctttgctaaattgagcacataagcgaggatgtatttaaaggagtgttagtgcactttttataaatcccaaacgcagggcaagctggctcatgccactgttgaaaagcagtgtgtgtccgaggaagggccgcatcacaccgggtgtggatggaaccatgcctccctgacgtgcagaccctccgaatactccacttgcagaacctgtttttaaacaaacatcattattatcaggtcagtgaaacatccccatatcgcttatgctcatcatctgctgtgcaaatatttgtggctttaaaagaataacagatcgtgagaactccagtaaaatgattgcagaactaaccacccttttaagtagaagtgacatttctaacaggcccactcagacggttccagccttcgctttggggttctacattaaactccacttaggctgcctgcagtgaggggcagaaggctgcgttacagagactcaaaggcaaaacgtggggtgcttgcctgcacccagtggagcctcatccacgatcagtgacttccagagacaggcaagggtgtcaggaggctcccgggatgcactgaagcagctccttttaggaaacaagcggcaaagaagaattttaaccctctttatgctgataaaaaaatacacacgtgtgggaatgcatgtcttgggtttgagcactgatcctttttctgcagtcccccggccttggcactgttggcctcaggggctgaatcaccccatggtgggggctgccttgtgcattgaaggttgtttaacagtgtccctggccgccaccctttagatgacccctaggtgcaccccttcttccttcctccacccccaggtatgtgaatcacaatgtctttagacgttgccagtgtgtcttggagaccaaagcaacccctgattgagaaccgctgcctaggaagacacacttttcatttgtttgttgttttttaatgtaatctatagttgagagacaccctgccccacctaggtgtgaagcacctcgctttacctggaaggctgggcatatttaaataccactcccctgcacgcttatttgtcgcagagtggttaatgctctttaattggtgcagtaaatattccagagtcttccttgttatgccggagtcatttagaaatcagccctgaaatgtggctgctattttagggatcatcacacatcatctgctgtttggtgttaaaccctgagccgctgttatttaacactgattaataaatggcaggttgtcagtaccggcagtgaagacacttcaaggagccattgttcttttaaattaaaacatttaaacatttaaatccagggctggttctcatggctcgttttaattattccttttgtcttggcatacctttcttctcctgatcacacagctgtcacgccagcagtacctggagtcggaacacgacagccctttccctattagctgccattattttcgcaaggaaagctggaagctgctggagcagatgttaattttgagagaagactgctggctaagttattaaaatgagcgcatccgaaggctgcgactcatatgatttatacgcgggcagggcctgcaggaccgggtcttgcttggctctgtatgtgtgtgtgtgtgtggatctgtgtatgtgtgtctctctgtgtggtgtgtctgtgtatctgtctgtctctgtgtgtgtgattgtgtgtatctctctatgtgtctatatctctgtgtgtctgtgtatgtgtctgtgtgtgtgtatgtctgtatctctgtgtgtgtgtctttgtggatatctgtgtgtgtgtctgtgtgtgtatctgtgtgtgtgattgtgcgtatctgtatatgtgtctatatctgtgtgtgtctgtatctatgtgtgtgtatctttgtggatatctctggttgtctgtgtgtgtgtctgtgtgtgtatctgtctgtgtgattctgtgtgtgattgtgtgtatctctatatgtgtctctgtatgtctgtgtgtgtatgtctgtatctatgtgtgtgtgtctttgtggatctctctatgtgggtgtctgtgtatctgtatatggctgtgtctctctttgtgtattttgtgtgtgttcatgtgtatctatgtgtgtgtgtgtatgtgtatgtatgtgtgggtttctttgtgtatgtatttttgtgtatctgcacgtgtgtttctctgtgtgtgtctgtgtatatttttgtgtttctgcatgtgtgtgtctatgtgtgtctgtgtgtgtatttgtgtgtatctgtatatatgtgtatgtgtgtgtgggtttctttgtgtgtgtatttgtgtgtatctgcatgagtgtttctctgtgtgtgtctgtgtatatttgtgtgtttctgcgtgtgtttttgtgtatccgtatgtatgtgtatctttgtgtgtctttgtgtacatctgtgtctgtgtgtatatctgtgtgtatatgtatgtgt

SEQ ID NO: 1251 - DNA, 2481 bp, Homo Sapiens
caccctgatcatgctctgttcccagcagagacaacagtctcagagaggtcaggattctcactcaaggtcacacagctcaaagtacagaactgggctttgaaccccaaaagtcagactaaagagcccaccctgcagccaccctgctgtgtgtagccgagaacctcgtgggggtcagttgtgcctgagaaagtatgtgaggaaactgaagctcccccaaaatcgtgggggtggccccatcgtccctgttttcactgtctctgagttagttgtaaagaaaggaatttctctgcagagcatcgctttgaaggaaaacttacttggggaaaaaaaaaacaactgtctccgttgggagcaatttccaaacgggagtccacgcgtgggtttttcgcttgctgcttcaagcaaatcagccattttcactgcagaatggctgcaaaggaaatggagaaaaggcagagcgcagccctgggagctgcctcccagcctgggggccgggcagggggaaacaggtgccacctgggcctagacggggcgatgcctgggaggagaggctggaggaaccgggccttcccaccacggggccctgtctgtggccaccgccgtccacagaggcttcacaggtgcatgcagcgttcctccccgtcctcctggctgctgccttttgcgggatagtcgcaggctggctctcgctggaggggcttctccgaattctgtttatcctgggtctggctctctccaacatggcagctggggaggcagaggaggcggcgtgtctaccttgtcactgccggggcctgatttaccaacaggtctggacagcgctcccctccttcccacgcccccactgctaattgcctgcctgtagagcggccagccctgtctcagcagcgcggcgagtcgcagctccgtcgttgacggtgtgtccgcgatgtgctgtggggtcccgtcgtggcggctgtggacgggctgaggtcttcctctggatgctctcagagtggcagggagcagcctgggtactctccacgctcggcacaatccgcccgggctggcagttagagaagccaggcagagaagtgcggccagagaggctgtccaacccaatttccccgggctgggttatttgaaagtctaaaactccctaataccaagagacgggcggtatttaaatttaagtctggctcccaaatgaaatcttttcgttcaactgttcaactttatttggaaatatgaaatggtaacttgattacatgttaaggtagctttggtcgggggattagagccgaaatctctgcccctctgagttcatcctccagcgaatggaatccatccaaattaggaatcagttctgctaccgcgggcgagccgcaggcctggtggcctggagggtggggcatcttgaggctgcgggattccagttactctgcatggccaggataagggggcgcccagagctctgcgttccccaagggaggttggaaggaaacgttcaactgtgtgcttcccagagccctagcaaatcactcgatgtttataaactgtcagtgaaagtcatttgtaagaaaagctccatttccagtggctctgcagcttagaaaactcaaaactgaaaaacacacgccacccaggaaggacaggagaaacgagaacaggctccatcgctgcagagcgtgaggccggcccccgctgcgtctgcttccaggaggcggtgccgagacggcggaggtaatggaagcagaaacgagtgaaacttttttgttgtgtttagcaagtatctcttgtcaaggaagttgccaaactcacaaatgttcttgccaagagagaggcgcctgctctccacacgagcttgttgttggtaaggaggcacgacagaaaacgtgtcaagctgggacccggagcaggtggtggaaacagcagtttgcaggatgtcggtcctgcctgcatggcggcctgagagccgcccgaactgctgtgctgaggacggggctggagattcgccctcaggtgaggggctggcctctgcaggttctgttttgtctctgaggcatcaccagacgggtgtcaccagccacatggtgcaggtgaggagacagaggaccgaggcgggtagaagtgacaggagaggcaaagagctgtcccctgcacagccactgtccatgctgtctgaccacccctctccgccgtccagcctctgcatctggcctcggcctcacccactgctggccaccagtcacctggaggtcagccacacccggggggcagctctgctgtctggacctctgagccacaccgaaagcactcagtcccccttcctcctgaagcctccaggtcctgccctctccttaccatatgggttcccctctgagcatccctcctgtctcctctgtggacctgcccagctctcgcctggtgggtgtgtcaggtttctgctgcctcagtgtggggatcctccaggggagggagtggccgtagcctcagaagtgc

SEQ ID NO: 1252 - DNA, 2425 bp, Homo Sapiens
gctaccaagaagaagaagaggggcccagaggcatgcagaacccagctgaaaaagaacaacccacttatgtctgaagttctaaaccagctttaactactcttgttaagagctgaggaagggacttaggagaaaggggaccaaactcattcctcctctccttacgaatttcagtataacttgttctaagctaacttttattgaatgttgtgggctgactgctattctaagtcatttgcttctctcaaacaccctaagaagtgctttgacccattttacagatgaagaaactgagacccaaagaggttaagtaactttccaagtggcgaacacaggtggcagagaagattgaagattcaaactctggctgtcagcctccaaaacctgaatttaccactgatctccatggcattggtttggattagattacctttaacatcttttccaactctgagattctaggattctctgatgtcaggacattataaacctattataactctcctaaatttgtcaaaccaattctagatctctatgattacagacatgatacttttagaatcaatatttaaatcaaggtaggattattacacagaaaacacaactgagtagaatctacctttgccatgttgttcttttcagaattgaccctaaaacacagcgctatgtttgtcagagccagtcatttgtaatgtgtcagaatttcgactctaggcaagtgctaggagctaaaatgcaggttccttcaaacttccaagtagctgcggtgccaagctgatttcgatgagttgagttcttactgagcagttcaaatgaccagactgtaaccaggggcttcattctctcacccacgaagcactagggcagtcaaggggaaagactgacgcagaaggaatgaggttcccatgggctgggtccaaaagacctagagcgagtgcttagttgaaacatttgccaaaacctcaaggaacacccacacaaaaataagaagttgctcggcacagaagtcagggtaggggatgttcttcgaaggccacactccatggcaggcatacagcagcacgcttaaacatggttcctgttaaggctagagaggcaccattcacatagaagaagtcatcatcgtgactctacccaccccgcgcccccaccgcgtaattgaatgctgagtgtggacggcacttcttccagcacttggctgcgttaccgtgctcagttggcaagccttgggggagaagagaggttcagaaggaagaccatctgagtccatcagaacaatgtgtgcttttaacaaggcaggggcgcccaaactcagtaggtccaacagaccaagttatgctatgaaggtcttgtggaccacctacccccgccaaccagtcaccacttaaaagatgagaaaacgccagctcacaggccaaatgggaggcatttagaagagacaccaatgaagagatgtctggctttgtattaattactgtaggtaaattaataccaaatgccaggaagtaaagtagaggcattttcctattataaacccttgggacaagcccagagaccaccagcagtccagggcttgtgtacgctgagaactgaggggataacagaattgtgcaacaccttggtgccccaccgcccccgttaccaaatctcacagttcacagtatcgccttggcacactgggcttgtgtaatactcatggacttgacctggaatcacaaagcggactcagcttctgttacattcattcaccccagtgactctgggcacacactgtgcctctgaaggaggcacagtggccataaatggaaatagcatttgcctgcttctggggaccttggtcatagacttctgaggctttcctgggagccagtctaagataatgggtaagagtatggactctgaaggcagagtcctctgcttggaatcctagccctgccatttcccaactgtgtggccttaacaagctacttagcctgcctgtgactcaggctcctcatctataaaatgggcataatagttcctacctcatagggttgtcatggtgattcgtgggctaatattaaaggagatttctcaacctcagtaccattgacatttggggccggataattctttgttctgggggctgtcctgagtattatgggatgtttagcaacctccctaccctctacgaactgttgtgacaaccaaaattgtctccagacattgccacatgtcccaaatatttcctaggggggcaaaattgcctccagttgagaaccactgtattagattatgtcgtagatacaaatagccaaatatcagcaatttcacgtggttcaatctaacaattataaagtatttaacagttaaaactctttgaactttgtagatacatttatgtgcttcatctgggataaacgaacccaatgctttcaccagacgctca

SEQ ID NO: 1253 - DNA, 2492 bp, Homo Sapiens
aactaatccttaagtgtatttttaaatgcatttctctagctgctaggcagatgagcatttttcctctgtgaacttacccccaaccccttctccccagctacccactgcacggtaccaccaataccctttagcatttctgtcctggagcctaaagtgacacagctggtaagaagctgcgtaggggctggagtttacatctgctgggcaccagagcctctgtcctgagccacctgcccgtgctgggaccggcaggctactcccacagcagaccattcccatccattcccagtgttctagcacgcagctctctgggaactcagactatgacaccttttttgggaagtggtatggagaatcctggccaggtgccctaagccaagcccatgccaatgataccagggcacagagaagttttctgtggtttatggggaggtgggaacatctgcaacacggcttctttaactccattccgttaggactggagagcacgaaggagcccgtctccctgcaaaaatgggcagttagagggttctgggggccaaatggacacccttctgcctgcagccttctgcagtctccccatgtagacaggcatggccaagctctgtggagttgataggtgtattctgacctcagagcactgtgtgggctcccaggggctgcaggtcactgctgcctcctcctcccctcccatcacaaaaggcaggtttcccgagaagcactgggcgcatgcctccgagtgaggggccttggctcacagggcagcggctggggcagagctgctggattggtgagtccattgggagcccccagccttgggtcaggcccatacagagcttggggtgggggttaatgccactgttgaatgtgctttctcctagtgaccttcaaagggagatgaaagttaaaaataattttggtgggggaaatagctggtggatagcgggccagtgatgggggtgggcaggaggatgtggcactgtcggggggaggaagcagaccaaatgctccttttccctcaagccgcaagggacggacagcactatctgtggcctttgtggttggcatttcccctgcagtgtcttcctgttaggagttctctcagataataagctgcagaagagagcaggagatggagcaggcactgtgtgcatcggattgaaactcctaagtgtctcttgcacctgccccagtgccagccacagcccaggccttcaacgccctccggcctcttatgctggaagtctccttagcagatggcctcatggccagagctggcctcctgtgagctctgttgctgccctaactgcagtgcctatcatctgagccccctctcgcgagccaccttcactcgctaaagtgaatttaggccgactttgtttttgctgtgtctggcttgctatctattctttgttatgagtgatctcaaatatgccctatgatcgaagagttctgagcagagagaattcagcagcccttcaggagccacatctgtccttactttaattacccctctgtgacactgtgggcctgcttttcacttgccatccctgacctaggtcctaagatatatgtgatctattttatcccagcctgacaactagagataattcggtgtaatcacatgcttcctgacagcaactggggcatgagagcacaggtggtcagggagtgtgggtggtgccaggctttcacagggcacacactgtggtccacgtcggcccctctcccagatgatatgccacttttactgtcttgtgatacttggaaatagtatcacaagacagcctttttaaggcttcaaagtctccttttgccaaggatggtgattagcttatcttagtcctctgagaacaaagcaaaaggaaatgactactattaaaatagaatataagaatgatgtaaaaaaaaaagggcttcttgcagcaaaattataaaagggctgcaaagttctagaatttcttttattgatgctctgcaaaacacaggcactgggctcatgcctcccagcgaggggccttggctcacagggcagtggctccccaggcggagtgttcacaggtggcccagatgtctcattggccctgcccttcctcagcctgcgctccggacagactgggcagtgtgcgggaaccaccctgcgttttactgcctcttgttcacactgctcctgcatccacctgaactgccccagatcatcttggccggctgccttcttcagggtccctgcgaatattcctcctttaggaaaccaagctagaagatgtctccttctccttggaactccctctgcacttgacccgtacacttcttaggccctggccgctgtccttgttggatggactgcagcccctcagggaaggttttcattccagtcctccctgtgttaattgagcacctgctacattcaagcaccgggctcggtactggggattccttgagtgaaacaaaggttccttgccctcacagagcttacgttctctactagaaag

SEQ ID NO: 1254 - DNA, 2489 bp, Homo Sapiens
cccatggctagggacagtgacatcagtgtgtttaccaagtatttgatttacttgctcaggcaaaattccagaagagacactgggacctgtgtggagagtttcttcactgcagctatcctgccaagctcattgtaaagtgacgaattttgtggacacttacagagaaaaaatagcttcaaatgctatagaccaatgctgcacgctgcagagacacagtctttgggttctgtgagctgtatttgggcattacgcagagttcagctgccatctgtccctttgaaggccagctaagaagttggtcccagcctgggcatggtaccactgtcctacattccagccatttgggatatcctgggttcaagcattccctcccattgctggatcaagcacttcccacctcctgctctgggaaatcagatctcagtaggtcatcaaccatcccagaaagtccagcagagttggttttggtttgggggtgttttttgagttgggtggaagaagagaccttatataatcttttaactttttctctaaggctgaattccctataagcaaaattttaaaattttttttaaagaagaaaaacacccagacaatccttaaaatcccctttcagctccaagactgtgtaattctgtgataccagtattgaaagcccctgcatttccctaactatatattcccctatgccagggaaaggtgcatgtaagtgagagaacaaaaaatttcacaatcgtggggacctcttctttcggctttggagcccccttccctctgtctctgtacggggcagctttttccttctgtcttctcccttccttcttgtctactaaactctctgcgccttagaaccaaaaataaaaaataaaaattcaaaatcatgatcttaggggtgaaagaacactgagaaaccatagaaagcaaaaatgaaaagccaacatagaaaaagtctgacttgaattagaagcagcacttaaaattacaggttcagaaaaagcttgaacagaatccagggctgaggtcagccctgagtctgcaggctctgccctctcacaaaggtgagtagatgggtctggagagggctgttcatgctatggaagggcctctatgccatcgaggctaaaaccaaagcaggagcaaatcagccctgctagtgtgtacagtcggcatcaaagaggcaacaacggtagagaatattttctgaaagacacacatgaaaccagtaacggcgatggtctctggaagaattaggtcagaagcagacttaatttgcactgtgtacattctttggtatcctttttaattgaacgcatgtgaatgcattacctattcaaaaataaatgtgtaaaaacacgtgccacgacaaagcaaaatgaggagacagtataaaaaagacaaggataattttaaatttctcctaataaaacgctgtttaaaaatctaagaggaaaaaagggtaggctccagctagtggagagaacaactgaaaaacaagagccacgtgttcccatggtcctggccaaccccacttctttcccatcctcactcgttcacatctgccttggagcacccacagcaagcctggcttcatgcccagaacatcgcctggctttcctcctctctccctgcccacatctcctcagtcactcgctgcctcctctcttgcttctctcccagttctcagtttgcccatcaaatctcaggtggtactctccattctctgctatgagggagttcatttgttcatgcaatttccccaccggagacaaaatgtatttcccaaagttggcttgcaatgacatctcccatgcctgctctgcttacccatgactttgacactccttccatcgagagggcagaacctgtgtttcctctctctgaatctaggtgggctacagctctggtagaagtgacactctgtgaccttaaggctaggtcacaaaaagggaatgcagcttctgccagcaatcctgggacacacacttggagcccgagctgctgtgtaagccatctgcctgctctgagcccaccacactataaggaagcccaagctagcccacaggagagacgaggtgaagagaatgagatgccagtctccactgctccagctctctagtgtcccagccccagccactatctgactgcaaccccatgaaagactgagccagaaccacgagcccagcccttcctgatgttgacatacagacttcatgaaagagaataaactaatttttgctttaagccactatgatttgggatgatttgttatgcagcactggataactgcaacacctgcttctaaacagtagaatcccaaacgtctaggccccatctctaacttacttcatgttcctgttctcactgattttttgccactgagcttgaccaagcccttgagtcaccaattccagatatttgtttaaacaaattcactgtgactgtctacactatccattcctccaaaacaatccctgttatagttggccttc

SEQ ID NO: 1255 - DNA, 2417 bp, Homo Sapiens
gttgcccaggctggagtgcaatggcacgatctcggctcactgcaacctccgcccgcaccgaggttcaagcgattctcttgcctcagcctccctagtagctgggattacagtcacccgccaccatgcccagctaatttttttgtgtatttttagtagagagggggtttcaccatgttggccaggctggtctcaaactcctgacctcaggtgatccacctgcctcagcctcccaaaatgctgggattacaggcgtgagccaccgcggccaaccaggaatgaacatttttaaggctcttgatatatattgccaaacactttccaagattgtgctggtctattcccctcccccagaatcctgggtgtgggagcccagaggctgctggcccgttcccagcaggcaaagatgttacccatctcctaggaaggaagtgtagcagcctctgagcgccacaggtctcgtttctgtgggtgctggagtgcgtttggtgctgttctcctctaggtccagacatcatctgtcggtggtggacgtctgcaatcactgtggccatcagctggctccagggagacgatgcagctgtgcgctctcattttaccaaagtggaacgcatccccaaggccctggaagtgacagagtgcgtaaccctccttggccactcacttgcttctctccaggggaatcttgtttgagttagcaggagcaaactggactgggtgggcgtgttggggtgaagggtcaggactgcatgacaggtgggcggctagaaaagtcgggggtgagggcaccatggagaactcaagttgggccagcaggtcctctgtgcaagtgtcctgctctgcacaacacgacagttgtcccagcagctgtcagcactgtgtccgggtcctcctccctgcagccttcatggcgccacaggctgaaaagaagagacgagagcagtgtggcccccagcatcttcagaagctttgtggtggaggcaggcactggtggttcacaatcagtgcagagaggccactgttgcccccaaaactcatgtgcactggagcatcttgcccctgtgtgctagcattttatccactttccttccagccacctccacccccaccatcaaccctggcaactttgtcctgtaactaaaatagcctttagcacatggcataaccggagagcttttgacattcctctttggagattcatgtctgcgtcttgggggcattcggcactagtgatgggcagccctgcctgctgactccccggctgtttctaattggatctgagtattctaagagaaactgtaaaatgctccaagacagaaaggccccacgaggtcctatccttagagccaaggctgtagcatttcctatcaagcagacccttaaccggcgcacaggaaggagctgagaagagtgagtatacacaggcttgaagtcctttgttccctgaagtagatgtgacaccctaatttcattgaagtagccccatttgtaagcactctgactaggtaagcacccagcccggtatagcattccacctgtatgtgtgtctcccccagtcgatgtgcctgaggacactgagactcagcaggtaagttgtccaaagtcacctcgctccagagcagcagagcttccatggacagccaagacacccctgcaggcactgctgcctgctggattcacttacccctgggtccctctgcttttcagggactaggatgctatgagaaccctcccccatccctagcctccccttccactcccagtctcctctacagaaagaagctaactaagtatctccagagagtttaataccacatctctgggggggtggtcccttaaagaacgggtacaacaccttattgtggccactttataggtaaggaaactgaggcacacgttggaatgactatcttgggtggcttcttagcagcagacgtgatggtgaagcctgtgtctctgacttccagcattgaatgaaggtgctaaagggtggggcgctaaccctagctcagggctggcatttcagatctggagctggtggcatggtgccatagtggcagcattggagtcaacagatgcacatgtcatatcagtgtggggcgtggcagtcactggcttgggcccctctgcctgtcacgcaggtgacacatagtgacctgcctctcgactccctgtcactgctgcaggagccccctggtgaaggccatcttccatgcctgcagagccatgcatgcctcactccctgggaaagcagatgggcagcagagttccttctgccattgcgagagggccagtggccacctatggagcagcctcaacgtcagtggggccacctctgaccctgccctcaaccacgtgagtgggagctgagttggcccctgggggaggtgctctgcactggtttacgagaacactcccac

SEQ ID NO: 1256 - DNA, 2844 bp, Artificial Sequence
  chemically treated genomic DNA (Homo sapiens)
ttgtattagagaaaagttagagtagtggagaattgtagaggaacgcggggtatttatataaatgttttgaatgaatgagtgtatagagtgatagataaaaagaattagagggtcgggtttcgtggtttacgtttgtaattttagtattttgggaggtcgagttgggcggattataaggttaagagatcgagattattttggataatatggtgaaatttcgtttttattaaatatataaaaattagttaggagtggtggcgtttgtttgtagttttagttatttaggaggttgaggtaggagaatcgtttgaattcgggagacggaggttgtagtgagtcgagatcgcgttattgtattttagtttggcgatagagtaagatttcgttttaaaaaaaaaaaaaaaaaaaaaaaaaagagagttagggttttttttgaagcgaagagggtaaagggtaaaggggaagtataggggaatttcgcggcgttttttgaagttttttttcgaatataatcgtaacgaaaaggttaacgattagaggttttgcgaggttgaggttgggtttcgggaggggattgttttgagaggttcgggaggatttgttgtggaatttaagcgatcgtgggttttgagggaatcggggggtaagatatttatttagtattcgcggaatattttttcgaattatttcggggaggggtgaggtcggggtagggtggggtttttttcggagggggcgcggttttcgagtaattaatttcgtttttgttgcgttttgttttttttttgtttatttagtagggttagtttagggcgcgttaagagtttagagagttcgtttttatggtgacgggtttcgcgaaggtttttttggggtgaagaggtagggcgttgaataatcgttatggcgatagtagtagatgacggtgttttttttgagtgtttttatttagagttaagggatatttgagggtaagtaatcgagtgacgaaataaagaaggcggggtttgaggatagaacgttaaggttaggggaatggagttaggtaaacgaggggcggggttgtagatgattcggtcgggagagggttacggtttgttgggggagcggttcgagattgcgttttagagaggaattagagagagggtttttaatttaaatataaatgaatgattggatttttgaagaattcggaatggtttgttgattggatagatggatggatggatggacggacggacggatcgatggatggaaatttggttattattgacgtttgagttttttatttttttgggttttttattttcggagtttttattcgtttgtgatagttgtacgagaaatatatgttttttttaggagtaaatttttaatttaaataggtagtatagagttagtttagtattttatattggaggtatttagggtggagtttaggtcgatgagacggcgtaggatgaggttttttggtttagttgggaattatttttttttagatttttcgtttagagtttaattttttttttttttagcgttattttttttgttagtttgtttagttttttagggtgtttggatttttaggttttattttgtgtttagtatagtagggtttagcgttttagtaattgggaaggtttgtatttttgttgattattttttggaattgttggaattttgttatatagggtgaggagtggataggggtttgtttttatttttgggtggggattagttttgaaaataaatatagttgttttgaattttattgtatagggagtaatttgaagtaggttgaggtttttggatgggggggtttagaatttatatgttgagtttatttttttttttttatttaattttaggtatttaagggttttttaggttatttattgttgtttataattatatgtagtaagatgggggaaagtggtagtaggggtagtttagtagagtttttaatggttatgtttagggaggggtgttttttgtttttagggtatgggaggtgagattgggtatttttatttgttttttttttttttttttgagatagagttttattttgttatttaagttggagttcggtggtacgattatagtttattgtagttttaatttatcgtgatttttagttaagcgatttttttattttagtttttagagtagtttggaatacgggtgtatgttattatgtttgggtaatttttaaattttttgtattgatggagtttttttatgttgttttgtttagttttgaatttttaggtttaagtgatttttttgttttagttttttaaagtgttgggattatagatgtgagttattatgtttagtttttttttgtatttaaggagttttttttagttgaataaaaatttagtttttaggggattaatttttttgttggatttgggaggatgggatttagaattgtgtagttggttttagagttttatgttttatattttttatcgtttgtttttttggaatgggatagaggagagggtattagtattagttatttatttgtttgttaacggtggagtattatggagttgtggttatttgttttttttaattttaaattttaggtattatattatttgattaagttttagatttttatttttagtggagatttagtatatttttttttaaggagttgtagcgttaatgggggtatatatagtttttgttttggggttttaagaagagttttatgtattgggtttggagaagatatagaaatttagttagagattttatttaggatattagaatattgtcgtttacgttaagtattttgtttaaaagaatggagttggtcgggcgcggtgg

SEQ ID NO: 1257 - DNA, 2844 bp, Artificial Sequence
  chemically treated genomic DNA (Homo sapiens)
ttatcgcgttcggttaattttatttttttgagtaagatatttaacgtgggcgataatgttttaatgttttagatggagtttttggttaaatttttgtgttttttttaaatttagtgtatgaagttttttttgaaattttagggtagaggttgtgtgtgtttttattagcgttgtaattttttaagggaagatatattgagtttttattggaagtggagatttgagatttaattaggtgatgtgatgtttgaaatttggagttagaagaggtaggtgattatagttttataatgttttatcgttagtaaataggtggatagttgatattggtgtttttttttttattttattttaggggggtaaacgatgggaagtgtggaatatgaagttttggagttagttgtatagttttgaattttatttttttagatttaatagaagagttaattttttgaaaattaaatttttgtttagttaagggaagttttttaaatgtaaagaggagttgggtatggtggtttatatttgtaattttagtattttgggaggttggggtaggaggattatttgagtttagaagtttaagattggatagggtaatatagggagattttattagtataaaaaatttaaaaattatttaggtatggtggtatgtattcgtgttttaagttattttggaggttgaggtaagaggatcgtttggttgaggattacggtaggttgaggttgtagtgagttgtgatcgtgttatcggattttagtttgggtgatagagtgagattttgttttaaaaaaaaaaaaaaaaagtaaataggggtgtttagttttattttttatattttggggataaaggatatttttttttggatatggttattagggattttgttgaattgtttttattgttatttttttttattttattgtatgtaattgtagataatagtggatgatttgaggggtttttagatatttgaaattgggtagggaaagaaaggtaggtttaatatgtgaattttgaatttttttatttaggggttttagtttattttagattattttttatgtaataaggtttagagtagttgtgtttgtttttagaattaatttttatttaggggtggaagtaggtttttgtttattttttattttatatagtaaagttttagtagttttaggggatgattagtagagatgtagatttttttagttgttggggcgttggattttgttatattggatataaggtgaggtttgaaagtttaggtattttgaggagttgggtaaattagtagaaaagatggcgttgggagaaaggaaagttagattttggacgggaaatttggaaagaagtggtttttagttgggttaaaaagttttattttacgtcgttttatcgatttgggttttattttgagtgtttttagtgtgaggtgttggattggttttgtgttgtttgtttgggttgagggtttgtttttaggagaggtatgtatttttcgtatagttgttataagcgagtgagggtttcggaggtggagggtttaagagggtggggagtttaggcgttagtgatagttagatttttatttatcggttcgttcgttcgtttatttatttatttatttatttaattaataagttatttcggattttttaggaatttagttatttatttatatttaggttaaagattttttttttggtttttttttagaacgtaatttcgagtcgtttttttaataaatcgtggttttttttcgatcgggttatttatagtttcgtttttcgtttgtttggttttatttttttaattttggcgttttgtttttaggtttcgttttttttgtttcgttattcggttgtttatttttaggtattttttaattttaggtaggagtatttagaagggatatcgttatttgttgttgtcgttatggcgattatttaacgttttgtttttttattttaggaaaattttcgcggaattcgttattatggaaacgaattttttggatttttagcgcgttttgggttggttttgttgggtggataggagaggagtaaaacgtaataaagacgggattaattattcggaggtcgcgtttttttcgaagaaggttttattttgtttcggttttattttttttcgaaataattcgaggaaatatttcgcgaatgttgggtgggtgttttgtttttcggtttttttaaggtttacggtcgtttgaattttatagtaagttttttcggattttttagggtaattttttttcgaagtttagttttagtttcgtaaagtttttagtcgttggttttttcgttgcgattatattcgagagggagttttagagggcgtcgcgaagtttttttgtgttttttttttgttttttgtttttttcgttttaagaggagttttggtttttttttttttttttttttttttttttttgagacggagttttgttttgtcgttaagttggagtgtagtggcgcgatttcggtttattgtaattttcgtttttcgggtttaagcgatttttttgttttagttttttgagtagttgggattataggtaggcgttattatttttggttaatttttgtatgtttagtagagacggggttttattatattgtttaggatggtttcgattttttaattttgtgattcgtttagttcggttttttaaagtgttgggattataggcgtgagttacggagttcggttttttgattttttttgtttattattttgtgtatttatttatttaagatatttatgtaggtgtttcgcgtttttttgtagttttttattattttggtttttttttaatataa

SEQ ID NO: 1258 - DNA, 2457 bp, Artificial Sequence
  chemically treated genomic DNA (Homo sapiens)
cgttattataattttttataaaataggagtttttgttgttgttgtttttgagatagggtttggttggttttgtcgtttaggttggagtgtaatggtttgattatagtttattgtaatttcgattttttgagtttaagcgattttttttttttagttttttaagtagttgggattataggcgtatttgaaaagttaagtaggttaaagtatttgtgtaaatggttcgagtatatattttaagtgagaattatttgaagatttcgagtttgtttgcgaggatttttaaagggatttgggtagttggtggtttcgtttttttttttatcggagttttttagttttttcgttttttttacgtttaattttttttcggtttttttttaatcggttttacgtcgttgattcgttcgtagtttttttttattatattttaattatggttgtgtttttgtagttgttatcgttgttgttttcgagggtttaagggaattttgggggtaagcgatttttgggagagttgtgatagacgtagaggggttgaagtaagataagggtcgtttagtagggtgggttgtgtgtgggaagatttaggatggttggagtgtagaatagagaagagaaagaggagacgggatggagggtcgttttgttttgtggacgtgttttaattatagttttcggttttttttagtttttttggacggtcgttttggggatcgggtgaattttttttgcggaggagttttttattttattcgttgggtttgggtatttagtttttcggtttgtaagggtttgtttaaaggacgtcgatcgattttgtgggttttttcgagcgggatttttatcgtgttttttttttagtttttcgtcggtcgtttacgttttttggattttggtattcggcggttggagttttttttgagcgcgggagattcgggtatttttttttgtaagggtcgttacgaggacgagagtcgtatagtgttttacgtgttgggggataggatttattgtaaggttttcgggtttatttatggtaggtgtaggtttgtgcgtataagggtatttaatttcgatatatattcggaggagggaagagggttttggttgggggtttttgagcgggattgttggttgtttttcgttaaatttttgattttagtattttttttcgttacgttttttttttagggttcgtgtatttttagtttttgatttcgttgttgggcgttgggttggtgttcggattgggagttttgggtttggtttggtggttgtataggtgagtaggagggattcggtttcgttaaatggggagtgattagaggtggaaggggtaggattagaattttcgtaaaagaaagagttagatttagagttttggttttggtttggcgaagaatgggagaggttaaaggtgggagcgaggtcgttggttggtgagtagagttttattagagtagatgagttggaagtgtagtagagttagagtttgggttggattgtcggtggggtagagtttaagttgttttcggtttgagtttttaagttgttgggttgtttttggcgtggcgagttttaggagaattagtgagataagattggtggtttttaaagatttatatgttttttataggcgtttgttttcgtaatcgattcgattattttttagatttggtgagattaattttattttatttttttttttttatatgtttattttttattttttaatttttgagtttgagtttttgttgggagtagatacgttggttattttttttttattttttagttttgttttttttatatagttttatttgtgaaaatcgagttttagaggttagtaaaggaggaagagtttaagattttaggggatttggattaggaatcggtaagggtatggggatgggaaggggatagttagaatttttgaggaaaatggattaaaaaaaaaaaggtttgaattttaaggaagattgtggagattattttgtttttttttttttttttttttagagtttgttttatgcggatttggattatttagtttttagtaggtttcgtcggttgtttatagcggattttgttgatgtttttattatttatgtagttgtagtttgaagggaagtttttattttaaattttttaagttaggggattttagttttttataattttttttttttttttggttttttatttggaagaggaaggtattatggtatagaaataagtgttagattgggagttgggagatttgggttttaggttgtttttgttattggttttatttttaaatttatttttattttttttataatttttatgttttttttattattagtgttttttttatatttaattaagttttagttttttttttttttttttttgagacggagtttcgttttgttgtttaggttggagtgtagtgatattattttttttatt

SEQ ID NO: 1259 - DNA, 2457 bp, Artificial Sequence
  chemically treated genomic DNA (Homo sapiens)
agtgagggagatggtgttattgtattttagtttgggtaatagagcgagatttcgttttaaaaaaaaaaaaaaaaggagttagggtttgattgggtatagagaggatattggtggtgagggagatatggaggttataggagagatgggagtaagtttagaagtaagattagtggtagagatagtttggaatttaggttttttaatttttagtttagtatttatttttatattatggtgttttttttttttaggtgaggaattaaggaggggagagggattatggggagttgggattttttagtttgggaggtttggagtaagggtttttttttaaattataattgtatagatggtggaggtattagtagggttcgttgtggatagtcggcggggtttgttgagggttagatggtttagattcgtatagagtaggttttggaggaggaaggggaggaagataagatggtttttatagttttttttggggtttaggtttttttttttttggtttattttttttagagattttggttattttttttttatttttatgtttttatcggtttttggtttaggttttttggaattttgggtttttttttttttattggtttttggggttcggtttttataagtggagttatgtgggggggatagagttgaaggatggagagaaggtgattaacgtgtttgtttttagtaagggtttagatttaggaattgaggggtggggagtgggtatgtaggagaaagaaaatggggtggaattagttttattaaatttagggagtggtcgaatcggttgcgggggtaggcgtttgtaagggatatatgagtttttgagaattattagttttgttttattggtttttttgggattcgttacgttaaggatagtttagtaatttgaaggtttagatcggaaataatttagattttattttatcgatagtttagtttaggttttaattttgttgtatttttagtttatttgttttggtggggttttatttattagttagcggtttcgtttttatttttgattttttttatttttcgttaagttaggattagagttttaggtttagtttttttttttgcgaaggttttggttttgttttttttatttttggttattttttatttaacgaggtcgggttttttttgtttatttgtgtagttattagattaggtttaaagtttttagttcgagtattaatttagcgtttagtagcgggattaggagttggggatatacggattttgggggaaaggcgtggcggggagggatgttgaggttaggggtttgacgagggatagttagtagtttcgtttaagaatttttagttaaggtttttttttttttttcgggtatgtgtcggagttaagtatttttgtgcgtataggtttgtatttattatgggtaggttcgggggttttgtaataggttttgttttttagtacgtgaagtattgtacggttttcgttttcgtggcggtttttgtagaaaaaagtgttcgagtttttcgcgtttaagaggagttttagtcgtcggatattagagtttagggagcgtaggcggtcgacgaaaggttggaggggaggtacggtgggggtttcgttcgaagaggtttataggatcggtcggcgttttttggataggtttttgtaggtcgggaagttgggtgtttagatttagcggatgggatgagagattttttcgtaggagagatttattcggtttttagggcggtcgtttagagaagttaggagaggtcggaggttgtggttagggtacgtttatagggtaagacgattttttatttcgtttttttttttttttttttgttttgtattttagttattttggatttttttatatataatttattttattaggcggtttttattttgttttagtttttttgcgtttattataatttttttagggatcgtttatttttagggtttttttgggttttcgagagtagtagcggtagtagttgtagaaatatagttatggttaggatgtggtgaggagaagttgcgagcgaattagcggcgtggggtcggttggggggggatcggagggaagttaggcgtggggagaacggaggggttggggggtttcgataagagagggggcggggttattagttgtttagatttttttgggaattttcgtaggtaaattcggagtttttaaatggtttttatttaaaatgtgtgttcgggttatttatataaatgttttggtttgtttaattttttaggtgcgtttgtaattttagttatttaggaggttgaggagggaggatcgtttgagtttaggaggtcgaggttgtagtgaattgtgattaggttattgtattttagtttgggcgatagagttagttagattttgttttaaaaataataataataaaaatttttgttttgtaggggattgtgataacg

SEQ ID NO: 1260 - DNA, 2898 bp, Artificial Sequence
  chemically treated genomic DNA (Homo sapiens)
tatttagtgtttttatttaagtaggagagtatagttttttaggtcggttattttatttgttagatgatgatgatgatattgttttttttttagggtttttgggagaattaagtgagattaattacgtttatttaaggttttttagtttttggtttttatgattggttttttttgtgtttgtgtagtttattttattgtttttttttggcggaatttaggaggtaggggataaataagattggttttttagggttagtttagtaggtttgaaagtaagtggtgggaggtttagggtttttcgattatatgtggattttaagtttagttttaggtatgtaggtttttatattttgggtagttgggtggggtacgaagggtttggttgggagataggatgtttggttttaggttagttttcgttttttatttgttgtgtgattttgggttgtgtttagtttttagttgttttttatgtgtaaggggagggttttttatggtttttgtttaaagcgtttgggttttatgttttttagtggattttttagggttgggtatagagtttagtttttagattaggattggtttttgttttgttttgttttttttttagatagggttttttttttgttgtttaggtttaagtgtagtggtatgatttcggtttattgtagttttgattttttaggtttaagtaattcgtttattttagtttttcgagtagttgggattttaagtgtgtgttattatggttagttaatttttgtatttttgttgtagagatgggattttattatgttggttggttttaaatttttgggtttaagtgatttatttattttggttttttaaatttttgggattataggtgtgagttattgagttaggttgttttgttttttaaggttagtgggagtggagaaggaataaagaaatttgtaattggttacgattaattagttgttaatattattgtattcggattagtttagattagggttttgatggaggaaggggatggtgtgggaaatgtttatttaggttatatattttggttttatttgttttttggatttcgagcggtattttgataggatagttcgaggtagtacggcgttttcgtagacgttgggtttgtcgttgggttttaattcgtttggtttgtagtttgtttagttttcgtgtagggtttattagtttttgaagttgtaggtggatggagtagcgattagaagttagagttatagcgtaattttggggggcgggagtttttagggttagaatagttattatatttgcgttggttagggtttgtacgtagttcgatatcgtcgatgttagggcgttcgtggttttattcgttatttttaggaaatttgttagggagggagaaaggtgaggtttagttttatggagataggaaattaagtagttattgtcggatattgggttttagagtaggttgaggggatagtgggatggggcggatatgggggtttgaggtttatagttaggtcggattcgggtgaggttgtagtcggttcgtagggagcgtacggttcgcgtgatgtttagcgttagtttaagggcggtttttgtttcggggtttttttaggagtattgtggggtggaggagggggtgagggggtttggagggtaggttagatttttttttttaggttatgttatatttttgagggtttcgggtagggggtaatatagaggttagggggagtttgcggtatttttcggggtagtttttggaatagttttttcgttacgaagggtatgaagggtgagagtagtcgtaggttaacgtttaggtaagtgtatagggtttggcgggtatatttagttgttatttggtttattttatttagtataggttttaggtatttttaggggacgagaggtatagggtttacggttggaggtttagttttgagttttcgttgtgtttgtgaggattgggaaggggatgggttggtttaggttttaaggttaattttggtaaaattgagtttagggttttgttgtttatttgtttttattattttttgtttcgttgtgtttttttttattaagtagatattatagagtttatagagttagaagttgtattgggtagtggtgacggtcgggaagtcgtaggtttggaagttttgattgttgagttttatagtttttgttaggcggttgcggatttagcggtttattaggtttttatggttttcgggtttggggagagagggtgtattagtcggcgggttaggggagggtgttagaattttatgggggtaggagttatgggtaaatttttatttagagtttgatgagtttaaagtaattatttatgtgttaggatttgggaagaagtgataggttttagtttttaatgcgttgggttttttttttaattgtttgtttttgtgtttatttgtttttttagttatatggaggttgtttcggataggggtatagtttgtgtgagtgttgttagttttgttgtttattaggtttttatttgggaggtgggtgagggtataaaattttttttaaggttacgaagggtaaatttggtggtattttagagtttgttgtagaagtggcggtaatttagtattcggtttatatttaggttgatgttacgatttgggtcgggggtgagatgtgagtttttattattttttttttagtttatgtttattagaggtttagggtggagaagagggatgggttttatagaaggaggaaggagtggttgggagggacgttttgggggttatattttgggatatgtaggtatataatttaaatcggagagtatcggtgttatatttaggaattttcgttgggaagttagttttttatagggaagaggtagggggaggagcgttttta

SEQ ID NO: 1261 - DNA, 2898 bp, Artificial Sequence
  chemically treated genomic DNA (Homo sapiens)
tgaggacgtttttttttttgttttttttttgtagaaagttgattttttagcggggatttttgaatgtggtatcgatgtttttcggtttggattatgtgtttatatgttttagggtatggtttttaaagcgttttttttagttatttttttttttttttgtgaggtttattttttttttttattttgagtttttggtgggtatgggttgggaagagggtgatgaggatttatattttattttcgatttaggtcgtgatattaatttggatgtgaatcggatattgggttatcgttatttttgtaataagttttggaatgttattaagtttgtttttcgtggttttgggaagggttttgtgtttttatttattttttaggtaagggtttggtgggtagtaaagttggtagtatttatataggttgtatttttgttcggagtagtttttatgtagttggggggatagatagatatagagatagatagttaaagggaaagtttagcgtattgggggttggggtttgttatttttttttagattttggtatataggtggttgttttggatttattagattttggatgaagatttgtttatgatttttgtttttatggggttttggtatttttttttggttcgtcggttgatatattttttttttttaagttcggaggttatgagagtttggtggatcgttggattcgtagtcgtttgatagaggttgtgaggtttagtaattaaggtttttaggtttacgatttttcggtcgttattattgtttagtatagtttttggttttatgagttttgtgatgtttatttggtgagaaggagtatagcggggtaggggatggtgggggtaggtgggtagtagagttttgggtttagttttgttagagttggttttgagatttaagttaatttattttttttttagtttttataggtatagcgagggtttaaggttagatttttagtcgtgagttttgtatttttcgttttttaggagtgtttgaaatttgtattgaatggggtggattaggtggtagttgagtgtgttcgttagattttgtatatttgtttggacgttggtttgcggttgtttttattttttatgtttttcgtgacggaggagttgttttagaggttgtttcggaggatgtcgtaagttttttttagtttttgtgttattttttattcggagtttttagaggtatggtatggtttggagaggggagtttgatttgttttttaggtttttttatttttttttttattttatagtgtttttggaaggatttcgaggtagaagtcgtttttgagttggcgttaagtattacgcgagtcgtgcgttttttgcgggtcgattataattttattcggattcggtttgattgtgagttttaggtttttatgttcgttttattttattgtttttttagtttattttgggatttagtgttcggtagtgattgtttggttttttgtttttatggagttaggttttatttttttttttttttggtaggttttttggaagtggcggatgaggttacgggcgttttggtatcggcggtgtcgggttacgtgtaggttttggttagcgtaggtgtggtggttgttttggttttgggggttttcgttttttagggttgcgttgtggttttggtttttgatcgttgttttatttatttgtagttttaggggttggtggattttgtacgggagttgggtaagttgtaagttaagcgagttgaggtttagcggtaggtttagcgtttgcgggaacgtcgtgttgtttcgggttattttgttaaggtgtcgttcgaagtttaggaggtagatgaagttaaggtgtgtggtttgggtgggtattttttatattattttttttttttattaaaattttggtttgggttggttcgagtgtagtggtgttgataattaattgatcgtaattagttatagatttttttgttttttttttatttttattagttttaaaaaataaaatagtttggtttagtggtttatatttgtaattttagaaatttgggaggttaaggtgggtggattatttgagtttaggggtttgagattagttaatatggtgaaattttatttttataataaaaatataaaaattagttggttatagtggtatatatttggggttttagttattcggggggttgaggtgggcggattgtttgagtttgggaggttaagattgtagtgagtcgagattatgttattgtatttgagtttgggtaatagagagaagattttgtttggaaaaaaaataaaataaaataaaaattaattttggtttggaagttggattttgtatttaattttggggaatttattggggagtatggagtttaggcgttttgagtagggattatagaaggttttttttttatatatggggagtagttgggggttgggtataatttagggttatataataggtgggagacggaggttgatttagaattaggtattttattttttagttagatttttcgtattttatttagttgtttaaaatgtggaaatttgtatgtttggggttgggtttggggtttatatgtagtcggggagttttgggttttttattatttatttttaagtttattgggttgattttggaaggttagttttgtttgttttttgttttttgggtttcgttagagagaagtagtggagtaaattgtatagatatagagaaaattagttatggaggttaagagttagagagttttgagtggacgtggttaattttatttggtttttttaagagttttgggaggggggtaatattattattattatttgataaatgaagtgatcggtttgggagattgtgtttttttgtttaggtggggatattgaatg

SEQ ID NO: 1262 - DNA, 3108 bp, Artificial Sequence
  chemically treated genomic DNA (Homo sapiens)
tagatatatatttgttagatattgtttatggtattttttaggaagaatagtatgtgggaaaggttgttaaaattgtttatgtaaaaattatattaatgttgtttttttcggtgttgtttatgtagttggtagttatttttttttttatattatggttttttttagattttttatgaaggataagatttttaaaaagaggattaataagtttatgaggtattaattagattgaaatgttaaaattaagtataattggcggaaatttagaggttttaatagtagggttcgtagaaggtttaagggttagattttgatgtttaatattgtttatgggagtaataataataataaaaaaaatatgttgtttagtggtttttagaagtttttggtttatagttttaaggagttgaaagtgttgttgatgtgtaataaattttattgtgttgagatcgtttataaaattttttttagaattgtaaagttattatggaaagagttatttagtcggttattagagttattaattttagtattagggtgtatagttaagaaaatgagtagaaagtttatgtttacgttttgtgtgtaaataaaattataaaaattgttaaaaaaaattatattaatgtttttaaatttaaaggattttatttttataggtttttggttgttgtggtgatttttattgtgtaaaatattttttatattttttgatattaagtttttttgtagttatgtttgaaaattaatttttaggttatagagttttttttatattaaagttgaagaaagttttaagaaatatatttttatattttttatatgtaaaataataggagtaagttgaggaatttttaagaaattggtcgagaagagagagcgtttagttatggaaaagagaaagaaggaagggagggttttttggaggaggtggtatttgaattaggattgatattaggatggaaatgttagttagggagttaagtagggggagtagtttcgttttttacgtttttagtttttttcgtttttgtttttttttttagtgattttacgtgaaacgttttcgttttttttagttattagtagaagggattgttttttttttagtgttcgtttttttttagtgattatttagtgtttttgagtttattttttttagtaaattttttttttgcgtggtgagaaaataggtttggagaggttttgcgattcgtttaggattatagaattcggtattaggaaaatttttattttaaaatttagttttgggtgggaagatttgggaagaatcgttaatattgagagagagagggagaaagaggattagatgagagtggcgttttcgtttatgttcgtttttttttcgtagagaattattttttttagggacggtaggaatgttacgcgtttaatgggatatagcgttttttggagagatatatttataatcgggaggagttcgcgcgtttcgatagcgacgtgggggagtttcgggcggtgacggagttggggcggtttgttgcggagtattggaatagttagaaggatattttggaggagaagcgggtagtgtcggataggatgtgtagatataattacgagttgggcgggtttatgattttgtagcgtcgaggtgagtgagggttttgggtcggcggttttagggtagtttcgcgggttcgtgtttagggcgtaggagtagtcgggttggtttaagggattttagtgtcgggcggaaaggggattttgggttggggatttatggggggagtttatttggagtttgttaggggagcgagcgcggggatttggattgggttgagtatggagtgaggaggacgagagtagagagattttcgggattttattaggtttggtagttgattgtatgtggggtgaaaaaaggaagttataggatagcgtataagggtatggtgtggagatggaggtggagatggtatagtaggttatatagagaagaaatttatagggaggtagttgggtttgaggtgtttgaggggtagatgggtggtttgatgggtaggtagatagaagggtttgtagtcggggaggagattgagatatatgagattatttagggagaggggatttagggggaagagtaaaggatcggattttgggaattggatagttgtgatttggttaagatagaaaagtttgtgaaagagattaaaaaaatttaagtgtagtgtgaggagaggttcgtagagaagagttttggaagttgaggggaggtgattttagtagtatagtggatagcggtgttagtgatttgggaaggttagaaaatagaagatggaaagtgggtttggaaattagggagatttggggagagtaggttggtcgtagcggtaggagttggaatgggagggggtgtatgaggttgagtgtggcgtatttttttcggggttgagatggattttatttgttttgggttttttacggttgttatagggtagtgttttagtttattcgttttttttttttaggaagtttgggtgtaaagggatggagagaggtgaggtgtgtgtagtaagaggattttttaaggatgggataggaaggttttggagttttggtttttttttgtgaatttgtggggtggggagtttggtgtattaatttgagggatttgagggagtagtattaggatgtgggattgagttttggattttttttttagaaagaggaaaaaaatgaagggaggaggaggaggaagttggggagattatatttttgatttttttgtttttggaaagtgaaaggaagtttatttgttatgagtgagaaggtggatatattgggtggggatgaggtgagtgatatgagtttaggaaagttgttgaggtaattggttgagagaggtgtttaaataaaaataacgtaattggtaaaaattgttattaagattttgtagaggtattaattagtgatatggtagtatttttttttatagtaattaattgttagattgtagatagttttgatgttagtttaaggagtgtgggttttttttttaggttcgtaggtttttaattttatttttttgaagatttttttggagattttttgtgatgtatagat

SEQ ID NO: 1263 - DNA, 3108 bp, Artificial Sequence
  chemically treated genomic DNA (Homo sapiens)
atttgtgtattatagaggatttttagaagagtttttagaggagtgaggttggggatttgcgggtttggaggagaaatttatattttttaggttggtattagggttgtttgtaatttggtagttgattattgtgaaagaaaatgttgttatgttattgattggtgtttttataaagttttagtaatagtttttgttaattgcgttatttttatttgaatattttttttaattaattattttagtaatttttttaagtttatgttatttattttatttttatttagtgtgtttatttttttatttatagtaggtgaatttttttttattttttaggaataagaaaattaaaggtgtgatttttttagtttttttttttttttttttttattttttttttttttttagaaaaaaggtttagggtttaattttatattttgatattatttttttaagttttttaggttggtgtattaggttttttattttataagtttataggaggaagttaaagttttaaggtttttttgttttatttttgagaaatttttttattgtatatattttatttttttttatttttttatatttagattttttgaaggaaaaagacgaatgaattgagatattgttttgtgatagtcgtggggaatttaagataagtaaaatttattttagtttcgaggaggatgcgttatatttagttttatgtatttttttttattttagtttttgtcgttgcggttaatttgttttttttaggtttttttggtttttaaatttattttttattttttgttttttgatttttttaagttattggtatcgttgtttattgtgttgttgaggttatttttttttagtttttaagatttttttttgcgggtttttttttatattgtatttgggtttttttggttttttttataggtttttttgttttggttaaattataattgtttagtttttaggattcggttttttgtttttttttttgggttttttttttttggatggttttatgtattttagtttttttttcggttgtagatttttttgtttatttgtttattagattatttatttgttttttaagtattttaaatttagttatttttttgtaggttttttttttgtgtggtttgttgtgttatttttatttttatttttatattatatttttgtgcgttgttttgtggttttttttttttattttatatgtagttagttgttaggtttgatgaagtttcgggggtttttttgttttcgttttttttattttatgtttagtttagtttaggttttcgcgttcgtttttttgataagttttagatgggttttttttatgaatttttaatttaaagtttttttttcgttcggtattaaggttttttaggttaattcggttgtttttgcgttttgggtacgggttcgcggggttgttttgggatcgtcggtttaaagtttttatttatttcggcgttgtagggttatgggttcgtttagttcgtagttgtgtttgtatattttgttcggtattgttcgttttttttttaggatgtttttttggttgttttagtatttcgtagtaggtcgttttagtttcgttatcgttcggaatttttttacgtcgttgtcgaagcgcgcgaatttttttcggttgtagatgtatttttttaggaagcgttgtgttttattaaacgcgtagtatttttgtcgtttttggaaaaggtaattttttgcggggagggggcggatatgagcggaggcgttatttttatttaatttttttttttttttttttttttaatattaacgattttttttaaatttttttatttagggttggattttaaaataggagtttttttagtatcgagttttgtggttttaagcgggtcgtagagtttttttaggtttgtttttttattacgtagagagagaatttattgaaaagaatgagtttaggggtattgagtgattattagggaggggcgagtattgaggggaaggtagttttttttgttggtggttggaggaggcggagacgttttacgtggggttattgggagaaaaaataggggcgggaggagttggggacgtggagggcggagttgttttttttatttaattttttgattgatatttttattttgatgttagttttggtttaaatgttattttttttaggaagttttttttttttttttttttttttttatagttaagcgtttttttttttcgattagttttttgagaattttttaatttgtttttgttgttttgtatgtaggagatgtagaaatatattttttaaaattttttttaattttggtataagaaagattttgtagtttgaaagttaatttttaaatatggttgtagaaagatttggtgttaaaagatgtggaaagtattttatataatgaaaattattataataattagggatttgtgggggtagagttttttgggtttagaggtattgatgtaattttttttggtagtttttatggttttatttatatataaaacgtggatatgaattttttatttatttttttagttgtgtattttggtattggggttggtgattttgatggtcggttgggtgattttttttatgatgattttgtagttttggaggaaattttgtgagcgattttagtatagtaagatttgttgtatattagtagtatttttagttttttgaggttgtggattagaaatttttggaagttattgggtagtatgttttttttgttgttgttgttgtttttataagtaatgttgggtattaagatttggtttttggattttttacgaattttattgttaagatttttgggttttcgttagttatgtttaattttgatattttagtttgattggtgttttatgaatttgttggttttttttttgaggattttattttttatgaggagtttgagggaggttatgatgtggaggaagagatggttgttagttgtataggtagtatcgaggaagatagtattgatgtaatttttatatgaataattttggtagttttttttatatgttgttttttttagggagtgttatgagtagtgtttggtaggtgtgtgttta

SEQ ID NO: 1264 - DNA, 2897 bp, Artificial Sequence
  chemically treated genomic DNA (Homo sapiens)
gattgtttgagtgtgggaggtagaggttgtagtgagtttcgatcgtattattgagttatagtttgggtgatagaggtaggttttattttaaagagaaaaatattattttttttagtggattttatagtgttaaggatttgtgtaagttttagagatttttggaaatgatgataatatagttggggaaaaatagagagaaatgggaggaagaggtaagtagatatggttaattaaggaaagttgagggtatgatgggtgaatttatgaaattgaggataagatcgtagtaagataatgagtttttaggatttgtttattgatttttagttttatgagatgtgaataatgtttatattgtttcggtaattttatatagtatatagtttgaatattattaaatttttgatatttgattatttttgatttataaaaatagaattttatataatttatattatattagttaaattttttttgttatgtttagttagagtatgtaggagatgtaggagaaataagtatagaaaggttaaaaagatttataataaatattaatttgggttagttttttagaggatgttttaagttttttaggtattaaagaatattttataagtgttttgtatttgtaaggtgattttaagtattaatgattttagttttagttttagggatttttttttataagaaagaaagagtattaagtataatttttgttagataatttatatatattatagggatataggttttataaatattggagtttagaaagaaaagaaaggagatattagggaggttattgggtttatttttatatatgaggaagaggggttaatattataggttttgtggaggatataatttaggatcgtttaggagagattttttgaatttttttgatttttataaaatttttagtaaaaatttttttttgtttgatataagttaatataataaagggaattgttgtatggggaatttattttagtatttttatttttaaattttttaaagattttgagtatatgtgatgtaaaggttttattggtggagatttgagaagaaatggtttgtataaaggttttttatataagttttatggagagggtaagtagttaagttttttttgtggaggaaataatttgcgattttttgataaagatgagtaatttttgaagaaaattttataattttttaagggatatggtttgggtataatgttaatataattttttatatttttttattttatagtagtttagtatttttaatgtgtttttacgtcgggtgtttttagcgaaagttagtcgggagtttagtattattagtgttattgttaacgttgttaagttggagtttttagggagttttagatatattatgttggagaagaggataggattaggggttagaggagtaggtaagttttatttagggagaattatgatttttttttatttatattttaaattatagggaggaagttattgatttttttgtttttggattgggtaatttcgtgtcggagaattaattagtatttgagtttaatagtattattagttgttgtttagagatgttgtatgaaggtttttttttgaaataattttattttttaaaggattgttttaatttagtatttgaaaggtttgaattagttgtatgtaaaatattttaattggggagttattgtgagttagttttgtgttggttagtgatgtgtttataagtttgagttttgtaagagtatttattttttatttgataagataattgtttgtagaagtgagtgtgtgagtgtgtttaagagtaaaggagacggagggaatatggttgtaaattcggagttttttaattttgtttttattgtattatattttaatgttatagatttgggaaaattattttatgttttatagttgaaatgaaggtattgcgattttttaggttttttaatattggaaaattttgtgattttttagatgttttaaggagcggtagttttaggtatttgataatatgatagaatgatagttattgattagagagtgtaatatgtatttatttttaggtagtgatgtttttaataagttaaaggaaattgaaagtttgttaataatttaatttgagtaaaaatattttttttaagcgtgttttttgatgttgtttttaggtttagcggtatttttagaatatatataggaatgggttaataggggttatttatgtgtaatggagggtttgaaggtgtttttgtacggtatttattttaataatgtgataaggttaagtgtgtaatttaggtattcgtgggtttgagagatcgattaaagatttttaaagttagtcgtttatagaataattttttttttttttttttttttttgagatagagttttgttttgttgttttggttggagtgtagtggtatgattttggtttattgtaattttcgttttttcggtttaaataatttttttgttatagtttttcgagtaattttgattataggtacgtgtttttacgtttggttaattttttgtatttttagtggagatggggttttatcgtgttagttaggatggtttcgattttttgatttcgtgttttatattagtagtgtaattttaaattgttggggttattggcgtgagttattatgtttggttataattttgttttaaaataatgaatattttatatgaagagtgtttagttttttatttttggtttttattatgatttttttatttgattgaggttatagtattttattattatgttttttttgttttattataagggaggatataagacgattttgttaattaatatatttttgaatgtttaggaaagagaatattagggaaaattatgaattatattagttgatg

SEQ ID NO: 1265 - DNA, 2897 bp, Artificial Sequence
  chemically treated genomic DNA (Homo sapiens)
tattaattgatgtaatttatagttttttttagtgtttttttttttgaatatttaaaaatgtattagttagtaaagtcgttttatatttttttttatgataaaataagagaaatataatagtaaagtgttatagttttaattaaatgaggaaattataatgggaattaggaatgagggattgaatattttttatataaaatatttattattttaaaatagaattgtgattaggtatgatggtttacgttagtaattttagtagtttggggttatattgttggtgtagaatacgaagttaggagatcgagattattttggttaatacggtgaaattttatttttattaaaaatataaaaaattagttaagcgtggaggtacgtgtttgtagttagagttattcgggaggttgtggtaggagaattgtttgaatcgaggaggcggaggttgtagtgagttaagattatgttattgtattttagttagggtaatagagtaaggttttgttttaaaaaagaagaagaaaaaaaagagttgttttgtgaacggttgattttgagagtttttgatcgattttttagatttacgaatatttggattgtatatttgattttattatattgttagggtaagtgtcgtataaaggtatttttagattttttattgtatataggtggtttttgttagtttatttttgtgtgtgttttggaggtgtcgttaaatttgggggtagtattaggagatacgtttgaaaaagatatttttatttagattaaattattaatagatttttaattttttttaatttattaaagatattattatttggaaataggtatatattatattttttagttaatagttgttattttgttatattattagatatttggggttgtcgttttttgaggtatttagagaattatagaattttttagtattgaaagatttgaaagatcgtagtgtttttattttaattgtgagatatgaagtaatttttttaaatttgtgatattaagatatggtataataaagataagattaaaggatttcggatttataattatgtttttttcgttttttttatttttaaatatatttatatatttatttttgtaaatagttgttttgttaagtgggaaatgaatgtttttataaggtttaaatttgtgaatatattattgattagtatagagttggtttataatagttttttaattaaagtgttttatatgtaattggtttaaattttttaagtattaaattaaaataattttttaaagaatgaaattattttagaagaggatttttatatagtatttttgagtagtaattgatgatgttgttgaatttagatgttgattggtttttcgatacgagattatttaatttaggagtaaggaaattagtaattttttttttataatttggaatgtgggtggaggggggttatagttttttttgagtgagatttgtttgtttttttggtttttggttttgtttttttttttagtatggtgtgtttgaagttttttggaggttttagtttggtagcgttgatagtgatattgatggtgttgagttttcgattggttttcgttggggatattcgacgtaagagtatattgagggtgttgagttattatggggtgggggaatatagggagttgtgttaatattgtgtttaggttatgttttttaagaaattgtgaggttttttttagagattgtttatttttattaagggatcgtaaattattttttttataaaaggaatttggttatttgttttttttatgagatttgtgtaaggggtttttgtataggttatttttttttaaatttttattaataaaatttttgtattatatgtatttagggtttttagaggatttggaaataaggatgttaaaataaattttttatatagtaattttttttattatgttgatttatgttagataaaaggaggtttttattgaaaattttgtgggagttaagggaatttaaagggttttttttagacgattttgggttatgttttttataggatttgtggtgttggttttttttttttatatgtgaggatggatttagtggtttttttagtatttttttttttttttttttgaattttaatgtttataaagtttgtatttttgtagtgtatgtaggttgtttgatagaagttatatttagtgtttttttttttttatggggaaaaatttttggaattgaagttgagattattagtatttggaattattttatagatatagagtatttatgaggtattttttggtgtttaaagaatttaaggtattttttgaaaaattggtttaggttagtgtttattatgaatttttttaatttttttatatttgttttttttatattttttatatgttttaattagatatgatagaagagatttaattaatgtagtataaattatatgaaattttatttttgtaagttaaaaataattaaatattagaaatttaataatgtttaaattatatattgtgtggggttatcgagataatgtggatattgtttatattttatagggttgaaagttaatgggtaagttttggaaatttattgttttattgcggttttgtttttagttttataggtttatttattatgtttttagttttttttaattagttatgtttgtttattttttttttttatttttttttatttttttttaattatgttgttattatttttagaaatttttaaagtttgtatagatttttagtattatgagatttattgaaagagataatatttttttttttgagatagggtttgtttttgttatttaggttgtagtttagtggtgcgatcgaggtttattgtaatttttgttttttatatttaagtaatt

SEQ ID NO: 1266 - DNA, 2884 bp, Artificial Sequence
  chemically treated genomic DNA (Homo sapiens)
ttatagttttttgttttttagtttggtggttagttattttgatttttcgaggttttgggtattttagaggtttttgaggtttagagggattttggaagataaaagagaggtatttataaaggggttttagagtgttattgtgggggtttttaggggtggaagaaatggaagtaataatattgttgtttgggtagggttacggggtataggaattgagaatgtggtagagttatatgaataatgagataagggaattttaaggattttgaggttttagagtttgagtggagatttttttaggggataaagatatggaagattttatttggttttttttggttttagggggattttttttttttgggtgattttgggagtaagggatagaaaatgtgattagtggtttttgttattttttttgtatttttttttatattttttttaatttaaattttttgtgatttagtgaagttaattgtttatggataagtattattagtgattttttagtgtaagggttattaaaggagttttgaggttatgtattggggtggaaggttaaggggaattggattcggaagtggggttttatttatcgggggttcgtttgagttaggtatgtcggggagttttggttttttttgaggattttgtaggaagataaagaggtttagggttattagaggggttatgtttggatatagataaaattttagtagatatttagggttttttttatatttttattttaaattttttgttttttaaattatttagttatttattttttttttatgagggtcgatggtattttggggttcgggaagattttatatatagggaaagagaagttataggggttttttagggttttttttatttagtttttcggatttaaagtatgagtaataagggtttgaaatttttaattttttgtatttttttagggttttatttattgtggaagtttaagggaagttatgaaaattggggaacggagtaggggtatcgtttatttgggttttaggggtgttttgttgtttaggaggttttggttttttttggggtttttagaaataggtgattaggtataggttagaaggagatggagatagaatatatttagagtatggagttgagttttagtagcgatagttaagaaggtaagagtaggaagtaggtaggggttaaaatggcggttaataggatgttggtagggatttcgggggataagaatgggggtgggattttttatttattatttattaagttttttttggggttttggggattatttatgtttcggacgttttgaaatataagatgggtgtgagtagtttgaaggtggttcggagggatttgtggtttttagaggttcggttattttcgagggtgtgacggttagatttttaatttattttaaatttaagtaaatatagttggtttaggtttgtagtgtgtgggattgtggatttgtgggtttgtgggttttggttttgttttttttgaagatttattttttatgtttagagtttttagggtattacgttatatggttttttttgtgtacggggagcgaatgttgaggtagggtagtgtggggttagagtagggggagtttatagggaatgggaagtatgtcgagagaggagagggagtaggaaggtagttagaaaggtggagagttggagaggttaaggggttattttagggttagaagttagggagttatttatagggggtttaggaatattaggtgggtttttggggttaaggagatttcgaggtttttgtatttacggtgaggggaggagacggtatgaatggataaaattgtgtttttttagtgtttatgttttttttttggtttttttagagtttttttttttagtattagtttttggatatttatcgattttttaggtagttttcgaggtttaattttttcgttatttttttggaggaggaggatacggtaaagttgttgtgttttttagattttttttgtatttagtttttatatttgttattatatttattttttttttatttttattagggggattaggaaggttttgggtattagtattattttgtaaaatgggggaatttataagaggggttttagagtttttaatataggtagatatcgaatttttgtatttagtttatttattatttttattgagtttttgttaagtttttagttttttttttttatttatttttatttttatagaagatttatttttaattataatatatatttattaatgtatttattttatggtttttttttttagggagttttgggagtttattaaaatttcggttattttaggaggaggaaggatagttagagtgaggatacgattttgtttaagtttatttttttttattgtattttgagttgggggggtgttgattttggggaagtttggagaattaggttatttttaagaaataattgagtttagcgtgggttgaaggttataggttttagggaggggtttaagtttgttatttttattttaggatttttaggtatttttcgggttttattagtatttgttcggttttgggagaataagggaagtgttagaataagtagggtcgtagttttttattttgtaggttttgtttttttataatatttatttatttttggggtatttatttttcgtttagttttgttaggagggtttgtgaggttttgaggttttttggggttttggtgagaggagagatggggtggggttaggaggtatagggaggggagtgagggagattgagttggtgaatagatatgggggtgtagtggaggaaagtggttatttgaggttttaagtttttagattttttttttaggttagggtttttaggt

SEQ ID NO: 1267 - DNA, 2884 bp, Artificial Sequence
  chemically treated genomic DNA (Homo sapiens)
atttgggagttttggtttgaaaggagagtttggagatttaggattttaggtgattatttttttttattgtatttttatatttgtttattagtttagttttttttatttttttttttatgttttttaattttattttatttttttttttattagggttttagaggattttagggttttataggtttttttggtaaggttgggcgaagggtgagtgttttaggggtggatgggtgttgtggggagatagggtttgtagggtaggggattgcggttttgtttgttttgatattttttttgtttttttagggtcgggtaggtgttgatggagttcgagggatgtttggagattttggagtgaaggtaataggtttgggtttttttttgaagtttgtagtttttagtttacgttgggtttagttgttttttggggatgatttagttttttaggtttttttaggattagtatttttttagtttagggtgtagtagggaggggtgggtttggatagggtcgtgtttttattttggttattttttttttttttagggtgatcgaggttttgatggatttttagggttttttggagagaagggttatagggtgagtatattagtgggtgtgtgttgtaattggggatagattttttatgggagtgaggataggtagggaagggaggttggaggtttggtaggagtttagtgaaagtaatggatgggttaagtgtagaggttcggtgtttgtttgtgttgggggttttgaagttttttttatgagtttttttattttgtagggtgatattggtgtttagggtttttttggtttttttggtgaggatggagagagggtaagtgtagtggtaaatgtaggggttgggtgtaggggaggtttagaaggtatagtagttttatcgtgttttttttttttagggagatgacggggagattgggtttcgagggttgtttggagagtcggtgagtgtttaagggttggtgttgggggagggggttttggggaagttaggagggggatatgagtattaaagggatatagttttatttatttatgtcgttttttttttttatcgtgaatgtagggatttcgaggtttttttggttttaaaggtttatttggtatttttggattttttgtaagtgattttttgatttttgattttgaggtgattttttgatttttttaattttttatttttttagttgtttttttgtttttttttttttttcggtatgttttttattttttgtgagttttttttgttttggttttatattgttttgttttagtattcgtttttcgtgtatagggagggttatgtggcgtggtgttttgagggttttgggtataggaaataaatttttaagaaaaataaaattaaagtttataagtttatagatttatagttttatatattgtaggtttgggttagttgtgtttgtttgggtttgggatggattggaggtttgatcgttatattttcgggaatggtcgggtttttgaaaattataggttttttcgggttatttttaggttgtttatatttattttgtgttttagggcgttcgaggtatggatggtttttagggttttaaagggagtttggtgagtgatggataggagattttatttttatttttatttttcgaggtttttgttagtattttgttggtcgttattttgatttttgtttgttttttgtttttgtttttttggttatcgttgttgggatttagttttatgttttaaatgtgttttatttttatttttttttgatttgtgtttggttatttgtttttagggattttagggagagttaggattttttggataatagggtatttttgggatttaggtgagcggtgtttttatttcgttttttaatttttatgattttttttgggtttttataatgggtgagattttggaaggatataggaaattaagggttttaggtttttgttgtttatgttttgaattcgggaggttggatagaagagattttgggaggtttttgtgatttttttttttttgtatgtagggttttttcgggttttagggtgttatcggtttttatggagagaaggtaagtgattaagtgatttggaggatagggggtttagagtggggatgtagggagaattttaaatgtttgttgggattttgtttgtgtttagatatgatttttttagtgattttgagtttttttgtttttttgtagggtttttaagggaagttagggtttttcggtatgtttggtttagacggattttcggtgagtgggattttattttcgaatttagttttttttggttttttattttagtgtatgattttagagtttttttagtgatttttgtattgaaaggttattggtggtgtttgtttatggatagttggttttattaggttataggaaatttgggttggaagaagtgtagggaggggtgtagagagggtgataggggttattggttatattttttattttttatttttagggttatttagggaaggaaggtttttttggaattaaaggaaattaggtgagattttttatgtttttattttttgagggagtttttatttagattttagagttttaaagtttttgggatttttttgttttattatttatatggttttgttatatttttaatttttgtgtttcgtaattttatttagatagtaatgttgttatttttattttttttatttttggaggtttttatagtgatattttgaggtttttttataaatgttttttttttattttttagggtttttttggattttagggatttttaggatatttaggatttcgaggggttaaggtaattgattattaggttgggagataaagggttgtgg

SEQ ID NO: 1268 - DNA, 2476 bp, Artificial Sequence
  chemically treated genomic DNA (Homo sapiens)
tggagagtagaggaggttgggggtggggagtagatgggggtggggaaggaggggagatgggggtggggaaggggggcgggaggagggttaggaatgggggaaggaagatagggtgggggaggggtgggtatgggggaaggaagatagggtgggggaggggtgggtatggggaaagggagatagggtgggggaggggtgggtatgggggaagggagatagggtgggggaggggtgggtatgcgggaagggagatagggtggggaatcgagaagaaagatagtggggggggatggaggaaggaatatagggtggggtggggggtcgggatgggggaagggaaataaagagtggtggaggcgtggggattaggaacggagatagagggtgggggaggggtggggtgggggaagggagatagggtgggggaggggtgaggatggcggaaggtagataaggcgggggaggggtggggatgggggaagggagatagaagggggggaggggtggggatgggggaagggagatagaaggcgggttagggcgggaatgggggaagggaaatagggtgggggtggggatgagagaagatagaggttgggggaggggtggggatgtgtaagaaaaataaagggttggggagggggagggaaaagaggtagagagtgggggagggggtggggatgtggaaagaaagttagaaggtggggggtgaggggtggggatgggtgaatacgtgatggttgcggttttttttattagatagtagggtgggggtagggtggaaaaagggggtgcggtgggcgaatggggaggcggggggttgattgggagtgtgggacggggtgttttgggattacggagacgtttaagtttggattttgttttgggtttgtgtttttggcgattttttttttttttagtgggatgcggggtgtaggggtcggttttaggttttttgagtttaagtttcgttttatttcgtttcgtaagtttagaaaagatgtttttgtttttggttgggtaatttttggatttatttattgtttgtaatttttcgggttgaagagattatttttcgggagttaattaatttattttttggagcgcgcgtttttttttgtttttaggagtcggttttttaaaattttttgaggttcgcgtatgtttttttcgatttttcgtgtttttattttttatagaaatttacgtatttacgttttttttttttttcgagtttgtagaggatttcgttttgttttttttatatttagggttgttttttttgtcgttaatataaatttgttgataggttacgtttgggaagcgggtggggtgtttcggagcggtgttgaggcgttgtaggttcggtttttggttgcgggggagttgtattttgaagtttcgtcggaattcgcgtttggggttagtagggggtattagagttaatagggattgtatgtaaaatttatttttttttaggttttttagggggatggttaggtttttgtagagatggggaggatttttttttggtaaggggagagggacgggttaggagttaagcggaaggatttcgtgtttaaggttttttaagggacgggataggcgaggaatttttttgagttttttgaattgttttattagttaggtttgggaagtatttcgtttttataaattttgtttttttgaaaggggtcgggggggggattttaatattttttgttataggttatgatgggtatggtggttaagagtaataggtcgcgtggtgaggttggttttttgtggttttgttttgttatttttcgaggtatttttatgttagtgaatagagttgcgggtttttagttgtatagatgaatgtacgaataaaatataggtttatataaaggaagttattgtattgatttagattcgatttgggattgtcgtataaaatagggttgataaaaatcgtcgtgtttttattttggaaatagagatttagtttttttttttttgtttgaggtatttagtaaaggtttgtttttgagtggttgtggatgtttaaggatttacgatttttgattttataaagtttagggtgaaaataaaaaataaaataaggagattattgttttaaagtggtcgttgtagttaattattttaagaaagtaaataggttggtattgaaagttatataggcgggcggttttttgggagggttgtttagttttttttttttgagatttgagtagggagtagttagaggagtttgaagggatggtgtttagggtatgggaataggttgtatatatttttacggagtacggtgtttgtttagtttgagaagggaaagaaacgggagtagagggttgatgagaaggtagtagatggatagtgcgggattgaaaaggggatttatttgaagattggttattattatttatttttattatttgattgttgttgttttattgagatcgatgcgtggaga

SEQ ID NO: 1269 - DNA, 2476 bp, Artificial Sequence
  chemically treated genomic DNA (Homo sapiens)
tttttacgtatcgattttaatggagtaatagtaattagatgatgaaaataaataatggtggttagtttttaaatggattttttttttaatttcgtattatttatttgttgtttttttattagttttttgttttcgtttttttttttttttaaattggataagtatcgtatttcgtgaagatgtgtgtagtttgtttttatgttttgaatattatttttttaagtttttttggttgttttttgtttaggttttagaaaaggagagttgggtaatttttttagggagtcgttcgtttgtgtaatttttagtattagtttgtttgtttttttgagataattagttataacggttattttaaaataatggtttttttattttgttttttgtttttattttaaattttataaagttagaaatcgtaagtttttgagtatttatagttatttaaggataaatttttgttgaatgttttaagtaaagagggggaggttgagtttttgtttttagggtgaaaatacgacggtttttattagttttgttttatgcgataattttaggtcgaatttggattaatgtaatgattttttttgtatggatttatgttttgttcgtgtatttatttgtgtagttgggaattcgtagttttgtttattggtatggggatgtttcggggaatggtagggtagagttataaaaagttagttttattacgcggtttgttgtttttagttattatgtttattatagtttgtggtaggagatgttggggtttttttttcgattttttttaggaaaatagagtttgtggaggcggagtattttttaggtttgattgataaaataatttaaaagatttaaagagatttttcgtttgtttcgttttttgaagggttttgaatacggggttttttcgtttggtttttagttcgtttttttttttttattaggaaaggattttttttatttttgtagaagtttgattatttttttagagggtttgggaggaagtgggttttgtatatagtttttgttgattttagtgttttttgttggttttagacgcgagtttcggcgaggttttagggtatagttttttcgtagttagaagtcgggtttgtagcgttttagtatcgtttcgggatattttattcgttttttaggcgtgatttgttaataggtttgtattggcgataaaaggagtagttttgaatgtagggaaagtagggcggagttttttgtaggttcgggggaggggaggggcgtgaatgcgtggatttttgtggagagtggaaatacggggagtcgaggggagtatgcgcgggttttagaaagttttgggaaatcgatttttgggagtagggaggaacgcgcgttttagagagtaagttaattgattttcggggggtggtttttttagttcggggggttatagatagtaggtaaatttagagattatttagttaagggtaggggtattttttttagatttgcggggcggggtggggcgagatttgagtttaggggatttggaatcggtttttgtatttcgtattttattgaagaaaagggaggtcgttagaagtatagatttaggatagagtttagatttggacgttttcgtgattttagaatatttcgttttatatttttagttagtttttcgtttttttattcgtttatcgtattttttttttttattttgtttttattttattgtttggtgggaaaggtcgtagttattacgtatttatttatttttattttttattttttattttttgattttttttttatatttttatttttttttttattttttgttttttttttttttttttttttaattttttgttttttttatatatttttattttttttttaatttttgtttttttttatttttatttttattttgtttttttttttttattttcgttttggttcgttttttgtttttttttttttatttttattttttttttttttttgtttttttttttttatttttatttttttttcgttttgtttatttttcgttatttttattttttttttattttgtttttttttttttattttattttttttttattttttgttttcgtttttaatttttacgtttttattattttttgtttttttttttttatttcgattttttattttattttgtgtttttttttttatttttttttattgttttttttttcggttttttattttgttttttttttcgtatgtttattttttttttattttgtttttttttttttatgtttattttttttttattttgtttttttttttttatgtttattttttttttattttgtttttttttttttatgtttattttttttttattttgtttttttttttttatttttaatttttttttcgttttttttttttatttttattttttttttttttttatttttatttgttttttatttttagttttttttgtttttta

SEQ ID NO: 1270 - DNA, 2391 bp, Artificial Sequence
  chemically treated genomic DNA (Homo sapiens)
ggacgattttgtttagtgtttttagtttgtttttttaggttatggttttaagtgaaatgatagagtttatagttttggttttggttgaggtttaggttatagtaagggtatgtttttggggttttcgatttgaattttgatttttcgggtagggaagaggaggttgttttttttggttgttttggttttggagttttttgtaaaaatattttgggttttttgttattggttgtagaaatggttcgacggggtgtgtggggatagatatttagaaggaatgtatttttgtggttttggtgttcgatggggttgggggagagtgttttttattgatttagtagtatatttatgtgtagtgcgtttgtatttgtgtgggggtagttatattttttggttgttgtttttttgggttgtttttttgggggtatgtgattggatttacgaggtttgtattgagttttatttgaatgatattttttttattttattttttttacggaagtatcgttttagggttatttagttttttgttttatggttgaaattgtttatttcgtttgtagatgtttattattttgtttatttaatgtattattatgtattgattttttatgagatagagagagagagagattattagatagtttatatttaaagggtaggtttttgtatatttttttagttttttttattaaggggaaggggagagtttaaaaatttaaatcgttgtggttttaaggtgttttatttttaaaagggagagagaatttatttaaagttattttagattagggattgttatttttttttgtttaatgtattttttgttttttaaaaaaattttttttagaggaaattaatattagtttttgtgtttattaatttttttggttatttgtatttatttatttatttatttattagatatttgttgttatttgaaagaattggtttagtgggtttgaaagttcgtttgagaataggaaatttgagatttggttttttgtgggtaggagaataaggattatttgggttttttagttttgaacgagaattttatttttattagaatgttttttttaattttagcgtatgatgaggaaatttatttatttttagttaggatttgataaattttaatattaaatgattaaaatatttgttattgaggttttattggtgagattcgtttttcgttttcgggtgtagttttttgggggttgtttttcggattgcgtttcgtatatttgttatcgagggtgtgagaagcgtttaagttggtgatatgtgatttgggacgtttttatttttcgggttaggagtagtagttgttaaggatagtagtttgtattgcgtggttttagggaagtagggtttggtttttaatatgaattgtaaaaagtagttttttattgatatttttttgttgttgtttttggggggtttttttgttttgtttttaatgtttttgagtgtatattttttttttcgtttgaaatcgaatttttaaagtggttttttttagttttggttggaaaattattttttaatagttttaagtaataaatagatgagtagagaatgtggttttaattgggtttattaaagtaagtgtgtttagtttttatttgaataagtgatagttgtagatggcgaaagaaatttatttaatttttgtagtttataggtggtagaaataaaaatgtaattttaaaattttaaatattaaatattaattattgttttttttttttttgagatggaattttgtttttgttatttaggttggagtgtaatggcgcgattttattttattgtaatttttgtttttcgggtttaagtgatttttttgttttagttttttaagtagttgggattataggtatgcgttattatatttagttaattttgtatttttggtagagatagggtatttttatgttggttaggttggttttggattttcgattttaggtgattcgtttatttcggttttttaaagtgttgggattataggcgtgagttattatgtttgtttagtaatattaattattgttttttaaattcgtgttggttttttagatagggagattattggaataaaataatcgatggttttattttgttatacgtaaattaaaagaaatgttttttttgaagttgtaagattttattaatgatagatatttttttcggtggattttgagtggtgtgtagtggttttatagttatggaaattaggagtattttattttttattgagaatttttgtttttaatttttttaagttggggtgtggtagttgggtagggttaagtgatttagttttggttgtaggatagttatatatagtgaagagttttagaattagttaaaaatggaagtttgggt

SEQ ID NO: 1271 - DNA, 2391 bp, Artificial Sequence
  chemically treated genomic DNA (Homo sapiens)
atttaaatttttatttttagttggttttagaattttttattgtatatggttgttttatagttagggttgggttatttgattttgtttaattgttatattttaatttagagggattgggggtaggggtttttagtggaaagtgagatatttttagtttttatggttataaaattattatatattatttagagtttatcgaaaagggtgtttgttattggtggagttttataattttaaagaggatattttttttgatttacgtgtgataaaataagattatcggttattttattttagtgatttttttgtttgagaagttaatacgaatttaaaagataatggttggtattgttgggtaggtatggtggtttacgtttgtaattttagtattttgggaggtcgaggtgggcggattatttgaggtcgggaatttaagattagtttgattaatatggagatattttgtttttattaaaaatataaaattagttgggtgtggtggcgtatgtttgtaattttagttatttgggaggttgaggtaggagaattatttggattcgggaggtagaggttgtagtgaggtgagatcgcgttattgtattttagtttgggtgataagagtaaaattttattttaaaaaaaaaaaaggtaatggttggtatttggtatttaaggttttaaaattgtatttttgtttttattatttgtaagttataaaaattaaatgggtttttttcgttatttgtagttattatttgtttaagtgaaaattagatatatttattttaataagtttagttgaagttatattttttatttatttatttattgtttaaggttattgagaggtggttttttagttagggttaaagaaagttattttgggagttcggttttagacgaggaagaaaatatgtatttaaaggtattaaaaataaaataaaaaaattttttagaaataataataaaaaaatattagtgagaagttgttttttgtagtttatattaaaagttagattttgtttttttaaaattacgtaatgtaagttgttgtttttagtagttgttatttttggttcgagaaatgaaggcgttttagattatatgttattagtttaggcgttttttatattttcgataataggtgtgcggggcgtagttcgaggagtagtttttaagggattgtattcgaggacggagaacggattttattagtgaagttttagtggtaaatgttttgattatttgatgttggaatttgttaaattttagttagagataagtaaatttttttattatacgttgaggttaagaaaaatattttgataagagtgagattttcgtttaagattggagaatttaggtggtttttgtttttttatttatagggggttaggttttaagttttttatttttaagcgagtttttagatttattgggttagtttttttagatggtaataaatatttgatgaatgaatgaataaataaatataagtgattagaagagttagtgaatataaagattaatattagttttttttaaaaaaaatttttttaaagaataaggaatatattggataaaaaaggatgataatttttgatttgaaatagttttaaatagatttttttttttttttaaaaatgaaatattttaaaattataacggtttgggtttttaaattttttttttttttttaataaaaaaggttggaaaaatatataaaaatttattttttgggtgtaaattatttgatagtttttttttttttttgttttatggagaattaatatataatagtgtattaggtagataggatagtagatatttgtagacgagatgagtaattttagttatgaggtagaggattgaataattttgaagcggtgttttcgtgggggaaatgggataggaaaggtattatttaaatggagtttagtgtagatttcgtaggtttagttatatgtttttagaaaggtagtttaaggaagtagtagttaaggggtgtggttgtttttatatagatgtaggcgtattgtatatgggtgtgttgttgggttagtggagagtatttttttttagttttatcggatattaaggttataaaagtatattttttttgggtgtttgtttttatatatttcgtcgagttatttttgtagttagtggtagggggtttaaaatatttttgtaaaggattttaaagttaggataattaaaggggataatttttttttttttgttcggagggttagagtttaggtcgagggttttaagaatatgtttttattatgatttggattttagttaagattagggttgtgaattttgttattttatttgggattatgatttgaggggatagattgaggatattgggtagaatcgttt

SEQ ID NO: 1272 - DNA, 2483 bp, Artificial Sequence
  chemically treated genomic DNA (Homo sapiens)
aaaagagaaattttgatagttttttaattatgtgggatacggtattattttattagaaaattgtatgttgaaaatattgtattgttgtgtatagatagagtggtatggatttaattttgtatgtataaattaaatttgtaatgtttaagtagtggattagaattttaatatgtttttattttatttggttttgttaggtaagtaagggattttgtgtgttggaaaaagaattattttggtgtagtcgtttaagaggagtttggggaggacgttggttcgcgaggttcgtcgtagataaggtggcggcgatgttcgggagttaggttagtgtcgcggcggtagcgtcggggtttttcgcgcggtagggcggtttgggtttcggtttttcgtcggttttttggaagcgggttcgcggttagcgcgggagtagtagtagagatggaggttttagcgtttttttttttttttcgttcgtttgagttaggggaggttaggcggttcgggtgtttggagtcgggggtttgttgttcgagaatgagaattttttttttttagaacgtggagattgttcgattattaggagtataaagttattattgttgggttggataatgtagggaaaattattattttttattagttttttatgaatgaggttgtatatatattttttataataggaagtaatgtagaagagatagtgattaataatacgcgttttttaatgtgggatattggtggttaagaattttttcgttttttttggaatatttattatattaatatagagttgataatagttgtggatagtatagatatatgatttttgtaattagagaagaattttataaaacgttagcgtatgaggatttaaggaaagttggattgttgagttttgttaataaacgagacgttaaagaatgtttgattgtagcggaaattttttagtttttgaagttattttttattaaagataatagttagtggtatatttaggtatgttgtgttttaattggtaagggattgtgttaaagatttgaatggacgatgttacgattttagattatatgattttttttaattttatagattttgtataaatgaagtgttggattttatttgaaagttgtaaaaattaatggtttagatatatttataataaattgatttaaattttttttataagaagaaaaattaagattatttatttgaaaagaaagatggagagggaggaggaagaagagaaaacggtcgggcggcggcggttgtaggttgtgtagcggtagcggttttttttcgcggcggacgatggatagttaggataggaaggtggtggtgtataataatagtatcgggtttgtgaagtgtggttatatgtaggttttaattttttagaagatatttttttagttttggttggaagatttattattagattaattattaaagtgggaaatattgaataaggattttatggttggtgatgaggtaggtgaattacgattaatgttggaagttaattattttatggaaaatggtatagtaagaaattaggatgacgtgaaaaatttgtgggattatacgtttggattagagaaatttaatatagatattagaaattgtaaaattttatttatagaattttttatgaatttaattaaaaatatagagaagattgtagaggtaatgtttgaaatttagtagtttttcggtgtatatgtagttatttagacggttttgattttgtacgtttaaggtttattgattggtgtagcggtagattttggagatagtgtgagttatatttgtttagtatatgaaggttttttttttttttattttattaggagattggatattgttgagagggatgtaattagatattaggttgtttttattgcgaggatatgtttttaattattttgttgattttgaaacggtttgtatgattaaagaaaaattgttacgtgggatataatattgagtaagagtagaaattggttttagaaattaaagtattagttgaattttatatatttttagatggatatattattaaagttggaggggagagatttgaagtattagaaattttattttagttttatttgattagtgttgaaggagttggtgttgttgaattgtttttgaatataatttaggtagttgatattgatatttgatttgaattttataaatatattgtgttttttggagggtttattatgtattttggtttgttattaaggttggaacgagaatttaaatagttttatttagaacgagttttaaagggtgatgtggaaaaattttttaaatttaagattcgtatcgaagatttattttttagaaagtatatgggtggtgtagttttagtagatattatgaaagataaagataatttttggatgattcgataagagtattaagaaaggggtgttcgtgtgttagagaaatttggtgtgattgttcgataaatttta

SEQ ID NO: 1273 - DNA, 2483 bp, Artificial Sequence
  chemically treated genomic DNA (Homo sapiens)
tggagtttatcgaatagttatattaagtttttttagtatacggatattttttttttggtatttttgtcgggttatttaaaagttgtttttgttttttatggtatttgttagaattgtattatttatgtgttttttgaggggtaggttttcgatgcggattttaaatttaaaaagtttttttatattattttttaaaattcgttttaagtaaagttgtttaagttttcgttttaattttgatgataggttaggatatatagtagattttttagaaagtataatgtgtttgtaggatttagattaggtattaatgttagttgtttgaattgtgtttaaaagtaatttagtaatattaatttttttaatattgattaagtgaggttgaaataaaatttttggtgttttaaattttttttttttaattttgatgatatgtttatttgggaatgtataagatttaattaatattttggtttttaaggttagtttttgtttttgtttaatattatattttacgtaatagtttttttttaattatgtaaatcgttttaaaattagtagggtggttgaaggtatattttcgtaatagaagtaatttggtatttagttatattttttttagtaatatttagttttttggtaagatgagggagagaaaagtttttatatattgggtaaatatgatttatattatttttagagtttatcgttatattagttaataaattttgagcgtataaagttagaatcgtttggatggttatatatatatcggaaaattgttaagttttaaatattatttttatagttttttttgtgtttttggttgggtttataggaggttttgtgagtaagattttataatttttggtatttatattaagtttttttggtttaaacgtgtagttttataggttttttacgttattttaattttttattatgttattttttatagggtaattaatttttaatattgatcgtaatttatttgttttattattaattataagatttttgtttaatgttttttattttggtggttgatttgataataggttttttaattaaagttgggaagatgttttttggaaagttagagtttgtatataattatattttataagttcggtgttgttgttgtatattattatttttttgttttggttgtttatcgttcgtcgcgggggagagtcgttatcgttgtataatttatagtcgtcgtcgttcggtcgttttttttttttttttttttttttttatttttttttttaaataagtggttttaatttttttttttatagaaaaagtttaaattagtttattataaatatatttaaattattaatttttgtagtttttaggtaaagtttagtattttatttatataaagtttatgaggttagaagagattatgtaatttaaagtcgtgatatcgtttatttaagtttttggtataattttttgttagttagagtatagtatgtttggatatgttattaattgttatttttaatagaaggtagttttaaaaattgggagattttcgttatagttaggtattttttaacgtttcgtttattaataaaatttagtaatttagttttttttaggtttttatgcgttaacgttttatagagtttttttttagttatagaaattatgtgtttgtattgtttataattattattaattttgtgttagtatagtaagtgttttaggaagaacgaaaagatttttggttattaatattttatattaggaaacgcgtattattaattattattttttttatattattttttattataggagatgtatgtataattttatttatagaaaattggtaaagaatggtagttttttttgtattatttagtttaataatgataattttgtgtttttggtgatcgaatagtttttacgttttgggggaagaaaatttttattttcggatagtagattttcggttttagatattcgggtcgtttggttttttttggtttaggcggacggggaagagagagaggcgttggagtttttatttttgttgttgttttcgcgttagtcgcgggttcgtttttagggaatcggcgggaggtcgaagtttaggtcgttttgtcgcgcgaaaggtttcgacgttgtcgtcgcggtattggtttggttttcggatatcgtcgttattttgtttgcgacgagtttcgcgggttagcgttttttttaagttttttttgggcggttgtattaaagtaattttttttttaatatataagattttttgtttatttaataggattaaatgaagtgaaagtatgttaaaattttaatttattgtttaaatattataaatttaatttatgtatataaaattgaatttatgttattttatttatatataataatgtaatatttttaatatatagttttttgataaaataatgtcgtgttttatataattaaaaaattattaagatttttttttt

SEQ ID NO: 1274 - DNA, 2431 bp, Artificial Sequence
  chemically treated genomic DNA (Homo sapiens)
tttttattttttttttcgagtttttaaagtttattatattatttttaaatgtatttgtatttttatagtttagtttttatttataagtgagaatatatgatatttggttttttatttttgagttatttagaataatggtttttggttgtttttaggttgttgtaaaggttattattttattttattttatggttgagtagtatattattgtgtatatatattatattttttttatttattcgttggttgatgggtatttagttgatgggtatggttgatgggttttttatttttgtaattgcgaattgtgttattatgaaaatatgtatatgtatttgttttttatgtaatgatttttttttttttgggtagatatttagtagtgtgattgttggatcgaatggtagttttattttgagttttttgagaaatttaggagttattttaatatagataattgaattgtagttaattttttatttagttttttatattggttatttattattatcgatttgaggttattttttatttatattattcgattattttatttagttatatttttaatagtatatgttgtttttaaagtatattatgtgaatagtttaaaatttttaaagtataattttttgttgaagtatttgtaagttttatataagtttttatatgatttgttttgatttttaaattattattttttttattttatttatatttatttttttttttgtgagatgtaattttatataaattttatagataggaagatgttgggaaattattatatggtttgttatgttgtgttattttaataggttaaattatttgatgaaaagagaaattttgatagttttttaattatgtgggatacggtattattttattagaaaattgtatgttgaaaatattgtattgttgtgtatagatagagtggtatggatttaattttgtatgtataaattaaatttgtaatgtttaagtagtggattagaattttaatatgtttttattttatttggttttgttaggtaagtaagggattttgtgtgttggaaaaagaattattttggtgtagtcgtttaagaggagtttggggaggacgttggttcgcgaggttcgtcgtagataaggtggcggcgatgttcgggagttaggttagtgtcgcggcggtagcgtcggggtttttcgcgcggtagggcggtttgggtttcggtttttcgtcggttttttggaagcgggttcgcggttagcgcgggagtagtagtagagatggaggttttagcgtttttttttttttttcgttcgtttgagttaggggaggttaggcggttcgggtgtttggagtcgggggtttgttgttcgagaatgagaattttttttttttagaacgtggagattgttcgattattaggagtataaagttattattgttgggttggataatgtagggaaaattattattttttattagttttttatgaatgaggttgtatatatattttttataataggaagtaatgtagaagagatagtgattaataatacgcgttttttaatgtgggatattggtggttaagaattttttcgttttttttggaatatttattatattaatatagagttgataatagttgtggatagtatagatatatgatttttgtaattagagaagaattttataaaacgttagcgtatgaggatttaaggaaagttggattgttgagttttgttaataaacgagacgttaaagaatgtttgattgtagcggaaattttttagtttttgaagttattttttattaaagataatagttagtggtatatttaggtatgttgtgttttaattggtaagggattgtgttaaagatttgaatggacgatgttacgattttagattatatgattttttttaattttatagattttgtataaatgaagtgttggattttatttgaaagttgtaaaaattaatggtttagatatatttataataaattgatttaaattttttttataagaagaaaaattaagattatttatttgaaaagaaagatggagagggaggaggaagaagagaaaacggtcgggcggcggcggttgtaggttgtgtagcggtagcggttttttttcgcggcggacgatggatagttaggataggaaggtggtggtgtataataatagtatcgggtttgtgaagtgtggttatatgtaggttttaattttttagaagatatttttttagttttggttggaagatttattattagattaattattaaagtgggaaatattgaataaggattttatggttggtgatgaggtaggtgaattacgattaatgttggaagttaattattttatggaaaatggtatagtaagaaattaggatgacgtgaaaaatttgtgggattatacgtttggattagaga

SEQ ID NO: 1275 - DNA, 2431 bp, Artificial Sequence
  chemically treated genomic DNA (Homo sapiens)
tttttggtttaaacgtgtagttttataggttttttacgttattttaattttttattatgttattttttatagggtaattaatttttaatattgatcgtaatttatttgttttattattaattataagatttttgtttaatgttttttattttggtggttgatttgataataggttttttaattaaagttgggaagatgttttttggaaagttagagtttgtatataattatattttataagttcggtgttgttgttgtatattattatttttttgttttggttgtttatcgttcgtcgcgggggagagtcgttatcgttgtataatttatagtcgtcgtcgttcggtcgttttttttttttttttttttttttttatttttttttttaaataagtggttttaatttttttttttatagaaaaagtttaaattagtttattataaatatatttaaattattaatttttgtagtttttaggtaaagtttagtattttatttatataaagtttatgaggttagaagagattatgtaatttaaagtcgtgatatcgtttatttaagtttttggtataattttttgttagttagagtatagtatgtttggatatgttattaattgttatttttaatagaaggtagttttaaaaattgggagattttcgttatagttaggtattttttaacgtttcgtttattaataaaatttagtaatttagttttttttaggtttttatgcgttaacgttttatagagtttttttttagttatagaaattatgtgtttgtattgtttataattattattaattttgtgttagtatagtaagtgttttaggaagaacgaaaagatttttggttattaatattttatattaggaaacgcgtattattaattattattttttttatattattttttattataggagatgtatgtataattttatttatagaaaattggtaaagaatggtagttttttttgtattatttagtttaataatgataattttgtgtttttggtgatcgaatagtttttacgttttgggggaagaaaatttttattttcggatagtagattttcggttttagatattcgggtcgtttggttttttttggtttaggcggacggggaagagagagaggcgttggagtttttatttttgttgttgttttcgcgttagtcgcgggttcgtttttagggaatcggcgggaggtcgaagtttaggtcgttttgtcgcgcgaaaggtttcgacgttgtcgtcgcggtattggtttggttttcggatatcgtcgttattttgtttgcgacgagtttcgcgggttagcgttttttttaagttttttttgggcggttgtattaaagtaattttttttttaatatataagattttttgtttatttaataggattaaatgaagtgaaagtatgttaaaattttaatttattgtttaaatattataaatttaatttatgtatataaaattgaatttatgttattttatttatatataataatgtaatatttttaatatatagttttttgataaaataatgtcgtgttttatataattaaaaaattattaagatttttttttttattaaataatttggtttattaaaataatataatataatagattatgtgatagttttttaatatttttttatttataaagtttgtatgagattatattttataagaagaaaagtaaatataagtaaaatagaagagatgatgatttaaaaattaaaatagattatataagggtttgtgtaaaatttataaatgttttaataaagaattatattttgagaattttaaattgtttatatgatatgttttggaaatagtatatattgttagaaatgtgattgaataaaatgatcgagtaatataaatgaaaaatggttttaaatcggtggtagtaagtaattagtgtggaaaattggatggagaattaattgtaatttaattatttatattaaaatgatttttagattttttaaagaatttaaagtagaattattattcgatttaataattatattattgggtatttatttagaggaaaagaggttattatatggaagatagatgtatatgtatgtttttatagtagtataattcgtaattgtaaaaataggaagtttattaattatatttattaattaaatgtttattagttaacgaatggatgaagaaaatatggtatatatatatagtggtatattatttagttataaaatgggatgaaataatggtttttgtagtaatttggaggtagttagaggttattattttaagtaatttaggagtggaaaattaagtattatatgtttttatttgtaagtggaagttaagttatgaggatgtaaatgtatttaagaatgatataatggattttggggattcggagagaaaggtaggag

SEQ ID NO: 1276 - DNA, 2412 bp, Artificial Sequence
  chemically treated genomic DNA (Homo sapiens)
ggtagaggttaggaggatgatgttagtagttaggaagttcgggtagtggtttaggaggggtatttgttaagaatttacgtgggttttagtgaagttgcggatgttgtggttgaatatagagtttaggtagttattttaggtacgggttacggcggcgttatcgatgatgtattcgaggagaatattttagtcgatgaggaaggtttatagttcgtttatggatacgtaggtgaataggtaggtagagttcgtgcgtggtatacgtgttttaaattttgtatagtatagggttgttagtagggaggttatagcggttatatcgaaggataagagtatagtagggttagttatttttttggttacggtatttgtgagtacgtagagattcgagtttattatgttatttacgtttagaagagttaggtttagcgtggataggtagcgtcgtagtgacgtttttatggtggagttttttagcggttttaggcggtttagtttttggtataagcgtgttaggttagtaatggtgggtagttttcgggttatggtaggtggtcgagaagagtatcgagttagttattggaatttgttagggttagaggggaatgataggatgcgtagtcggggtttgattagttttttattttttttggtttgattatttttagttttttttttgtttttgatttggggatttggatatttttattaggggtttgttggagagttggaatggggtaggtgttagaatttgtgggtaggaggttataggaagtttggaggttttgtttgtattttaggtagtaaaggaggtttggtgaggttttatttgtttattcgttcggtggttttgaggggtggggagggagtagttttagggggagtagggtgagaggttgggaacggtttagtggtggggttttagagttaggtgaaatcgaggtttttttagagtcgagtcggattcggaataggagtcgcggttttgcgtcggggcgggtgtggtttaggtagttatttggttatagatagatagtggcggttatatatattttcgtttttgtattcgtggttaggttggggtattcgcgcgttaggcggaatgtaggggcgttttgggttcgtatatttttttatgttcgatacgtcgttgttgttagagtttgtttcgtcgcgttttcgttttcggatatttgcgttttcgtttgtttttgggtttgagttcgttttagttttcgttttcgtaggatttgttgtaatttatttgttgttgtcgtagtcgttgttttcgttttgagtattgagttcgtttagttcgtcggcgtcgagcgtagggttcgtttttattttaggtttttcgcgcggttttattcgttgttatatatttagatattttattttgtttattttgttcgatttcgtaaggtcgttatcggagtttatcggggtttagggaagttttgtgattgtgatttagttatagatggagaaggttagatcgtcggttgattgattagtttaggttagttcggggaggttaagggttacgtttgaaagttcgtagtttattttttttttattgtagcggatattttttttgattttttattttagtatatgaattttatttagttgggttttagataggttttatagtatcgttatgtgagttttaggtatagtgagttagatgaagatatgggtttggtagagtggtttggggcggtttttgatttttatttttataatggaagagattgtagttttttgagagagttttgcgaattgagggaatgtattttggttgttttgagtttgtagttattacgttttgtaaggaagtaagtagtttttgggattagtttgtagtttttttgtgggggagtagagttttttagattttagtggtagttttttttagtttaggtatttttggtaggtcgggagggttttatgggattttaatagtagatttttatttgtgtttattagcgatagttattgtgttttgagtattgtattttagtgttttacgttttaggtaggtagttatgtaataatatatttggttaattttttaattttaatttttttagagattgggttttattatgttgttcgggttggtttcgaatttttggttttttaaaaggttgtgattatatttatgaattatggtttttggtttttttagaacgttatattagatatgtgtttaggtttatatgtggtttgtggaatggaattttaggagtatttgtagtttatttagtttattgggttggtgataggatgatggatttttagataagatggtgttaatttggaatattttgtttcggttagaatgttaatattttttaatatttggttggtattgttttgaggaattttttagatggtttttatttt

SEQ ID NO: 1277 - DNA, 2412 bp, Artificial Sequence
  chemically treated genomic DNA (Homo sapiens)
gaagtgggagttatttgagaagttttttaagataatattagttaaatattagaaggtattggtattttggtcgaggtagaatgttttaaattggtattattttgtttgggagtttattattttgttattagtttaataggttggataggttgtagatgtttttaagattttattttataaattatatgtaagtttgaatatatgtttagtatagcgttttggggaggttaggagttatggtttatgaatgtaattatagttttttgggaggttaagagttcgagattagttcgggtagtatagtgagatttagtttttaaaaaaattaaaattaaaaaattagttaggtgtattgttgtatagttgtttgtttggggcgtggggtattggaatgtagtatttaggatatagtggttgtcgttgataaatataagtggggatttgttattggggttttatagggttttttcggtttgttagaggtgtttaggttaggaagggttgttattggggtttgaggagttttatttttttataggagggttgtaggttggttttagaagttgtttgtttttttgtaggacgtggtagttgtaggtttaaaatagttagaatgtatttttttaattcgtagaatttttttaaaaggttgtagttttttttattgtaagagtagaggttagggatcgttttaggttattttgttagatttatgtttttatttaatttattgtgtttgaagtttatatgacggtgttgtggggtttgtttggggtttagttgggtggggtttatgtattggggtgagggattaagaagggtgttcgttgtagtagaaagaaggtgggttgcggatttttagacgtggtttttaattttttcgaattgatttaggttagttagttagtcggcggtttgattttttttatttgtgattgagttatagttatagggtttttttagatttcggtgagtttcggtaacgattttgcgaggtcgggtagagtgggtagggtgaaatatttgggtgtgtggtagcgggtggggtcgcgcggggggtttgggatgggggcgggttttgcgttcggcgtcggcgaattgggcgggtttagtgtttagagcggaggtagcggttgcggtagtagtaggtgggttgtagtagattttgcggggacggggattgggacgggtttaggtttaagaataggcgaaggcgtaggtgttcggggacgggggcgcggcggagtaggttttagtagtagcggcgtgtcggatatggggaggtgtgcgggtttagggcgtttttgtatttcgtttggcgcgcggatattttagtttggttacgggtgtaggggcgggggtgtatgtagtcgttattgtttgtttgtggttaggtggttgtttgggttatattcgtttcgacgtagagtcgcggtttttgtttcgggttcggttcgattttggggaagtttcggttttatttggttttgggattttattattgagtcgtttttagttttttattttgttttttttggagttgttttttttttattttttagggttatcgagcgggtgagtaggtggggttttattaggttttttttgttgtttgggatgtagatagggtttttaggttttttgtgattttttgtttataggttttgatatttgttttattttagttttttagtaggtttttggtgagggtgtttaggtttttaggttagggatagagagaggattgggggtggttagattaggagggatggaaggttggttaggtttcggttacgtattttgttatttttttttggttttagtaggttttagtagttggttcggtgtttttttcggttatttgttatggttcgggggttgtttattattgttagtttggtacgtttatgttagaagttgaatcgtttgaagtcgttggaggattttattatggagacgttattgcggcgttgtttgtttacgttggatttgatttttttgggcgtgggtggtatggtgggttcgggtttttacgtgtttataggtgtcgtggttaaggaggtggttggttttgttgtgtttttgtttttcggtgtggtcgttgtggtttttttgttggtagttttatgttatgtagaatttggggtacgtgtgttacgtacgggttttgtttatttgtttatttacgtatttatgggcgagttgtgggttttttttatcggttggaatgtttttttcgaatatattatcggtggcgtcgtcgtggttcgtgtttggagtggttatttggattttatgtttagttatagtattcgtaattttattgagatttacgtgggtttttggtaggtgttttttttgggttattattcggattttttggttgttggtattatttttttggtttttgtt

SEQ ID NO: 1278 - DNA, 2475 bp, Artificial Sequence
  chemically treated genomic DNA (Homo sapiens)
tttttgagatagagttttttatcgtttaggttagagtgtagtggcgtgattttagtttattgtaattttcgttttttgggtttaagtaatttttttgttttagttttttaagtagttgggattatagataattattattttatttagttgatttttttttttttttttgagatggagtttttttttgttatttaggttggagtgtagtggcgcgatttcggtttattgtaagtttcgtttgtagttgggattataggcgtttattattacgttcggttaattttgtttttgtatttttagtagagacggggttttattgtgttagttaggatggttttaattttttgatttcgtgatatgtttatttcggttttttaaagtgtcgggattatagacgtgagttatcgtgttaggtttaaagtatttttttatagtttttagtttgttgttgtgtttgttttttttacggttcgtatagtttgggtttgaattttggttttttatggttttgggtaagttggttaattttttgtgttttaatttttttatttgtaaagtggggttggggaaaaattttattttatagggaatattaagtgagtttatgaaagttttcggtgtgtggtatgcgataattattatttaagtataaggtatgtttatatgtattggttgtttattacgacgtattagtatttatttaagttatttttttttagagtttgtttggaatgtagaatcggttagtttttttttttaaatagtttttgtaatttttggttatttgtgtgggtagaggcgggagtgtgggtgtgtggttttgttttgggatagggatgacgagagagtatgtgtttgtgtttagagttgtttttttttttgtttaggggttattaaatatgtttatggtttttgttgtttggttaacggttatttcgggttgtcgttttttggttagatttggagtttataagttaattttagaaatgattggtcgatttagttgttgttattatattggtttagaaggagggtggggggaggacgggtcggggaggggtagtaaggggaagggatgtgtgtcggtgtgtgtggagagggtgttttttcgtttttgttttttcggttcggtggggttttttcgcggttattcggggagacgttttagatagtcgtggtttttgtgatttgtgttttttttgtagaaggtattattgggttgggttttagacgggtattttgcgagcggatcggcgagttttaatttttcggaatgcgttgttgggggttgcggtggtaggttttcggttttttggtttattttaggtttttttggtgttgagagttttcgaggtttgatttttttgtttgttgttcgtgttgtttattttgaaaataagagtgtttcggtggaaggatttgagaataaaatgttggggtaaatggatattcgtaagaattattttttttaggttttagttgttcgttaataatttttaaaaatgtgtttagaattatgagttaatttttattgtgaatttttgttcgtagacgttagggtttatatttttttttaattattagtaatttttgttttattggtgtttagttatggtcggggaagagttaggttttttttttcgtgttaataacgttgttgagtcgaaatgttaattttaatgtttttttttaaattgtaaattaagtatgtatgagtgttgggggaagggtaatggaagtttatggttgaaggttttaattttatgttattttttttgagttttgtttgagggaaggtgttttatttggtatttcggatagtaggtatttttttgaatgaagaagatttataggttttagtggttttatagtggggtagaagggggttatgttttgatatggagtttttttttaggagaggagaagattttattagttataggtttttgggttgttgtttttttgtagtttttttatggaggaggttaggagtggggaggttcggaatggggagtttagtcggtttttagtcggttttaagttgtttagtttggttttaattcgtaagtgtggggatttgggtttttattttgtagggtttggaatacgacgaggttgttatttttattttgtggttgtttaaaaagatgttgttttatttagtgtattagtttatggaggttgagtgttttattagggtttttagattttaataaggataatggtggttttgggtgttgtatttattgttgatttaagttgtatttttttatgtttgggtattatgtttagtgtgtattttgggagtagaaaagagaggggtttatatatttttaggttatggatgagttttagaaaataatagtggagaggagagagagaaaagaaggaagaggaggaggagaaggagaagaagagaaggaggaggaggaaaaaagtaggaggagaaagagaagaaggaggagaagaataata

SEQ ID NO: 1279 - DNA, 2475 bp, Artificial Sequence
  chemically treated genomic DNA (Homo sapiens)
tattatttttttttttttttttttttttttttttttgttttttttttttttttttttttttttttttttttttttttttttttttttttttttttttttttttttttttattattattttttagaatttatttatagtttaagagtatatagattttttttttttttgtttttaaggtatatattggatatggtatttaggtataggagaatataatttaggttagtaatggatatagtatttaaggttattattatttttgttggagtttagaagttttagtgggatatttagtttttatgagttggtgtattgaatgaggtagtatttttttggatagttataaagtgaaagtaatagtttcgtcgtattttaggttttataggatagaagtttagatttttatatttgcgggttgaggttagattggatagtttggagtcgattgggagtcgattgggttttttatttcgggtttttttatttttggttttttttatggaaaagttgtaggaaggtagtagtttagaggtttgtagttggtgaggttttttttttttttgggagagagttttatgttaaagtatagtttttttttgttttattatggggttattgggatttgtgaattttttttatttagagaaatgtttgttattcggggtgttagataagatatttttttttagatagagtttaaggaaggtggtatgaaattgaaatttttagttatgaatttttattgttttttttttaatatttatatatgtttaatttgtagtttaaaaaagaatattaaaattaatatttcgatttaatagcgttgttaatacgaaaggggaagtttggttttttttcgattataattgaatattagtgaagtagaaattattggtagttgaggaaaaatataaattttgacgtttgcgggtaaagatttatagtggagattaatttatgattttaaatatatttttaaaaattattagcgaatagttggggtttgaggagagtgatttttacgaatgtttatttgttttagtattttgtttttaaatttttttatcgaaatatttttgtttttaaagtgagtagtacgggtaataggtaaaggaattaggtttcggaagtttttaatattagaaaggtttaaaatagattaaaagatcggaggtttgttatcgtagtttttagtagcgtatttcggaaaattaaaattcgtcgattcgttcgtaaggtgttcgtttaaaatttagtttaatagtattttttgtaaagaggatatagattataggaattacgattgtttaagacgttttttcgggtggtcgcgaagggattttatcgagtcgggaaagtaggagcgaaggagtattttttttatatatatcgatatatattttttttttttattgttttttttcgattcgttttttttttattttttttttgggttaatgtgatagtagtagttgagtcgattagttatttttaaaattagtttgtgagttttaggtttggttaggagacggtagttcggggtggtcgttgattaggtagtagagattatggatatatttggtggtttttgagtagggaaggggatagttttggatataagtatatgttttttcgttatttttgttttagggtagggttatatatttatattttcgtttttgtttatatagataattagaggttgtaggaattgtttgaggaggagagttggtcggttttatattttaggtagattttggaagaaaataatttgaatgaatgttggtgcgtcgtggtaaataattagtgtatgtaaatatattttatgtttaggtagtggttatcgtatgttatatatcgagggtttttatgaatttatttaatgttttttatgaggtagggtttttttttagttttattttataagtggggaaattgagatataaaaagttaattaatttgtttaaggttatggagagttagaatttaaatttaggttgtgcgggtcgtagaggaaatagatataatagtaaattaggggttataaaaaagtgttttgggtttggtacggtggtttacgtttgtaatttcggtattttgggaagtcgaggtgggtatattacgaggttaggagattgagattattttggttaatatagtgaaatttcgtttttattaaaaatataaaaataaaattagtcgggcgtggtggtgggcgtttgtagttttagttataggcggagtttgtagtaagtcgagatcgcgttattgtattttagtttgggtgatagagagagattttattttaaaaaaaaaaaaaaaaattagttgggtggggtagtggttgtttgtgattttagttatttgggaggttgaggtaggagaattgtttgaatttaggaggcggaggttgtaatgagttaaggttacgttattgtattttagtttaggcgataagagattttattttaaaaa

SEQ ID NO: 1280 - DNA, 2443 bp, Artificial Sequence
  chemically treated genomic DNA (Homo sapiens)
gtatttgatttgtggtatgtgttaatttattattgttaattgtagggatttagtgattttttcgaatttttgttatttttgttacggtttttgttttgtggaggtttgtggaatgggaagtggggaggggaaggagaagggggcggagttagtcggagttttttggttaggtttggagttattttgttttgttatagtttttatgggtttagagtgggttttggggtagagggtttgtaaggataggggtgggtggttttgtcgagggcggtgttttgagtaggttttattttttagtttgtttagtttggttttattttagttttgttgttttgttattttgtttttttgtgtttattttttattttttgtcggggatattttaaggtttgttaaggttggagtaggggtgggatttagttatttaataaacgtttttttggttatgtagggttgggtattggggtggggggttgatttggattttttaagatattagattgtttaattgtttagtttttattggggtaagtgtttcgttgagggtgaagggggttgtgagtgtttattagggagtttggataggtttcgttttttatagttgttttattttttggagttgttttggtggtagatggtattgttttagaaaggtgaggttggagttgttttttttattaggggtggttaaggacgtttttagggttttttatgtaggtttttagggttattttgggcgtggttgagggtatgtagattacgttgtgtttttttttattttttatgttcgtcgtttgtttgatatgttttttagttgttttgtttcgtagaagttgtgtggttttttttgtgagtagagtcgggttttatgatttttcggagtagcgttagggattttttttaggtataattttaaagggggttttaggatttgttaggtttacggaagtggtttttgtaattttttttttggtggtagtttttggtgtatttcggtaggggtagtttttttttattatagggattttgtgtgttaggttttagttgcgttgtcgttgaattatggatttaatagtagagaagttttgtaggtcgtttgtgttggttcgggaaatcggggtttagtcggggtttgttacggttttggtgtcgttttgttttttgtcggcgttacggagtaagcggagagatttattttttcggttttaagaggtattaacggaggaggttgagaggtaggagttgaataattgatggttttttttggtttaggatttgttgaaaatgatacggtgtaaggtagaggggttgagagtgttgattataaaatgttgagaagttattttagggcggttacggttagaaggaggatttttatttaggacggggttataggtatttggggcgggtgttagaggtttttgttttgggttattttagggggttaggatatttagaagttgggtttagaggtttatagggttggtttatttttattttttttttatacgtttgttattatcggtgttttagtttagtaattttatggttcgttggtttcgtttatagtttttattgttttttgtgtgttgggcgtgggtttttgagttttatttttagtttttttagttttaggagaggagtggaggataggggtttaacgtggggtgtggtgcggagcggggagggttgtggcgtttttttagtttttttttttttaatagttttagttttttttttggagaattttttatttgttgggtatatttggtttttttttattattttgtttttagtcgggagatttttatttagtgaaatagtgaaataggaagggttttttggttatttcgcgtagggcgtagggtatgtagcgggggagtggttcgtttttttagtgttttatcgtttatatttttaggggagtatatagacgggtaggttgtggggttttgattttatggtagtgtttgggggtgaatgtttatagtttttgaaattttagtgggagtgcgttatcgggtggttttttagtttagcggtttgtaggtggttggtgagagtgagtttaattagatttttgttttataataaggatagaggaatttttgtattttagggttttttgttttggtgtattaaaaaattggattatacgtgggtttggagaatgagtgtaaggttttattgagtggaagtagtttttagtagatgggggagttagaggggagatggtttttttttggagttaggtaatattttcgggatgtttagtagtttgtttttttttattagtgtgtttttttttttatatagaggtttttgtttttgttttgttagggttttgggtttttataggtataggatggaggtatggtaggttagggtggttttgggaaatgtaatatttgggtaggaaatgtttgtttttatttaggttcgt

SEQ ID NO: 1281 - DNA, 2443 bp, Artificial Sequence
  chemically treated genomic DNA (Homo sapiens)
acgaatttaggtgaggataggtattttttgtttaaatgttgtattttttaagattattttggtttgttatgtttttattttatgtttataaaaatttaagattttagtaaggtagagatagaagtttttgtgtggggagaggaatatattggtggaagaagataagttgttggatatttcgagaatgttgtttgattttaggggaaaattattttttttttggtttttttatttgttgagagttatttttatttaataaaattttgtatttattttttaagtttacgtgtgatttaattttttggtatattaaggtaagaaattttgggatatagaaatttttttgtttttgttataaggtaggggtttaattgagtttatttttattagttatttatagatcgttagattaaaagattattcggtaacgtatttttattggggttttaagagttgtaaatatttatttttagatattgttatggggttagagttttatagtttgttcgtttgtatgtttttttagaggtgtgagcggtggggtattgaagaagcgagttattttttcgttgtatgttttgcgttttgcgcggggtaattagggaattttttttgttttattgttttattgggtagagatttttcggttggagatagaatggtggggagaggttagatgtgtttagtaggtaggggattttttaggggggaggttgaggttgttaggaaaggaggggttgagggggcgttatagtttttttcgtttcgtattatattttacgttaaatttttgttttttattttttttttggggttaaggaggttgagagtagagtttagaggtttacgtttagtatataggaggtagtgggggttgtggacggggttaacgagttatggggttgttgggttgaagtatcggtgatggtaggcgtgtgagagggaagtgggggtgagttagttttgtgggtttttaggtttagtttttgggtattttggttttttggaatgatttagggtaggagtttttgatattcgttttaaatgtttgtgatttcgttttgagtgggggttttttttttggtcgtgatcgttttggagtggttttttagtattttgtggttagtatttttagtttttttgttttgtatcgtgttatttttagtagattttgagttagagaaggttattaattatttagtttttgttttttagtttttttcgttagtattttttaaagtcgggaagataaattttttcgtttgtttcgtggcgtcgataggaagtagggcggtattaggatcgtgataggtttcggttgggtttcggtttttcgagttagtataggcggtttgtaaggtttttttgttattaaatttataatttagcggtaacgtagttggggtttggtatatagggtttttgtgatgaggaggggttgtttttgtcggaatgtattagaggttgttattagggagagagttataaggattattttcgtggatttggtaggttttagggttttttttaaaattgtgtttggggagagtttttggcgttgtttcggaggattatggagttcgattttatttataggggagattatatagtttttgcggggtaagatagttgaggagtatgttaggtaagcgacgggtatggggggtgggggggagtatagcgtggtttgtatgtttttagttacgtttagggtgattttggaggtttgtatggaagattttggaagcgtttttggttatttttggtggaagagatagttttagttttatttttttaggatagtgttatttgttattaaggtagttttagagagtgggatagttgtgagaggcgggatttgtttaggttttttgatgggtatttatagttttttttatttttagcgaggtatttgttttaatgaaaattgagtagttggataatttgatgttttggagggtttaggttagttttttattttaatgtttagttttgtataattaaggaagcgtttgttgaatggttgagttttatttttgttttaattttggtaggttttggagtgttttcggtaggaagtggagggtgaatatagggggataaagtaatagggtagtagagttggggtggggttaggttgggtagattggggaatgagatttatttagaatatcgttttcggtagagttatttatttttatttttgtaaattttttgttttagggtttattttaaatttatgagagttgtggtaggatagggtgattttaggtttggttaggaggtttcggttgatttcgttttttttttttttttttttttattttttattttataggtttttatagggtaggggtcgtgataggggtgatagaagttcggagaggttattgagtttttgtaattagtagtaatgagttgatatatgttataggttaagtgt

SEQ ID NO: 1282 - DNA, 2892 bp, Artificial Sequence
  chemically treated genomic DNA (Homo sapiens)
gtttttttaattttagaggcgtgagtatgttggtttttttggtaagtttttttgggttttttgtaaattttaaatttataagatattttgtggggagatgagtttttgtttttttgttttttattttaaaatttaatatgtgatcgggtacggtgatttacgtttgtaattttagtattttgggaggataaggcgggtggattatttgatgtcgggagtttaagattagtttgattaatacggagaaatttcgtttttattaaaaatataaaatttgttaggcgtggtggtgtatgtttgtagttttagttatttaggaggttgaggtaggagaatcgtttgaattcgggaggtggaggttgtagtgggttgagattgcgttattgtattttagtttgggtaataaaagtaaaatattattttaaaaaaatagaaagaaataatatgtatttagaaaagggtacgtattataaatgaatagtttaataaatttttataaattgagtttaattttgtaattaatatttagagtaagaaagttgaatttaattagttttcgaaagtttagtacgtttttattttaggattattatttttttgatttttgaattgtttttgtttttttttttttttttttttttttttgagacggagttttatttcgtcgtttaggttggagtgtagtggtgagatttcggtttattgtaattttcgtttttcgggtttaggcgatttttttgttttagtttttcgagtagttgggattataggtgtgtattattatgtttggttaatttatttttatttttatttttagtagagatagggttttattatgttggttaggttggtttcgaatttttgattttaggtaattcgtttattttatttttttaaagtgttgggattataggtgtgagttatcgttatcggtttgtttttgttttttatgtaaatggaattatgtagcgagtgtttttttgtggttgattttattattttgatttacgtttgtgagatttattcgttatgtgagttgcggattatttatttttgtttcgtttgtcgtgtttttaagttcgaatattttacgatatttatttgttttgatgacgttaggttttttaattggaggaattatgaatgtgcggttatatgtttttttgttttttggagtatatgttgtatgcgtttttgttgagtgtaaggttgggcggggcgtcggtggtttaaggggtttatggtgaatttataggaatatcgttttgagttgtttagtggcgtttttatgcgttttatttagttttttcgtatttttatttgtattattttattttttttttttggaaaataaatttatttgtggttttaaagtttaatttatttttagtaatttcggtagttatgaatttttatataagaggttttcgtaggtttagcgttaaagttgttttttttgtagtttcggtgatttttcgggttttttttttcggttttggtgtttcgggtgagtttagtatacgttgggattttggttgtttgttggtttggttcgattgtttttgtttttgagggtagagtcgggttttatttcgggatacgtttggggttagttatcgatttgtagtttttcggtcgagggtgcggggttggcggtaaggtttgttttagtgttttttagtagtcgggttttcgattgtaggttcgggttttcgttttttcgcgcggagtcgggcggggataatttttgatttcgagtttttttttcgagagggggtggggggaggaggggatcgggttttacggagtgttgggggataggattgggggtattcggttcgaaggcgttttttttgtgtttttttcggggaagtttgggatttaggttttcgtttttagtcgtgggcgcgcgtttttcgtagtcggggttcggggagggagggtttcggtagggggcgtcggggagggaggattaggagattcgcggtttcgttttcgtcgcgtttttttttcgggcgggataattgaacggcgcggttttggtttagcgttggttgtcgaggttcggtcggagcgtggagttcgcgtcgttgttttaggatcgcgttcgcgtttttgttcgtcgtcgtttatcgttcgtcgttcgtcgtttatggagcgcgtcgcgtcgtcgcgtcgggtttcgttttcgttgttgttgttcggcggttttgcgttgttggcggtcggaggtaggggcgtttcgggttcgtcgttttagtttagggtttcgattttttcggtttcgcgttttttgcgagtttcggaattacggggattcggagttcgtgcgttgttttgcgcggcgttttcggattgttagcgtcgaggtttcggcgacgttttttttttttacggttagtttcggtttttatttttttttcggtttggggatttgttttaaaatcggatttttttattttttaaatatatcgttttattttagttttagtaaatttagtcggtttcgggggtcgtatttcgggttttgggggtttaggggcgttagttgggttgggggacgttggttgggggttatcgagtttagggcgttttgtatttgacgttggaagcgttttcggttatttttttttatcgtttttcgtttttatttttaggtaggagttgttgtatttagtttgcggatgtgaaatttgagtttggagggtgggaagtagttttttttttaggagatattagcggttttgggataggggttggagaggaagaaatgagaaagttagggagtagtttggaggtttttggggcgtagttgggaggatggaggggatgcggatttggttattttttttttgtttttttttcgggatagagggtttaaggtagtggttt

SEQ ID NO: 1283 - DNA, 2892 bp, Artificial Sequence
  chemically treated genomic DNA (Homo sapiens)
gaattattgttttgggttttttgtttcgggagggaggtagggaggaggtggttaggttcgtattttttttatttttttagttacgttttaaaaatttttaggttgttttttggtttttttatttttttttttttagtttttattttaggatcgttagtgttttttggggaaaagattgttttttattttttaggtttaagttttatattcgtaagttgggtataatagtttttatttgggggtggaggcgggaagcggtgaggaaagatagtcgagggcgtttttagcgttaagtgtaaggcgttttgggttcggtaatttttagttagcgttttttagtttagttagcgtttttgaatttttagggttcgggatgcggttttcggagtcggttggatttgttaggattggggtaggacggtgtgtttgaggggtgggggaattcggttttgaaataagtttttaggtcggggaggagatgaggatcggagttggtcgtgggggaggggggcgtcgtcgaggtttcggcgttgatagttcgggggcgtcgcgtagggtaacgtacggatttcgagttttcgtggtttcgaaattcgtagggagcgcgaggtcgagggggtcgggattttaagttggggcggcggattcgggacgtttttattttcggtcgttagtagcgtaaggtcgtcgagtagtagtagcggaagcgggattcggcgcgacggcgcggcgcgttttatgggcggcgggcgacgggcggtgggcggcggcggataaaggcgcgggcgcggttttggggtagcggcgcgggttttacgtttcggtcgagtttcggtagttaacgttgggttagggtcgcgtcgtttaattatttcgttcgggaggagggcgcggcggaggcggggtcgcgggttttttggtttttttttttcggcgttttttgtcgggatttttttttttcggatttcggttgcgaggggcgcgcgtttacggttgggggcgagggtttggattttagattttttcggagggggtatagagggggcgttttcgggtcggatgtttttagttttattttttaatatttcgtgaaattcgatttttttttttttttattttttttcgaggggagggttcgggattaaaggttattttcgttcgatttcgcgcggaggagcggggattcgggtttgtagtcggaggttcggttgttggggggtattggggtaggttttatcgttaatttcgtattttcggtcgggaggttgtaggtcggtggttaattttaggcgtgtttcgggatgggattcgattttgtttttagagatagggatagtcgggttaggttaataaataattaaaattttaacgtgtgttgggtttattcgggatattagggtcggagggagagattcgggaagttatcgaggttgtaggggaggtagttttggcgttgggtttgcgggagttttttgtataggaatttatagttatcggggttattgaggatgagttaggttttggaattataagtagatttattttttaaagaagaagaataaaatggtgtaggtgaagatgcggaggaattggatgagacgtataggaacgttattgggtagtttaaagcggtgtttttgtgagtttattatggattttttgagttatcgacgtttcgtttagttttatatttagtagaaacgtatataatatgtgttttaaaagatagaaagatatgtagtcgtatatttataatttttttaattgggaagtttagcgttattaaggtagatgaatatcgtggagtattcgggtttaggagtacgataaacggaataggagtgaatgattcgtaatttatataacgggtaaattttatagacgtaagttagagtaatagagttagttataaaggaatattcgttgtatgattttatttatataaaaggtaagaataggtcggtggcggtggtttatatttgtaattttagtattttgggaggatgaagtgggcggattgtttgaggttaggagttcgaaattagtttggttaatatggtgaaattttgtttttattaaaaataaaaataaaaataaattagttaggtatggtggtgtatatttgtagttttagttattcgggaggttgaggtaggagaatcgtttgaattcgggagacggaggttgtagtgagtcgagattttattattgtattttagtttgggcggcggagtgagatttcgttttaaaaaaaaaaaaaaaaaaaaaaaaaggtaagaatagtttagaggttaggagagtggtgattttggagtgggagcgtgttgggttttcgggggttggttaggtttagtttttttattttgggtattggttataaggttgggtttagtttgtgagaatttattgagttgtttatttatggtacgtgtttttttttgaatatatgttgtttttttttgtttttttgagatggtgttttgtttttgttgtttaggttggagtgtagtggcgtaattttagtttattgtaatttttatttttcgggtttaagcgatttttttgttttagttttttgagtagttgggattataggtatgtattattacgtttggtaaattttgtatttttagtagagacggggttttttcgtgttggttaggttggttttgaattttcgatattaggtgatttattcgttttgtttttttaaagtgttgagattataggcgtgagttatcgtgttcggttatatgttaaattttaaaatgaaaaataaaaggataagaatttatttttttatagggtgttttataagtttgaagtttgtagagagtttaggaaagtttattaaggggattagtatgtttacgtttttgaggttaaggaggt

SEQ ID NO: 1284 - DNA, 2588 bp, Artificial Sequence
  chemically treated genomic DNA (Homo sapiens)
tattgattttattaagtttttttttaagtgttagtttttattttttttttttttgtttagaggagaaatttaaaatcgaaatttttaacgtggacgggggtatagagtttttggttttttttggtgttttttgattcgggtatattttttttacgattatgtttgagatgttttttttttttttaggttttttttatagtggggttttttggaatgtttttttttaaatttatttatgtaaattttgtttttcggaggttttagtttagtttcggtattttttaggagttcgttttgtagagatttttcggtttttcgtttcgtatttcgcgtaggaagttcgattttttttttagttttttttgagttaggtttagtagtttgaggaagcgagggtcgtcgtattcgaagcggcgttcgtaggtgagggaggcgattacgttgtttacggttttgtttaagaggtcgttggggcgaaaggggcgttttgggggtgggagatgcgggtaaggggttgtttttttcgtttttcgtttttttagttttcgttttgtgtttttttgtttattatttatcggtttggtcggcgaaggcggtataaaggtaggcggttttttcggttatttattgttttagcgattttttgtttaggtttaagttgcgtaaggtggatacggagaagcgtttttgttcgcgttacgcgggtttatagcgcgataggattatttttgggggcgggacgggtacgtgggcgttgttatgaaggttttggttttatttttcgttatttattttaattttggcgttttataaggtttttcgtagtttttagttcggtttagttgggtatagggtttattttttgtttatttatattgtttttttgtttggggcggggtttggttttatttcgtttttgtttattttgattatttttttatttaaggaagatttcgttcgtttcgtttatattgagttcgtagtataggcgcggttttcgttatcgttatttcgacgtattagtttcgtttatcgggtttttggcgggtttgggtagtagtttcgtttttttttagtttatagattcgtatttttttcgtgtaggtggttttttggtttattgtttttagtttattcgttggtttttatttttgttttacgtttaggattttacgttttgtcggcgttgtttgggttacggttattgtttattcggggtttacggaaacgcggtttttgttttttatcgtcgtttgttttgggaacgcggttcgaagtttaggatttggtagatgggcgtaggcgggcggtcggtcgtgttttcgtcgcgggttattatcgtttcgcgtacggtcgttagtttattgagtacgattatcggcgtttaggttagttgtaggttgaatacgttttcgaagcggcgtcgtaattgtagagggagggttagggttttttgttaagttaggattattttagattataggttttagttttatttgaattttggacgattttcggggttattaggagtgagtaggtggaaggaggagatttagttttttgattttggggcgggggtgggggttatattttttgtgatggaggaatttagtttggatgcgttatttaggtatgattttgtaagagttattaaaattgtcgagaggttttagttagtattttatttttagatgatggtttatgtcggtgagtagtgaggttcgaggatttatagtgtaaaaggtttgaatcgggttattgtattttttttattttcgatttcgtgatttaaacggtatttaggattaatttattttttatttttaaggtttttttttttggtgttagtagaagggattttgtattttataatatatgttgtttaatgggtttgtatgtttattgttaagtttagttttatttttaggtttttgttttatttttttttggtttttggaaaatttagttttttatgttatgtataaatgtttttttttaggacgttttttaaatttgttttttttttttagtttggtttttgatttagtttgtggtttaatttattatttatgtttgttggtggtggggtatttttaggatttttgtcgttttttaggatttttttttttatttggtcgaagtagtatggtgtgttttggaagtttatatgtagtaaggttgtttagttcgggtagtggtaggggatttggcgggtagcgtgtagtttagcgttggtgtcggtgtattaggtttattaggagtaggaagatggttattattatggttaggggtattagtgtttttagttttatggttgttttattattaattgggtttttttggatatatttggtatttttattttattaggtatagaggattaggtaggatattttcggtatatcgagcgcgtgattttttttttataaagggagttgatgatggttttcgttttttgttgtgagtgaatttgttgtgttgattgtgttgttagtggtagagttaggttagggtaggtatgggttgttttagaggtttttgtcgttgttttttgttttaggtttttatttagggtagggtggtagaaa

SEQ ID NO: 1285 - DNA, 2588 bp, Artificial Sequence
  chemically treated genomic DNA (Homo sapiens)
tttttattattttattttgggtaagggtttggagtaggaagtagcggtaaggatttttggagtagtttatatttgttttggtttgattttgttattggtagtatagttaatatagtaggtttatttatagtagagggcgaaggttattattagttttttttataagggaagggttacgcgttcggtgtgtcgagagtgttttgtttggttttttgtgtttggtggggtgggggtgttaggtgtgtttagaggagtttagttggtagtgaggtagttatggggttagaagtattggtgtttttggttatgatagtggttatttttttgtttttggtggatttgatgtatcggtattaacgttgggttgtacgttattcgttaggttttttgttattgttcgggttgggtaattttgttgtatgtggatttttagaatatattatattgtttcgattaggtgagggaggaggttttggagggcggtagaggttttgaggatgttttattattagtaaatatgggtggtgggttaaattataggttggattagaagttaggttgagaaggggaagtaggtttgggggacgttttggggaaggatatttatatatggtatgaaggattggattttttaaaggttaaggaagagtagggtaagggtttggaggtggagttggatttggtagtgggtatgtaagtttattgggtaatatatgttatggagtataaagttttttttgttgatattagaaggaaaggttttgggaatggaagatgagttagttttgagtgtcgtttaaattacgaaatcgaggatgaagggggtgtagtgattcggtttaaattttttgtattgtgggttttcgggttttattgtttatcggtatggattattatttgggaatgggatgttaattggggtttttcggtaattttggtgatttttgtaaggttatatttgggtgacgtatttaaattgagtttttttattatagaaggtgtgatttttattttcgttttaggattaggaggttgggttttttttttttatttgtttatttttggtagtttcgggggtcgtttaaggtttaaataggattaggatttgtagtttggggtgattttggtttgataagaggttttgattttttttttgtagttgcggcgtcgtttcggggacgtgtttagtttgtagttggtttggacgtcggtggtcgtgtttaatgggttggcggtcgtgcgcgaggcgatggtgattcgcggcgaggatacggtcgatcgttcgtttgcgtttatttattaggttttgggtttcgggtcgcgtttttaaggtaagcggcggtgggggatagagatcgcgttttcgtgggtttcgggtggatagtgatcgtagtttaagtagcgtcgatagggcgtggggttttggacgtgaaatagagataaaggttagcgagtgggttgaggatagtgggttaggaaattatttgtacgggggaggtgcgagtttgtgggttgggagggggcggggttattgtttagattcgttagaagttcggtgggcgaggttgatgcgtcgaagtggcggtggcggggatcgcgtttatgttgcgggtttagtgtgggcgggacgggcgggattttttttgagtggaaaggtggttagggtgggtagagacgaggtggggttaaatttcgttttaggtaggggagtaatgtgggtgagtaaagagtgggttttgtgtttagttggatcgggttagggattgcgggagattttgtggagcgttagggttggagtgggtggcggagggtggggttaaggtttttatggtaacgtttacgtgttcgtttcgtttttaggggtgattttgtcgcgttatgggttcgcgtggcgcgagtagaggcgttttttcgtgtttattttgcgtaatttgggtttgggtaagaagtcgttggagtagtgggtgatcgaggaggtcgtttgtttttgtgtcgttttcgtcgattaagtcggtgggtgatgggtagaagggtataaagcgggaattgggaaggcgggggacggagaaggtaattttttattcgtattttttatttttaggacgtttttttcgttttaacggttttttggataaagtcgtgagtaacgtgatcgttttttttatttgcgggcgtcgtttcgagtacgacgattttcgtttttttaggttgttggatttagtttaggagggattgaaggaggagtcgggttttttgcgcgaggtgcggagcgagagatcgaggagtttttgtagggcgagtttttgagaggtgtcggggttggattggggttttcgaagggtaggatttgtatagatgggtttgggaaaggatattttaggagattttattgtaagaagggtttggaggaggaggggatattttagatatggtcgtgggagaggtgtgttcgggttagggggtattaggagaggttaaggattttgtattttcgtttacgttggagatttcgattttaggttttttttttgggtaaggagagagagggtggaggttggtatttggggagggatttggtgaggttagtg

SEQ ID NO: 1286 - DNA, 2282 bp, Artificial Sequence
  chemically treated genomic DNA (Homo sapiens)
ggtcgaggcgggcggattacgaggttaggaggtcgaggttattttggttaatacggtgaaatttcgtttttattaaaaatataaaaaagtagtcgggtgtggtggcgggcgtttgtagttcgagttattttcgaggttgaggtaggagaatggcgtgaattcggtaggcggagtttgcggtgagtttagagattaggttattggaatttagtttgggcgatagagggagatttcgttttaaaaaaaaaaaaagaaaaaaaaaaaagattttgattttgttgtttaggttggagtgtagtggcgcgatttcggcgtatcgtaatttttttttagttttcgggtttaagtgattttttagttttagtcgtcggagtagttgggattataggcgcgtgttattatgtttgattaaatttgtatttttattagaaagggggttttattatgttggttaggttggtttttaatttttgatttcgtgattcgttcgtttcgattttttaaagtgttaggattataggtataagtcgttacgttcggttttttgttttttttttttttttttttatttgaagattgagttttgtatttgttgtttaggttggagtgtaatggtgcgattttagtttattgtaatttttattttagtaggagagtaggaatttttagtgatttacgggtagatttgtcgttattgtgggtatttgtttttttcgcgatttttgtgttcgtttttttttttttagtatttattgtatgattttttacgttcgtttttcgttattgttagtaagtgtttcgcgcgggtatttggttgcgtttattaattcgttaagttcgttttgttacgggcgtcgtgatgtgtttacgcgttcgtttttttaggtttaaaaggcgcgttgttcggtaatagaagaaattgttggtttagtcgttggtcgagttggcggttggacgaggacgtttagagtttagttttcgagagtttaagtaatcgacggttttttattgtttttaggagcggttatttgggtattttgtgttttttttttttgttcgggtttaggtcgaggatttgttagtagggtttagttgtttggagttcgtttagtttattttttagtttattttgtttgtgggattttttcgttgtttttgttcgtggattgagtggtaggttattttataagtattcggatatttgatattcgtggtgttaagataattttaagaaggtttttcgtgattttgtaagttttgtttttttttttgggattttgtttttaatttgattgtataggtattatagtaagttagtgttgtgtgtttcgagttttagggcgttttttagtttagttattgtattgagaatatggattttttgtggggtttaggagttgggagttatttttttggggtttataatagtcggttgtttttagatttgtgtttagggaagatagtgttgagggtttttaaggagagcggggtagggatgtttgagtaggataaggattttagagtttaagagaattttggtgattagagaagggttttcgaggttatcggggatgtatcgtttgtatttcggtttttgcgggataatggaggtttttttttttttgtgttcgggttcgggtttttgtagatagatttttatgtttagaggttagaaattagatatgattagttattttagattttttggacgagttcgtgtattaatcgaaatgttatttttagtttttatagttttacgggaggtttgtcggggttaaagcggaggagggggttagttttattttattgttagttgatttttagttttttaaagatagtgagtgaggataggttttaggttgttttttcgggttatatttagtgtgaaaaggtggtagagaaagtattagggtagatattcgtttttaggaatgatttttttagattcgaggtttttaggtttagtatacgtaagttttttttgttgttatataggcgaggggagtttttgatgttgttatttttcgtagagttggggtatcgggttattgttgaagatttggattgggagaaggaggcggtattttagtgtattaagagtgtattgtaggttgaggataaggttattttagattgtagatttttacggtttttttatattttgtttttatttgtaataggggtttttggtttgtttgtcgtttttaaagtatttagtatggatgtatagtaggagagatataagttttaagattgtttgggtttagtggtttttttagtat

SEQ ID NO: 1287 - DNA, 2282 bp, Artificial Sequence
  chemically treated genomic DNA (Homo sapiens)
atgttaggggggttattaggtttaggtagttttgggatttgtgttttttttgttgtgtatttatattgggtgttttagaaacggtaggtagattagaagtttttgttgtaagtgaggataaagtgtgggaaggtcgtgagggtttgtagtttgagatggttttgtttttaatttgtagtgtatttttgatgtattggaatgtcgttttttttttttagtttaggtttttagtagtgattcggtattttagttttacgggaggtggtagtattaaaggtttttttcgtttgtgtggtagtaggggaaatttgcgtgtattgggtttagaggtttcggatttggaggagttatttttgagggcgagtgtttgttttggtgttttttttgttatttttttatattgggtgtgattcgaagagatagtttgaggtttgtttttatttattgtttttgaggaattgagggttagttggtagtgggatgaggttggttttttttttcgttttagtttcggtaagtttttcgtggagttgtaggagttggagatggtatttcggttggtgtacgagttcgtttaggaggtttgggatgattggttatatttgatttttgatttttgggtatggaggtttgtttgtagaggttcgggttcgggtataaagggagagaggtttttattgtttcgtaggggtcgaaatgtagacggtgtattttcggtgatttcggggatttttttttgattattaggatttttttggattttagggtttttgttttgtttaggtatttttgtttcgttttttttgagggtttttaatattattttttttggatataagtttggggatagtcggttgttgtggattttaaaggggtgatttttagtttttgggttttatagagagtttatgtttttagtgtagtggttgagttggaggacgttttggaattcggagtatatagtattggtttgttgtggtatttgtgtaattaaattgaaggtaggattttagaaaggaaggtagggtttgtaggattacggaaaatttttttagagttgttttgatattacggatgttaagtgttcgggtgtttgtaggatggtttgttatttagtttacgggtaggagtaacggggagattttataggtaaagtgaattgggggatgggttgaacgggttttaggtaattgagttttattggtaggttttcggtttgggttcgaataggaaggaggggtatagagtgtttaggtaatcgtttttgggagtagtggggaatcgtcggttgtttgaattttcgagagttgggttttgagcgttttcgtttagtcgttaattcggttaacggttaagttagtagttttttttgttgtcgggtaacgcgttttttaaatttgagggagcgggcgcgtgagtatattacggcgttcgtgatagagcgagtttaacggattaataagcgtagttaggtattcgcgcgaggtatttgttggtaatggcgggaggcggacgtggggggttatgtaataggtattggaaggagagaggcgggtataaaggtcgcgggaggaataggtgtttataatggcggtagatttgttcgtggattattgaagatttttgtttttttgttgaggtggagattgtagtgagttgagatcgtattattgtattttagtttgggtaataagtgtaaaatttagtttttaaataaaaaaaagaaaaagaaaaataaaaggtcgggcgtggcggtttatgtttataattttagtattttgggaggtcggggcggacggattacgagattaggagttggagattagtttggttaatatagtgaaattttttttttagtaaaaatataaatttagttagatatggtggtacgcgtttgtagttttagttatttcggcggttgagattggagaattatttgaattcgggggttgggaagggattgcgatgcgtcgagatcgcgttattgtattttaatttgggtaatagagttagagttttttttttttttttttttttttttttgagacggagtttttttttgtcgtttaggttggattttagtggtttgatttttgggtttatcgtaagtttcgtttatcgggtttacgttatttttttgttttagtttcgggagtagttcggattataggcgttcgttattatattcggttgtttttttgtatttttagtagagacggggttttatcgtgttagttaggatggtttcgattttttgatttcgtgattcgttcgtttcggtt

SEQ ID NO: 1288 - DNA, 2731 bp, Artificial Sequence
  chemically treated genomic DNA (Homo sapiens)
gggttaggtatcgttagtttacgttgagtttttcggtggcgtcgtttcgtttattttttttttcgtttcgcgtagtaaattgatttaggatagtcgtatggagagttttatttcgattttgtcgttgtttatttcggacgtcgagattgagaagtttattaggatgaaggatgaggaagtatgtggggcggcgggggcggcggaggcgggcgttagggatgttttttcgcggtgttgtttattcgtcgggttgttttcgttcgtagttgaggcgtatgtaggagatgttgtagaggatgaagtagtagatgtaggattagtgacgttcgtcgcggatatatcgttcgttttcgggacgttttcgtatttttggatattagatcggattgttttcgattcggagacgcggggttatagtttttagttgattttaatttatttttagtattatttttttttaggttattgtgtttgttttcgaggggtttggatcgtagttttcgtttagttggttttttttgattttgggggattaggagcgaagttgggcgggattttagagattcgttttttttgtttttttttcgttttcggacggttatagtatttaaatcgtaggttttgttttggtaggtaggtaaagttaggtagaagaggatttttaggattttgggtttgttttttgttttagtgttgtagaacggatttgggagtttttttttgtttgttttcgcgggttatttagcgagtgttgagattttattttttgtcgaggcgggtcgagtttttttttatttttagacgtttagcgggtagggttgggttgaattaaatgggagttttttagatataaggaggttagaggttgtaaggagcggggtcgtgatcgtttatattttttttttatagttcggttcgatttggagggttttcggggtattgggcggtgagttattttttggtaattttcggtgtcgttttttgttttcgttcgaggttttttttttttagtatcgttgtggtgtgtcgggattttgagtttaggtttttcgatgtttttattcgtatgattttttttcgttatacgatgtttcgttttttttcgttgtgaatgtcgcgttttgttttggtgataggagaataatgttggtgaacgtcgtagcgggtgttcgagtgtttcgtgtgtttttgagagcgggtgggagcggaagtttgagcggtttgcggttttcggcgatagtgtgttatttgtcgttgtagcgcgcgttcgcgcggtttttgggttatttttggttaggtcgtagtattgtggtcggtgcgggcgtggtaggggcggggcggttttatcgttcggttttttcgtttacgtttttcgttgtagagtaagtcgggttgtcgttttttcgttatgggtttcggtgagtttggagttcggtcgggttttcggttgttttttaggtcgattcgggttgagaggagttttggtcgtttggttgtagttgggagagatttgggttagatttagaggggatttttagtcggcgtgcggggtggttagggtggagaggttggcgggttatcgggacgtcgggtattaggggttggatggagtcgggtcggtagtttgggtatttagagatgtcgtttaggtgttcgtcgatcgttcggtttattgcggcgttttttttgtagggtcgcgcggggcgttgagtttattgtttttgttgttggtttcgtcgagtcgttcggtcgtaggttgttcggcgttttgtagttgcgcggggacgttcgtggattgcgggcgtcgcgggttgatttgggtttcgttgtcgatcgttttttttgtcgatataatcgagttggtgttgatcggtaataatttgacggcgttgtcgtcggggttgttggacgcgttgttcgcgttgcgtatcgtatatttgggcgttaatttttggcgttgcgattgtcgttttgtgtcgttgcgcgtttggttggtcggtcgtttcgagcgtgcgttttatcgcgatttgcgttgcgtggcgtttttagcgttgcgcggtcgtttgttgttttatttggtcgaggacgagttgcgcgtcgtttgcgttttcggttcgttttgttggggggcgttggcggcgtagtttgcgttgttgggttttgggttgttgtacgcgttgttgttggtgttgttgttgtgtcgtttgcggaggttgcgggttcgggttcgcgttcgcgtcgtagttcggttgtcgttgatcgattcgttggtggtcgagcgagtcggaatcgacgagttttgaggagagaatcggtgcgttttgaggagagaatcggcgttgggtaatacgggtttgtaaattcgataggattttgttcgaggggttttcgcgttaatttggatcggttttcgtttttttcgttgtttaattttttagatttattttatttgtaggtttagattacgtgggatagaatttttgtttattttatttcgagggaggcgaattcgtatttttaggtttgggaggattatggggtataatgcggtttagattttgttgcgttttttttttaaattttggtgttgaataaatttttttgatttggttttttttgtacgattgatttggaaatttttttcgttaaatttaggaaaaggttttaggaggcggtttaaggggatataaatatatttttatatgtttattttaattttaggggtagatag

SEQ ID NO: 1289 - DNA, 2731 bp, Artificial Sequence
  chemically treated genomic DNA (Homo sapiens)
ttgtttgtttttgaggttagggtgggtatgtgaggatgtgtttgtgtttttttgaatcgttttttggggtttttttttgagtttggcgaggggaatttttaggttagtcgtgtagagaagattagattagaagggtttatttagtattagagtttggaagggagacgtagtagggtttggatcgtattgtgttttatggtttttttaagtttggaagtgcgggttcgtttttttcggggtagggtgggtaggagttttgttttacgtggtttgggtttgtaggtggggtgggtttgagagattgggtagcggaggaggcggggatcggtttaggttggcgcgagggtttttcgggtagggttttgtcgagtttgtaggttcgtgttgtttagcgtcggttttttttttaggacgtatcggttttttttttaggattcgtcggtttcggttcgttcggttattagcgggtcggttagcgatagtcgggttgcggcgcgagcgcgggttcgggttcgtagttttcgtaggcggtatagtagtagtattagtagtaacgcgtgtagtagtttaaggtttagtagcgtaagttgcgtcgttagcgttttttagtagagcgggtcgggagcgtaagcggcgcgtagttcgttttcggttagatagggtagtaggcggtcgcgtagcgttgggggcgttacgtaacgtaggtcgcggtagggcgtacgttcggggcggtcggttagttaggcgcgtagcggtataaggcggtagtcgtagcgttaggggttggcgtttaggtgtgcggtgcgtagcgcgggtagcgcgtttagtagtttcggcggtagcgtcgttaggttgttgtcggttagtattagttcggttgtgtcgatagggaaggcggtcggtagcgaggtttaagttagttcgcggcgttcgtagtttacgagcgttttcgcgtagttatagggcgtcgggtaatttgcggtcgggcggttcggcggggttagtagtaggagtagtaagtttagcgtttcgcgcggttttgtaagggaagcgtcgtagtaagtcgagcggtcggcgggtatttgggcgatatttttgagtatttagattgtcggttcggttttatttagtttttgatgttcggcgtttcggtagttcgttagtttttttattttgattatttcgtacgtcggttggaagttttttttaagtttgatttaagttttttttagttgtagttaaacgattagagttttttttaattcgggtcggtttagggagtagtcgggggttcgatcggattttagatttatcggagtttatggcgagaagacggtagttcggtttattttgtagcgggaggcgtaggcgggagagtcgagcgataaggtcgtttcgtttttgttacgttcgtatcgattatagtgttgcggtttggttagaaatagtttagaggtcgcgcggacgcgcgttgtagcggtagatagtatattatcgtcggaggtcgtaggtcgtttaggttttcgtttttattcgtttttaggggtatacggagtattcggatattcgttgcgacgtttattaatattgtttttttgttattaggataggacgcggtatttataacggaagaaaacggagtatcgtgtggcgggaagggattatgcgggtgggaatatcgggaggtttaggtttaggatttcggtatattatagcggtgttggggagaagaggtttcgagcgagggtaggggacggtatcgagagttgttaggaggtggtttatcgtttagtgtttcgggggttttttaggtcgggtcgggttgtggagaaggggtgtaagcggttacgatttcgttttttgtagtttttggtttttttatgtttggagggtttttatttgatttagtttaattttgttcgttaggcgtttggggataagggaagattcggttcgtttcgatagaaaatggggttttagtattcgttgggtgattcgcgggagtaggtaaaggagggtttttaagttcgttttgtagtattggggtagggaatagatttaggattttgggaatttttttttgtttagttttgtttgtttgttagagtagggtttgcggtttgggtgttgtgatcgttcgggggcgggggaagggtaagggaggcggatttttgaagtttcgtttaatttcgtttttgattttttaaggttagagagggttagttgggcgggggttacggtttaggtttttcggaaatagatataatgatttgggagggggtggtgttgagaataaattagggttagttgggggttgtggtttcgcgttttcgggtcgggaatagttcggtttggtgtttaggggtgcgagggcgtttcggagacggacggtgtgttcgcggcgagcgttattggttttgtatttgttgttttattttttgtagtattttttgtatgcgttttagttgcgggcggagataattcggcgggtgagtagtatcgcggaggagtatttttgacgttcgttttcgtcgttttcgtcgttttatatatttttttattttttattttgataagttttttagtttcggcgttcggggtgggtagcggtaggatcgggatggggttttttatgcggttgttttgggttagtttgttgcgcggggcgggggggaggatgggcggggcggcgttatcgggaggtttagcgtgggttggcgatgtttggttt

SEQ ID NO: 1290 - DNA, 2284 bp, Artificial Sequence
  chemically treated genomic DNA (Homo sapiens)
aggaatattaaatttattagtttgtttttttttttttttggggtagagttatattttgtgtaatatgtattatatttttatttgttttttgattagtataaaaattaaaatatatatatatatgtatatatttatatatagatatatatatttattaagagagattaaataaagaagaaaattatgtttattggttagtagaaagattcgttattattaaggaatatgttttggtgtatgtggggataaaaagatattttgtggtttaataggttagtaagttttgtattgataaaagtaaatgggtgtttattttggttaatacggtgaaatttcgtttttattaaaaatataaaaaaaatttagttgggtatggtggcgggcgtttgtagttttagttatttgggaggttgaggtaggagaatggtatgaatttgggaggtggagtttgtagtgagtagagatggtattattgtattttagtttgggcgatagagcgagattttgttttaaaaaaaaaaaagtaaatgggtgttttttttataaggtaggttgatttttagtatgagatgtgtattgtaaagtaataagaagaatttagatattcggtgttttttttttttttttttttttaatttatgtggcggtgaatgttttgtatggggtatttttttggattaagtttttagggtatattattaggggttggggtagggaattaaaaattgtagtagttagtttttaagagtttttttaattcgtgaaagttgatgtttttattttagttgttttatttgtttttttttttaataatttttttacgtaatttttttttatttttgtttgtgtttgttttgatgcggtttataattatggttttattgattttgttttcgtgttataaaattattttgtgtttgtgatttgttttatggtattttttaagaagtggttttaattttttttgggataggtatattattatgtattatagggtaggttaggttgtaggaggagtttgtagttttggaggtttttggttttttttttatttcgttgttcgttttttagtgattagttggaatttaagatagtaatataagatgtgtcgttggtgggagtgatggagtgtttgttgagtgggtcgtagataagtatcgtgatttcggaggacgttttattatttcgtcgtaagaatatgttaacgggtgattgtttgaatgtttttagttaataggatattatttataatattttggttagttggaatggaagatgataagaaattaaatttttaatggttttttttaagggaggattttttttaggggaattaggaattttgggaaatcgttttatgtattttggtaatatttatacggagagaattggttttaaatgaatttttgagggttatataaagggtaaaagaaagagaataaaaagtaattgatattaatcgggtttttattacgtgttaagtatttagatattttatttatattacgttattttattttggttttgtttttgttgtgataaggtattattaagtttattttagaattgggaaaattgaggtatatagaggtgagttgatttggttaaggttttatttttggtgttggagttacgatttatattttaaagtaatatttttttcgtgaaatgaattatggagagagaagttgtttgggagaagtagtttttatatgtaatttgaaaggtggagaagttatagtcgtatagaggtagttgtagtaggtgtagagggaaggcgagggttgtgtaggtggtttttattgatgtttgggaattatttattttttggatatttgtagttaatattatttatgaatattttttgcggtttttgagttttcgtattttttggaagtttttttgagttttgttttttttgtttttttaataagtaaggaagtttttgattttatgtattaaatttttttttgtttgaaatattgagaagaatgatagaattttgtttgtaaagtattttgcgtaagtattatatatatgtatggtatatatatatatatatttaatttataaaggtaaatttttaagaatagaattataggttatatatgttggggatataagatattataatgataatagtaatagtatggtttttttttttaatatggaaattatttttggaataatttttataagtttgggaagaaagagattatattattttttattaataattgttttttatatataatgaaattttttttttagataaataggatag

SEQ ID NO: 1291 - DNA, 2284 bp, Artificial Sequence
  chemically treated genomic DNA (Homo sapiens)
ttgttttgtttatttagaaggaggattttattatgtgtaaaaagtagttgttggtaaaaagtagtgtggtttttttttttttaggtttgtagaaattgttttagaaatggtttttatgttggaaaaaaaaattatattgttattgttattattgtaatattttatgtttttaatatgtgtgatttgtaattttatttttgggaatttatttttgtgagttgagtatgtgtgtgtgtgtgttatgtatgtgtgtaatgtttacgtagggtattttgtaagtagggttttgttattttttttagtattttaagtaggaggggatttgatatatagagttagaagtttttttatttgttggaaagatagggagagtaaagtttagaaaagtttttaggaaatgcggaagtttagggatcgtaggaaatatttatgggtaatgttggttgtaggtatttaggaaatagatgatttttaggtattaatagaagttatttgtataattttcgttttttttttgtatttgttgtagttatttttatgcgattatggtttttttattttttaaattgtatgtgagggttattttttttagataatttttttttttataatttattttacgagaagaatattgttttagaatgtaaatcgtgattttagtattagaaatgagattttggttaagttagtttatttttgtgtgttttagtttttttagttttgaaatgagtttaatagtgttttgttataatagagatagggttaggatgaagtaacgtgatgtaggtaaaatgtttaagtatttggtacgtagtagggattcggttaatgttaattgttttttgtttttttttttttattttttgtgtaatttttagaggtttatttaaagttaatttttttcgtatagatattgttagggtatatggagcgattttttagggtttttggtttttttgggaaaagtttttttttaaagaaagttattaaggatttaattttttattattttttattttaattagttagagtgttatgaataatattttattagttggagatatttaaataattattcgttaatatgtttttacggcgaaatgatgaagcgtttttcgaaattacggtgtttatttgcggtttatttagtaggtattttattatttttattaacgatatattttgtattgttgttttggattttaattaattattgaggggcgggtagcggggtgagaggagagttagaagtttttaggattgtaagttttttttgtagtttggtttgttttgtggtatatagtaatgtgtttattttagaggggattgaagttattttttgagaaatattatgaaataaattataaatatagagtgattttgtaatacgaaaataaggttaataaaattatgattgtgaatcgtattaagataagtatagataaaaatgaagaagagttacgtagaggagttattgaaaaaaaaggtaaatgaaatagttaaaatagaggtattaatttttacgagttagaggagtttttagagattggttattgtagtttttaattttttgttttagtttttagtagtgtgttttagaggtttagtttagagagatgttttatatagagtatttatcgttatataggttggggaaaaaaaaaaaaagaaaatatcgaatatttaagttttttttgttgttttgtaatgtatattttatgttaagggttaatttattttatgggaaagatatttatttatttttttttttttgagatagagtttcgttttgtcgtttaggttggagtgtagtggtgttatttttgtttattgtaagttttattttttaggtttatgttatttttttgttttagttttttaagtagttgggattataggcgttcgttattatatttagttaaattttttttgtatttttagtagagacggggttttatcgtgttagttaggatggatatttatttatttttattagtgtaaggtttattaatttattgaattatagaatgtttttttgtttttatatatattaaaatatattttttggtagtgacggatttttttattagttagtgagtatagtttttttttttatttagttttttttgatgaatatatatatttgtgtgtgaatatatatatatatatatatattttaatttttatattggttagagagtaaatggaagtgtgatgtatattgtataaaatgtagttttattttaaggaaagaggaaaataagttaatagatttggtgttttt

SEQ ID NO: 1292 - DNA, 2519 bp, Artificial Sequence
  chemically treated genomic DNA (Homo sapiens)
gtagaggaaagggaagatgattataggattagtttattttggaatagatttttgaagggttggatttggggttaaggaataggagagaaaagttttttttatgtattttggtataattatagtgatttttaataattatcgtttttttagtaaaattgttgaaatttagaataatattttttaaattagttattaggggaaagggtaattaattttttttttttttaaatcgtttaattatatgaattaatatatagaaaattatattgtagtgtatattgttttttagtaggcgtggtggtatggaaggacgcgaacgatttcgggagtggcgggtgaggagggaaggggagcgagcgggtgcgaggtgttcgcgtttttttggggttcgggagggaaagggagagggtgtgaggtgtttgttttttcggggtttgggagggaaggtgagtaggtttaaggcgtttgttttttttggggtttgggagggaaggagagagggtgcgaggtgttcgttatttttagggtttgggagggaaggggagcgggtgcgaggtttttgtcgttttgcgaggttgcggagtttgttgtgttttttttttcgtttatttttcgatttgtaggtttacggcgtttaaggtaatagggtttttagttttggaattaattttttgggtttcggaacgtaatttatataaatttggattttgttttttattggcggggagtcgttttcgtatgtagacgtggagaagtcgtttttattcgtagtttttttcgtggatttaggtcgttttttttacgtttttttcggagtttttagatttttcgtggcgtttttggtatcgtttttattgttttatttataaagagttttagttttttttcggggggcgatttttttagttagtcgttgtatagtacgtggttatttttcgtgttttcgtcggcggggttattttcgggttacgaagataaaggcgtaaatgtcgggttaggtgggtatagttttcgggagggtgagggggacggtagggatatgggggttgtagtttatagtgaaggtgggggagatagggcgagagggcgttgttggaggtggggtgtgagggacggtttgcgatattttgggattgcggggtagaaagcgtagttttaggggaggtcggggttagaggtgaagttcgtggggagggcgagattcgggcgtaggtgtttataggcgagggcggggtttaggttttagttgggttttgagtttcggtttaggtttttatttgtggtttcggttttaatttgaggtggagtttgggattaaagtttagacgaggtttttcgtttagggtttgcgttggggattggggtggggatttgtattttgggttagtttgggtgtattttatcgggattatcggggcgggggatatgggtcgggtggttttttgggagaagagggatagggagcgtagttggtggagaggataagaacgaggggcgtagtttatttagagggttataatagagttttaggtgttgagttttatgcgttagatgaggaaagataatggaagagtttaggtttttgttggggtttgagttttagttcgggattcggtttatggtttattttttgatttgagttggggtttggggttaaggtttaggttaggatttgagtttcgggttgtagtttgggggtggggttaggttttagagtgagggtttgggtttgtttgtgttgtgtatgtttgtgaatgtattgggatgttatcgtgtgtatttatgttacgtgtgtgtacgtattagtgtgtgtatgtgtgagtgtttattgagtgtggtattgatagttaatttttttttttttatttatgttttattgttttattttggttggggtgggttttataagttttttttttgggttagttggaggtttttatgttgtttggggagagaagggaaggagagaataggttaaagatgagggtagtttggttttaattagattcggtgttacggggattaagaagtcggaggtttttgttttttgtttttggaggagtttggtttgtttttttgtttatatattgtgtgaaagtatagttgggggtatttgatatgtataggatttgtttttgtttttgtagatgttttagagaataggatagataaggggtttttttagtaagttatttttaatgtgtattgtatgttagtttataagaggggtataggggttttattaggtagtagggaggatgtaaggaagagtgtgtggggatgggggtgttgggtggggttaggtgagtgggtgtttggtttttttttagagtaaaggaaagtgttgaagagtgtgaaattgtgtgatatgttatgttttatgttttgagaatggattgtaggaataagtagatatgggggatttgatgagggttaatgggatgtttatagagataagatttggtttgagttggtgggaaaagtggagatggagttatatggaggaaattgtagagttt

SEQ ID NO: 1293 - DNA, 2519 bp, Artificial Sequence
  chemically treated genomic DNA (Homo sapiens)
agattttgtaattttttttatgtggttttatttttattttttttattagtttaagttaaattttatttttatggatattttattggtttttattaggttttttatgtttgtttgtttttgtaatttatttttaaaatataaagtataatatgttatatagttttatattttttagtatttttttttgttttgaggagaagttaggtatttatttatttggttttatttagtatttttatttttatatatttttttttgtattttttttgttatttgatggggtttttgtgttttttttgtaagttgatatgtagtgtatattggggatggtttattgaagaggttttttgtttgttttgttttttaagatatttgtagaggtaagaatagattttgtgtatattagatgtttttaattgtgtttttatataatgtgtgaataaagaagtaaattaagtttttttagaggtaggagataaggattttcggttttttggttttcgtgatatcgggtttggttgaggttaagttgtttttatttttgatttgtttttttttttttttttttttttaggtaatatgagaatttttaattggtttagggaaggaatttgtaaagtttattttaattaggataagatagtggggtataaatgggaggagaggggttggttgttagtgttatatttaatgaatatttatatatgtatatattgatgcgtgtatatacgtgatataagtatatacggtgatattttaatatatttataaatatatataatataaataggtttaaatttttattttgaaatttaattttatttttaaattgtaattcggaatttaagttttagtttgaattttgattttaaattttaatttaagttagaaggtaaattatgggtcgaatttcgaattggaatttaaattttagtaggaatttgaatttttttattgtttttttttatttggcgtatgggatttagtatttgagattttgttgtggttttttgaatgagttgcgtttttcgtttttgttttttttattagttgcgttttttgtttttttttttttaaggagttattcggtttatgtttttcgtttcggtggtttcgatgagatgtatttaggttgatttagggtgtaaatttttattttaatttttaacgtaaattttgaacgagaggtttcgtttaaattttaattttaaattttattttaaattggaatcggaattatagatggaagtttgaatcggaatttaaagtttagttggaatttgaatttcgttttcgtttgtgagtatttgcgttcgggtttcgttttttttacgagttttatttttgatttcgattttttttagaattgcgttttttatttcgtagttttagggtatcgtaagtcgttttttatattttatttttagtaacgttttttcgttttgttttttttatttttattgtgagttgtagtttttatgtttttgtcgttttttttattttttcgggagttgtgtttatttgattcggtatttgcgtttttgttttcgtggttcggaagtggtttcgtcggcggaagtacgagaagtggttacgtgttgtatagcggttggttgaggaagtcgtttttcgagaagaagttgaggttttttgtgagtggggtagtgggggcggtattaggagcgttacggagggtttggggatttcgggaggggcgtgggggaggcggtttgggtttacgggaggagttgcgggtggaggcgatttttttacgtttgtatgcgaaggcgatttttcgttagtgagagatagggtttaggtttgtgtgggttgcgtttcgagatttagggagttgattttagggttggggattttattattttgagcgtcgtgggtttgtaggtcggagagtgggcgggaaaggggatatagtaggtttcgtagtttcgtaaaacggtaggaatttcgtattcgtttttttttttttttaggttttgagaatggcgggtatttcgtatttttttttttttttttttaggttttaaggaaggtaggcgttttaaatttgtttatttttttttttaagtttcgagaaggtaggtattttatattttttttttttttttttcgggttttaggaaaacgcgggtatttcgtattcgttcgttttttttttttttttattcgttattttcggggtcgttcgcgtttttttatgttattacgtttgttgagggatagtgtgtattgtagtgtagttttttatatattaatttatgtggttaaacgatttagaaaaaaagaagattggttgtttttttttttagtggttaatttgaagagtgttgttttaaattttaataattttattgaggaagcggtaattgttaggagttattatgattatattaaggtatatagaagaggttttttttttttgttttttagttttaggtttagttttttaagaatttattttagaataagttgattttatagttatttttttttttttttgt

SEQ ID NO: 1294 - DNA, 2452 bp, Artificial Sequence
  chemically treated genomic DNA (Homo sapiens)
gaatattttatttaaaagaaggtttttttatagagtatattaggacggatttttagaattattggttggttgtattttatttttaggtttttgattggagatttttttatgtatcgtttattgatttttgtggttgaaagttttgttgttttagttagatggtaaattatattttaaggatagatatttgttatatatgtttgtgttttttagagttgtatttagtatagagttggttataaagtggtttttttaaatttttgtggttttagtttaataaatatttgtaattttttatagttgaataaagatgaatgattttaattcgtttaagttaggttggattttttttattttgattatatatttggttttataaagcgttgagcgataggaagaaagaatggtttttattggtcgagttgaagggtttcgagtatattttttttaatagtataatttggttttttgatataaaaggtagggaaaggaaggggtagcggtttttaatgaatagagacggatggcggtcgggtttttgtcgttattgttgtgtttattgggtagattagttatattttttggtttaggttaaagattagggtagatgatatatggggtatttataggagagttgtgtttagggttttttgttggtttcggaattttttagaatggttttttatatatttttcgttttttttttttttttttgtttttttcggaattttttagagtgggtttttatatatttttttttttttttttttttttgttttttttttttttttagtgaaaggatttttttggtaagagtgttaggttttagttgtttgtgttttgggaaattataagattttttttttttttttttttagttaggattatatatgtagagttatttggtttttttggtttgcgtagttgttgtcggtcgggtcgggggattatgttaggtagtttagttagaggtgagttgggttataggggtgagttgttaggtttgtttatttttttttttggtgtgatttttttaagtttaatttttagggattttttttaggaatgttgagagtattagttgtttcggttatgttaggtatttggttattaggtttttttttattttaggggtaattatcgttagagggaaaaacggaaatattaggttatttgtgatttgtatatttatttttcgtttagagagataagtaggaggttaggggaatagatgggattgtgggaatagttaagggtagagggtgaagggcggcgattagaaggaaagacggaatgtttatatattttttgtcgttttcggttttagtcgtggaggaagcggggttcggaggatattgtattagataggttttgtttagaaaattggaaaagaataaatattgattataagagtgtaggagaatgggtttttttattattaaaaataggtatttagttaggcgaagtgatttacgtttgtaattttagtattttgggaggtaaaggtaggaggatcgtttgggtttaagagtttgagattagtttgggtagtatggtgaaatttagtttttataaaaaatattaaaaattagttgggtgtggtgacgtgtttgtggttttagttattcgggtggttgaggtgggaggattgtttgggttcgggaggtcgaattatgtttatattatggtattttagtttggatgatagaatgagattttgtttttaataataatagtaataataataataaaatatatatttattagttatgattttgttttataggataattggggtaaaaatgtttttgggtgaaattgggtaatttaatttgaaaggtttgggaaatatggtttaattttagtttcgttcgttatttataggttaagtggaggttgcggtttataatatattggatattagatattattaatgtttttattttataaatgggaaaattatggttgagaggttatttgattttttaagtttatttagagacgtggggatgggtcgagttttagagtttgggttttgttttgttttattttatatagtacgaagttttttggttaattaaggaaggagtgtaaggtgattgaagaaaataaaaataaatagaattgatataaaaaataaataaataaaattgagtgttaaagaaggagaatttgggggttgaggttgtggttgtagagtgggagtggggataattaacgttgggtttttgagtgtttttggaagggcgggttttggtgtttagagcgtttggtgtttattttttttttttttttagggtttttgtttgagagtttttttatttatttttggttgttggggtatttgatattttttaaaatataatttttatatttttaatagtgggttgcggaggagttaggattagagtttttagtttagatttttttttttgaaaggatacggttttag

SEQ ID NO: 1295 - DNA, 2452 bp, Artificial Sequence
  chemically treated genomic DNA (Homo sapiens)
ttaagatcgtatttttttagggaaggaaatttgagttagaggttttgattttgattttttcgtagtttattattaagggtgtgaaaattgtgttttggaaaatattaggtgttttagtagttaggagtgggtagaagagtttttagataggggttttgggggaaaggggaaggtgggtattaggcgttttggatattagggttcgtttttttagagatatttaggagtttagcgttgattatttttatttttattttgtagttatagttttagtttttaaattttttttttttggtatttagttttgtttgtttgttttttgtgttagttttgtttgtttttgttttttttagttattttgtattttttttttagttggttagggaatttcgtgttgtatggggtggagtagggtaaggtttaggttttggagttcggtttatttttacgtttttgagtgaatttgggagattaggtgattttttagttatggtttttttatttgtagaatgaaggtattagtgatgtttagtgtttagtatgttatgaatcgtaatttttatttggtttgtgagtggcgagcgaggttgaaattgggttatgttttttagattttttaaattaggttatttagttttatttaagaatatttttgttttaattattttgtaaagtagagttatagttagtgagtatgtattttattattattattattgttattattagaaatagggttttattttgttatttaggttggaatgttatggtgtgaatatggttcgatttttcgggtttaagtaatttttttattttagttattcgaatggttgggattatagatacgttattatatttagttaatttttggtattttttgtagagattgggttttattatgttgtttaggttggttttaaatttttgggtttaagcgatttttttgtttttgttttttaaagtgttgggattataagcgtgagttatttcgtttggttgaatatttgtttttgatgatggaagggtttatttttttgtatttttgtaattaatatttgtttttttttaattttttaaataagatttgtttggtgtaatgtttttcgagtttcgttttttttacggttggagtcgggagcggtagggaatgtgtgggtatttcgtttttttttttgatcgtcgttttttattttttgtttttggttgtttttatagttttatttatttttttggttttttgtttgtttttttaaacgaggagtgagtatgtagattataaataatttggtgttttcgtttttttttttggcggtggttgtttttggagtggaaggagatttggtggttagatgtttgatatggtcgggatagttggtgtttttagtatttttggggaaggtttttggggattggatttgaggggattatattaagaagaggggtgagtaggtttggtagtttatttttgtgatttagtttatttttggttgggttgtttggtatgatttttcggttcggtcggtagtagttgcgtaggttaggggagttaaatggttttgtatgtgtaattttagttaaaaagagaaaggggaaagattttgtaattttttaggatatagataattgaaatttgatatttttgttaaggaagtttttttattgagagagagagagagatagagaaggagggagggaggggagtgtgtgagagtttattttggaaggtttcgggagagatagagagaaggagggagggcggggagtgtgtgagaggttattttggaaggtttcggggttagtaggaagttttgagtatagtttttttgtgagtattttatgtgttatttgttttagtttttggtttgagttaggagatgtggttggtttgtttagtgggtatagtagtggcggtagaggttcggtcgttattcgtttttgtttattgggagtcgttgtttttttttttttttgttttttgtgttagggagttagattgtgttgttgagaaaaatgtgttcgaagttttttaattcggttagtaagagttattttttttttttgtcgtttagcgttttgtaaaattaaatgtatgattagagtggaaggagtttagtttgatttgaacgggttagggttatttatttttgtttagttataaggaattgtaggtgtttgttaggttaaagttatagaaatttggggaggttattttgtgattagttttgtgttgggtgtagttttgggggatataggtatgtatgataagtgtttgtttttgaggtgtagtttgttatttggttggagtaataagatttttagttataaggattagtgaacgatatatgaaggagtttttaattaagaatttgaaggtgggatatagttagttagtggttttgggggttcgttttggtgtgttttgtggagaagtttttttttaggtgaaatgttt

SEQ ID NO: 1296 - DNA, 2410 bp, Artificial Sequence
  chemically treated genomic DNA (Homo sapiens)
taagtagggtatatgtgatttttgttagttaaataaataattttttttaggttttttttgtttttgtagagatagggttttgttgtattgtttagtaggagtgtattaatggggatttatagattattgtagttttgaatttttgggtttaagtgatttttttattttagttttttaagtaattgggattataggtttatattattatatttagttaattaaaataaaatgtttggataggtatagtggtttatatttgtaattttagtattttgggaagttgaggtgggcggattatttgaggttaggagttcgagattagtttggttaatatggtgaaatttcgtttttattaaaagtataaaaattagtcgggagtggtggtaggagtttgtaattttagttagttgggaggttgaggtatgagaattatttgaatttaggaggtagaggttgtagtgagttgagattgtgttattgtattttagtttggatgatagagtaagattttgttttaaaaaataaataaataaaaaaataaataaatttttgtttagtttgggcgtagtggtttatatgtgtaattttagtattttgggaagttaaggtgggtagattgtttgagtttaggagtttgagattagtttgggtaatatagtaaaattttgtttttataaaatgtataaaaattagttaggtatagtggtgtatatttgtagtatttgtagtggaaggtttaggtaggaggattttttgagtttgggaggtagaggttgtagtgagttgagattgtattattgtattttagtttaggtaatagaataagattttgttttaaaaaaataattttttttttttttttttttgtagagatggggttttgttatgttgtttaggttggttttaaattgttaattttaagtaatttttttattttggttttttaaagtgtagggattataggtgttagttattgtgtttggttttttttagggttggtgaaattttttgttgtttattttggttcgaggaggtttaggggtttcggagggggattagtagaggtaggtttttggttgagggagagtgagggtgtgtttaggattttgcgggtgtggttagtatttggtgaatgtatagtcgattcgtaggtttagtttttggcgagtatttattgagagcgtttcgttgtggttaggttcgtttaggtaggttatggtattatagatgtttgtgttcgtgatggagttaaatttggttcggaatacggttttttcgttattatgggttttgtttatgacgggtagaatagtattaagaatttgggggtggggagtggttagttgtgatttattttttagatttttgttatagttttttattttattgtgaagtttggttttttttaggaaagaatacgtgtgttcggtttttttttttgtttttgttagatttttttttatttttttttttgtatttgttagatttttttttatttttttgtttttttagaagttttgagtattttataatattttattatatggttttttttatttttatttagaaatatattcgaatattttttttttattttcgtttttttttttaattttttgtttttatttttattaaattaggaaatgttattgttaagtatatgagggattttttagtttttaaatttattttatgtgatacgattttttgttttttaggagggagggtttggaggggtgggtggaaattttaagaggttgaagaaaagatagggaaggaaaaaagaatgaaggggaaaggaaatgggtaagagtaggaaggttacgggtggttttagtttgtggtgggggtagttcgggttaaagtatagtaggggttttggagtcgagatttattaggaaggtcgtgtagtgggattagggtcgtcgtcggagtttggttacgtagtttttttattgggaataagtggttttatttttgaagggagaaagttttatgagttgtttttattttttatttttagatgtaaaggtttttagggaggagtcgttttgtaggggaggagagggtatttgggaagagatagagtgtgatcgtatttgttgagggtgttgtattgtaacgttaggtgttttagttttgttttattgattagtttttgagttacgggtgagagttgggggtataggagtacgggggcgatttatagaataatagtttgaagggtattaagtgagattagtagttatggttattgtgagggtattatggtcggggtaagtatggggtatggggtgtgtatagggagtagttgttatttgtttttttgtagggtttttagggttggttggaggtaggaggtattttggatgaggtaggagatgagtagagcgaggtttgtaaaaggagt

SEQ ID NO: 1297 - DNA, 2410 bp, Artificial Sequence
  chemically treated genomic DNA (Homo sapiens)
gttttttttgtaggtttcgttttgtttattttttgttttatttaggatgttttttgtttttagttaattttgggagttttgtagagaagtaggtggtagttgttttttgtgtatattttatgttttatgtttgtttcggttatggtgtttttatagtggttatgattgttggttttatttggtgttttttagattgttgttttatgggtcgttttcgtgtttttgtatttttagtttttattcgtggtttaagagttggttagtgagatagagttgaggtatttggcgttgtagtatagtatttttagtaaatgcgattatattttgtttttttttagatattttttttttttttgtagggcggtttttttttgggggtttttgtatttgggaatggagaatgggggtagtttatggggttttttttttttagaaatgaagttatttatttttagtaaggaagttgcgtggttaggtttcggcggcgattttagttttattgtacggtttttttagtgagtttcggttttaggatttttgttgtgttttagttcgagttgtttttattataagttaggattattcgtggtttttttgtttttgtttatttttttttttttttatttttttttttttttttgttttttttttagttttttaaaatttttatttatttttttaaatttttttttttagaaggtagggaatcgtgttatatgggatgggtttggggattaagaggttttttatgtatttggtagtagtattttttgatttggtggggatgaaagtagaggattagaagagagggcgggagtaagaagggagtgttcgagtatgtttttagatgggagtaaaggaagttatgtggtggggtgttgtggagtgtttagggtttttggaaaggtagggggatagaggagggtttggtaggtgtaggaaaggggatagaggagggtttggtaggggtaggagagggagtcgagtatacgtgtttttttttggaaggaattaggttttatagtggggtggggagttgtggtagggatttgggaggtgggttatagttggttattttttatttttaggtttttgatgttgttttgttcgttatgaataaggtttatggtggcgagaagatcgtgtttcgggttaggtttagttttattacggatatagatatttgtaatgttatggtttgtttaggcgagtttgattataacgaggcgtttttagtggatgttcgttaggagttggatttgcgaatcggttgtgtatttattaggtgttggttatattcgtagagttttgggtatatttttatttttttttagttagagatttgtttttattggttttttttcggggtttttaggttttttcgagttaggatgagtaataggggattttattaattttgaagaaggttaggtatagtggttaatatttgtaatttttgtattttgggagattaggataggaggattgtttgaggttggtagtttgagattagtttgggtagtataataagattttatttttataaaaaaaaaaaaaaaaaaaattatttttttgagatagagttttgttttgttgtttaggttggaatgtagtggtataattttagtttattgtaatttttgttttttaggtttaagagatttttttatttgagttttttattataggtgttataggtgtgtattattatgtttggttaatttttatgtattttgtagagatagggttttattgtattgtttaggttggttttaaatttttgagtttaagtaatttgtttattttggttttttaaagtgttgggattatatatgtgagttattgcgtttaggttaaataaaaatttatttatttttttgtttgtttgttttttgagatagagttttattttgttatttaggttggagtgtagtggtataattttagtttattgtaatttttgttttttgggtttaagtgatttttatgttttagttttttaattagttgggattataggtttttgttattattttcggttaatttttatatttttagtagagacggggttttattatgttggttaggttggtttcgaatttttgattttaggtgattcgtttattttagttttttaaaatgttgggattataggtatgagttattgtgtttgtttaaatattttgttttaattagttgggtgtggtggtgtgagtttgtagttttagttatttgggaggttgaggtgggaggattatttgagtttaggagtttaaggttgtaatgatttgtgaatttttattaatgtatttttgttgggtaatatagtaagattttgtttttataaaaataaaagagatttaaagaaaattgtttatttagttgatagagattatatatgttttgtttg

SEQ ID NO: 1298 - DNA, 2424 bp, Artificial Sequence
  chemically treated genomic DNA (Homo sapiens)
taaggatttagtaaattttagttattgtttttattaggtcgttaatataaatgtttgatgagtgaatgaatgattttcgtttgggatttggttgtaaataaagtcgagttgtattttagggaggggtggagattttgtttttgtttgtgttttgaagttagtagggttttgttttaggatatttttatttatttttttgtttagtaagtggaggtgaggggcgtggtttggggtttttcgggaggttatggttattgggttattcggagtttgtgtttatatgaggtttggtagagggaggtttttggttatttatttttgtgttcgggtttattattattggtttttgcgttttttggattttgttttgtacgggtcgtatttttttcgtcggttttcgtttatgttttagttttagttttagttttaatagcggtttttttttgttttttttttgatattttttttgtcgtttaggttcgtagttcgagtgtcgtcgttatggtttcgtcgtagttttgtcgcgcgttggtgtcggcgtaatgggtggcggaggcgttgcgggtttcgcgcgttgggtagtttttgtagttgttggacgttttttggtatttgtcgaagttggggcgcgacgcgcgacgcgagttcgaggagcgttatatttcgggcgtcgtttttttcgatatcgattagtgtagcgatcgtatttcgttttacgattatatgttgttcggggtcgagtatttcgcggagtacgtaggtcgtttgggcgtgggcgcggttatttacgtcgtgatttacgacgttagcgattagggtttttatttcgtttcgcgcgtttggtggatgtttcgcgttttcggttattacgtcgtgttattgtttgatggcggttttcgttattggttgcgttagaatttttcgtttagtttcggtaagagttaatttgttttcgtcgagtttcgcgtttagttcgatttcgtttttattaagatttacgaggatattaaggagaatttggaatttcggcgtttttaggtggtggattttcgagttattggtaggtttcgcggtatcgagttcgagtttcgagacggtaacgcgggggaagggggtaggaggtcgtcgggggcgcggtttttacgttttgagtagtgttttggatttgattttttttttatttttttaatttattttgtttttattttttttttttttttttttttttttttttttttttttttttttttttttttttttttttttatttttgttttttttttatagggtttggttttatcgtttaggttggagtgtagtggtataattatggtttattgtagttttaattttttgggtttaggtgatttttttcgtttagtttgattttgtttttaaaggttattgtatgaggtggggaaggagatttgatttttatttgtttcggtgattttgtttgttaagtagaattataatattggtttttttttttttgtgttttgggtagtgattttttttagtttattgggaattttggttgtttaaatagtttttaatttaatattagaggtgtggggggttattgtggaatgttggggggtaggttttagtatgagagaaaaatttagagggatggttttgattagggttatttatgtttttgaggatggtggaatgaaggtagagtcgggggttgtataaaggaaagttttttttagggattaaagtttggagaattgagggtggaagggggattaaatagaagtgggtagggtagagttttttgtttgtgggttggatttttttaggtaagaagtttgtgggtaagttttgtataatgcgaggaggagtttttataaagtaggttggttagtggttacgttagtgtgagttttttaaatatttcgtgtaagtagatattgttattgtatagaggaggaaatggaatttggtttaaggttttaagaaataatttagtcgggatttagattcggtagtttgcgtatttaatagtcgtgagtaattaggaattttttagtttttttttttgtgtttttaagagtgtaagaaattgattattgtttttagagagttttttgaagagtatttttatggttatagattgggtttggagtcgtttgggtttattatgggttagtattgttttggatggtttgagggtaaggattgtttttgttttttatgtattttgaagattagtttagtatttggtatagagtcgatgttttagagaggtttggtgaatatagaaggtttttgttgtatggaattttgtaaagtaatgttggtgttatcggaattataggaaatagttgatatttaattatttttgaatttatataggtgttagttttatgtggtttagtttaatgagagtattattttaattttgttgggtttttt

SEQ ID NO: 1299 - DNA, 2424 bp, Artificial Sequence
  chemically treated genomic DNA (Homo sapiens)
ggagaatttaataggattaaggtggtgtttttattaggttgaattatatgaaattgatatttgtgtaggtttaaaaatggttggatattagttgttttttatggtttcggtaatattaatattgttttgtaggattttatgtaatagggattttttgtatttattaaatttttttggaatatcgattttgtgttaggtattgagttaatttttaggatgtatgaagagtagggatagtttttgtttttaggttatttaaaataatgttggtttatggtgagtttaagcggttttaaatttaatttgtagttatgggaatgttttttagagagttttttaggggtagtggttagttttttgtatttttgaaggtataagagaaagggttggggagtttttggttgtttacggttgttaagtgcgtaggttgtcgagtttgaatttcggttgggttgttttttgagattttgggttaggttttatttttttttttgtgtaatgatagtatttatttatacgggatgtttgaaagatttatattagcgtgattattgattagtttgttttgtggggattttttttcgtattatatagagtttatttataggttttttgtttgaggaaatttagtttataggtagaaggttttgttttatttatttttgtttaattttttttttatttttagttttttaagttttggtttttggaagagatttttttttatgtagttttcgattttgtttttattttattatttttaggggtatgggtagttttgattaggattatttttttgggttttttttttatattggggtttgttttttaatattttatagtgattttttatatttttagtgttggattgagagttgtttgggtaattagggtttttaatgagttagggagagttattgtttaaagtataggaggggaagggttagtattatggttttgtttaatagataaagttatcgaggtaagtggaagttaaatttttttttttattttatgtagtggtttttaaaggtaaggttaggttgagcggggagggttatttgagtttaggaggttgaggttgtagtgagttatgattgtgttattgtattttagtttgggcggtagagttagattttgtgaaaagaaggtaagggtagggaaaagggggaaaggagggaagggaaagggaaggaaaggaaagaaaaaaggaaaggaaatgaaagtaagataaattaaaaaaataaaagaaaggttaagtttagggtattgtttagggcgtagaggtcgcgttttcgacgattttttgtttttttttttcgcgttatcgtttcggggttcgggttcggtgtcgcggaatttgttagtggttcgggagtttattatttggaagcgtcgggattttaggttttttttgatgttttcgtaggttttgatgaaggcggggtcgagttgagcgcggaattcggcgggagtaggttggtttttgtcggagttgagcgggaggttttggcgtagttagtggcggaggtcgttattaagtagtgatacggcgtggtggtcgaaggcgcggaatatttattagacgcgcggggcggagtagaggttttggtcgttggcgtcgtagattacgacgtgggtggtcgcgtttacgtttaggcggtttgcgtatttcgcgaaatgttcggtttcgggtagtatgtggtcgtagggcgaggtgcggtcgttgtattggtcgatgtcgaagaaagcggcgttcgggatgtggcgtttttcgaattcgcgtcgcgcgtcgcgttttagtttcggtaggtattaggaggcgtttagtagttgtagaggttgtttagcgcgcggggttcgtagcgttttcgttatttattgcgtcgatattagcgcgcggtagagttgcggcgaagttatggcggcgatattcgggttgcgggtttgggcgatagggaggatgttagaagggaagtagggagaggtcgttgttggggttagggttggggttggagtatgggcgagggtcggcgggggaggtgcggttcgtgtagggtagagtttagggaacgtagaaattagtggtggtgaattcgggtataaaggtgggtagttaggggtttttttttgttaggttttatataaatataagtttcgagtgatttaatgattatgatttttcggagagttttaggttacgttttttatttttatttgttgggtaggagggtgggtggaggtattttagggtaaggttttgttggttttaaggtataaataggggtaaagtttttatttttttttaagatgtagttcggttttatttgtaattaagttttagacggaagttatttatttatttattaagtatttatattggcgatttaataggaatagtagttggaatttattgagtttttg

SEQ ID NO: 1300 - DNA, 2313 bp, Artificial Sequence
  chemically treated genomic DNA (Homo sapiens)
ttatttttatttggagggtagtgcggtattttagggcgttatttttttagagtcgtttgaggttagtagagaggaagtgttgtaggagtcgtgagtgggcggttcggtttattattgggagtagttgttttgttgatgttggtagggtgtatttgttttaaataaagaatgattagagattatatttgtaatttttacgttatgagtagttgaggtaggaggattacgttaggttaggagtttgagattagtttgggtaatatagttaaagtttatttattttttaaaaaaatttaaaaattagttaggtgtgttggtatatgtttgttattttaattgtttaggaggttgaggtggattatttgagtttaggagttcgaggttgagtgatttattattatgttattgtattttagtttgggtgatagagtgagatttatttttaaaaaaaaattgttttagaaatgaatagttaggtttttaaagtttgttagtttttgagggtcggggaaggcgggtgtttggagaatagttattttttggtttagtttggttagagtttgtattatagtgttttaggtttagttaggttgttagttttgggttgggaggagggcgaagggtcggttaaggagatttttttttatattgtttttttatttttgtttagtagttgtaggagaattagtttttttgatatttagggggagaaatttagaattaagagtagaaggtagaaatgaaaggatttttttagtgaaaggttagagtggttttttttgtttttgtttaaaaatggtttgtgttgaattatgataaggttaaatgtattaaggtagtagaaatagggggagggtagggggagggtacggggacggtttttgagaaatagaggaataggttaggtcgtagggtttcgggggtagtacgtgttttaaaggtggtgaggggaggggcgatattattagggtagggtttagtttaggtatgtttcggtggataggggagttgttaggattaagttggatggagttaggtcgttttgtggtttttggggagggtttttagagggttgtcgggcgaagggagttttttttaaaacggttttttgagttttgatgtatatatatgtagtttatttttaagtttagcgttttattagtttatcgtttcgttttttttagtatattcggtgcgtagtcgcgattagtttaatcgtggtatttttttatcggttttgagttttggcgtgtttttttacgatattttttgggtacggagttgtgtcgataggtttttgtgattggttgggtatgttttcggggtttgttcgcggggtagcgtgttttagagtttggttgtacgaagcggtgttgacgggtaaattcggttttgttttttttttcggcggttgagggttggtttcgcgttttatttgttagtgatgggatcgtgttgtcgtggacgttcgtgtcgaggtttgtgtgtggatagcgtttagattttttggttgcgcgttcgggcgtgtgttgggtttatggattttgcgtttagttttttgaggagtcgtcggttgtttgtagtggtcgtattatatacgttttcgttagcgacgcggagggtttgatttttttcgatttagtagtttatggtgtttgtttttagtggtcgtcggcgcgaggcgggttcgtgtttcgtttagttgaggtttacgttttttcggtgttcggcgttttggtatgagtttattggtcgtgtgtggtttttttttggagaaatgtttaaaggttttttgtttaatcggtttttttttttttatggtggagttgtgggagttttgggtatattttgggtataggattttttagggacgtggtttgagagggagttttgtggtgggttgggtttgtgttttgtttgatttggggttgtgtgggtgttgatcggggtggggttggttttcgggggtagtttagaagggtttttgtttattttttatatagtttaggattgtggtatagtagtttgtttagatttgttgtgtgatttgaattttgtgttttttgttttgtgttttttggggtttgtagcgttgtttggaagtttttttttgttcgttttttagttataggaggtttttttttgggttgtagaatttatagagttagacgttttttgggtttttagcgtttttttgtataagtggggaaattaggttatggggtttaggtagtgtggaaggcgttgtaggagttgtttagggtgtggggttttttagttttagtgaagagtggtattggggtttgttatagg

SEQ ID NO: 1301 - DNA, 2313 bp, Artificial Sequence
  chemically treated genomic DNA (Homo sapiens)
tttgtgataggttttagtgttattttttattgaggttggaggattttatattttgggtaatttttgtaacgttttttatattgtttgggttttatgatttagtttttttatttgtgtaggggggcgttgggggtttagggggcgtttggttttgtggattttgtagtttagagggaggttttttgtaattggagaacgggtaaggaggagtttttagatagcgttgtaggttttaggggatatagggtaggaggtatagggtttaggttatatagtaggtttgagtaagttgttgtgttatagttttgggttgtgtggggagtggatagaggtttttttgagttgttttcgagagttagttttatttcggttagtatttatatagttttaggttaggtaggatataaatttagtttattataaagtttttttttaaattacgtttttgaaaagttttgtatttagaatatgtttagaatttttataattttattatgaagaggaaagggtcgattaaataaggggtttttgaatatttttttagagaagagttatatacggttagtgagtttatgttaggacgtcgggtatcggggaaacgtgaattttaattgagcgagatacggattcgtttcgcgtcgacggttattgagagtaaatattatgagttgttgggtcgaggggaattagatttttcgcgtcgttggcgggagcgtgtgtgatgcggttattgtaaatagtcggcggttttttaaagagttgaacgtagagtttatgggtttagtatacgttcgggcgcgtagttagggggtttgagcgttgtttatatatagatttcggtacggacgtttacggtaatacgattttattattaatagatggaacgcggaattagtttttaatcgtcggagggagagataaaatcgggtttattcgttaatatcgtttcgtatagttaaattttgagatacgttgtttcgcgggtaaatttcgaaaatatgtttagttagttatagagatttgtcgatataatttcgtgtttaggggatgtcgtggaggggtacgttagggtttagggtcggtggaaaggtgttacggttagattggtcgcggttgcgtatcgaatgtgttgggaagaacggaacggtagattaatggaacgttagatttgggggtgagttgtatgtgtgtgtattagagtttaggaaatcgttttggaaaggatttttttcgttcggtagttttttgggaattttttttaggagttatagggcggtttggttttatttagtttggttttggtagtttttttgtttatcggagtatgtttgggttgggttttgttttgatggtgtcgtttttttttttattatttttggagtacgtgttgttttcgaggttttgcggtttgatttgtttttttgttttttaggagtcgttttcgtgttttttttttgttttttttttgtttttgttgttttagtatatttggttttgttatagtttaatataaattatttttaaataaaaataagagaaattattttgattttttattgagaaaatttttttatttttgttttttgtttttgattttgaatttttttttttaaatgttagaggggttgatttttttgtagttgttgggtaggggtggggaggtagtgtgggaagaagtttttttagtcggtttttcgttttttttttaatttagggttggtaatttggttgggtttggggtattgtggtgtagattttggttaggttggattaaagaatagttgttttttaggtattcgtttttttcggtttttagaggttggtaggttttgggagtttggttgtttatttttaaaataatttttttttagagatgagttttattttgttatttaggttggagtgtagtggtatgatgatgggttatttagtttcgagtttttgggtttaagtgatttattttagttttttgagtagttggaatgataggtatgtgttagtatatttggttaatttttaaatttttttgagagatagataggttttagttatgttgtttaggttggttttaaatttttggtttgacgtgatttttttgttttagttgtttatgacgtgaggattataggtgtgatttttgattattttttatttgaaataggtgtattttgttagtattagtaagatagttgtttttaatggtaggtcgggtcgtttatttacggtttttatagtattttttttttgttggttttaggcggttttggaagaatgacgttttaagatatcgtattgttttttaggtgggggtgg

SEQ ID NO: 1302 - DNA, 2410 bp, Artificial Sequence
  chemically treated genomic DNA (Homo sapiens)
aattgtttgggaaattttattatagtttttggggataagatttgtggtttgttttgttttgaggggtaggagaaaagggggtaatggttcgtaggggtagacgggtaggagtagagtagggggcgaaggtatatttagaatggtaaggaaggggggttagtcgtgagatagtaggggaaggttcgttgttgggttttaaagatgtttggtagaaaaaattttaggttggaaaagtaagcgagagaagttggagggtggtatgtgggagatagttgggggtttatttttgtattgttagttttagttttttatttttatttggatgatgaggtttgagatatttttattgttatttgggagaggttttgggaagggaagattttatagagttatgaggggattaatttttttggtgaattaagttttttgatatttttagagttgcggtgttttgggattttagttttgaaggagaaaggaaggaaggaaaagaggaaaggtttatgtagataatttttttaggttgttgagttttaatagatagtttttgtttttgttttatttaagaagtttaggtttagaagatattaattaaggaaattttcgttaggaagtttggggtagggagagttgttggtttgattagggtatagtcggtaaaagtttttataagatagttatttatagatatgtttaagaattagtatatagtttttaattagagatttttaaaatgaaatatttagggttatatataggaaaagtacgtatatatatatatatatatatatatagatatttatttttgtgtttttttggttatgttgacgagtttttttggtgaagttcggggtttatagagtaatttttgtagataattgtggtttttgtttttggtgtttgtaggaggtaggtatgttgtgtttttttaagatagatggtttagggtattttggtaggatttattaggaaatttatggagaagggaaaagggataagattagtaatagtgaagggagggagaatggtgggagaggattttagatgaacggtgggtcgttggaggttgagtatgttagtaggatgttagtttttagagtaaagtttatgttaaatagttaacgtttgttttttttgtttttaggattattttttcgtacggggagtattttttatattaatattattatgttttcggtgttcggtattatttgttttttgggtattatcgggaattttacggttattttcgcggtcgtgaagaagtttaagttgtattggtgtaataacgttttcgatatttttattattaatttttcggtagtagatttttttttttttttgggtatgttttttatgatttattagtttatgggtaatggggtgtggtattttggggagattatgtgtatttttattacggttatggatgttaatagttagtttattagtatttatattttgatcgttatggttattgatcgttatttggttattgtttattttattttttttacgaagtttcggaagttttttgtggttattttggtgatttgttttttgtgggtttttttttttattagtattatttttgtgtggttgtatgttagatttattttttttttaggaggtgtagtgggttgcggtatacgtttgtttaatttagatattgatttttattggtttattttgtattagttttttttggtttttgttttgttttttgtggttattatagtcgtatacgtgaggattttgtagcgtatgacgtttttagtggttttcgttttttagcgtagtattcggttgcggataaagagggtgattcgtatagttatcgttatttgtttggttttttttgtgtgttgggtattttattatgtgttatagttgatttagttgtttattagtcgttcgatttttatttttgtttatttatataatgcggttattagtttgggttatgttaatagttgttttaatttttttgtgtatatcgtgttttgtgagacgtttcgtaaacgtttggttttgtcggtgaagtttgtagtttaggggtagtttcgcgttgttagtaacgtttagacggttgacgaggagaggatagaaagtaaaggtatttgatattttttttgttattttgtatatttttaagttagggtattataatacgttatcgggagagatgttgagaaaaatttaagatcgttcgggaaatgtaggaaggtcgggttgtgaggggttgttgtaatgaaataaatatattttatggggtttatacgttgttggggaggtttggagttaggtttggggtttttagatattagaaatttttttgggggagtaggatgagatttttggatagaatagaagttgagtaagagaatatgttggtttggataatcggttg

SEQ ID NO: 1303 - DNA, 2410 bp, Artificial Sequence
  chemically treated genomic DNA (Homo sapiens)
taatcggttatttaaattaatatgtttttttgtttagtttttgttttatttaaaggttttattttgtttttttaaggggatttttgatatttgaaaattttaaatttgattttaggtttttttagtaacgtgtgagttttatggaatgtatttattttattgtaataattttttataattcggtttttttgtatttttcgagcggttttgggttttttttagtatttttttcggtggcgtgttgtggtgttttgatttggaggtgtgtagggtggtaggggaagtattaggtgtttttgttttttgtttttttttcgttagtcgtttgagcgttgttgatagcgcgaagttgtttttgggttgtaggttttatcgataggattaagcgtttgcggaacgttttatagagtacgatgtatataaaggggttgaggtagttgttggtatagtttaagttgatggtcgtattgtataagtagataaaggtgagggtcgggcggttgatggataattgggttagttgtagtatatagtagggtgtttagtatataaagaagattagatagatggcgatggttgtgcgggttattttttttgttcgtagtcggatgttgcgttgggaggcgggggttattgaggacgttatgcgttgtaggatttttacgtatgcggttgtgatgattataaaaggtagggtaaaggttaggaaaaattggtatagggtgaattagtagaggttagtgtttgggttgggtaggcgtatgtcgtagtttattgtattttttgggaaggggatgagtttggtatatagttatataggggtgatgttgatgaaggagagggtttataggaggtagattattagggtggttatagagggttttcggaatttcgtggaagagatggggtggatagtggttaggtagcggttaatggttatggcggttaggatgtaggtgttggtgaattgattattggtatttatggtcgtgatgagggtgtatatggtttttttaaagtgttatattttattgtttatgagttggtggattatgaagggtatgtttaggagaaagaggagatttattatcgagaggttgatgatgaagatgtcggggacgttgttgtattagtgtagtttggatttttttacgatcgcgaagatgatcgtggagttttcgatgatgtttaggaggtagatggtgtcgaatatcgaaggtatgatgatgttgatgtaggagatgtttttcgtgcgaggaggtgattttggggatagaaggagtaagcgttggttgtttgatatgggttttgttttgagaattgatattttgttggtatgtttagtttttagcgatttatcgtttatttggaatttttttttattattttttttttttttattgttgttaattttgtttttttttttttttttatgagttttttggtgaattttattagagtgttttgagttatttgttttggaaggatataatatgtttgttttttgtaggtattagaggtaagaattatagttgtttgtagagattattttgtgagtttcgggttttattaggaaaattcgttagtatagttagaaggatataaaagtaagtgtttgtgtatgtgtgtgtgtgtgtgtgtgcgtgttttttttatgtgtagttttgagtgttttattttggagatttttggttggaaattgtgtattgatttttgggtatatttgtgggtgattgttttgtagaggtttttgtcggttgtgttttggttaagttagtagttttttttattttaggttttttagcggggatttttttgattggtattttttgagtttgggttttttgagtgaagtagagatagaaattgtttgttggagtttagtagtttggaaaaattatttatataagtttttttttttttttttttttttttttttttttaaagttggaattttagggtatcgtagttttggaaatgttaggaagtttaatttattagaaaagttaatttttttatggttttgtgaagttttttttttttagggttttttttaggtggtagtaaggatgttttagattttattatttaagtgggagtaaaaagttgaggttaatagtgtaggagtgagtttttagttgttttttatatattattttttagtttttttcgtttgtttttttagtttggaattttttttgttaagtatttttggaatttagtagcgagtttttttttgttgttttacggttggttttttttttttgttattttgaatatgttttcgttttttgttttgtttttgttcgtttgtttttgcggattattgttttttttttttttgttttttagagtaaagtagattatagattttgtttttaagaattgtgataaagttttttaagtagtt

SEQ ID NO: 1304 - DNA, 2494 bp, Artificial Sequence
  chemically treated genomic DNA (Homo sapiens)
agtttatgggagtttttgaattatatagaattatagtatatagtaaataatatattaaatttttgttattttattgggttttgtttatagatttatttaggtattattgtggttttttgggttttttttattttaatttttattttaagttattattattgaggttgattaataaaaatataatattaaatttttttatttttgaggttttttttttaaggggaggtagaaatagaatattttttatcggggagggaaaggggtttaataaaaattggtataattagttaaatattgatttcggttaggttttttttgtgtttatgggtttagttttggttggttgtttttttttagggagtttttttttatttcggggtttgaggtggtattaggagggggttgggggcggttagtattagcggcgttttgtttagtttttttgtagggagcgagtaggtaggtaagtcgttgggcggtgggacgttattatcgtaggaaatcgcgaatgaatttttagagtttggtgatttataggttggcgtcgaggtttattaggtattggatttcgggcgtgagtatgcgtcggtagagttgcgcgtgtcgttgttcgatgttttttttgaggttgtagtttaggatggatttggtgtttagcggttgttagggttgtatggtttcgttttggatggcggcggcgtttacggcgtggttttcgtcgatgtagatggttcgtatgcgttcgttggtatggcgtagggcggttatttcgcgggttatgcgttttcgttcgaaggtttttattttgcgttagaagttggcgttgaagtggcggtagaggtgggagtttagtatgttttaggcggtggcgcgtttatatagttttttcgagagtcgcggtacgggcgagtcgcggcgggcgttgagtttgaagtagagtacgttttttagtttttagtatagtaggttttttagtagtattagcgattcgtcgaagtatttttgaaggagtattaggtggaagcgacgttttatttttaggatgtgtttttgtatttgcgggttgttggggtttaggttgttgttatagtttaggtcgaagaagagtaggtttcggaggtagtgggtattgaagtcgttggggtcgtagtagcgattcgggttttgtaggaattcggttagtttgtcgtcggtcgagagtttttacgtgaggggtattatcggttcgaagtagtggaaggaggattcgaataagcgggcggggtcgcggagtatcgtgatgaagatggcgttggtcggtattaggtcgcgtatttcgtcgtagtggaagcgtatgtggttgtagatgatgttgaagtaggtttcgggtcgatagttttgtattaggttgcgggcgaagaaggtcgggtagtcgaagttattgcggtcgttagggaaggcgaatttgagtcggtgtttttggtcgaagcggaataggatgttgagtagggtgttgttggtcgttttgtgcgtttttaagaatacgatgttgcgtcgcggttggtattttttcgtcgagtcgttggttcggattattgtttttggttcgagtgtaggtggagagtaggacgttgcggttttcggggttttgttggggatagagaggtggggagagttttaggggggtgttggggtttttaggattttggtagttagagagggagattattgggaatagtggtggtaaaggagttgggatagtgagatttgtggggtttgagtttaggttgggtgtttgcgcgggtggtttggtttttttagttttatgttttttttttgtgaaatggggacgataataggttttatttacggtgttgtgagatgaggtatataggttttttttttatttatggttattgtgttgtatgtattatgaattagtattagtttgggttatatgaaattgttattttataggataaaaatggtttatttttgtagaaatttgtagttttttttgtgttaagttaatattattaattattggtattgtattagttataggttgtgttgggtttgtgtagagtagttttatgaggaaacgggagagtttggtttttaggagttgggtttggagttagatcgattcgtttgaatttatgtttatggataggtcgtttttattagggtttcgttggtattttagatgatgtaaatttgagttttgtatagatagtgttatttgatttttatgttttatgaggaaggttttgggttttttttgtttgtttgtttttttttttgttttgagatagttttatttcgttggtttagtttggagtatagtggtgttatttcggtttattgtaatttttgtttttcgggtttaagtaatttttttgttttagatttttaagtagttgagattatagatatatattattatgtttagttaatttttgtatttttagtagagatggggttttattatgttggttaggttggtttcgaattt

SEQ ID NO: 1305 - DNA, 2494 bp, Artificial Sequence
  chemically treated genomic DNA (Homo sapiens)
gagttcgagattagtttggttaatatggtgaaattttatttttattaaaaatataaaaattagttgggtatggtggtgtgtgtttgtaattttagttatttgggagtttgaggtaggagaattgtttgaattcggaaggtagaagttgtagtgagtcgagatggtattattgtattttaggttgggttaacggagtgagattgttttaaaataaaaagaaaaataaataaataaaaaaaatttagagttttttttatagagtatgagaattaggtaatattgtttgtatagggtttagatttgtattatttgagatgttaacggggttttggtgggggcgatttgtttatgggtatggatttaaacgggtcggtttgattttaggtttagtttttgagaattaggttttttcgtttttttatggggttgttttgtatagatttagtatagtttgtagttggtgtaatattagtggttggtgatattaatttgatatagaggaaattgtaaatttttgtaaaaatggattatttttgttttataaaatggtagttttatgtggtttaagttgatattgatttatggtatatgtaatatagtggttatgaatgagaggagagtttgtgtgttttattttataatatcgtgaatagggtttgttatcgtttttattttatagaagaggaatatgaggttagagaggttaaattattcgcgtaggtatttagtttggatttaggttttataggttttattattttagtttttttgttattattgtttttaataatttttttttttaattattagagttttgagggttttagtatttttttgaggttttttttatttttttgtttttagtaggatttcggaggtcgtagcgttttgttttttatttgtattcgagttagaggtagtgattcgggttaacggttcggcgggggagtgttagtcgcggcgtaatatcgtgtttttgaagacgtataagacggttagtagtattttgtttaatattttgtttcgtttcggttagaagtatcggtttaagttcgttttttttaacggtcgtaatgatttcgattattcgatttttttcgttcgtagtttggtgtaggattatcggttcggggtttgttttaatattatttgtaattatatgcgtttttattacgacgaggtgcgcggtttggtgtcgattaacgttatttttattacggtgtttcgcgatttcgttcgtttgttcgagttttttttttattatttcgggtcggtggtgttttttacgtggaagttttcggtcggcgataagttgatcgagtttttgtaagattcggatcgttattacgattttaacggttttaatgtttattattttcgaaatttgttttttttcgatttgggttatgataatagtttggattttagtagttcgtaggtgtaggagtatattttggaggtggagcgtcgtttttatttggtgtttttttaagagtatttcgacgagtcgttggtgttgttgaaggatttgttgtgttgggagttggaggacgtgttttattttaagtttaacgttcgtcgcgattcgttcgtgtcgcggttttcgggggagttgtatgggcgcgttatcgtttggaatatgttggatttttatttttatcgttattttaacgttagtttttggcgtaaggtggaggttttcgggcgggagcgtatggttcgcgaggtggtcgttttgcgttatgttaacgagcgtatgcggattatttgtatcgacgggggttacgtcgtggacgtcgtcgttatttaggacgaggttatgtagttttggtagtcgttgggtattaagtttattttgggttataattttaagaagagtatcgggtagcggtacgcgtagttttgtcggcgtatgtttacgttcgagatttagtatttgatggatttcggcgttaatttgtgggttattaagttttggaagtttattcgcgattttttgcggtggtgacgttttatcgtttagcggtttgtttgtttgttcgttttttgtagaggggttgagtaggacgtcgttggtgttggtcgtttttagtttttttttggtgttattttagatttcggggtgagggggggttttttggggggaggtagttagttaagattgggtttatgaatatagagagggtttaatcgagattagtatttaattaattatattagtttttattaaattttttttttttttcgataaagaatgttttatttttgtttttttttaaaggggagattttagaagtaaaggaatttgatgttgtgtttttgttaattagttttagtggtggtgatttggggtgggggttggggtggggggaatttaagagattatagtggtgtttgggtgagtttgtgggtagagtttaatggggtggtagggatttgatgtgttatttgttatatgttatagttttatatggtttagggatttttatgagtt

SEQ ID NO: 1306 - DNA, 3457 bp, Artificial Sequence
  chemically treated genomic DNA (Homo sapiens)
aaaaattagtcggatgtggtggcgggtgtttgtaattttagttattcgggaggttgagatagaagaatcgtttgaattcgggaggcggaggttgtagtgagtagagattgcgttattgtattttaatttggtgatagagatgtcgtttaaaaaaaaaaaatgtaaggattattgtgaaattcgtatgttaatgtaaaatattatttgtgcgtttagaagataaagtgatttttttttttagaaaaggtaaaacggtttaagggagcgtgagagtcgtggatttgattaatttggtttagtgttttgtgtcgttttttagttgtaggatttgagaaaacgtatttgaaaattcgttaagtttcggttttttgattatataaggttatatttttttagaagttgcggggaggtttatatattattatcgcgtcgggtatatagtaggcgtcggttttagtttttttgttttcgttcgcggagtttttagcgtttagtcgaggttatagcgagttgaattgaatttaaggttcgtattaaatttataggtatttgggggcggagtattcgtaggcgcggttttcggcgcgcggtttagttttttttatatgtagatgaaaattacgatttaaacgtttttatggtggaaattagaagacgcgtagggaaaatagggacgcggaaattgtcgggaagcgtaggggttgataagtagtttggtttaggtcgttttacgagcgttttttcgcgggagtagcgttttcgaggtcgttagcgagttagaggaaggtagggcgtattcgttttttagtaagaacgcgatgtattcgggcgcgacgacggtttaggtagtttttaggaggttgggatattagttcggtcgttttttttttttcgcggtttttcgtttcgttttcggttttgagtggcgagtggttcggttagaattcggacgtttttatttgagcggggtttatagtatagtatttgcgggcggggcggttttggagtttcgtagtcgcgcgcgtcgttcgttagtaaagtttacgcgtcgcgtcgagcgtagttatatagttttacgtagttattcggtcgtcgtcgtgcgtacgtgtacggcgtgcggtttttttttttcgcgagttcgttcgttgtatagttaattagcggtcggcgcgcgcggtattacgggagttgtagttttgtaagcgcgcggagttcgtcgggcgtttatggaattcgattcgtaggttaaaggggtttcgttgtaaggaagaagtgcggggtttcgtcgttttttagatcgagatcgcggtgagttggtcgcggcgtataatgggtacggtttgggcggcggcgttcgtattatcgttttgtgtttgcggatttcggtaatattgcgcggtaggttttaggtcggttttttttagtttcgcggattgtttgggtcgggggttttaattttgattttagggtcgggtcgttggggtagatttttagtgatgtttaggttttttgggtttttgttagttaagggacgttcgtcgcgcgttaattgttaagttttttattgtttttgtaaatttgttgacgtttttttagcgtatagggagattgcgtacgtgagttcgttttcgcgcgtattgcggagaggtagaggtacgaatgtagtataaggtataaaatgattattttagagagggttagatgattaagttagtaaatatttagggaatacgattgtgttcgttgcgcgtttttcggagtagatataagggtgaatgaataaagaatggatttcggttattgaaagtggagaggtagtcgatttcgttcgtggaggtttttagtagagttggatttggtagtttttcggttatgaggggagattttgttggaggaaagaggtttttatttttatcgtttgaaatgtgtaggatgtttttagattttttggtttatttataggtatagttatgttaaaaacgcgggattttataatgtatttagtattagtagagagggagtcgaggatatggatagagattgtattagtttatatattagtaggttagggtgcggtggtttatttttgtaattttagaattttggaaggttaaggtgggaggaaaatttgagtttaggagttttagattagtttgggtaatatagggagattttttttttattttaaaaataataaaatagggtcgggtgcggtggtttatatttgtaattttagtattttgggagattgaggcgagtggattaggaggttaggggtttaagattatttagttaagatggtgaaatttcgtttttgttgaaaattgtaaaaattagttaggcgcggtggtaggcgttttaagttttagttattcgggaggttgaggtaggagaatcgtttgaatttaggtagtagaagttgtagtgagtcgagattgcgttaatgtattttagtttgggtgacggagtgagatttcgttttgaaaaaaaaaaaaataataataataataataaaatgaagaagtagttagcggtgttttttggtttttagttttgaagggtaagattttaatttagtttaattatagttaattagaatttggaagattaatttaagttagttaaatttataatagttcgatatttaaattttgttaggggatatagttttttaggattgtaatgtttttaattttttttttttattaaattatttagaaattgatttagttattagaaattttttggtatgatggtttttaaatatgtttatagttttttttgataatcggttttttaaaagtatagttaggcgcggtggtttatatttgtaattttagtattttgggaggttaagttaggcggattatttgagattaggagtttaagattagtttggttaatatggcgaaattcgtttttattaaaaatataaaaattagttcgttatgtatttgtaattttagttatttgggaagttgaggtaggagaatcgtttgaatttgggaggtggaggttgtagtgagttgagagcgtgttattgtattcgagtttgggtaatagagtgagattttattttaaaaaaaaaaaaaaaagaaagaagaaaaaaaggtcggttatagtggtttatgtttgtaattttagtattttgggaggtcgaggtaggtggattatttgaggttaggagttcgtgattagtttggttaatatggtgaaattttgtttttattaaaaatataaaaattagttaggtatggtggtgtgtgtttgtaattttagttatttgggaggttgaggtaggagaattatttgaatttgggaagtagaggttgtagagagttgagttgagattgagttattgtattttagtttgagcgatagagcggaattatgtttttaaaaaaaaaaaaagttggagttgggtgggtatggtggtttatgtttgtaattttaatat

SEQ ID NO: 1307 - DNA, 3457 bp, Artificial Sequence
  chemically treated genomic DNA (Homo sapiens)
gtgttgggattataggtatgaattattatatttatttaattttagttttttttttttttggagatatagtttcgttttgtcgtttaggttggagtgtagtggtttaattttagtttagttttttgtaatttttgttttttaggtttaagtgatttttttgttttagttttttaagtagttgggattataggtatatattattatgtttggttaatttttgtatttttagtagagatagagttttattatgttggttaggttggttacgaatttttgattttagatgatttatttatttcggttttttaaagtgttgggattataggtatgagttattgtgatcggtttttttttttttttttttttttttttttttttgagatagagttttattttgttgtttaggttcgagtatagtggtacgtttttagtttattgtaatttttattttttaggtttaagcgatttttttgttttagttttttaagtagttgggattataggtgtatgacgagttaatttttgtatttttagtagagacgggtttcgttatgttggttaggttggttttgaatttttgattttagatgattcgtttgatttggttttttaaagtgttgggattataggtgtgagttatcgcgtttggttatgtttttgaggagtcgattgttaaaaaaaattgtgggtatgtttaaaagttattatattaagaaatttttaatgattaaattagtttttaggtagtttaatagaaggaagggattaggaatattgtaattttagagagttatgttttttggtagggtttaagtgtcgggttattgtgagtttgattgatttgaattagttttttaaattttgattagttgtagttgaattgaattaagattttgttttttaaagttgaggattaaaggatatcgttaattatttttttattttattattattattattattttttttttttttaagacggagttttatttcgttatttaggttggagtgtattggcgtaatttcggtttattgtaatttttgttgtttgggtttaagcgatttttttgttttagtttttcgagtagttgggatttgaggcgtttgttatcgcgtttggttaatttttgtagtttttagtagagacggggttttattattttggttaggtggttttgaatttttgattttttgatttattcgttttagttttttaaagtgttgggattataggtgtgagttatcgtattcggttttattttattatttttaaaatagagaaggggtttttttatgttgtttaggttggtttggaatttttggatttaagttttttttttattttgattttttaaagttttgggattataggggtgagttatcgtattttggtttgttaatgtgtgagttagtgtagtttttgtttatattttcgattttttttttgttagtgttaagtatattgtagggtttcgcgtttttagtatagttatatttatgaatgggttaaagaatttgagggtattttatatattttaaacggtgggaatggagattttttttttttagtagaatttttttttatgatcgggggattattagatttagttttgttaagggtttttacggacggagtcggttatttttttatttttagtgatcgaaatttattttttgtttatttatttttgtgtttatttcgggaaacgcgtagcggatatagtcgtgttttttaagtgtttgttgatttagttatttggttttttttggagtagttattttgtattttgtattatattcgtgtttttattttttcgtagtgcgcgcgggggcggatttacgtgcgtagtttttttatgcgttgggagggcgttagtaggtttatagaaataatgaaagatttaataattggcgcgcgacgagcgttttttgattggtaggggtttagaggatttgaatattattaagggtttgttttagcggttcggttttgaagttaaggttgagattttcggtttagatagttcgcgaagttgagggaggtcggtttggggtttgtcgcgtaatgttatcgggattcgtaggtatagggcgatagtacggacgtcgtcgtttaggtcgtgtttattgtgcgtcgcggttagtttatcgcgatttcggtttaggaggcggcgggatttcgtattttttttttgtaacggagtttttttggtttgcgggtcgagttttataggcgttcgacgggtttcgcgcgtttataggattataattttcgtgatgtcgcgcgcgtcgatcgttgattggttgtgtagcggacggattcgcggggggggggggtcgtacgtcgtgtacgtgcgtacggcgacggtcggatggttgcgtggggttgtgtggttgcgttcggcgcggcgcgtgggttttgttggcgggcggcgcgcgcggttgcggggttttagggtcgtttcgttcgtaggtgttatgttgtgggtttcgtttaggtgaggacgttcgggttttggtcgagttattcgttatttagggtcggaggcggggcggggagtcgcggggaaggaggggcggtcgggttggtattttagttttttgggaattgtttggatcgtcgtcgcgttcgagtgtatcgcgtttttgttggagggcggatgcgttttgtttttttttgattcgttggcggtttcggaaacgttattttcgcgggagagcgttcgtgggacggtttgggttaggttgtttgttagtttttgcgtttttcggtagttttcgcgtttttgttttttttgcgcgttttttgatttttattatgaggacgtttgggtcgtgatttttatttgtatgtggaggaaattgggtcgcgcgtcgggagtcgcgtttgcgggtgtttcgtttttaagtgtttgtgggtttggtgcgggttttgggtttagtttagttcgttgtgatttcgattgagcgttggaggtttcgcgggcgggagtaggagggttggagtcggcgtttgttgtgtgttcggcgcggtagtgatgtgtgagttttttcgtaatttttgagaaggtgtgattttgtgtggttaggaagtcgaagtttgacgagtttttaagtacgtttttttaggttttgtagttgggagacggtataggatattaaattaggttggttagatttacggtttttacgtttttttgggtcgttttgttttttttggaaaaaggaattattttgttttttaaacgtataagtaatattttatattaatatacggattttatagtaatttttgtattttttttttttagacggtatttttgttattaggttggagtgtagtggcgtaatttttgtttattgtaattttcgtttttcgggtttaagcgatttttttgttttagtttttcgagtagttgggattataggtattcgttattatattcggttaattttt

SEQ ID NO: 1308 - DNA, 2424 bp, Artificial Sequence
  chemically treated genomic DNA (Homo sapiens)
tttaattgtttttatagttattagggtagaaaaaattgagattaggggtagggtataaaggagaatatatttatgttttatttgtataattataaattaatgttaaaaagaatgtaaagttaggtttagggtagggatgaagaggttgtagatgtttttaagtattggaaagttttggttttttggttttatgtttttttttttttttttttttttttttatttttgagatagggtttttttttgttgtttaggttggagtgtaatggtacgattttggtttattgtaattttaaatttttcggtttaagcgatttttttattttagtttttcgagtagttgggattataggcgtacgttaggtggtttagttaatttttgtattttttaaaatttttttgagacggagtttcgttttgtcgtttaggttggagtgtaatggcggaatttcggtttattgtaattttagttttttgggtttaagcgattttcgtgttttagttttttaagtagttgggattataggcgcgcgttattacgtttagttaatttttgtattttttgtagagacgggtttttaatatgttggttaggttggtttcgaatttttgattttaagtgacgcgttcgttttagttttttagagtgttgggattttaggtggagttatcgcgtcgtatttttcgggtttttttttaattcgggtttttgggttttttaggttttcgttttttttttttacgtcgtttcgcgttcgttttagatttttttgggattcgtcggtttggcgttttggttcgttcgagttttacggtttttcgggttttaatttcggcggggtaggtatttttttaggaagtttcggagtaggttgtcgttgtataggtggtttaggttggcggtttttgatcgaaggtcgcgtcgggttagtgtgtagttcgtggttgagaggcggttgttgaggggtcgggcgggttaggggtcggttagtcgtcgttcgtttttgttttgtatatttatgaagtttagcgaggtcggtcgtttaggttagtcgtggacgggttatgaattatttatgaggaaatttttggtttcgtttagaaaggtttcgttgattatttatgagtcgaggagcgggtttgggtcggaaaaggtcgttgattttcggtgggagggaagcgtcgacgagttgaggtgagggttgttgagacgcgaggtttcggtttagagagggtattcgggcgttgttagttttgtttttatgttaaaaaataatttttttttttttttttattatttaaggttttaagttggatttgaaagtattatatttcgtgagggtttaaagtattgtgaagagaatcgggagggtagggggttgaggaggaaggtaaaagggaggcgattttttttagaattggatagagagtatttaggtagttttgaaatttagatttttttggatatgaaattaaatttgttgagtaagtagtagttataatgagttatgatgaggttggtagggtagacgatgtttgtgttcgatattggagggggtcgtgtgtggtggagttttggggaagtttattttatttgggttagattttttttagttattgaggttttttgttaggatcgatgtttggtataggttaagaggtgagagaggtggggataagatatttcgttttttttgattttagttttttttttattttagtgaggatttgttaattaatttttatggattttagttttttaaatagagggagagagttttgaattttaggattagttaatcgttaaaatgtgttcgagtacgtagggtattggataggttgtgtagtatatcgtgtatttagttggtagaaatgaggggtggttttggtttttaaaggggtttttaattttagtaggattataatttaattttttttttattggattattaatttgttgaggtaggaatagtattttatatttcgtaattttgtatgttgttgtttggtatattgtagttgtttcgtagatgttgaatgaatgaataattgaaatagtatgaaaaagatattaaaaagttaaaagagtatgaataaatatttaattaatatagtggaagttattttttttgaatgagtataggtaggggaattattagggttaaatggaatttgttaaaatggtgaataatttattgaagtaagttttgttggaaggtttaagtaattgggcgaattttggtaaattaagtttttttgtttagttttattttttttttttttttttttttttttttgtgagatggagtcgagttttgtgttaggttggagtgtagtgacgtaattttagtttattgtaatttttatttttcgggtttaagcgatttttttgttttagttttttatgtagttgggattataggtg

SEQ ID NO: 1309 - DNA, 2424 bp, Artificial Sequence
  chemically treated genomic DNA (Homo sapiens)
tatttgtagttttagttatatgggaggttgaggtaggggaatcgtttgaattcgagaggtggaggttgtagtgagttgagattgcgttattgtattttagtttggtatagagttcgattttattttataaaaaaaaaagaaaaaagaaaaggaaagtgaggttaagtaagggaatttggtttgttaaagttcgtttaattatttagattttttaatagagtttgttttaataaattatttattattttaataaattttatttggttttggtaatttttttatttgtgtttatttagagaaaatggtttttattatattaattgagtatttgtttatgtttttttgattttttaatattttttttatgttattttaattatttatttatttaatatttacgaggtaattataatgtgttaggtaataatatgtaggattacgagatgtaaaatattgtttttattttaatagattgatggtttaatggaggagaaattagattatgattttgttgagattaaaaatttttttaggggttagaattattttttatttttattagttgagtatacgatgtattgtatagtttgtttagtgttttgcgtattcggatatattttggcgattggttaattttgaggtttaagattttttttttttgtttagggaattaaagtttatagggattaattggtaaatttttattaaagtgaaaggggagttgaggttaaggggggcggggtgttttgtttttattttttttattttttggtttgtattaggtatcgattttggtagaaaattttaatggttggggagaatttgatttaggtaagataaatttttttaaagttttattatatacggttttttttaatgtcgggtatagatatcgtttgttttgttagttttattatggtttattatggttgttgtttgtttagtaagtttgattttatgtttagaaaaatttgaattttaaaattatttgggtgttttttgtttagttttgggggaaatcgttttttttttgtttttttttttagttttttgttttttcgattttttttatagtattttaggtttttacgaaatatgatatttttaaatttaatttaaagttttaagtaataagaaaagaaaaaaaaattgttttttgatataaagatagaattaataacgttcgagtgttttttttgggtcgagatttcgcgttttaatagtttttattttagttcgtcgacgttttttttttatcgggggttaacggtttttttcggtttaaattcgtttttcggtttatgaatagttaacgaggtttttttgggcgggattagaggtttttttatgaataatttatgattcgtttacggttagtttgggcgatcggtttcgttagattttatgaatatgtaaagtaggggcgaacggcggttagtcggtttttagttcgttcggttttttagtagtcgttttttagttacgggttgtatattgattcgacgcgattttcggttaggggtcgttagtttgggttatttatataacgatagtttgtttcggggttttttgaggaggtgtttgtttcgtcgaggttaggattcgagggatcgtggggttcgggcgggttaggacgttaggtcggcgggttttagagaggtttgaggcgggcgcggggcggcgtaggggagggaagcgagagtttggggggtttagggattcgagttagaagaaggttcgagaagtgcggcgcggtggttttatttgggattttagtattttgggaggttgaggcgggcgcgttatttgaggttaggaattcgagattagtttggttaatatgttgaaaattcgtttttataaaaaatataaaaattagttgggcgtggtggcgcgcgtttgtagttttagttatttgggaagttgaggtacgagaatcgtttgagtttaggaggttgaggttgtagtgagtcgagatttcgttattgtattttagtttgggcgatagagcgagatttcgttttaaaaaaattttaaaaagtataaaaattagttgggttatttgacgtgcgtttgtagttttagttgttcgggaggttgaggtaggaggatcgtttgagtcggggagtttgaggttgtagtgagttaagatcgtattattgtattttagtttgggtaatagagggagattttgttttaaaaataaaaaaaaagaaaagaaagaaaaaagatataaggttagaaggttagagttttttaatatttgagggtatttgtaatttttttatttttattttggatttgattttgtattttttttaatattaatttgtaattatgtaaataaaatataaatatatttttttttgtgttttatttttaattttagttttttttgttttggtaattgtgggagtagttggg

SEQ ID NO: 1310 - DNA, 2371 bp, Artificial Sequence
  chemically treated genomic DNA (Homo sapiens)
ttttaggttttttatgtggttgttggttagaagtatatttgataaggtgtttcggttgttttggtcgtttttatatgaagtttgtttagttaaggtatttttaggggtttaatgagaagggaattgtggttgggtgatttcgaaggtgatgggaaagacgttgttttttatttataaagttgttagggttagttggggaaaagtagaggaaagggaaattataagaaagtagatttaaagaaatagaatttgaaagagttttttaggttgttgtttagaatatttggaattaagttaatgggtatggagggagagtagttgttaagttattttttggtacgagttttgagagtcgtttgagggagttggagtagacgtcgtgggattttttttttgagttattgtagtttttttttggagtcggttcggggtggcggtttaaatatggaaatgtggtttgaattttttttttagtaatcgttgttgggttttagtttttttttgtgaggcgggtagttgagcgaaatgaaattataatatttaattataatattgcgagtgttagatattgcgttgagttttgtatgtggatttttttaatttttaaaataattttagaggtggtaatgattgtatttattttatagatagaataattggttagagagggtgtgtgtgtgttatttaaggttacggagttagtaagggtatcgggtgagaatttgaatttagagttattggttttttaattatagcgtttttttgttgagtagggataagtatttatttttttagttttttttgtagttagggagttagaatattttgggatcggaaattgttgtttggatgattttagttagttatttcgtttcgtagacggggaaagtgagaattagagaaggtcggtgattggtttaaggttacgttgtgttttatattttttttttattttcggacgtttagttttttaatagttttagtatagagttggggaaaaatttttagagatatttttttgggaagatagttggaaggtagggttgagtcggggttatttgtgatttagcggtgaggtgatgaggtattgacgaaagtattgtattttttttttttgagaaacgttttggtattagatgagttttgggggagggaggagaggaatttggtagggatttggttataagttatttggagggtggcgtgaggatcggaaaagtcgttgttcgttttgtttggttttattttttgaatgaggttattgaatgtgtacgggaggtttagcgttgttttattttagtttgatggagaaattttattcgaaattttaaagtagggtagggatatttttattagatatttttgtagtttttgttttgtgggacgaagtaagggatgatgatatattcgtttgtttattcggaagtgagttttaggttattgtattagaagggtgataatttaatataagttattgttaagtaattttcgcgtgtttagtatttatatttttttgttttattttgattattatattgtataggagttattatttttatttttcgtttttatttatagatgaggatatcgagatttagagagttttttgttttgttttgttttttgagatggagttttgttttgttatttaggttggagtgtaatggtacgattttagtttattgtaatttttgttttttgggtttaagagatttttttgttttagttttttgagtagttgggattataggtatttgttattatatttagttaattttgtattagagatggggttttattatgttggttaggttggtttttaatttttgatttcgtgatttatttgttttagttttttaaagtgttgggattataggtatgagttatcgcgtttggtttgttttattttttgttttgtttgtttgttttgttttgtttttagagatagggtttggttttgttttttaggttagggtgtagtggtgcgattatagtttattgtagttttaaatttttgggtttaagtaattttttcgttttagtttattaggaattggaattataaatgtatgttattatttttagttaatattttttttttttggaaaaatgaagttttattatgttgtttaggttggttttaaatttttgggtttaagtgatttttttgtagtgttgggattataggtatgagttattttgttcggttaattttagagagttttgatgaagttataaaattttgattatggagttagaatttaaatttaggtatgtgaggtttgagtttaggtttttattagggttattgtgttgtaattgttattattttttggtattttaagtgatattcgagtattatttaagggaa

SEQ ID NO: 1311 - DNA, 2371 bp, Artificial Sequence
  chemically treated genomic DNA (Homo sapiens)
tttttttgaatgatgttcgggtgttatttgaggtgttaggaagtggtggtagttgtagtatagtggttttggtggaagtttgggtttagattttatatatttagatttgagttttggttttatggttagaattttgtaattttattaaaattttttgagattggtcgggtagagtggtttatgtttgtaattttagtattgtaggaggattatttgagtttaggagtttgagattagtttgggtaatatagtgagattttatttttttaaaaaggaaaaatattagttggggatggtggtatgtatttgtagttttagtttttggtaggttgaggcgagaggattgtttgagtttaggagtttgaggttatagtgagttatggtcgtattattgtattttaatttggaaaataaagttagattttatttttgaaaataaaataaaataaataaataaaataaaaaataaaataggttaggcgcggtggtttatgtttgtaattttagtattttgggaggttgaggtaggtggattacgaggttaggagttggagattagtttggttaatatggtgaaattttatttttaatataaaattagttgggtgtggtggtaggtgtttgtagttttagttatttaggaggttgaggtaagggaattttttgaatttaggaggtagaggttgtagtgagttgagatcgtgttattgtattttagtttgggtgatagagtaagattttattttaaaaaataaaataaaataaaaaattttttgggtttcggtgtttttatttgtaaatggaggcggggggtgagaataatggtttttgtgtagtgtagtggttagaatgaagtaagaaaatgtgaatattgagtacgcgagagttgtttagtaatgatttgtgttaggttgttatttttttgatgtaatgatttgagatttattttcgggtgggtaggcgagtgtgttattattttttgtttcgttttataggataaaggttgtaaaagtatttggtgggaatgtttttgttttgttttgggatttcgggtaggatttttttattaggttggagtggggtagcgttgagtttttcgtgtatatttagtgattttatttaggggatgagattaaatagaacgggtagcggttttttcggtttttacgttattttttagatggtttataattagatttttgttaaatttttttttttttttttttaagatttatttgatgttaaagcgttttttaaaagggggaaatatagtattttcgttagtattttattattttatcgttgggttataaatgatttcggtttagttttgttttttagttgtttttttaaggggatgtttttgaagatttttttttagttttgtgttggggttgttggggagttggacgttcgggaatgagaggaggatatgggatataacgtgattttgggttagttatcggttttttttggtttttatttttttcgtttgcgaaacgaggtagttggttgaggttatttaggtagtagttttcggttttagggtgttttggttttttgattgtagggagagttgggaagatgagtatttgtttttgtttagtaggagagcgttgtggttaggaagttagtggttttgggtttaaatttttattcggtgtttttgttggtttcgtgattttaggtaatatatatatattttttttgattagttattttatttgtaaagtgggtgtaattattgttatttttggagttgttttaaggattaagaggatttatatgtagaatttagcgtagtgtttgatattcgtaatattataattaaatattataattttatttcgtttaattgttcgttttatagagagaaattgaggtttagtagcggttgttgggaagaggatttagattatatttttatgtttgagtcgttatttcgggtcggttttaggaggaagttgtaataatttaggggaaaagttttacggcgtttgttttagtttttttaggcggtttttagagttcgtgttaagagatggtttggtagttgttttttttttatgtttattagtttagttttagatgttttaggtagtagtttggggagtttttttaggttttgtttttttggatttatttttttgtagttttttttttttttgtttttttttaattggttttggtagttttataaatgaaaaataacgttttttttattattttcgaaattatttaattatagttttttttttattagatttttggaaatgttttggttagatagattttatgtagggacggttaggatagtcgggatattttattaaatgtgtttttgattagtaattatatgaaaggtttagag

SEQ ID NO: 1312 - DNA, 2500 bp, Artificial Sequence
  chemically treated genomic DNA (Homo sapiens)
ttttggagaataggatacgtggagggttaggaaggggttaggtttagagacgggagattttttttcggagtaggtggaggtataggattattcgttattttatttgtcggtatttgcgggggagtttaggtattttttgtaagtttttttgattatttggtttaaagaaaatagaagtatggaggtcgttaagtatttttaagaaataattttatgaatatggtattatttttttagaaagaggggtttggggtaggtagaggagagaagggagattaaattgagagttaagtttttagacggttttgtaggaggagaggatgtagttgtttagagggaagtaggattatatttaaggaagtgtgtggggtttttggatgatattagtatttagtgcggttttgtttggtaatcgtttttaaggtggtaggagtgggtgttttttgtgtgttagtgggtagtttttgttgaatttatagtttattggggagtttgatagtggggttatgtgtttgatatttttttttgtttgtggatttggtaaggtagggagtagaaaatagagttatttgaaggttttttgtttgcgtttgtgtgtagtgtggatttagttgtgttttttatttgttgggagagtatagttattatttataagtagtgttattttcgtgggtggcgaggatagaataggagtttttgttttttgtatttatttgggttcggtgggtttttttgttttggtttttatttttgttttagcgattatttagttttgtataggaatatatgttgtttagaaaagttaaatttagtttttgtttttgttttttttggttttatgatgtgtatttgttattttgaaattggaaattagtttattaatgtttgtgttaattttttattttttttttaatttttttttttatacgattttttatttatgtaggatgtgtgttgtttaatgatgggatgattatatttttttatgttttaaaagtgttttttttttatagggttttagggttggtggttgttttgggtttatagttacgttttattcgttttttgttttaatagtttgtgtggtggtaaagtcggtgtggggttggggaacgtagcgttttttaggaggggattcggttttttttttgtagtgtaggcgaaggtttagatgttagtgtgattttttataaggcgtggtttttagatttttcggtcggaagtgatgtttttttgtcgcgggttttgggtttgaagtagtttggtttttttttggtaagtggttggtgttttagtagttgtaatttgagtttagttatttatatattatcgtggtcgatatttttattaaaaagttttttgagacgatttgcgtgtatgttgattttatgattagcgtcgttgggaagaattttagagtcggtggggtggggttggaagtagtaggtgtagtgatagggttgggtgtttaggaggttttagtgtttaattaggttaaggtggttaagtttaggttgtagggaaggtcggtttggggggtgtgggtgagtataggtaggtattagttgggtagtgttaggatgttggagtagtattcgtaattttattgagtggggtagtttggttggggtagggatcgttgttgttttggtagagagagaggatttttattggggagaggttgttttgattttgtaggtgggatagggatagatggttattagggtgattcggttggtttttttttgttatgttaagttttgggatatggaggatttttgttatatagtttgggttcgggtttttatttgtggttatcgttttggtatgagttttttagttttgggtggtttttgtttggttcgggatttggtgttgttgttgagtttagtttttttgttattttcgtatgggtcgtgggtggtgatgttagttgttttttattttggttttagtagtttatttagtttataggggagttgttttgggttggagatgggtatgtattttgggttttatttgaatgaatgtagtttgaggagattcggttatatatattgggttataggttattttcggtaatgtttatattagtcgttagtttgagtttttttaggagagtaaggtttatacgataaaggttgttcgtggttagtgaggtggttgagtttagttaggatttttttcggattttcgggatgtggttttgttcgtgagttgtttggttagttttttcggggtgagaggggtttgttatacgggtttttgtttgtagtgtgattttttttagttttttttagtagttttgtttgtagagtgttattattattatgattatttttttgatattgcgagggtcgggggacgttttgggtagagatagggttcgtggtagtagtaggtttaggggcgttttatattggtgggttggggatttggtggagattacgttaagggttggataaggggacgagtttttattttggttttttcgtaggtt

SEQ ID NO: 1313 - DNA, 2500 bp, Artificial Sequence
  chemically treated genomic DNA (Homo sapiens)
ggtttgcggagaggttagggtggaggttcgtttttttgtttagtttttggcgtggtttttattaggtttttagtttattagtgtagggcgtttttgagtttgttgttgttacgggttttgtttttatttaggacgtttttcgattttcgtagtgttagggaaatgattatggtggtggtgatattttgtaggtagggttgttgagagaagttgagaagggttatattgtaggtaggggttcgtgtgataagttttttttatttcgagagagttgattaggtagtttacgagtagagttatatttcgggagttcgagaaaggttttggttgggtttagttattttattggttacgggtagtttttgtcgtgtgagttttgtttttttggggaggtttaggttgacggttgatgtgggtattgtcgagggtaatttgtggtttagtgtatatggtcgggtttttttaagttgtatttatttaagtaggatttagggtgtatgtttatttttagtttagggtagtttttttgtaagttgggtgagttattgaagttaaggtgggaggtagttgatattattatttacggtttatgcggaggtggtagaaaggttggatttagtagtaatattaaatttcggattaggtagaaattatttaagattgaggggtttatgttagagcggtggttataggtaagaattcgggtttaggttgtgtggtaggaattttttatgttttagggtttagtatagtaaaggaagattagtcgggttattttggtggttatttgtttttgttttatttgtagagttagaatagtttttttttagtggggattttttttttttgttaaagtaatagcggtttttgttttaattagattattttatttagtggagttacggatgttgttttagtattttaatattgtttagttggtgtttgtttgtgtttatttatattttttaggtcggttttttttgtagtttgggtttggttattttggtttgattgagtattgaggttttttgggtatttagttttattattgtatttgttgtttttagttttattttatcggttttggggttttttttagcggcgttgattatgaagttaatatgtacgtaagtcgttttaggaaattttttaatgaaagtgtcggttacggtggtgtgtaggtggttgagtttagattgtagttgttaagatattagttatttattaagagaaagttaggttgttttaaatttagggttcgcggtaaaaaagtattattttcggtcggggagtttggaagttacgttttgtgggaggttatattggtatttaggttttcgtttgtattgtagaaggagagtcgggtttttttttggagaacgttgcgttttttagttttatatcggttttgttattatataggttgttgaggtaggaggcgggtaagacgtagttgtagatttaaagtaattattagttttgggattttgtgggagaggagtatttttagaatatggaaaagtgtggttattttattattagatagtatatattttatataaataaaaagtcgtatggggaaggaggttggggagggaataaaaaattggtatagatattgatagattggtttttagttttaaggtaatagatgtatattatgagattagaggaggtagagataagggttggatttggtttttttaagtaatatgtgtttttgtgtagggttgaatggtcgttgagatagagatggaagttaggataagggagtttatcgggtttagataggtatagagagtagaggtttttgttttgttttcgttatttacgagggtgatattgtttgtaaatggtggttgtgtttttttagtaagtaaaaagtataattaaatttatattgtatatagacgtagatagaaagtttttaagtagttttgttttttgttttttgttttgttaggtttataagtagagaggagtgttaggtatatggttttattgttaggttttttagtgagttgtgggtttagtaggagttgtttattgatatataggggatatttatttttgttattttgggagcggttgttagatagagtcgtattgggtgttggtgttatttagggattttatatatttttttaaatgtgattttgtttttttttgggtagttgtattttttttttttgtaggatcgtttggaaatttggtttttagtttgatttttttttttttttttgtttgttttaagtttttttttttaaaaaagtgatgttatgtttatgggattattttttgaaaatatttggcggtttttatgtttttgttttttttgagttaggtggttaggagggtttataaagaatgtttgggttttttcgtaggtgtcggtagatggggtagcgaatggttttgtgtttttatttgtttcgggagggagtttttcgtttttaggtttggtttttttttaattttttacgtattttgttttttagag

SEQ ID NO: 1314 - DNA, 2431 bp, Artificial Sequence; identical to SEQ ID NO: 1274
  chemically treated genomic DNA (Homo sapiens)

SEQ ID NO: 1315 - DNA, 2431 bp, Artificial Sequence; identical to SEQ ID NO: 1275
  chemically treated genomic DNA (Homo sapiens)

SEQ ID NO: 1316 - DNA, 2451 bp, Artificial Sequence
  chemically treated genomic DNA (Homo sapiens)
taattaaagatttttttaaatttagtagggattagtaaatatttatagaagattagagattttttgtgagtgtaaagggtttagagtgatttgatgttatagattaaattttatggtttttttaaatttatgtgttaaaatttaattttttatatgatgggatttggaggtgaggttttggaaggtgattagattatgaaagtagagattgtatgaatgggattagtgtttttattaaagggattgttgagagtttttttattttttttgttatgtgaggatatagtaaaaagatggtagtttatgaataaggaaggaagtttttattagatacgaaatttgttgacgagttgattttggattttattatttttagaagtatgagaaatgaatttgtttttttgttatttagtgtagtgtattattttttggtatttagattggttatagtattaatatattaatttgtatacgtaatttttgaaattttgatgttaaatttttgatggtaataggtgattgatttgttggaggaatggattgatatgatttttttttttataataaattagagagtaaaaataagtaaaagtaggttaaggttttttaaaagtcgtatttgaaaggtttttagtaatagttgattagatggtaatttaattatataaataattacggtaaagatatataattattagatatttttagaatagtttttaaaataatatttgataatattagggagttaaagaaggtacgaatttttaaaaagttaaattttatttaaatgttattgtagaaatttgtaattttaatattatggatgaattttagggtaggtggtggtatggtatggcgatttgggggtataagtgttgagttttgaagtttcggttttgatattttttggagatgttttttggtttttatatttttgtttatttgttaagaagagtttgttttgggtagtattttagggataaatagtttagaagtttagttgagggtagatttttaaggttggaggaagaagtcgtttttgggagtaggaggagttgttggattttttttttttaggtttttttttttgttttttagcgttttttgtaggtaggtaaataattttagtaggagtagtagtaggttttttagtcgtagggttgtagttttgttgaatgagagaagtttttttttggcgagttagaggagcgtaggttatatattcgggtttttatttttatgttttttattgtgtttaggattgagtttagcgtgggagatgcgggttggggtcgtgttggttatttttttttttttattttttgttttagttatgtttttagttttagggttgaggttagtggttagagtagattttatgatgttaggtagttttttattgggttggtttttggtaggattaggataggggtaggagggatttggagttgttgatagttttagttttgtttttgaaggggggtttttttttggtgttggtattggtttattagttggcgttggaattttttgtgttgttgtatatggaataggagatgaaaaagaagaaagatttattaacgttagttattttttattggaatttttatatatagaattaatttcgttgaatgtaaggtattttagttcgaaaatattgtttttgtaaaggtttatagattataggttattttatcgtgtgtttgtgtttcgatgaattttagaggttttagttggataagaataatgtgtagatgtggtcgcgatgggattatcggtggggtttggtttggtagggtttgttttgggttgttttgtggtatttgggggcgtttttgtttaaatggttagaggcgtttggagtgagagatgagtgaggtattgttttttataagagggtattagttgcggggattcgtttatagattttgatttaaatgacggatgaataaaacgtatattgatatagagttattttgttttgttagttttgttgagtgttttattgtttgtatattaagagaggtttgttattgtagttggtcgtgaatagttcgtattgtaggtatttatttagtatagaatttataacggaagttttgagtaaatatttttgtggataattaatatggttaagagagtagttttattaatgattaaagtttaggtattatggtttaaagtaaatattattgggggtaatttttcgggtttatttttttttttttttttaagaggattatttggtttaaaggttagttaatggaagtagggtaaatagatttaattggggaagtttttattgtttttaatatttattttatgagttaatgttttaagataagaagtagttgtttttagtttgtttaattattataagttatgtaattttttcgttttttaaaaggtttgtgattattttttgtaattttttttaatatttttttttaa

SEQ ID NO: 1317 - DNA, 2451 bp, Artificial Sequence
  chemically treated genomic DNA (Homo sapiens)
ttaaagggaaatattagggaaagttatagggaatagttataaattttttggaaggcggaaaggttatatagtttgtaataattgaataggttgaaggtagttgttttttattttagagtattagtttatagggtaaatgttagggataatagaggtttttttagttaagtttgtttattttatttttattaattagtttttgagttagatagtttttttggggaggaggggggaggtagattcgggaaattgtttttagtggtatttattttaaattatggtatttgagttttaattattggtagaattatttttttaattatgttaattatttataagagtatttatttaaagttttcgttgtaaattttatattaaataaatgtttgtagtgcgagttatttacggttagttgtagtgataaattttttttggtgtgtaggtagtgggatatttagtaggattggtaaagtagaataattttgtgttagtgtacgttttatttattcgttatttgggttagggtttgtgggcggattttcgtagttaatgtttttttgtgaggggtaatattttatttattttttattttaggcgtttttggttatttgggtaaaggcgtttttaagtattatagggtagtttagggtaggttttattaggttaggttttatcggtgattttatcgcggttatatttgtatattgtttttgtttagttggagtttttggagtttatcgaggtataggtatacggtgaggtggtttatagtttatgagtttttgtaggggtagtgttttcgggttggaatattttatatttagcgaggttgattttgtgtgtgaaaattttagtggaaagtgattgacgttggtgagtttttttttttttttattttttgttttatgtgtagtaatataggaaattttagcgttagttgatgagttagtgttagtattaggggaagatttttttttagggatagaattggagttattagtagttttagattttttttgtttttgttttggttttgttaaggattagtttagtgaggagttatttgatattatgagatttgttttagttattggttttagttttggagttgaaagtatggttggagtaagaggtggaagagagggggtggttagtacggttttagttcgtattttttacgttgggtttagttttgggtatagtgggagatatggaggtagagattcgggtatatggtttgcgtttttttgattcgttagagagaggttttttttatttagtagagttgtagttttgcggttgaagggtttgttgttgtttttgttggggttgtttgtttgtttgtaagaggcgttggggggtaggaaaagaaatttgggaggaggggatttagtagttttttttgtttttagaggcggtttttttttttaattttggaggtttgtttttaattgggtttttgggttgtttgtttttgaggtgttgtttaggataggttttttttgataggtgggtaggggtgtggaggttagggggtatttttaaagggtattaaaatcgaagttttaaaatttagtatttgtgtttttaaatcgttatgttatgttattatttgttttagaatttatttatagtgttaaaattataagtttttataataatatttaaataaagtttgattttttgaaagttcgtgttttttttaattttttaatgttgttagatgttgttttagaggttattttgaaaatgtttgatagttgtgtatttttgtcgtggttgtttgtgtgattgaattattatttaattaattgttattggaaattttttaggtacggtttttagaagattttgatttatttttgtttgtttttattttttggtttattgtggaaagagggattatgttagtttatttttttagtagattaattatttgttgttattaaagatttggtattagaattttaaaaattacgtgtataagttgatatgttggtattgtagttaatttgggtgttaaaagataatgtattgtattaggtagtagagaaataaatttattttttatgtttttggagatggtaaaatttaaggttaattcgttagtaggtttcgtgtttgatgagggtttttttttttgtttatagattgttatttttttattgtgtttttatatgatagaagagatgagggagtttttagtagtttttttgatagggatattgattttatttatatagtttttgtttttatgatttaattattttttaaggttttatttttaaattttattatatggggaattagattttaatatatgaatttgaggggattataagatttggtttatagtattaggttattttgagttttttgtatttataagaaatttttaattttttataagtatttgttggtttttgttgggtttagggaaatttttaattg

SEQ ID NO: 1318 - DNA, 2402 bp, Artificial Sequence
  chemically treated genomic DNA (Homo sapiens)
ttgtttttgtaggttgagttttggagtttttttgtgttcgggatggagttggagtttatttttttgatttttattcgggagtagtggagttttgagtttttttgaatattggggaggatgggtgtagacggattgtgtatttttgttttttttgttaatttggtgggtaggtgttgagtttataaggttttagaattttataacgaagttagggtgtttggtgggagtttagggagttttagttgttgtttatttttttttttttttaaaaagtttgtttatttgtggcgtggggattattattagtggggagtggttaaggtaggttaggtagggacgtagtttataagtttcgtggtattttttttttttttgtggatttttggggtgatttttttgtttttgtttttgttttttagaaatgtttttattaatttgagcgtggtggtttacgtttgtaattttagtattttggaggttgaggcggggtagattatttttggttaggggttcgagattagtttggttaatatggtgaaattttatttcgattaaaaatataaaaaatgagtcgggtatggtggcgtttgtttataaatttagtaattcgggaggttgagttgggagaattatttgaatttagtggagattgtagtgagttaagatagtattattgtattttagtttgggtgataaagtgaggttttattaaaaagaaaaagaaaaaaaaagttttaatttgtgtgttttgtttttttttaggattaggtttgttaggtagtagtgggagttgattttttagtagatttataaattgaaagttgaattggatgttatgttttttcgagaagatgtagacggtacggtagggtgttgatagtaggtttatgtagagttttagggttatgttgagatatatgttaggttttatagttgtagttggttagttatagatttgggtttatgtttggttagagtttttggttttgtgtttttttcgatttgggtttaggattttgtattttggaattttttgtttttttttgtgttgttataaggttaggaagtttgtaatttttatagtattaaggattttaaggaggtttaggagtaggttggtagaggttcgtggtaaaggtgtggtagtcgtgattttatttttttttttttacgtgtgtttgtgtttcgtggcgttattttatagatattttgtttgagaagggattatgtttgggaatttttagggtcggattttgattgtagaatttgacgaaaggggttttgtagggtttagaatgaggaggaggtaatgagaattatttttggaggattttagaagtagaggttgggagtatttataggtgaatggagtttgaattatgattagaaaggaattgggagaaagagatataggaatttgggagtttcgggagtagtggggatattattattaggaagttagggggtattcggtaatgaaagtggtagatgtaataaaatttttaatatattgttgtataatgtataataatgtaataaaaatatattttttatatattattgttttaattttagttttatttattgttttttttatatgaatttttttttttatattttattttttagttaattttaattaggttttttgtttatattagttatattaagtttagttgtttattttattttgtgattaggatgagtatttaatttgaaatatgtatttatcggtgtattatgtatagtggtttaaatagttttatatgaagttattttagttattatttttttattagttttattaataagtggtttatttaatttgtatatatttattggaatagaagaatttttttggttgtttttattattatgatttttggttataatatgatttatttttatattagtagaaattagtcgagtttttttagatttaatagagggggaattagaattaatttcgggttttaacgtcgaatatgttgtaggtttatttgttttgttttttatagtagattatataaatattattataataaatgttttgaaggtcgtaagaggttcgtgggtgtagtgtataggagattatatttggggatagtagttgtagtagattttaagttgggttatttttgttatttgttaggtggtgtttggcgaaggtaagtagtttttattcgttcggggaatatagcgcgattttcggcggtatgttttttagtattattttaggaggtattaggattatttattattggaaatttttgatggagtgttgaaatttattcgtgattaaaatatttttaagggatttgtttattattttcggggttattagttttgttagtgatgatttttttaacggaagttagttagagttatttgagtaatagttt

SEQ ID NO: 1319 - DNA, 2402 bp, Artificial Sequence
  chemically treated genomic DNA (Homo sapiens)
ggattattgtttaggtggttttggttggttttcgttggggggattattattggtagggttggtgatttcgggaatggtgggtagattttttgggagtgttttggttacgggtaagttttaatattttattaggaatttttagtggtagatgattttggtattttttggggtggtgttgaagagtatgtcgtcgggggtcgcgttgtatttttcgggcgggtgggagttgtttgttttcgttaagtattatttggtaagtggtagggatggtttagtttggggtttgttgtagttgttgtttttagatatggttttttgtgtattgtatttacgaattttttgcggtttttagggtatttattataatgatatttatatagtttgttataaagaatagggtaaatgggtttgtagtatattcgacgttaaagttcgagattaattttgattttttttttgttaggtttaaagaggttcggttggtttttgttagtgtggaaataagttatattatggttagaggttatgatggtaggagtagttagagaaatttttttgttttaatgagtatatataaattaaatgaattatttattaataggattgataggaggataatagttagagtgattttatatgagattgtttgggttattgtatatagtgtatcgatgagtgtatattttaaattagatgtttattttgattataggatagagtagatagttaggtttgatgtggttaatataaataggaggtttagttaagattaattagagaatggggtatggggagagggatttatatgaggagggtaatagatagagttagagttggaataataatgtatagggggtgtatttttattatattattgtatattatataataatatgttaaaagttttattgtatttgttatttttattgtcgagtgttttttgattttttggtggtggtgtttttattgttttcgaagtttttaggtttttgtgttttttttttttaatttttttttagttatagtttaggttttatttatttgtggatgtttttagtttttatttttagaattttttagggataatttttattgttttttttttattttggattttgtaaagtttttttcgttaggttttgtaattaaagttcggttttgggaatttttaggtataatttttttttagatagggtgtttgtgaggtggcgttacgggatatagatatacgtgagagggggagagtagggttacggttgttatatttttgttacgggtttttgttagtttatttttgggtttttttagaatttttgatgttgtgagaattgtaggttttttggttttatgataatataaagggaaataagaggttttagaatgtagggttttgggtttagatcggagagggtatagggttagggattttggttagatataggtttaggtttgtggttggttagttgtagttgtggggtttggtatgtgttttaatatggttttggagttttatatggatttgttgttagtattttgtcgtgtcgtttatattttttcgaagaagtatgatatttagtttaatttttagtttgtggatttgttgaaaggttagtttttattgttgtttggtaggtttggttttggggggaggtaggatatatagattggagttttttttttttttttttttttggtagagttttattttgttatttaggttggagtgtagtggtgttattttggtttattgtaatttttattgggtttaagtgatttttttagtttagtttttcgagttgttgggtttataggtaaacgttattatgttcggtttattttttgtatttttagtcgagatggagttttattatgttggttaggttggtttcgaatttttgattaaaagtgatttgtttcgttttagtttttaaagtgttgggattataggcgtgagttattacgtttagattgataggggtatttttgagaagtagggatagagataagggaattattttagaggtttatagggaaggaaaagatgttacggggtttgtaggttgcgtttttgtttagtttattttagttattttttattaatgatagtttttacgttatagatgaataggttttttgaggagaagggggaatgaatagtagttgggattttttgggtttttattaggtattttggtttcgttgtgggattttaggattttgtgaatttagtatttgtttattaggttggtaaagggggtagaagtgtatagttcgtttatatttattttttttagtgtttagaaaggtttagggttttattgttttcgagtgagggttagaggggtgggttttaattttatttcgagtatagagggattttaaaatttagtttgtaaaagtag

SEQ ID NO: 1320 - DNA, 2500 bp, Artificial Sequence
  chemically treated genomic DNA (Homo sapiens)
aatatttgtacgtttagtagtaatggggttttattgtgttgtttaggttggtttcgaattcgtgattttaggtgatttgtttatttcggttttttaaagtgttgggattataggcgtgagttattatgttttatttttattcgttttttattataggagttaaagaatattttttttttggtttgcgttttttttttttttttttttttggttttattaagatattttaagatgagtttttgttatttttatttgaaaaagttttgattagtttattttttcgaattaattagaagatataaagtagagtttatttttttggaaatgggttttttatttttttttttttttttttttttttagtttggaaattttttttttttatttttgtttgttttaggttttattggttatgatcgttttttattgttgggttttagtttttttttttttttataaattttttttttttttagatgaaaagattaatattgaaaaggtaagttgatgtgtttcggtttgtatagagttttggaagtagagttgggatttgaattttgggtttttgattttttgtttagggttttttattttggtagagtaggagattaattttttttttttttttttttttaaatgaagtttttatatatagttatttatatatgtataagtagtttttaaggttagagaagttaattttaaattttagagttgtggaggttttatagattatatggagttttagttagtgattaaatttgaggtaatagtatttggaggtttagttttagtattgaggggagttggagggaaaaattaagttaagagtaaaattttttcgttttgaaaataatagtggtataatataatatttttggattgtgggaaataaaatggagagggatatgattagaaggaaatttttagaattttattaattttacgttttttaaattggtataattggtgataattttagagttatttgttatcgtattaaagtttgatagagaaggatgatttataggagtagttttgttgtgtttgaggattgtttgatatttgaaatgagtttcggattagtttttggttgaagtttatttaggtttttttcgcgaaggttaagttattagagttaattattatttttgttttattttgtttaaatatcgtcgtcggggttgataattgtatttagtgaatatttgtattggaattcggagtatttatttttttttatttgtagtttgaggaattttgattttttggtgatttttagaagtttttggacgtagttgttcgtgaggcggatttgttcgtcgtcggtttcggggttggacgatacgttcggagttttagggaggtcgcgaggagtttgtttttcggttaggaagtgatcgttgtttgcgtcgcggtttttaaggataatttttgggcggtaattatttttttttatttaggagattaatttttttgttgaggttttatttaaggttgtagtatttatttattgaggtttttaagaaatttgtttgttttaggaaattttttattgagatttgtttcgtattgttatttggtggtaagatataaaaatatattttttacggtgggattagattgcgcgtttgtttcgtttttatttcgtttttttttcggtggtggggtagagggatggtggaaagggaattaagagttagtttttagaagtgtaggtatttgggattgagattggagtggggttatatttttttttttgtttttagtattagttatagttttgttattgtgtttttagttttttttttttttgtagatattggttatttgtgaaattaattgtattttttttttgtattgttttttaggatatttggaattagcgtatagtttattgttagtaattggatagaatcgtatggtaggaatttagaagaggagtttaatttttgagtttatatttttttttttgggttttatttttttattttattttatatttagttttttgatgatgtttaggatatttttttagttattttaatttttttttttgtaagggataggagggataaagtaaggttatatatttagaaagagtttgtttattttttgtaagttttagtttttttttttataaagtgggtataagaatttttgttttggagggttttgtgtgtgttttaggagatgttggattaatattagtgtttattttattttttatttttttattttttaggttttttgttagttatgtgatgtaggttaggatgtaaaggagattaatagtatagattattttttttttagtgttatttgtgttttgtaggtttagtgggtgtttttattagagttttgtattttgagtttagtttttatttgttttttggaagatgttggttttagaattttttgttttttttttgtaggtattgtggtatttatagttgatttgtagagagtttagatgtattttataaataaggaatgtatt

SEQ ID NO: 1321 - DNA, 2500 bp, Artificial Sequence
  chemically treated genomic DNA (Homo sapiens)
agtatattttttatttatgagatgtatttgggttttttgtaaattagttgtgaatgttataatgtttgtaggagggaggtagagaattttggagttaatattttttagaaggtaggtagggattgggtttagggtataaggttttagtaggggtatttattgggtttgtagagtataaatggtattggggaaaaagtgatttgtgttgttgattttttttgtattttagtttgtattatataattggtagagagtttggaggatggggaggtgggaaatagggtggatattaatattaatttagtattttttgaaatatatataaaattttttaaggtagggatttttgtgtttattttataggggaggaaattgagatttgtagaaggtaggtaagttttttttgaatgtataattttgttttgttttttttgttttttataaagaggagagttaaggtggttggaaggatgttttgaatattattagaaaattaaatataaaataaggtaggaaaatgaggtttaggggaaggaatgtggatttagagattaagttttttttttaaatttttgttatgcgattttatttagttgttaatagtgaattgtacgttggttttaggtgttttggaagataatgtaaagagggaatataattagttttataagtggttaatgtttgtaaagaggaaagaaattagaggtatagtgatagagttatggttggtattgaaaatagagaaggaggtgtagttttattttaattttaattttagatatttatatttttgggaattagtttttggttttttttttattatttttttattttattatcggggagagggcggggtgggggcggagtaggcgcgtaatttgattttatcgtggagggtgtgtttttatattttattattaggtggtagtgcggggtaggttttagtaggaggttttttaggataggtaggttttttaggaattttagtgagtgagtgttatagttttaggtggaattttaataaagaaattgattttttgggtggaggaagatggttgtcgtttaggggttgtttttaagggtcgcgacgtagatagcggttattttttggtcgaggggtaggtttttcgcggtttttttgggatttcgggcgtgtcgtttagtttcgaggtcggcgacgggtagattcgttttacggatagttgcgtttagaggtttttggaaattattaaaggattagaattttttaggttgtaggtggagggaggtagatgtttcggattttagtatagatgtttattggatatagttattaatttcgacgacggtatttgaatagggtggggtaagagtggtggttgattttgatagtttagttttcgcgaaaggggtttaggtggattttagttaagaattgattcgaagtttattttaagtgttaaataatttttaagtatagtaaggttgtttttgtgggttatttttttttgttaaattttgatgcgatgataggtgattttgagattgttattagttgtattaatttgaggaacgtggaattagtagaattttagaagtttttttttaattatgtttttttttattttattttttatagtttaggagtattgtgttatgttattattatttttagaacgggaagattttatttttggtttaatttttttttttaattttttttagtgttaaggttgagtttttagatgttgttattttagatttaattattagttgaaattttatataatttgtagagtttttatagttttaaaatttggaattaatttttttggttttaagagttgtttgtatatatgtggatagttatgtataaaagttttatttaaaaaaaaagaaagagaagaaattgattttttgttttgttagaatgaagagttttggatagagaattaggagtttagaatttaaattttagttttgtttttagggttttgtgtaaatcggagtatattaatttgtttttttagtgttggtttttttatttgagaaagggggagatttatggagggaggaggagattgagatttagtaatggaggacgattatggttaatgaagtttgggataggtagaagtggagagaaagaatttttaaattagaggagaaaaaaaaaaagagggggtaaagggtttatttttaggaaggtgagttttgttttgtgttttttggttggttcgggggagtaaattagttaggatttttttaaatggaaatgatagaaatttattttaaaatgttttggtagaattaaaaaaaaaaaaaaaaaaaaaacgtaaattagggagagagtgttttttggtttttgtgataaaaagcgaatgggagtggggtatggtggtttacgtttataattttaatattttgggaggtcgaggtgggtagattatttgaggttacgagttcgagattagtttgggtaatatagtgaaattttattgttattaaacgtataaatatt

SEQ ID NO: 1322 - DNA, 2480 bp, Artificial Sequence
  chemically treated genomic DNA (Homo sapiens)
gagattttattttaaaaaaaaaaaaaaaaaaaaaataaaaaaaaatttaattaattaaaaaataaaaggtatttatttggtaggttttggtaattttagagttaatttgtgtggtgtggtggttaggaggtttagtgtatatttaataaatattagtggttattatgatttatttatagttgtaagttattttcgcgattgggaagtttttagaatttagagtttttgtttttggtaaaatttttttgttttaggtttttttttgttaagagattgttttttttatagcgcgaatagatggttatggattattttataaatgattttttattgaaggtgtttagtttggtttgtttttttaggaagtaggttgaggtttttttagaaagttgtttagaagtagtgtttttttagttgttgcgacgatagttggttgaacgtgttttaatttagttttgatttttgttttttttgagtttgtgtagtagtcgtgtttattattaagtgttgtcggtagagtttggtggtggaacgttaaagtgtgtgttttagtaaatgttcgttacgtgtttgcgttagtttatgtacgttatattttcgtagtttttagttattttattaataggtttgaattagttttataatattggggagtgaagaatgaatgattttatttttttttttttagtttgtttattttattttttattatattttgtgtttagaatagtgtttggtacgggtagatgtttagtaggtatattttattttatttttatttttgagatagagttttgttttgttatttaggttggagtgtagtggtacgatttcggtttattgtaattttcgttttttgggtttaagcgattttttttttttagttttttgggtaagtgggattataggcgtttattattacgtttggttaatttttgtagagagagttttgttatgttggttaggttgagttggagtaatgttttttttattttatggagtttttatttattatagttgttagttttttttaattttaggaattttcgttttaagggaaataggatagatagcgttcgtgttttattttgtttatttttagatgaggaaatagttattaaggtttcgtgtaaattcgtcgtttatttaatagtttatattatttgttttgttttagtttttcgttcgttagttggtgtttttggtagttagtaggttcgcgggggtttcgttttagttaggttgggggtcgggggttgggttttaggaattttgttgttgttgttggggttgttttaagttagcgtggatagaagtttagagtttaggggtattttagggttgaggggtttaggttggtttttgggtttcgggtttagggtagttatttagggtgtgtgtttgtagttaattagggttgtggggaggaaggttttcggtattgttatagtttgtaggttttatgagtttggttttggggttgggaaggtgggagtttttggttttaggaggttgtttttgtttttaattttcggtagagtgtttacgggaggagggggaggagtcgtttttatagtgggttatagttaattgtttataggttttaggtcgttattttgagttggtttttaggttatagttttttttgtttatagttttattatgttaggattaggataggagtgggtgttgtcgatagggaataaagggggtagcgtggggttgagtttttggggtaggtagggtgtttcgtgatttacgggttttttattgtttttggaaattttattggttttgttttattatggagggggtagttggttttggttgttttagtcgattaggaagttattttggtttttaggggtggtaggcgtttgcgtgttattaatagaaattttgggttagggcgggttggagagtttaaggtttggagtttttatgggggtgttttttttacgtaggaaattgattagagtgtttttaggagtttgttttgaaggtgggggtggggagtggttggtttggttgggttaagggttagtgggttagggttttagtatttttttttttttggttgtaggaggttttgtggtaggtatggggttgtcggtggaaggtgtagtaggacggttgtgtagtgggggcgttcgattttttgtttttgttaggtttaggttaggtttttttaagggtttatagtatagattttcgtggagatgaatgaaattgtagtcgtagtggaagttatttataaatacgcgttttagtgggtttagttttggggttttttttttaatggtattgttatgttggttggcgtaggtgaagggtttggggttaggaggcgtgagatgaagttagtttcgttgaagagttcgtggttgaggagtcgttgtttgagtttttagggtttagtgtgtttaggattcgttaatagggtggtagagagtaggtgattgtgttggttggttgttggg

SEQ ID NO: 1323 - DNA, 2480 bp, Artificial Sequence
  chemically treated genomic DNA (Homo sapiens)
tttagtagttagttagtatagttatttgttttttattattttgttggcgaattttggatatattgggttttgaaggtttaggtagcggttttttagttacgagttttttagcgaggttgattttattttacgttttttggttttaagttttttatttgcgttagttagtatggtaatgttattgaggaggaggttttagagttgggtttattggggcgcgtgtttgtagatgatttttattacgattataattttatttatttttacgaggatttgtgttatgggtttttagaggggtttgatttagatttggtagggataggggatcggacgtttttattgtatagtcgttttgttgtattttttatcggtagttttatgtttgttatagggttttttgtagttaaggaggagggggtattgagattttggtttattagtttttggtttagttaggttagttattttttatttttatttttagagtagatttttgggaatattttggttaattttttgcgtgaggaagatatttttatagaggttttagattttgagttttttagttcgttttggtttagggtttttattgatggtacgtagacgtttgttatttttgggagttaaaatgattttttagtcgattaggatagttagaattagttgttttttttatggtgggataggattaatgaggtttttaaggataatgaggaattcgtgggttacggagtattttatttgttttagagatttagttttacgttgttttttttgttttttgtcgatagtatttatttttgttttggttttgatatggtggagttgtggataggaaggattgtagtttgggagttagtttaggatggcggtttggggtttgtggatagttagttgtggtttattgtgggggcggttttttttttttttttcgtaggtattttgtcggagattaagggtagggatagttttttggagttagagatttttatttttttaattttaggattaggtttatgggatttgtagattgtggtagtgtcggggatttttttttttataattttgattggttgtaggtatatattttgggtgattgttttgagttcgagatttaagggttagtttgagttttttagttttgaggtgtttttgagttttgggtttttgtttacgttagtttggggtagttttaatagtagtagtagagtttttgaggtttagttttcggtttttagtttggttgagacggggttttcgcggatttgttggttgttaggaatattagttggcgagcgggaagttggagtaaggtaagtgatgtgggttgttgggtgggcggcgagtttgtacgggattttggtgattgtttttttatttgaaaatgagtagagtgggatacgggcgttgtttgttttgttttttttggggcgggggtttttaggattaggggaaattgatagttgtggtaggtggaggttttatgaggtgagaggagtattgttttagtttagtttggttaatatggtaaaattttttttataaaaattagttaggcgtggtggtgggcgtttgtagttttatttatttaagaggttgagggaggagaatcgtttgaatttaggaggcggaggttgtagtgagtcgagatcgtgttattgtattttagtttgggtgatagagtaagattttgttttaaaaataaaaataaaataaaatatatttattaagtatttattcgtgttaagtattattttaggtataggatatagtgaaaaatgagatagataaattgagaaaaaagaaataggattatttattttttattttttaatattatagaattagtttaggtttattaatgaaataattgagggttacgaaaatgtagcgtgtatagattaacgtaggtacgtgacgagtatttattgaaatatatattttggcgttttattattaggttttgtcggtagtatttggtaatgaatacggttgttgtataggtttaaaagaagtaagagttagggttgggttagggtacgtttagttagttgtcgtcgtaatagttggagagatattatttttgggtaattttttggagaaattttaatttgttttttgaaagggtaagttaggttgaatatttttagtagagagttatttgtggaataatttatgattatttattcgcgttataggaaaagtagttttttgatagaggagaatttaggatagggaaattttgttagggatagggattttgagttttgaggattttttagtcgcggggatgatttgtagttgtgggtgaattatgatggttattgatgtttattgaatgtgtattgagttttttggttattatattatatagattaattttagaattattaaaatttattaggtaggtattttttgttttttgattggttgggtttttttttgttttttttttttttttttttttgagatggagtttt

SEQ ID NO: 1324 - DNA, 2364 bp, Artificial Sequence
  chemically treated genomic DNA (Homo sapiens)
aagttttttttgtaatcgttaagtgggttattaaggtaggggaattgtagtggagaaagagtttaatttatgtagaaatggttgaataggagattagagttgttttttgtttgtttgttttggttttttttttgagatgaaggtttgttttgtcgtttaggttggagtgtagtggcgtgatttcggtttattgtaattttttttttttaggtttaatttatttttttgttttaattttttaagtagttgggattataggtatgcgttattaggtttggttaatttttgtatttttagtagaaatggggttttattatgttggttaggttggttttgaatttttgattttaggtgatttttttgttttgattttttaaagtgttgggattataagtaggagttattgagattggagtttttttattatttaaattagttttttggagtatttaggggttagggttttttaaaggtagtttaagggaagggtggcgggggtggttaggtaatggggtttgttgttgattggttgggggtgtaatgataggggtgtgggaaatgattttgtatgttgagttatttttgggtgaggttataggagtagttggtaggtttaggtggaattataggtgttagatatataaaaagtttgaaaagatattttaaaaaagttcgggcgtgatggtttatatttgtaattttagtattttgggaagtcgaggtgggtggattatttgaggttaggagtttgagattagtttggttaatatggtgaaatttttgtttttattaaaaatataaaagttagttgggcgtggtgatgggtatttgtaattttagttatttaggaggttgaggtaggagaattgtttgaatttaggaggcggaggttgtagtgagtcgagatcgtgttattgaattttagtttgagcgacgagagagaaattttgttttaaaaaagaaaaaaaaaaagatattttaaaaggttaatttttacgaagggttaggggttttataggtgagtggagttttagtagtttttttagttttgcgtgtttatgtattggttttttttttggttttatatttagtgtttaaggggttgtagtgagacggggtttgggtcgcggagttgcgtttggttttgttgttttataagggtatcgtggttgttagtttgtttttgtaattgttgtagagttacgtagggttataggtggtggttggttgtgggatttattttttgtgtatgatatttttaggtattcggttgggtgcggttttggtagttagtagggtttttgtattagttggtttagtttgtgttagagggtatggtggttggtatttttttttatattatttttttggaaatttttttaggagttggcgatttttgagtaaaggatttttaaggttattttgtttttagaagggtgtgttttgtttattggtttgttttttatttatatttagggggttttgaaatagaggtcgttgttttttttttttgttttagtgtgtggggaaaaggaaggaatgggaagggaggttttgaggacgaaagttttttttaggagttaaggatggagtttttggtattatttgatttatgagagggaagtgggtaggtaagagagattggttttagttttaaggaacgagagacggttgagttattagagatatgattagggatattagtgttattagaaaggggtttcgatttagattttaagagagggtttttggtttttatataagaaataattcgaggtgggtttataaagtgaaagtaagtttattaagaaagtaaaggaaggttagacgcggtggtttatgtttgtaattttagtattttgggaggttaaggtgggtagattaaaaggttaggagattaagattagattggttgatacggtgaaattttgtttttattaaaaatataaaaattagttagttgtggtggcgtatatttgtaattttagttgtttgggaggttgaggtaggagaatcgtttgaattcgggaggcggaggttgtagtgagttaagattgtgttattgcgttttagtttgggtgatagagtgagatttcgttttaaaaaaaaaaaaaaaggaagtaaaagaattaaagaatattttatagatagagtagtagtatgggttgtttgattgagtatatttatagttattttttgattatgtaattgtttagcgggttttttttgtttattgtttagatagagtcgattgattaagacgggaattgtaatagagaaatagtaatttatatagagtttgttgtgtgggagattggagttttattattatttaaattagttttttcgagtattcggggatta

SEQ ID NO: 1325 - DNA, 2364 bp, Artificial Sequence
  chemically treated genomic DNA (Homo sapiens)
tgattttcgaatgttcggggagattgatttgagtaatgataaaattttagttttttatatagtaggttttgtgtgaattattgtttttttattgtaattttcgttttgattaatcggttttgtttaggtagtgggtaaggagaattcgttgggtagttatatgattaagaaataattgtaagtatatttagttaagtagtttatgttgttgttttgtttatggagtattttttaatttttttattttttttttttttttttttgagacggagttttattttgttatttaggttggagcgtagtggtataattttggtttattgtaattttcgtttttcgggtttaagcgatttttttgttttagttttttaagtagttgggattataggtatgcgttattatagttggttaatttttgtatttttagtagaggtagggttttatcgtgttagttagtttggttttgattttttgattttttgatttgtttattttggttttttaaagtgttgggattataggtatgagttatcgcgtttggtttttttttatttttttaataaatttgtttttattttatggatttatttcgaattattttttgtgtaagagttaagaatttttttttggggtttggatcgggatttttttttagtaatattaatgtttttgattatgtttttagtgatttagtcgtttttcgttttttggggttgagattagttttttttgtttgtttattttttttttatgggttagatagtgttaaaggttttatttttagtttttagagaaagttttcgtttttagaatttttttttttattttttttttttttttatatattggggtagggagggagaatagcggtttttattttaaagttttttagatatggatgaagagtaggttagtgagtagggtatatttttttaggagtagaatgattttgaggattttttgtttagaagtcgttagtttttggaaagatttttagaaaggtggtatagaggaaggtgttagttattatgttttttagtatagattgggttagttggtgtagaggttttgttgattgttagagtcgtatttagtcggatgtttagaagtgttatgtataagaagtggattttatagttagttattatttgtaattttacgtggttttgtagtagttgtagggataggttgatagttacggtgtttttgtggagtagtaaagttaggcgtagtttcgcggtttaagtttcgttttattgtaattttttgaatattgagtatagagttagggagaagattagtatatgggtacgtagagttgagggggttgttggggttttatttatttgtgggatttttggtttttcgtgaagattggttttttgaggtattttttttttttttttttttgagatagagtttttttttcgtcgtttaggttggagtttaatggtacgatttcggtttattgtaattttcgttttttgggtttaagtaatttttttgttttagttttttgagtagttgggattatagatgtttattattacgtttagttagtttttgtatttttagtagagataaaggttttattatgttggttaggttggttttaaatttttgattttaggtgatttatttatttcggttttttaaagtgttgggattataggtgtgagttattacgttcgggtttttttgaggtatttttttaggttttttgtatgtttgatatttatggttttatttggatttgttaattgtttttgtggttttatttagaagtgatttagtatataggattattttttatatttttattattgtatttttaattagttagtagtaggttttattgtttagttattttcgttattttttttttaaattatttttgaaaaattttagtttttaaatgttttaagagattaatttgaataataaaaaaattttagttttagtggtttttgtttgtaattttagtattttgggaggttaaggtagaaggattatttgaggttaggagtttaagattagtttggttaatatggtgaaattttatttttattaaaaatataaaaattagttagatttggtggcgtatgtttgtagttttagttatttaggaggttgagataggagaatgggttgaatttgggaggaggaggttgtagtgagtcgagattacgttattgtattttagtttgggcgatagagtaagtttttattttaaaagaaaaattaaaataaataaataaaaaataattttggttttttgtttagttatttttgtataaattaaattttttttttattgtaatttttttgttttgataatttatttggcggttataagaggagttt

SEQ ID NO: 1326 - DNA, 2467 bp, Artificial Sequence
  chemically treated genomic DNA (Homo sapiens)
gagaggttttggaagggtaggggcgtgtggtgatattgggtgtttttgggttttagtatttttttagttagttggaagaatataggtaagttaagtttttttttttttttgagtttttaattttttatcggtaaagtagggatgataaaaataaattattaaattgttgtgaggttttaatgagggtaaagtttgttgtttgaaatagagtaagtttttgtggcgttttagttatttgtattagttatttgtatttttttttgcggttttttttttaatttttattttttttttattttaaaaagattttttttgaaaatgttagtttgttttagtagtattaggagatattagggaaaggtttttttttttttaagttgaggttgagaaggaatgggaagaacgaagagaagtatttttgtggaggttttttttagttggttttgggtttaggaatattatatatttaatttttaaaggtttttaggggttggtttaaggttatatagtttgatagtgcggagtatttcgaagttagggcgtgtggtgtagaataggttgggtgtttgaatttaattagttttttttatttttttatttagagttttttaggttgtggggtgtttatttgtgtatttttaagtcgattatttttttggggttttcgttaatttaattttatggaaatattataaggggtagatagagatgagtcgtgttagtgtttgtattagtagagggtaggattattgagcgttcggaggggagacgagtgtttgggtgtttttgggaatttggtttgtttcgatttttttggggggttttttttggttttgatttttatttttttagatttatttttatttatgtttatttatttcgaggggttttttagtgtgtatttatatatttatatttaaatttattattttatttgttttttaattattaggaacgtggcgttgttttaggtttttttttttttgtattttttagtagttgtttttattgggtagggtaaattatatcgtggttcgattataaaagttattttttaaaaaaagaagttttaaggttttcgagagacgtagttgagttttttatttggtagtgtttgatttaggaggtgatgtttgggttatgagttatagagtttggtgtttttttaagtagggagtataaatttttattttttttttttgttttttttgacgttagttggaaggcgtgtgagtgagtgaggggttgaggtatcgttcgcgcgagtatatatagatatatatatatatatatatatatatatatatatatattttttagatttattttttgtttgttagttttacgagttagagagagatagagcgcggacgtcgtaggaggtagtgtttggattttagttgtttaggagaggtgaggggttagatggggtttgaggatattgtgttagaaattgtggttttggttaggtcgaaggagagaggtataacgtgaaggtgggggttggattagtttagtttagtttatagatagggtgttgggggtatagaggatattatttgttttttttttttttatttttttttcgtgatttttaaatgaggtgaggtcgtgtggttttcgtgggagtatgtttgtgtttgtgtttgtgtttgtgtttgggatttgcgtttggtttaggaggtagagagtagtagatatttgttaagtcgtagttttttgtttgggaagtagcgggagagaggatcgttttgattagagaaattttagtgtcgtttttagttgttgaaagtagagtgtagtagggatttttgttggttttttttttggaatgttgggttgggaagggatcggttgggaaaggtagatagttggatttggagtagttgttttattttgattttattttttttttagtgtgatggggataattgtgttagttggtttagagaggtggtttcgtgtggttattttttttttttaggtattattttatttcgagtttttgttttttgtttgtttgttggtttgttttgatttttatttttgttagggtatagttttcggagggtaggggtgataagttagggtttgttaggtttttattttgggatatagggatttagggtggttttggttggtgttaagtttatgaatggtttgattttggtataaggagtttaggcggagataaggggcgacgttggtatttataaggagatagtaggtttttgttaagttgttagtttgtaggttttttttagggagaggggagggggatatagagcgagaataataataaatatagagtgtgaattgttgtatttattggggttggggtaggagaggaggaagtatgtttagtggggggtgggtaatttttttgagagtttggtattatgttgtttggttgtgattcggtaggggtttttttttgggaaagggggtttttagttttttgggggat

SEQ ID NO: 1327 - DNA, 2467 bp, Artificial Sequence
  chemically treated genomic DNA (Homo sapiens)
attttttagaaagttggagatttttttttttagggagaggtttttgtcggattatagttaggtagtatgatgttaggtttttagagaggttgtttattttttattgggtatattttttttttttttattttagttttagtggatgtagtagtttatattttgtatttattattgttttcgttttgtgttttttttttttttttttgggaagagtttgtaggttggtagtttggtaggaatttgttgtttttttgtgggtgttagcgtcgttttttattttcgtttggattttttgtgttagggttaggttatttatgggtttggtattagttaaggttattttaagtttttgtattttaagatagaggtttggtaggttttgatttattatttttgtttttcgggggttgtgttttggtaagggtggaggttagagtagattagtaggtaggtaagaagtaagggttcggggtggggtggtatttgggggaagagaataattatacggagttatttttttaagttaattaatataattatttttattatattggggaaaaaatagagttaggataagatagttgttttaggtttaattgtttgttttttttagtcggtttttttttagtttaatattttaggggaaggattagtaagggtttttgttgtattttgtttttagtaattggaagcggtattggggtttttttggttaaggcggttttttttttcgttgttttttagataggaggttgcggtttggtaggtatttgttgttttttgttttttgagttagacgtaggttttagatatagatatagatatagatatagatatgtttttacgggagttatacggttttattttatttgggggttacggggagagaatgagggagggagagataggtggtattttttatatttttaatattttatttgtaagttgaattgggttgatttagtttttatttttacgttgtatttttttttttcggtttggttaaagttatagtttttggtatagtgtttttaggttttatttagttttttattttttttgggtagttggggtttaggtattgttttttgcggcgttcgcgttttgtttttttttggttcgtggagttggtaggtaggggatgggtttggaagatgtgtgtgtgtgtgtgtgtgtgtgtgtgtgtgtgtgtttgtgtgtgttcgcgcgggcggtattttagttttttatttatttatacgttttttagttgacgttagggagagtaggagggagggatgagaatttgtattttttgtttaaagggatattaggttttgtggtttatggtttagatattattttttgagttaggtattgttaggtgagaggtttagttgcgtttttcgggggttttaaagtttttttttttggaaagtggtttttatggtcgggttacggtataatttgttttgtttagtgagggtagttgttgaggaatgtaggggaggaagaatttgagatagcgttacgtttttggtaattagagagtaagtggggtggtgagtttgagtgtgagtgtgtgagtgtatattggggggtttttcggggtgggtgggtatgagtgggggtgagtttgggagaatggaggttagagttaagaggagttttttagaggggtcgagataagttaggtttttagggatatttagatattcgtttttttttcggacgtttagtggttttgttttttgttagtatagatattgatacggtttatttttgtttattttttgtaatatttttatggaattgaattgacgaggattttaaggaagtgatcggtttgaaggtgtataggtgaatattttatagtttgggaggttttgagtagagaagtagagagggttgattgaatttaggtatttagtttgttttatattatacgttttggtttcgaagtgtttcgtattgttaagttgtgtgattttgggttagtttttgagggtttttggaggttgagtgtgtgatgtttttaaatttagggttagttggaggaggtttttataaaggtgttttttttcgttttttttatttttttttagttttagtttggaaagaaggaagtttttttttggtgttttttggtattattgaggtaggttggtatttttaaaaggagtttttttaaaataaaaaggaggtgggagttaaaagggaaatcgtagagaaaaatataagtaattaatataaatagttaagacgttataagagtttgttttgttttaggtagtaagttttgtttttattgaaattttataataatttaataatttatttttattatttttattttatcggtgaggaattagaggtttagggaggaggaaggatttgatttgtttatatttttttaattggttagagaggtattggaatttaggagtatttagtgttattatacgtttttgtttttttagaatttttt

SEQ ID NO: 1328 - DNA, 2366 bp, Artificial Sequence
  chemically treated genomic DNA (Homo sapiens)
gatttatgtgttttagtgtttttttttgtaatatgggggtgatgattgtatttattttataaggaagtttttagtaaaatgaaagtttttaaaattatgtttgttttattattaatgattttataaatattagtaataatattagtattaagttttgttattttttattaattttttgtaaacgattttatttttttgtttttatatattttttatatttgtattttatttgatttagttattttttgtttaatttgttagaaagggtagatagttttttagttatttgttgttagggaaatttattattttagttcggatggtgaagattttagtttgagagattagttcgggtttgaagtgtttttttatttattgtgttgagatttttttttttcgaattttgttatgtttttgtatacgttgttttttttatttgttacgtttttattttttttttttttattgtaaatttttatgtagtcgttaaggttttatttttttttggaaagttttttcgatttttttggtaataattattattaatatttatttattgagtttattttgtgttaagtattgttttagatacgggtatgtaatcgcgattgagagagatagattacgtatagtttggattttattttaagagttattgggtgtcgttggtgggtttgagtgagtggggttaggaagtgatttattttttcgagggtttgtgggagttttagtttaggggcgggtagggggcgtggggaagtttgtagtcgagagtttaggtaggagttttttgcgtggtttcgggagaggaaggggtttggttcggggcggggtgtggaggtgggaggacggcggtgcgggatggagggtggaggttaggttgatagggtgttggtggtgggttgcgggggtcgattttaggttttggtttatgtagttgttattttggaggtgaatagtttgcggggaaattggtatggtttggggaaggcggggagagggggagaaatgaaagtattgagtttaagtggtttgtagaatttcgggggtttaggcggtacggcgggcgttggggtttcgggtagagttttttggaggtttgtggtagttttatttttacggtatttatttttttcgggttttgtcgtagagaggaggaagtttttgtcggttgagcgggtttggaggaagtgagtagcggggtttttgtttttcggtttggttttcgaagattttagaagaattcggaatttgtttttattcggaatttagggattattttttgtatttagtaggtttttgtttttttgcgtggaaagcggttgggtgagttttggtatcggggttattatatttgagtgttgggggttacggagggaggggtttagatattatttgggaaggattttagagtgtagttttagtttaggttattcggggaagggagtcggtaaagtgggattttgagtttttacggttttttcggttgtttttgtttagaggttgttcggcgttttttttttttgttttattgaggagttgtcgtttttgaattttagttaattttttcgtttttaggtgaagaaattgaggttttggggttaggaaggggtttgtttaggttgttgatttttttgggtagtatcgagtttaggttttttttgtaattatgtattaggattagagagggtagggggtttgtttaacgttatatagtttgagtgaggaggagttggtttgggatttaggttttttgacgtttaggttaggttttttcgttttttttggttatggtttttagtttggatattaaggggttgggagttagttgtgtttttattatttttatgttatagggtaggatggagtttggtatttttcgttttaggttggttgttggtgtgatatgggtggttttagtcgagtgaatgttttcgttttttatagtttagggggttttttgttttggttattaatttttgttatgtgatttttttattttaatgtttgattgagtttgaaaatattgagaagatttaggggttgaaaagggaggaagagggaggttagaaggcgttagtcgagttagcgaagtttttataggagaggaagtgggttaggggaataggaaggagggttgggttggtttttgggtttgtttttgtttcgggtatgtggtgagtttagttttttgtttgtaatgaggaggaggaagatgaatagtgtttttgttaattttggttttttcggtttatgggatgggagatgttattattttacgtatttattttagttagttttatataggtcgatcggggaggttttttttgagtttaatttgataagttttgaggagtgagttgtat

SEQ ID NO: 1329 - DNA, 2366 bp, Artificial Sequence
  chemically treated genomic DNA (Homo sapiens)
gtatagtttattttttagagtttgttaggttgagtttaagggaaattttttcggtcggtttgtgtggggttggttgaggtggatacgtggaatggtgatattttttattttataaatcggaagggttagggttgatagaggtattgtttattttttttttttttattataggtagaaggttgggtttattatatgttcgggataggggtagatttagaggttagtttagtttttttttttgtttttttggtttatttttttttttgtgaaggtttcgttggttcggttggcgttttttggtttttttttttttttttttttagtttttgggtttttttagtgtttttaaatttaattagatattgaggtaggggagttatatggtagaagttggtggttagagtagggagttttttgagttgtgggagacggaggtatttattcgattggagttatttatgttatattagtagttagtttggggcgggggatgttagattttattttgttttgtagtatggaggtggtggggatataattgatttttagttttttaatatttaagttgagggttatggttagagaaaacgaaagagtttggtttgggcgttaggaagtttgggttttaggttagtttttttttatttaggttgtgtgacgttgggtaaattttttgttttttttggttttgatgtatggttataaggagggtttggattcgatgttgtttaaagggattagtagtttgggtaagtttttttttggttttagggttttagtttttttatttggagacggaggggttggttgaagtttagaggcggtaattttttagtagaatagggagggaggacgtcgagtagtttttgagtaggggtagtcggaggggtcgtggggatttaaggttttattttatcgattttttttttcgggtggtttgggttgggattgtattttgggattttttttaggtggtgtttgggttttttttttcgtgatttttaatatttaagtatggtggtttcgatgttagaatttatttaatcgttttttacgtaggaaaataaaggtttattgagtgtaaagggtggtttttggatttcgaatggaagtaagtttcgggtttttttggggttttcggggattaggtcgggaggtaggagtttcgttgtttattttttttaggttcgtttagtcggtaggagtttttttttttttgcggtagggttcgaggggggtggatgtcgtgaaagtgaagttgttataaatttttagaaagttttgttcggagttttagcgttcgtcgtgtcgtttgggttttcggggttttgtaggttatttaaatttaatgtttttattttttttttttttttcgttttttttaaattatgttagttttttcgtaggttgtttatttttaaaatggtagttatataggttagagtttggggtcgattttcgtaatttattattagtattttgttagtttggtttttattttttatttcgtatcgtcgtttttttatttttatatttcgtttcgggttaggtttttttttttttcgggattacgtaggagatttttatttggattttcggttgtagatttttttacgttttttgttcgtttttgagttgaggtttttataagttttcggaggagtgagttattttttgattttatttatttaaatttattaacggtatttaatagtttttaaaataaaatttaggttgtgcgtggtttgttttttttaatcgcggttatatattcgtgtttagaataatgtttggtataaagtgggtttagtgaataaatattggtggtggttgttgttaaggggatcgggaaggttttttagaggagaatggggttttgacggttgtataggagtttgtagtggaagaagaaggggtgagaacgtggtaggtggagaaaatagcgtatgtaaaggtatagtagggttcgagaaggagagattttagtatagtagatagagaaatattttagattcgagttggttttttaagttggaatttttattattcgggttgaaatggtgagtttttttagtaataggtgattgggaagttatttattttttttgataggttaggtagaaagtggttaaattaggtgggatgtaggtgtaaggagtgtgtgagagtaggaaagtagggtcgtttataagaagttaataaaaaatgataaaatttagtattggtattgttgttaatatttatggagttattggtgatgaaataaatataattttaagggtttttattttattggaaatttttttgtgaggtaggtataattattatttttatattatagaggaagatattgaggtatatgagtt

SEQ ID NO: 1330 - DNA, 2333 bp, Artificial Sequence
  chemically treated genomic DNA (Homo sapiens)
tcgatatatacgtatatatatatagagtgtatatatatgtatatacgtgtagtcgtattttttggtgcgtttgttgtgagggtataggggtgggtaggttggtaggtacgtgaagttgttattagtttcgagggatcgtgagcgagttgggatttgggggagaaaaaaatgggggcggacgttagttttttgggcggtcgtcgttatcgttttcgttttttcgaggttttttttgtatttttgggtagcgaagtttttcgttaagacgggggttgatgttatttcgggttgtttagttaggggattcgggggttttggtggttgttttcggaagtgagttagtcgtttgtcggtcgataggtttggaatttttagttagaggatagaaaatttgtatgggttaggtgagcggggtttggtcgagggtagtcgggtagggggtagtagggtgcggtagtttgtttatcggaattttttagggtgtattttaggggggttgtttatttgaagggaagtgaggacgagggtgtttaaaggtcgttttttttatttttatttttatttttatttttcgtttttcgggatcgttacgttttggagtgagtgtagtcggtttgttttttaaagttttttgtttcggtcgattagttgggtgagttttggaattggaatttggattgtttagtgtgttgattttataatttcgttggggtggatttttagtttggtatttagttgttttttaattttgagcggtattcgtggatgtagtcggtttttggtttagggatgtttatttatttttggtttgtttgaagaaagttgttgtttttaatttttttttttttaagtaagtttaaaatttttatgagtaaaagagtttaaagaggtaagaggatattggcgttttaattgttttttttttttttaattttttttttttttttttttttggttggttttatggattatttgggagataaatttatagtggtttagatttatatgatttagtggatgggtatcgtgaggaggtttttttaggaagtttttaatttggtgattattacggtgggttacgaacggacgagtgtagagtcggttagtcggattttttttaagcgtatttttttttttcgatatttggtttttcggagtcgggaattttttcgtcgtttttttgttcgtagttaatagagattttttttattgaggaaaaggtatatagattcggaatcgttagatattgtaagtttattatgttttaaaaaatattaaaataatattgaaagttttttttttttagtttttttagggagggggttttagatattaaatcggggaagttattttttttagaatagttgttagttaaagtttaggtattttttgttttttgtatttgggaaagaggtacgtagtaataattttttttttttgaagttagttaggatatttttgttggagtcgacgtttgtgtggatagggttagtacgtgagttgggttgaatttgttagttgatttatgtttaagtgtgaatattttaattttcgatacgaaagtttatttttttttttatttttagggtggattagtggtatttgttttatttttttttatttttttaggaagtataagtggcggtgttatgtgtacgttgagttgtagtttttgtcgttttatcgagtttttattggattgttaaggaaagggttttaggagatcgaggtgtggtgggcgagtttgttcgttggtcgtgaattttgggtttggtgtgagtgggttagggagggaggttttgattttttatttaggtaggttcgggagggtttggattgggatagtagggtggaatgatagttaatgattaaaattttggtttgtgttttgttaggcgatagtgtagaaataatcgtaaggtttttttgatgatttggagaggtgggattgggtttagaaagcgaaagtgtttattgtgggggaagtatagtgagtgagtggtagagttaggtttcgaattttaggttttgatttttttatttacggttttttgtagtttagtttttagtagatgttttttttagatttttttaattaatttagggttgtttaggttattgattagatttgagtttaaagagagggtttgttatttttatataggagatttttgttatttgattgtgttggtttagtttatgggagtatttgaggataggcgaagggttaagttagtttttttttttgggttttttttagttaggagtgttatagttattaagggatttagtatttagggaggagttttgagttggttttttttatattcgag

SEQ ID NO: 1331 - DNA, 2333 bp, Artificial Sequence
  chemically treated genomic DNA (Homo sapiens)
ttcgagtgtagggagggttagtttagggtttttttttaaatgttgggttttttaatgattatagtatttttggttaggaggaatttagaaaaaggggttggtttagtttttcgtttgtttttaagtgtttttataaattgggttaatatagttaggtggtagaagttttttatgtgaaaatggtaggttttttttttaggtttaggtttggttagtgatttgggtagttttgaattaattgggagggtttggggagaatatttgttgggagttggattgtaaagagtcgtgaatggggaggttagagtttggggttcgggatttggttttgttatttatttattgtgttttttttatagtaggtattttcgttttttgggtttagttttatttttttaaattattagaaggattttacgattgtttttgtattgtcgtttagtaggatataggttaaggttttaattattagttgttattttattttgttgttttaatttaagttttttcgagtttgtttgagtaagaaattaaggtttttttttttggtttatttatattaaatttaaggtttacggttagcgggtaaattcgtttattatatttcggttttttaagattttttttttggtaatttaatgaaagttcggtggaacgataaaagttataatttagcgtgtatatgatatcgttatttgtgttttttaggagggtgagaggagatgaggtaggtgttattaatttattttaaaaatagggagaaggatgagttttcgtgtcgggggttggggtgtttatatttaaatataaattaattggtaaatttagtttaatttacgtgttggttttgtttatatagacgtcgattttagtaaaaatgttttgattgattttaggagagaggaattattgttacgtgttttttttttaggtataggggataggaagtgtttgggttttgattgataattattttggaagaagtaattttttcggtttgatgtttgggattttttttttgggaggattggaggggaggagtttttagtgttgttttaatattttttaaaatataataagtttataatatttggcggtttcgaatttgtatgttttttttttagtgaagaaaatttttgttggttgcgagtagagaagcggcggaaggattttcgatttcgggaagttaggtgtcggaaggaggaagtacgtttgaagggggttcggttggtcgattttgtattcgttcgttcgtggtttatcgtggtggttattaaattgagggttttttggaaggatttttttacggtgtttatttattgggttatgtgggtttgggttattgtgagtttattttttaggtaatttatggggttagttaggaggagagggaagaaggaagttagggagggagagagtaattaaaacgttagtgtttttttgtttttttggatttttttgtttatggaagttttgggtttgtttggaggaaaaaaaattaaaaatagtagttttttttaggtaaattaagggtaagtaaatatttttgagttaggagtcggttgtatttacgggtgtcgtttagaattaagaggtagttaagtgttaggttgggagtttattttagcggagttataaagttaatatattgggtagtttaggttttagttttagggtttatttagttgatcggtcgagataaggagttttgaggaataagtcggttgtatttattttagggcgtgacggtttcgaaaggcgggggatggggatgggggtgggggtggagggggcggtttttgggtattttcgtttttatttttttttaggtaggtagtttttttgaggtgtattttgggaggtttcggtgggtaagttgtcgtattttgttgttttttgttcggttgttttcggttagatttcgtttatttgatttatgtaggttttttgttttttggttggagattttaaatttgtcggtcggtaggcggttagtttattttcggaggtagttattagggttttcgggttttttggttgagtagttcgggatgatattagttttcgttttagcgaggggtttcgttgtttaggaatgtaggaggggtttcggggaggcggaggcggtggcggcggtcgtttagggagttgacgttcgtttttattttttttttttttaagttttaattcgtttacggtttttcggggttgatggtaattttacgtgtttgttagtttatttatttttgtgtttttatagtaagcgtattaggaaatgcggttgtacgtgtgtgtatgtgtgtgtattttgtgtgtgtgtgcgtgtatgtcgg

SEQ ID NO: 1332 - DNA, 2378 bp, Artificial Sequence
  chemically treated genomic DNA (Homo sapiens)
gttaaggttggaataatatagcgatttagtttttcgatttggttatatggagtggggttaggtttgttttttttgttttttattttttttttaattttatagttttttgagatttagatgttataagggtttaggtgtttatataggggtttaggagtttgttggtgttttgtatgagatttgtttgtttttggagttggttaaggagtacgcggtattttttcgagtagttgtttatagtcgttatgttcgttatgtttggaaataggagtgtaaggattagatttaaggtagagaagaggggtgttatttgatttggtgaggaaagttatagatgggagtttcggggagggggtttaagagggttttgaaaggtgttttttttattttagattttgtgtagtggagggcgggggttgggtattgtgtggtacggtgtgtgtttaggtgtgtttattaaggttattattatttttttagtaagttattgtttagggtttgatatagtaagtagtgggagggattgagatagtggttgcgatttattaagtaggtttttgagtaaaggttgtagtgtttggtcggattttagttttgtttatagtacggttttaatttcgggagttgattttttgtaaggtgggattggttttttgtaagattattgggttaaagatcggttattgttttaggatttgttttgttagttgttttggttatttaggtagatgggtttgagagggttttagggtaggtagttcgggagtagtttgtgtttttagttttgtttagaattaggagaggttgtttttttaattagaggtgtagtttggaatagatgtggaagattttttagtttatgtttttatttttttgataggtaaattaagttttaggagaaggttttatttaggttatataaggttagggtttttttttgattttttttgttttttttttttttttataagtggttttttttgttaggtttattagggatgttgtgagtttgttagaaggtgttgggggcgggtatagttatcgtttattattatttttaacggggtatcggtagttacgtggtcggaaggggtttatggcgtaatggttcggaaggtagtgatattatcgttttcgttttaagaattattcggttttttggggaagattggttgttggggagggttaaggggttaggtatttaggtttagcgattttacggtattttcgtcgtttttttaggtatttgttgtcgggttttggtaggggtttgtgtttgtggtagcgtacgtgggattggggtttttgtgtggttgtgtatttgggtttgtgtgcggcgtgagggagatttgtttcgtttattatggggattttggtttgtatgtgggggtttttgggttggtgagatttagggttgtagatgacgttatatggttgtgtgcgtatgtggttatgtgggtgtggttgtgtatgttgtgtgattgtgtgggttttggggtttttaggtttggttgattttttatttatttcgggtaagttggaggttttataatttttttatattttatattatttttttgtttagtttttgagttttttttttttgtttagtttttttgtttattttatttttttattttttggtttttagagttgtttttatattttgatattatttttttttggaagttttttagggatgttttttttttatttgtggagatgttaggtttttagtggattattttttttgtttgattttttggtttttttttttttttagtatttttttgtttggcgtttggtttttttagttttcggagggtagagggtgtttttgttttttatcggtattcgtgggtagatttagtaggcgggttttggcggggaggaaggaagtatttattgagtagcgttttttgtgtgagtagtatttttatgttgggtgttcgtgtttcggttcgcgttcgttgggggtgatatttttcggttgggagttttgtaggttggtagttattttatgttcgttggggcgattggttaatattttatgaggtgggtggggatggggaggggggagggtaggttttttgggaatatgattttaaaaattaaaatttttacgggcggttaatgggcgtagggcgcggtgtatgttcgtttttttttttgtttttttcgaattcgtttttcgaggttagttttacgtttaaggatgatgtaaaatcgtagttttagtttttttagggtgagtggggaggaaaagggtttatgttatttttagggaattgggttagggatgggtaggagggatttcgagttgggtttttggaggttttaggttagttttggtttaggagttattggttttataggat

SEQ ID NO: 1333 - DNA, 2378 bp, Artificial Sequence
  chemically treated genomic DNA (Homo sapiens)
gttttgtgaggttaatggtttttgggttaagattggtttggggtttttagaggtttagttcgaagttttttttgtttatttttggtttagttttttgaagatggtatggattttttttttttttatttattttaggaaggttgaggttgcggttttatattatttttgggcgtagggttgatttcgaagaacgaattcgaagaaaataggaggaggagcgggtatatatcgcgttttgcgtttattggtcgttcgtggaaattttggtttttggggttatgtttttagaaggtttgtttttttttttttttatttttatttattttatgaggtgttggttaatcgttttagcgggtataaagtggttgttagtttgtagggtttttagtcgagaggtgttatttttagcgggcgcgggtcggagtacgggtatttagtatgggggtattgtttatatagaggacgttgtttagtaagtatttttttttttttcgttagaattcgtttgttgggtttgtttacgggtgtcggtggggagtagaggtattttttgtttttcgggaattggggaggttaggcgttaggtagaaggatgttgagaaggggagagagttaggaggttaggtagagagagtggtttattgagaatttggtatttttataggtagagaaggggtatttttggaaggtttttagggggaggtgatgttaagatgtagaggtaattttgggaattagggggtgagagaataggatgggtaaagaggttgggtaggagagggaggtttagaagttgggtagggaagtggtgtgaggtgtggaggggttgtggggtttttagtttgttcgggatgaatagaaagttagttaggtttgggggttttagggtttatataattatatagtatgtatagttatatttatatggttatatgcgtatatagttatatgacgttatttatagttttggattttattagtttaggaatttttatatgtagattagagtttttatggtgaacggaataggttttttttacgtcgtatatagatttagatgtatagttatatagaaattttagttttacgtgcgttgttataggtataggtttttgttagagttcggtagtagatatttggggaggcggcgagggtgtcgtggggtcgttaagtttgggtgtttggttttttggttttttttaatagttagttttttttaaagggtcggatggtttttaggacgggaacgatggtgttattgtttttcgggttattgcgttataggtttttttcgattacgtggttgtcggtgtttcgttgggggtggtggtgagcggtaattgtattcgtttttaatattttttgataggtttatagtatttttggtgggtttgatagaaggagttatttatggagagaggagggaggtaagagaggttaggggagagttttggttttgtgtgatttgagtaggatttttttttgagatttggtttatttgttaggaaagtggggatatggattggaaggttttttatatttgttttaggttgtatttttggttgaaaaggtagttttttttggttttagatagagttgaggatataagttgttttcgggttgtttgttttgaagtttttttaggtttatttatttggatggttagagtagttgataaggtaggttttagggtagtggtcggtttttagtttagtggttttgtagggagttagttttattttgtagagagttagttttcgaggttagaatcgtgttgtaggtaggattgggattcggttaggtattgtagtttttgtttaaagatttatttggtaaatcgtagttattgttttagttttttttattgtttgttgtgttaggttttgggtagtgatttattggggagatgatggtggttttggtgggtatatttgggtatatatcgtgttatatagtgtttagttttcgttttttattatataaagtttgggatgaaggaggtattttttaaggtttttttgaatttttttttcgaggtttttatttgtggttttttttattaagttaggtgatattttttttttttgttttaggtttggtttttgtatttttgtttttaagtatggcgagtatggcggttataggtagttgttcgaaagagtatcgcgtgttttttggttagttttagaagtagatagattttatgtaggatattagtagatttttggatttttatgtaagtatttgggtttttgtggtatttgagttttagagaattatggggttaggaagggagtgagaagtagggaggataggtttagttttattttatatggttaggtcggggaattgagtcgttatgttattttagttttaat

SEQ ID NO: 1334 - DNA, 2269 bp, Artificial Sequence
  chemically treated genomic DNA (Homo sapiens)
agtttgttggtgttttgtatgagatttgtttgtttttggagttggttaaggagtacgcggtattttttcgagtagttgtttatagtcgttatgttcgttatgtttggaaataggagtgtaaggattagatttaaggtagagaagaggggtgttatttgatttggtgaggaaagttatagatgggagtttcggggagggggtttaagagggttttgaaaggtgttttttttattttagattttgtgtagtggagggcgggggttgggtattgtgtggtacggtgtgtgtttaggtgtgtttattaaggttattattatttttttagtaagttattgtttagggtttgatatagtaagtagtgggagggattgagatagtggttgcgatttattaagtaggtttttgagtaaaggttgtagtgtttggtcggattttagttttgtttatagtacggttttaatttcgggagttgattttttgtaaggtgggattggttttttgtaagattattgggttaaagatcggttattgttttaggatttgttttgttagttgttttggttatttaggtagatgggtttgagagggttttagggtaggtagttcgggagtagtttgtgtttttagttttgtttagaattaggagaggttgtttttttaattagaggtgtagtttggaatagatgtggaagattttttagtttatgtttttatttttttgataggtaaattaagttttaggagaaggttttatttaggttatataaggttagggtttttttttgattttttttgttttttttttttttttataagtggttttttttgttaggtttattagggatgttgtgagtttgttagaaggtgttgggggcgggtatagttatcgtttattattatttttaacggggtatcggtagttacgtggtcggaaggggtttatggcgtaatggttcggaaggtagtgatattatcgttttcgttttaagaattattcggttttttggggaagattggttgttggggagggttaaggggttaggtatttaggtttagcgattttacggtattttcgtcgtttttttaggtatttgttgtcgggttttggtaggggtttgtgtttgtggtagcgtacgtgggattggggtttttgtgtggttgtgtatttgggtttgtgtgcggcgtgagggagatttgtttcgtttattatggggattttggtttgtatgtgggggtttttgggttggtgagatttagggttgtagatgacgttatatggttgtgtgcgtatgtggttatgtgggtgtggttgtgtatgttgtgtgattgtgtgggttttggggtttttaggtttggttgattttttatttatttcgggtaagttggaggttttataatttttttatattttatattatttttttgtttagtttttgagttttttttttttgtttagtttttttgtttattttatttttttattttttggtttttagagttgtttttatattttgatattatttttttttggaagttttttagggatgttttttttttatttgtggagatgttaggtttttagtggattattttttttgtttgattttttggtttttttttttttttagtatttttttgtttggcgtttggtttttttagttttcggagggtagagggtgtttttgttttttatcggtattcgtgggtagatttagtaggcgggttttggcggggaggaaggaagtatttattgagtagcgttttttgtgtgagtagtatttttatgttgggtgttcgtgtttcggttcgcgttcgttgggggtgatatttttcggttgggagttttgtaggttggtagttattttatgttcgttggggcgattggttaatattttatgaggtgggtggggatggggaggggggagggtaggttttttgggaatatgattttaaaaattaaaatttttacgggcggttaatgggcgtagggcgcggtgtatgttcgtttttttttttgtttttttcgaattcgtttttcgaggttagttttacgtttaaggatgatgtaaaatcgtagttttagtttttttagggtgagtggggaggaaaagggtttatgttatttttagggaattgggttagggatgggtaggagggatttcgagttgggtttttggaggttttaggttagttttggtttaggagttattggttttataggatacggtggttgggggttgaggggagcgagatatttttttttttgagt

SEQ ID NO: 1335 - DNA, 2269 bp, Artificial Sequence
  chemically treated genomic DNA (Homo sapiens)
atttaagaaggaagatgtttcgttttttttagtttttaattatcgtgttttgtgaggttaatggtttttgggttaagattggtttggggtttttagaggtttagttcgaagttttttttgtttatttttggtttagttttttgaagatggtatggattttttttttttttatttattttaggaaggttgaggttgcggttttatattatttttgggcgtagggttgatttcgaagaacgaattcgaagaaaataggaggaggagcgggtatatatcgcgttttgcgtttattggtcgttcgtggaaattttggtttttggggttatgtttttagaaggtttgtttttttttttttttatttttatttattttatgaggtgttggttaatcgttttagcgggtataaagtggttgttagtttgtagggtttttagtcgagaggtgttatttttagcgggcgcgggtcggagtacgggtatttagtatgggggtattgtttatatagaggacgttgtttagtaagtatttttttttttttcgttagaattcgtttgttgggtttgtttacgggtgtcggtggggagtagaggtattttttgtttttcgggaattggggaggttaggcgttaggtagaaggatgttgagaaggggagagagttaggaggttaggtagagagagtggtttattgagaatttggtatttttataggtagagaaggggtatttttggaaggtttttagggggaggtgatgttaagatgtagaggtaattttgggaattagggggtgagagaataggatgggtaaagaggttgggtaggagagggaggtttagaagttgggtagggaagtggtgtgaggtgtggaggggttgtggggtttttagtttgttcgggatgaatagaaagttagttaggtttgggggttttagggtttatataattatatagtatgtatagttatatttatatggttatatgcgtatatagttatatgacgttatttatagttttggattttattagtttaggaatttttatatgtagattagagtttttatggtgaacggaataggttttttttacgtcgtatatagatttagatgtatagttatatagaaattttagttttacgtgcgttgttataggtataggtttttgttagagttcggtagtagatatttggggaggcggcgagggtgtcgtggggtcgttaagtttgggtgtttggttttttggttttttttaatagttagttttttttaaagggtcggatggtttttaggacgggaacgatggtgttattgtttttcgggttattgcgttataggtttttttcgattacgtggttgtcggtgtttcgttgggggtggtggtgagcggtaattgtattcgtttttaatattttttgataggtttatagtatttttggtgggtttgatagaaggagttatttatggagagaggagggaggtaagagaggttaggggagagttttggttttgtgtgatttgagtaggatttttttttgagatttggtttatttgttaggaaagtggggatatggattggaaggttttttatatttgttttaggttgtatttttggttgaaaaggtagttttttttggttttagatagagttgaggatataagttgttttcgggttgtttgttttgaagtttttttaggtttatttatttggatggttagagtagttgataaggtaggttttagggtagtggtcggtttttagtttagtggttttgtagggagttagttttattttgtagagagttagttttcgaggttagaatcgtgttgtaggtaggattgggattcggttaggtattgtagtttttgtttaaagatttatttggtaaatcgtagttattgttttagttttttttattgtttgttgtgttaggttttgggtagtgatttattggggagatgatggtggttttggtgggtatatttgggtatatatcgtgttatatagtgtttagttttcgttttttattatataaagtttgggatgaaggaggtattttttaaggtttttttgaatttttttttcgaggtttttatttgtggttttttttattaagttaggtgatattttttttttttgttttaggtttggtttttgtatttttgtttttaagtatggcgagtatggcggttataggtagttgttcgaaagagtatcgcgtgttttttggttagttttagaagtagatagattttatgtaggatattagtagatt

SEQ ID NO: 1336 - DNA, 2496 bp, Artificial Sequence
  chemically treated genomic DNA (Homo sapiens)
tttgtattttgttttttttaggtagtggataaagtattttttttgttgttgtttttttgagatagagttttttatcgtttaggttagagtgtagtggcgtgattttagtttattgtaattttcgttttttgggtttaagtaatttttttgttttagttttttaagtagttgggattatagataattattattttatttagttgatttttttttttttttttgagatggagtttttttttgttatttaggttggagtgtagtggcgcgatttcggtttattgtaagtttcgtttgtagttgggattataggcgtttattattacgttcggttaattttgtttttgtatttttagtagagacggggttttattgtgttagttaggatggttttaattttttgatttcgtgatatgtttatttcggttttttaaagtgtcgggattatagacgtgagttatcgtgttaggtttaaagtatttttttatagtttttagtttgttgttgtgtttgttttttttacggttcgtatagtttgggtttgaattttggttttttatggttttgggtaagttggttaattttttgtgttttaatttttttatttgtaaagtggggttggggaaaaattttattttatagggaatattaagtgagtttatgaaagttttcggtgtgtggtatgcgataattattatttaagtataaggtatgtttatatgtattggttgtttattacgacgtattagtatttatttaagttatttttttttagagtttgtttggaatgtagaatcggttagtttttttttttaaatagtttttgtaatttttggttatttgtgtgggtagaggcgggagtgtgggtgtgtggttttgttttgggatagggatgacgagagagtatgtgtttgtgtttagagttgtttttttttttgtttaggggttattaaatatgtttatggtttttgttgtttggttaacggttatttcgggttgtcgttttttggttagatttggagtttataagttaattttagaaatgattggtcgatttagttgttgttattatattggtttagaaggagggtggggggaggacgggtcggggaggggtagtaaggggaagggatgtgtgtcggtgtgtgtggagagggtgttttttcgtttttgttttttcggttcggtggggttttttcgcggttattcggggagacgttttagatagtcgtggtttttgtgatttgtgttttttttgtagaaggtattattgggttgggttttagacgggtattttgcgagcggatcggcgagttttaatttttcggaatgcgttgttgggggttgcggtggtaggttttcggttttttggtttattttaggtttttttggtgttgagagttttcgaggtttgatttttttgtttgttgttcgtgttgtttattttgaaaataagagtgtttcggtggaaggatttgagaataaaatgttggggtaaatggatattcgtaagaattattttttttaggttttagttgttcgttaataatttttaaaaatgtgtttagaattatgagttaatttttattgtgaatttttgttcgtagacgttagggtttatatttttttttaattattagtaatttttgttttattggtgtttagttatggtcggggaagagttaggttttttttttcgtgttaataacgttgttgagtcgaaatgttaattttaatgtttttttttaaattgtaaattaagtatgtatgagtgttgggggaagggtaatggaagtttatggttgaaggttttaattttatgttattttttttgagttttgtttgagggaaggtgttttatttggtatttcggatagtaggtatttttttgaatgaagaagatttataggttttagtggttttatagtggggtagaagggggttatgttttgatatggagtttttttttaggagaggagaagattttattagttataggtttttgggttgttgtttttttgtagtttttttatggaggaggttaggagtggggaggttcggaatggggagtttagtcggtttttagtcggttttaagttgtttagtttggttttaattcgtaagtgtggggatttgggtttttattttgtagggtttggaatacgacgaggttgttatttttattttgtggttgtttaaaaagatgttgttttatttagtgtattagtttatggaggttgagtgttttattagggtttttagattttaataaggataatggtggttttgggtgttgtatttattgttgatttaagttgtatttttttatgtttgggtattatgtttagtgtgtattttgggagtagaaaagagaggggtttatatatttttaggttatggatgagttttagaaaataatagtggagaggagagagagaaaagaaggaagaggaggaggagaaggagaagaagagaaggaggaggaggaaaaaagtagga

SEQ ID NO: 1337 - DNA, 2496 bp, Artificial Sequence
  chemically treated genomic DNA (Homo sapiens)
ttttgttttttttttttttttttttttttttttttttttttttttttttttttttttttttttttttttttttttttattattattttttagaatttatttatagtttaagagtatatagattttttttttttttgtttttaaggtatatattggatatggtatttaggtataggagaatataatttaggttagtaatggatatagtatttaaggttattattatttttgttggagtttagaagttttagtgggatatttagtttttatgagttggtgtattgaatgaggtagtatttttttggatagttataaagtgaaagtaatagtttcgtcgtattttaggttttataggatagaagtttagatttttatatttgcgggttgaggttagattggatagtttggagtcgattgggagtcgattgggttttttatttcgggtttttttatttttggttttttttatggaaaagttgtaggaaggtagtagtttagaggtttgtagttggtgaggttttttttttttttgggagagagttttatgttaaagtatagtttttttttgttttattatggggttattgggatttgtgaattttttttatttagagaaatgtttgttattcggggtgttagataagatatttttttttagatagagtttaaggaaggtggtatgaaattgaaatttttagttatgaatttttattgttttttttttaatatttatatatgtttaatttgtagtttaaaaaagaatattaaaattaatatttcgatttaatagcgttgttaatacgaaaggggaagtttggttttttttcgattataattgaatattagtgaagtagaaattattggtagttgaggaaaaatataaattttgacgtttgcgggtaaagatttatagtggagattaatttatgattttaaatatatttttaaaaattattagcgaatagttggggtttgaggagagtgatttttacgaatgtttatttgttttagtattttgtttttaaatttttttatcgaaatatttttgtttttaaagtgagtagtacgggtaataggtaaaggaattaggtttcggaagtttttaatattagaaaggtttaaaatagattaaaagatcggaggtttgttatcgtagtttttagtagcgtatttcggaaaattaaaattcgtcgattcgttcgtaaggtgttcgtttaaaatttagtttaatagtattttttgtaaagaggatatagattataggaattacgattgtttaagacgttttttcgggtggtcgcgaagggattttatcgagtcgggaaagtaggagcgaaggagtattttttttatatatatcgatatatattttttttttttattgttttttttcgattcgttttttttttattttttttttgggttaatgtgatagtagtagttgagtcgattagttatttttaaaattagtttgtgagttttaggtttggttaggagacggtagttcggggtggtcgttgattaggtagtagagattatggatatatttggtggtttttgagtagggaaggggatagttttggatataagtatatgttttttcgttatttttgttttagggtagggttatatatttatattttcgtttttgtttatatagataattagaggttgtaggaattgtttgaggaggagagttggtcggttttatattttaggtagattttggaagaaaataatttgaatgaatgttggtgcgtcgtggtaaataattagtgtatgtaaatatattttatgtttaggtagtggttatcgtatgttatatatcgagggtttttatgaatttatttaatgttttttatgaggtagggtttttttttagttttattttataagtggggaaattgagatataaaaagttaattaatttgtttaaggttatggagagttagaatttaaatttaggttgtgcgggtcgtagaggaaatagatataatagtaaattaggggttataaaaaagtgttttgggtttggtacggtggtttacgtttgtaatttcggtattttgggaagtcgaggtgggtatattacgaggttaggagattgagattattttggttaatatagtgaaatttcgtttttattaaaaatataaaaataaaattagtcgggcgtggtggtgggcgtttgtagttttagttataggcggagtttgtagtaagtcgagatcgcgttattgtattttagtttgggtgatagagagagattttattttaaaaaaaaaaaaaaaaattagttgggtggggtagtggttgtttgtgattttagttatttgggaggttgaggtaggagaattgtttgaatttaggaggcggaggttgtaatgagttaaggttacgttattgtattttagtttaggcgataagagattttattttaaaaaaataataataaaaaaagtgttttgtttattgtttaaaaggagtaaagtataga

SEQ ID NO: 1338 - DNA, 2285 bp, Artificial Sequence
  chemically treated genomic DNA (Homo sapiens)
ttagtatttgatttgtggtatgtgttaatttattattgttaattgtagggatttagtgattttttcgaatttttgttatttttgttacggtttttgttttgtggaggtttgtggaatgggaagtggggaggggaaggagaagggggcggagttagtcggagttttttggttaggtttggagttattttgttttgttatagtttttatgggtttagagtgggttttggggtagagggtttgtaaggataggggtgggtggttttgtcgagggcggtgttttgagtaggttttattttttagtttgtttagtttggttttattttagttttgttgttttgttattttgtttttttgtgtttattttttattttttgtcggggatattttaaggtttgttaaggttggagtaggggtgggatttagttatttaataaacgtttttttggttatgtagggttgggtattggggtggggggttgatttggattttttaagatattagattgtttaattgtttagtttttattggggtaagtgtttcgttgagggtgaagggggttgtgagtgtttattagggagtttggataggtttcgttttttatagttgttttattttttggagttgttttggtggtagatggtattgttttagaaaggtgaggttggagttgttttttttattaggggtggttaaggacgtttttagggttttttatgtaggtttttagggttattttgggcgtggttgagggtatgtagattacgttgtgtttttttttattttttatgttcgtcgtttgtttgatatgttttttagttgttttgtttcgtagaagttgtgtggttttttttgtgagtagagtcgggttttatgatttttcggagtagcgttagggattttttttaggtataattttaaagggggttttaggatttgttaggtttacggaagtggtttttgtaattttttttttggtggtagtttttggtgtatttcggtaggggtagtttttttttattatagggattttgtgtgttaggttttagttgcgttgtcgttgaattatggatttaatagtagagaagttttgtaggtcgtttgtgttggttcgggaaatcggggtttagtcggggtttgttacggttttggtgtcgttttgttttttgtcggcgttacggagtaagcggagagatttattttttcggttttaagaggtattaacggaggaggttgagaggtaggagttgaataattgatggttttttttggtttaggatttgttgaaaatgatacggtgtaaggtagaggggttgagagtgttgattataaaatgttgagaagttattttagggcggttacggttagaaggaggatttttatttaggacggggttataggtatttggggcgggtgttagaggtttttgttttgggttattttagggggttaggatatttagaagttgggtttagaggtttatagggttggtttatttttattttttttttatacgtttgttattatcggtgttttagtttagtaattttatggttcgttggtttcgtttatagtttttattgttttttgtgtgttgggcgtgggtttttgagttttatttttagtttttttagttttaggagaggagtggaggataggggtttaacgtggggtgtggtgcggagcggggagggttgtggcgtttttttagtttttttttttttaatagttttagttttttttttggagaattttttatttgttgggtatatttggtttttttttattattttgtttttagtcgggagatttttatttagtgaaatagtgaaataggaagggttttttggttatttcgcgtagggcgtagggtatgtagcgggggagtggttcgtttttttagtgttttatcgtttatatttttaggggagtatatagacgggtaggttgtggggttttgattttatggtagtgtttgggggtgaatgtttatagtttttgaaattttagtgggagtgcgttatcgggtggttttttagtttagcggtttgtaggtggttggtgagagtgagtttaattagatttttgttttataataaggatagaggaatttttgtattttagggttttttgttttggtgtattaaaaaattggattatacgtgggtttggagaatgagtgtaaggttttattgagtggaagtagtttttagtagatgggggagttagaggggagatggtttttttttggagttaggtaatattttcgggatgtttagtagtttgt

SEQ ID NO: 1339 - DNA, 2285 bp, Artificial Sequence
  chemically treated genomic DNA (Homo sapiens)
ataagttgttggatatttcgagaatgttgtttgattttaggggaaaattattttttttttggtttttttatttgttgagagttatttttatttaataaaattttgtatttattttttaagtttacgtgtgatttaattttttggtatattaaggtaagaaattttgggatatagaaatttttttgtttttgttataaggtaggggtttaattgagtttatttttattagttatttatagatcgttagattaaaagattattcggtaacgtatttttattggggttttaagagttgtaaatatttatttttagatattgttatggggttagagttttatagtttgttcgtttgtatgtttttttagaggtgtgagcggtggggtattgaagaagcgagttattttttcgttgtatgttttgcgttttgcgcggggtaattagggaattttttttgttttattgttttattgggtagagatttttcggttggagatagaatggtggggagaggttagatgtgtttagtaggtaggggattttttaggggggaggttgaggttgttaggaaaggaggggttgagggggcgttatagtttttttcgtttcgtattatattttacgttaaatttttgttttttattttttttttggggttaaggaggttgagagtagagtttagaggtttacgtttagtatataggaggtagtgggggttgtggacggggttaacgagttatggggttgttgggttgaagtatcggtgatggtaggcgtgtgagagggaagtgggggtgagttagttttgtgggtttttaggtttagtttttgggtattttggttttttggaatgatttagggtaggagtttttgatattcgttttaaatgtttgtgatttcgttttgagtgggggttttttttttggtcgtgatcgttttggagtggttttttagtattttgtggttagtatttttagtttttttgttttgtatcgtgttatttttagtagattttgagttagagaaggttattaattatttagtttttgttttttagtttttttcgttagtattttttaaagtcgggaagataaattttttcgtttgtttcgtggcgtcgataggaagtagggcggtattaggatcgtgataggtttcggttgggtttcggtttttcgagttagtataggcggtttgtaaggtttttttgttattaaatttataatttagcggtaacgtagttggggtttggtatatagggtttttgtgatgaggaggggttgtttttgtcggaatgtattagaggttgttattagggagagagttataaggattattttcgtggatttggtaggttttagggttttttttaaaattgtgtttggggagagtttttggcgttgtttcggaggattatggagttcgattttatttataggggagattatatagtttttgcggggtaagatagttgaggagtatgttaggtaagcgacgggtatggggggtgggggggagtatagcgtggtttgtatgtttttagttacgtttagggtgattttggaggtttgtatggaagattttggaagcgtttttggttatttttggtggaagagatagttttagttttatttttttaggatagtgttatttgttattaaggtagttttagagagtgggatagttgtgagaggcgggatttgtttaggttttttgatgggtatttatagttttttttatttttagcgaggtatttgttttaatgaaaattgagtagttggataatttgatgttttggagggtttaggttagttttttattttaatgtttagttttgtataattaaggaagcgtttgttgaatggttgagttttatttttgttttaattttggtaggttttggagtgttttcggtaggaagtggagggtgaatatagggggataaagtaatagggtagtagagttggggtggggttaggttgggtagattggggaatgagatttatttagaatatcgttttcggtagagttatttatttttatttttgtaaattttttgttttagggtttattttaaatttatgagagttgtggtaggatagggtgattttaggtttggttaggaggtttcggttgatttcgttttttttttttttttttttttattttttattttataggtttttatagggtaggggtcgtgataggggtgatagaagttcggagaggttattgagtttttgtaattagtagtaatgagttgatatatgttataggttaagtgttaa

SEQ ID NO: 1340 - DNA, 2448 bp, Artificial Sequence
  chemically treated genomic DNA (Homo sapiens)
tgtgatattcgttgttgaacgaaatgggggttcgtttttaattttcggtaggagttggtgggttttttttttgttgtagtttgggaacgttttggagaaggttatatttacggtaaggtgagtgtagttttgaacgttgtagggtgaagttagtttgtataggacgtttttattggtttttgttttatgttttattgtgtttgggttcgggttatgtggtttaggataggggtggttttttatgaaattttttaaatttagatggaggagaagttatcgttacgaaggtaagtgttttttaggaggttggtggtcgtagtttttagttaggttagtgttgatttattttcgggatattgtatgtggtttttatagttgtgttaggtagtgtttgatggggaggggttgtggggatgtgtacgattttatttaggttttgtttttagaggggtttggttgtttttatagatttttaaatattttatgtatttatttttcgtatagttaaaatttatataataaaattaattttgttgaagattgtattttgttggtatttagtgtagttattatgttgtataattttatagtagtcgagttttcgttttcgttattttataaaaagtttcgtgtttatgaagtaatttttttttttgtagttatttttttagtttcggaagtttttgtttttttagatttttagaagtaaaggttgtagaggtttttttagattgggtattcggacgtttatttgaggtttttttttttttgtttttagtagggaagttaaagtaattgttatagggtttagttggtatagattttaggtttagttagtattagtagttgtttagtatgttttattttttttaggttttaggttttgggtttttgattttagagggttttggttattgggacggttggtagatgtaagatgggaagtagttttgatttttattatttttttttgggatacgtttatgttttgtttttgttatttttttttagttgtttgagggttggttggtgtgagtttaggtttttgtagggtatgttaggagtaagttgtgatttggtttcgggttgtggagtttatgttattttttattgaggattttgggttgttttgtttcgcgtacgggtattcgggttttgatagttcgtcgggttttgggttattagaggttttgaattgcgttttggtgatagttagttttttgtatggggtacgtatagatttgggtttaggttggggtatcgagatttttatatttagtagtcgcggtgaggttggtttgtttgtttttcggggttatttttgtcgtgtcgtttttttttttttttttgttttttttgttggttgtttttttttcgttttttttgggtaggtacggtcgggtgggggtgaggttttggtaaagttttttttgttttttagtttagtggcgtttatatgtgacggtgcgggggtagtttcgtgaaaagtttttttgtgttttttttttaattaagaaatagtagtaggtttcgggggtttaggttttacgttttttttgaacgttggtcgtggttataggcggttggatgggtaggtttagtagtggattttaaggaagaattttttaggtttattaggtagttttgttgtttttcgggggttttttttatattgttaggttattcggtaggtttgggaggttttttttattttcgggttttaggagttgagatggtattcgtaggagtttacgtgggatttgggtgtttggatttggggttttagatttgatttttttttttgttttgtggggtttttttgaggtttagtttttttttttgtgaaatggggagaataaggcgttttgttttttagaatttatatttagagagttagaagtttttttaggtttggataaagaggtgttcgttttttttaaattaaggtagagggatatttgagagggtgttttgagtttatttttttttgttttatttgggatgttcgtttgtgtttttttcgtatagttgtttatgtttttaggaaaacgagggtttttgttttttttttagaattttagattttgaggtaaaggttcggaaagaatttatagtttttacggtattattgttattgagcgggttttattttttagtttgggaggcggatttttttagagtaggggtgtttagtagggagggttgatcgaggggagttttgagagatttttgacgagaatagggggtttgtagaggaaataggttttttaaggttacggttacgtttagtgagattttagtttagtttttcggagtgttgtgtttagggttacgttgggataggtaagcggtgttatttttttttttgaagatattttatatttatgtggaaaaggagaacggtattttttatttatttggaggagggatagaggtaagggttgtttt

SEQ ID NO: 1341 - DNA, 2448 bp, Artificial Sequence
  chemically treated genomic DNA (Homo sapiens)
ggggtagtttttgtttttgttttttttttaggtgagtgaaaagtatcgttttttttttttatatgggtgtaaagtgtttttaggaaaagaggtgatatcgtttgtttgttttagcgtgattttgggtatagtatttcggaaagttgggttggagttttattgggcgtgatcgtgattttaggggatttgttttttttgtaggttttttgttttcgttaggggttttttagggtttttttcggttagttttttttgttgagtatttttgttttgagagagttcgttttttaggttggagggtaagattcgtttagtgataataatgtcgtgagaattgtgggtttttttcgagtttttgttttagaatttggggttttggaaaagagataagagttttcgtttttttgagggtatgggtagttatgcggaggagatatagacggatattttaggtgggatagggggaggtggatttaggatatttttttagatgtttttttgttttggtttggggaggacgggtatttttttgtttaggtttggaaggatttttagttttttgaatgtggattttggggggtagagcgttttattttttttattttatagaggggagggttgagttttagggaggttttatagaataggagggagaattaggtttgaaattttaggtttagatatttagattttacgtgggtttttgcgggtattattttagtttttgggattcgagggtggagaaagttttttagatttatcgggtggtttgataatgtgagaggagttttcggaaagtagtagggttgtttggtgggtttgggggatttttttttgaagtttattgttaggtttgtttatttagtcgtttgtgattacggttagcgtttagagaggacgtggggtttgggttttcggagtttgttgttattttttaattagggaggagatataaaggggttttttacgaggttgttttcgtatcgttatatgtgagcgttattgggttggaaaatagagggggttttgttagaattttatttttattcggtcgtgtttgtttagagagggcgggggaggagtaattaatagagggggtaggggagagggaggagacggtacggtagaggtggtttcgggaagtaggtaggttagttttatcgcggttgttggatgtggggatttcggtgttttagtttaggtttaggtttgtgcgtgttttatgtaaggggttgattgttattaggacgtaatttaaggtttttggtggtttagggttcggcgggttattagaattcggatgttcgtacgcgggatagagtagtttaggatttttagtggagagtagtatgggttttatagttcggggttaggttatagtttgtttttggtatattttataggagtttgggtttatattagttagtttttaggtagttgaggaaggatagtagaggtagggtatgggcgtgttttaggaggaggtggtgggggttagggttgttttttattttgtatttgttagtcgttttagtggttaggattttttgaagttagggatttaggatttgggatttggggagaatggggtatgttgagtaattgttggtgttggttgggtttggagtttgtgttagttgggttttgtagtagttgttttggtttttttgttgggggtaggagagagaggattttaggtggacgttcgagtgtttagtttggaaaggtttttgtagtttttgtttttgaaggtttgggagagtaggagttttcggggttgggagaatggttgtagagggagggattgttttataggtacggggttttttgtggggtgacggaaacgagaattcggttattgtggggttgtatagtatggtggttgtattagatgttagtagaatgtaatttttaatagggttgattttgttatgtgaattttaattatgcgaaaaataaatatataagatgtttgaaagtttgtaagggtagttagatttttttgagagtaggatttggatggggtcgtgtatatttttatagtttttttttattaagtattgtttggtataattgtgagggttatatgtagtgtttcggaggtgggttagtattggtttggttgggggttgcggttattaattttttggaaggtatttgttttcgtggcggtggttttttttttatttaaatttgggggattttatgaagggttatttttgttttgagttatatgattcgagtttagatataatgggatatgaagtagaggttagtagagacgttttgtgtagattggttttattttgtaacgtttagagttgtatttattttgtcgtgggtatggttttttttaaggcgtttttaggttgtaatagggaaaaggtttattagtttttgtcgagagttgggggcgggtttttatttcgtttagtagcgaatgttata

SEQ ID NO: 1342 - DNA, 2374 bp, Artificial Sequence
  chemically treated genomic DNA (Homo sapiens)
gggttttggggatttattgtatgttgggtgttgggatgggggtagatattgttttttttttttattttttgtttgattttttttttttttattttgttttattattttagtggttttaagtttgtaaggagatttataggtagtaggagatatgggttgtagagtgggatgggggtgagtatgggtgcggtgtgtatatatataagttgttagaggtattatttgttataagtttttagatgagtattttagtttaagaggtaggatattagggtggtaatagttttagagttgttatttcgagtgtgatattatttttttatgttttttttttgggttttaatttttttatgtgtagagaggaagtagtgatttatacggtttttttagttttgttattgtgatgattttattatattggattttttaatgatttagggatgttattcgtgttttgttaaggttatagtttgtagttagagaaagttttaaatttatgttttagggttttttttgagttttagatttttattgagaaggaaaatatattagtttttgggtttggtttttttttttatcgttatatttttattttatttcgtttgtgttttttttagtttcgtgggttgaaagtgttttttaaatatttaggtagttttttaggtaggattttaggggtgttttttaggaaattgaggaatttttattttttgaatattacgagtttgtttatatagtgatatttagcgatgattttggttttgttttttttttttttattttttacgagtttttagtttagaatatttggttagatttaggtcgggggagttagatttcggggttaagtaattagaattgggggtttttgtttgaggattttagtttttttttttaggtgttcgtttgatggggagatggttgatgtttagaatattttattggatagtttagggagtgtgggggtcgtggtagtgtttgtggtttttgttttaatttttttgttgggtatagtgggtaatgggttggtgttggtagtgtttttgtagtttggttcgagtgtttggtaggagtttggtagtattacggatttgtttatttttaatttggcggtggttgatttttgttttattttgtgttgcgtgtttttttaggttattatttatacgttggatgtttggttttttggggttttcgtttgtaaggtcgtgtatttgtttatttattttattatgtacgttagtagttttacgttggttgttgttttcgtggataggtgcgttgtgtttggggtttggttgggtagggttgtgggggcgggggttgggggaggagttttgaatagatttttattggttttaggaaggagagagtgggggattagaaagggaggtgggtgggaggaaataaaagttttttgatttttcgtaagtagtttttgggtatttgtagggcgtgtttgaggggattgttttgtttttttttttttttattgtgaatttttagaggacgtttttgagttttaagtggtagtatagggtttggtatatagtaagtgttttgtaagcgcgaaatgaatcgtaaaagaagtttacgaatgcgtttattagtttttttgttttgttttgttttgttgttttttttttttggattttggtttattgtaatttttgttttttgggttttagcgatttttttgttatagttttttgagtagttgggattataggttattatatttggttaattttttgtatttttagtagaaacggggttttgttatgttggataggttggtttcgaatttttgattttaagtgattcgttcgtttcggttttttaagtgttgggattataggcgtgagttatcgcgtttagtttagttattttttaattgtttatatttggttaagttgtgtatatatttgtttttatagtttgaaatttggggttaaatttaggtttattttagttgatgattttgggtaagttatttttttttggattttatttgacgtatttataaaataattttagaaataataagttatcgggatcgggtttttgttaggtgtaagggtttaagtattttgcgcgtttatatttttaattttcgttacgttttttacggtttataggaggcgtattgggtcgtagggttcgggcgcgggacgtggcgcgggtttttgcgggagggtatttgttcgtttcgttgattaggcgtttttcgtaggtatttggtcgtgcggtattcgttgcgttcgcgcgttttgcgtacgtcgcgtaacgttcgcgtcgtagtggggttggtgtggttgttggcggcgtttttttcggcgttttattttagttattacggtatcgtgcgttacgg

SEQ ID NO: 1343 - DNA, 2374 bp, Artificial Sequence
  chemically treated genomic DNA (Homo sapiens)
tcgtagcgtacggtgtcgtagtagttgaggtagggcgtcgagaagagcgtcgttagtagttatattagttttattgcggcgcgggcgttacgcggcgtgcgtagggcgcgcgagcgtagcgggtgtcgtacggttaggtatttgcggagggcgtttggttagcggggcgggtaggtgttttttcgtaggggttcgcgttacgtttcgcgttcgggttttgcggtttagtgcgttttttgtgaatcgtgggggacgtggcggggattaagggtgtgaacgcgtaaggtgtttaggtttttgtatttagtaagggttcgatttcggtgatttgttatttttaggattattttatggatgcgttagatgaggtttagagagaagtgatttgtttagggttattagttggagtgagtttggatttgattttaagttttaagttgtggaagtagatgtgtgtatagtttggttaggtgtgggtagttagaaaatagttgggttgggcgcggtggtttacgtttgtaattttagtatttgggaggtcgaggcgggcggattatttgaggttaggggttcgagattagtttgtttaatatggtaaaatttcgtttttattaaaaatataaaaaattagttaggtgtggtggtttgtaattttagttatttaggaggttgtggtaggagaatcgttggaatttaggaggtagaggttgtagtgagttaagatttaaaaaaaaaaaataataaaataaaataaaataaaaaaattgatgaacgtattcgtgagttttttttgcgatttatttcgcgtttatagagtatttattatgtgttagattttgtgttgttatttgagatttagaggcgttttttggaagtttatagtggaggaggggaagggtaggatagtttttttaagtacgttttgtaggtgtttagaggttgtttgcgaggggttagggagtttttgtttttttttatttatttttttttttggttttttatttttttttttttaaggttagtgaggatttgtttaggattttttttttaattttcgtttttatagttttgtttagttaggttttaggtatagcgtatttgtttacggagatagtagttagcgtaaagttgttggcgtatatggtgaggtagatgagtaggtgtacggttttgtagacgagggttttaaagagttaggtatttagcgtgtagatggtggtttggaagggtacgtagtataggatgaagtagaggttagttatcgttaggttgaggatgaataggttcgtggtgttgttaggtttttgttaggtattcgggttaggttgtaggagtattgttagtattagtttattgtttattgtgtttagtaggaagattagggtaaagattataggtattgttacggtttttatattttttgggttgtttagtgaaatgttttgggtattagttatttttttattagacgggtatttgggaagagaagttggaatttttaggtaagagtttttagttttggttgtttgatttcgggatttaattttttcgatttgggtttggttaggtgttttgggttggaagttcgtgggagatggaggaggggagagtagagttaaagttatcgttgagtgttattgtgtgagtaagttcgtggtgtttaaggggtgagagttttttagttttttaaggaatatttttggagttttgtttggaggattatttaggtatttgagggatatttttaatttacgaggttggggaaggtataagcgaagtaggatgaagatatggcgatggggggaggggttaaatttagaaattggtatgtttttttttttaatggggatttgaagtttaggggagattttgggatatgggtttagggttttttttggttataagttgtagttttagtaaaatacgggtaatatttttgagttattggagggtttagtatagtgagattattataatggtaaaattgggaagatcgtgtaggttattgttttttttttgtatatagggaaattgaggtttagagaggggatatgggaggataatattatattcgaaatggtagttttggggttgttgttattttggtattttgttttttaagttagagtgtttatttgagagtttgtaataggtggtgtttttgataatttgtgtgtgtgtatatcgtatttatgtttatttttattttattttatagtttatgttttttattgtttgtggatttttttgtaggtttgagattattggggtggtgggataaagtaggggaaaggggggttaggtagggagtagggaagaaaggtaatgtttgtttttattttagtatttagtatgtagtaggtttttaaagttt

SEQ ID NO: 1344 - DNA, 2500 bp, Artificial Sequence
  chemically treated genomic DNA (Homo sapiens)
tcgttgaattaggaggtttatttagttcggttattttatttaggattaagtttattgtttaaggcggaggtgggtgttgtttattttgggttttggggatttattgtatgttgggtgttgggatgggggtagatattgttttttttttttattttttgtttgattttttttttttttattttgttttattattttagtggttttaagtttgtaaggagatttataggtagtaggagatatgggttgtagagtgggatgggggtgagtatgggtgcggtgtgtatatatataagttgttagaggtattatttgttataagtttttagatgagtattttagtttaagaggtaggatattagggtggtaatagttttagagttgttatttcgagtgtgatattatttttttatgttttttttttgggttttaatttttttatgtgtagagaggaagtagtgatttatacggtttttttagttttgttattgtgatgattttattatattggattttttaatgatttagggatgttattcgtgttttgttaaggttatagtttgtagttagagaaagttttaaatttatgttttagggttttttttgagttttagatttttattgagaaggaaaatatattagtttttgggtttggtttttttttttatcgttatatttttattttatttcgtttgtgttttttttagtttcgtgggttgaaagtgttttttaaatatttaggtagttttttaggtaggattttaggggtgttttttaggaaattgaggaatttttattttttgaatattacgagtttgtttatatagtgatatttagcgatgattttggttttgttttttttttttttattttttacgagtttttagtttagaatatttggttagatttaggtcgggggagttagatttcggggttaagtaattagaattgggggtttttgtttgaggattttagtttttttttttaggtgttcgtttgatggggagatggttgatgtttagaatattttattggatagtttagggagtgtgggggtcgtggtagtgtttgtggtttttgttttaatttttttgttgggtatagtgggtaatgggttggtgttggtagtgtttttgtagtttggttcgagtgtttggtaggagtttggtagtattacggatttgtttatttttaatttggcggtggttgatttttgttttattttgtgttgcgtgtttttttaggttattatttatacgttggatgtttggttttttggggttttcgtttgtaaggtcgtgtatttgtttatttattttattatgtacgttagtagttttacgttggttgttgttttcgtggataggtgcgttgtgtttggggtttggttgggtagggttgtgggggcgggggttgggggaggagttttgaatagatttttattggttttaggaaggagagagtgggggattagaaagggaggtgggtgggaggaaataaaagttttttgatttttcgtaagtagtttttgggtatttgtagggcgtgtttgaggggattgttttgtttttttttttttttattgtgaatttttagaggacgtttttgagttttaagtggtagtatagggtttggtatatagtaagtgttttgtaagcgcgaaatgaatcgtaaaagaagtttacgaatgcgtttattagtttttttgttttgttttgttttgttgttttttttttttggattttggtttattgtaatttttgttttttgggttttagcgatttttttgttatagttttttgagtagttgggattataggttattatatttggttaattttttgtatttttagtagaaacggggttttgttatgttggataggttggtttcgaatttttgattttaagtgattcgttcgtttcggttttttaagtgttgggattataggcgtgagttatcgcgtttagtttagttattttttaattgtttatatttggttaagttgtgtatatatttgtttttatagtttgaaatttggggttaaatttaggtttattttagttgatgattttgggtaagttatttttttttggattttatttgacgtatttataaaataattttagaaataataagttatcgggatcgggtttttgttaggtgtaagggtttaagtattttgcgcgtttatatttttaattttcgttacgttttttacggtttataggaggcgtattgggtcgtagggttcgggcgcgggacgtggcgcgggtttttgcgggagggtatttgttcgtttcgttgattaggcgtttttcgtaggtatttggtcgtgcggtattcgttgcgttcgcgcgttttgcgtacgtcgcgtaacgttcgcgtcgtagtggggttggtgtggttgttggcggcgtttttttcggcgttttattttagttattacggtatcgtgcgttacggcgcgttggagttttgcgtgttcgtttgggaggacgcgcg

SEQ ID NO: 1345 - DNA, 2500 bp, Artificial Sequence
  chemically treated genomic DNA (Homo sapiens)
cgcgcgtttttttaggcgggtacgtagagttttagcgcgtcgtagcgtacggtgtcgtagtagttgaggtagggcgtcgagaagagcgtcgttagtagttatattagttttattgcggcgcgggcgttacgcggcgtgcgtagggcgcgcgagcgtagcgggtgtcgtacggttaggtatttgcggagggcgtttggttagcggggcgggtaggtgttttttcgtaggggttcgcgttacgtttcgcgttcgggttttgcggtttagtgcgttttttgtgaatcgtgggggacgtggcggggattaagggtgtgaacgcgtaaggtgtttaggtttttgtatttagtaagggttcgatttcggtgatttgttatttttaggattattttatggatgcgttagatgaggtttagagagaagtgatttgtttagggttattagttggagtgagtttggatttgattttaagttttaagttgtggaagtagatgtgtgtatagtttggttaggtgtgggtagttagaaaatagttgggttgggcgcggtggtttacgtttgtaattttagtatttgggaggtcgaggcgggcggattatttgaggttaggggttcgagattagtttgtttaatatggtaaaatttcgtttttattaaaaatataaaaaattagttaggtgtggtggtttgtaattttagttatttaggaggttgtggtaggagaatcgttggaatttaggaggtagaggttgtagtgagttaagatttaaaaaaaaaaaataataaaataaaataaaataaaaaaattgatgaacgtattcgtgagttttttttgcgatttatttcgcgtttatagagtatttattatgtgttagattttgtgttgttatttgagatttagaggcgttttttggaagtttatagtggaggaggggaagggtaggatagtttttttaagtacgttttgtaggtgtttagaggttgtttgcgaggggttagggagtttttgtttttttttatttatttttttttttggttttttatttttttttttttaaggttagtgaggatttgtttaggattttttttttaattttcgtttttatagttttgtttagttaggttttaggtatagcgtatttgtttacggagatagtagttagcgtaaagttgttggcgtatatggtgaggtagatgagtaggtgtacggttttgtagacgagggttttaaagagttaggtatttagcgtgtagatggtggtttggaagggtacgtagtataggatgaagtagaggttagttatcgttaggttgaggatgaataggttcgtggtgttgttaggtttttgttaggtattcgggttaggttgtaggagtattgttagtattagtttattgtttattgtgtttagtaggaagattagggtaaagattataggtattgttacggtttttatattttttgggttgtttagtgaaatgttttgggtattagttatttttttattagacgggtatttgggaagagaagttggaatttttaggtaagagtttttagttttggttgtttgatttcgggatttaattttttcgatttgggtttggttaggtgttttgggttggaagttcgtgggagatggaggaggggagagtagagttaaagttatcgttgagtgttattgtgtgagtaagttcgtggtgtttaaggggtgagagttttttagttttttaaggaatatttttggagttttgtttggaggattatttaggtatttgagggatatttttaatttacgaggttggggaaggtataagcgaagtaggatgaagatatggcgatggggggaggggttaaatttagaaattggtatgtttttttttttaatggggatttgaagtttaggggagattttgggatatgggtttagggttttttttggttataagttgtagttttagtaaaatacgggtaatatttttgagttattggagggtttagtatagtgagattattataatggtaaaattgggaagatcgtgtaggttattgttttttttttgtatatagggaaattgaggtttagagaggggatatgggaggataatattatattcgaaatggtagttttggggttgttgttattttggtattttgttttttaagttagagtgtttatttgagagtttgtaataggtggtgtttttgataatttgtgtgtgtgtatatcgtatttatgtttatttttattttattttatagtttatgttttttattgtttgtggatttttttgtaggtttgagattattggggtggtgggataaagtaggggaaaggggggttaggtagggagtagggaagaaaggtaatgtttgtttttattttagtatttagtatgtagtaggtttttaaagtttaggatgggtaatatttattttcgttttgggtagtgggtttgattttgggtggaatggtcgggttgggtgggttttttgatttagcgg

SEQ ID NO: 1346 - DNA, 2419 bp, Artificial Sequence
  chemically treated genomic DNA (Homo sapiens)
agcgttcgggggtagtttagtttttagttttttttatagttttatgaggaggttttagtatgttttttttttgttaaatgaggagattaagaaacgggttaattttttatttaggcgagaagggtatagagttgggatttgaatttggttaggtgtagttcggggtttttgttgttattaggggtatatggtggttggggtagggtggtaaagtaggagttcgggagtttatggtttatttaatttgatttttgaatttaatggggtttatgttttttcgttttttttggttatttttatttgttatttttttgtttttatatatagtgtttgttttttgttatttaattttaggggtttttttagttgggtgcgggattttggttgtgggggaaggaaggggatttttggggatagtttagttttttattttatttttttttttcgaggtgttataaatatagttaagagtgggaggtttcggtttttaggagaggagagagtatgagttttaggtagttttaaagatagggttttatttttaatgttcggagatgtttttgatttgtttagttatgtagttaagggagggataaatttagatttaaatttagggttttgtttttagtttggggtttttagaggtttcgtagtaattttattttatagatggttttttaaggggatttttttgtttttatttattttataagttttttgatgagtacgtaatatagggttgtttttttcggtatatgggttttattttatagaggttaggagggggttttcgtttgttttattttatatttcgtatttttttcgggtatttaggttatttatttattttttttttattttttcgggttgggggtttagtatatagagtttagggaagttttttattttatagtagtttttagttttttttgaatgggttgggaaggagagttgatttgggattggggatcgtttttttttttagttaggagttatgagagttgggtttaatttttttttaggggaattttaagataaagttgggggatgggagtttaggtagaaattgttgggggaattgagttagagttgaaagttttttttgtgatttttatttttagttttttggttggtttataggggtcgggagggaggtagggggatattatttggttgagatatggggcggtggtagcgcgcgttttttagtttttttcggtgttgggatcgtggttatttttttagggttttgttgagttttggttgttggggtcgtaaagattaaaagtttagagttagtttattttttgtgtagaggatagaggggtaaggtttggggtggagaggcggggagacgaggtttatgagaaagtttgaaattttttaagtatttagggttagataaagatttgttttttacgttgggggcggtatatatatatatatatatatatatatatatatatatatatatagatatatattgttaaataggggtttagttgtatataggagttaagggaacgtaggttttttttttttttttttttatattatttttacgttaatttatataggttatttaatatttttgacgtttttattcggttatatatatatttattaatacgtaggttttatataagtaggtttttttaggtgattttagcgttttattttttttttagtttgtaatatattattttttcgagatttttattttatttagttttttaggaagttttttatttcgtttagtatttagagatgattgttttttttagtttttaattttgtgggtatgtggtaggtgtttatatttatgaggtatatgagttattttgatataggtatataatgtataataattatattagggtaaatggggtatttattattttaagtatttattttttttttgtgttaaaatttaagtatatttttttagttatttttaaatgtataataaattattgttgattaaagttattttgttatgttattaaatattagattttatttattcgatttaattttgttttcgtatttaataataatttttatttttttaatttttattgttttttttatttttattattgttttttttatttttatgaatttaattgttttaatttttagtttttataaataagtgagaatatgtgagttttgtttttttgtgtttggtttgttttatttaatataatgatttttagttttaaatatgtggttgtaaagataggattttatttttttttatggttgaatagtattttattgtatatatgtattatattttttttatttatttatttgttgatgggtatttaggttgtttttaaattttgggtattgtgaatagtgttgtaataaatgtgggaatgtagatgttttttttatatattgattttttttt

SEQ ID NO: 1347 - DNA, 2419 bp, Artificial Sequence
  chemically treated genomic DNA (Homo sapiens)
gaaaggaaattagtatatggaagagatatttgtatttttatatttgttgtagtattgtttataatatttaggatttggaagtaatttaagtgtttattaatagatgaatgaataaagaaaatgtggtatatatatgtaatggagtattatttagttatgaaaaagaatgagattttgtttttgtaattatatgtttgaaattggaggttattatgttaagtgaaataggttaggtataaaaagataaagtttatatgtttttatttatttgtgggagttaaaaattaaaataattgaatttatggaaatgggaagggtagtgatggagatgggaagggtagtgggggttggaggggtggggattgttgttgggtacgaaaatagaattagatcgaatgaataagatttagtatttgatagtataatagggtgattttagttaataataatttattgtatatttaaaaataattaaaagagtatatttggattttaatataaagaaaggataaatatttgaggtgatggatattttatttattttgatgtgattattatatattgtatgtttgtattaaaatagtttatgtgttttatgaatatagatatttattatatgtttataaaattaaaaattaaaaaaaatagttatttttgaatgttaaacggagtaaggggttttttggaaggttgggtgaaatgggagtttcggaaagatggtgtgttgtaggttgggaggagggtgagacgttggggttatttagagggatttgtttgtgtgaagtttacgtattagtgggtatgtgtgtgatcggatggaggcgttagaggtgttgggtagtttgtgtgagttggcgtgggggtgatgtaggaggggagagagggagggtttgcgtttttttggtttttgtgtgtagttaggtttttatttgataatgtgtgtttgtgtgtgtgtgtgtgtgtgtgtgtgtgtgtgtgtgtgtgtgtgtcgtttttagcgtaggaggtagatttttatttggttttgggtgtttgaggagttttaggtttttttataagtttcgttttttcgtttttttattttaggttttgtttttttattttttgtataggaagtgggttggttttgggtttttagtttttgcggttttagtagttagagtttagtagggttttggagagatggttacggttttagtatcggggaggattggagagcgcgcgttgttatcgttttatgttttagttaggtgatgtttttttgtttttttttcggtttttgtggattagttagagggttgggagtgaaagttatagagaagatttttagttttgatttagtttttttagtagtttttgtttgaatttttattttttaattttgttttagaatttttttagggaggggttgggtttagtttttatggtttttggttggaggaaaaagcggtttttagttttaggttagtttttttttttaatttatttaggggaggttagggattgttgtgggatgaggggtttttttgggttttgtgtgttgggtttttaattcggagaggtggagaagggatgggtggatagtttgggtgttcggagagggtacgggatatggggtgggataggcgggagtttttttttgatttttgtggagtggggtttatatatcgggggaggtagttttgtgttgcgtgtttattaggaggtttgtggagtaagtggggatagaagggtttttttggagagttatttatgaagtgaagttgttgcgaggtttttgggagttttaggttggaggtagagttttgggtttgagtttgggtttgttttttttttggttgtatgattggataggttagaagtattttcggatattggggatgggattttatttttggggttgtttggagtttatgttttttttttttttgggggtcgaagttttttatttttaattgtgtttgtagtatttcgggggagggaggtggagtgaggagttgagttatttttaagggttttttttttttttttatagttagggtttcgtatttagttggagaagtttttgaagttaaatagtaagagataagtattgtgtatgggagtaggggggtggtaggtggaggtggttagagaggacgaggggatataggttttattgagtttagaggttaagttggatgaattatgggttttcgagtttttgttttattattttgttttagttattatatatttttgatggtagtaggggtttcgaattgtatttgattaggtttaaattttagttttatgtttttttcgtttgggtgagaggttgattcgttttttagtttttttatttggtaaaaaggaggtatattagagtttttttatggggttgtagggagggttaaaagttgaattattttcgagcgtt

SEQ ID NO: 1348 - DNA, 2483 bp, Artificial Sequence
  chemically treated genomic DNA (Homo sapiens)
gtggacggaattgggtggtaggttgtggttttaggatatgtggttagattggttgagggtaggagggtgtagtattgattgtaattgtgaaagcgtagaattttttcgtggaaagtggtttggaatatggtttaatcgaatattattattttataattgaggaatgtgaagtttgagtttttaagtttttaaattcgtttgaaatgagaatatagatatatatatagatatgtatatatatatatatatagattatagatatatatatagatatgtatatatatatatatagattatagatatatatatagatatgtatatatatatatagattatagatatatatagagatatataagatgtatatagatatgtatatatgtatatatatagatatatagatgtaatatagatagatacgtatagatatatatagatatatatatagatatgtaaagatatatatagatatatatagatatgtaaaaatataaagatatataggtttatatagatatagatatatatagatgtatatagatatagatatgtaaaaacgtataaatatatatagatatagatagatttatgtatatattgatacgtagatatatatattgatatatagttttagggaggttgagtcgggtgttgggttagtttatagatttgtttttattatggtttttgatatatgggggtggttatgaggatgggggaggtcgtggggatagaagtatagtcggtttgatttaggcgggttagagtttatcgggttttggtttttcgtttttaggtgggcggttttagtttttttattttttcgggtttgggtaggttttgttttatcgggtattgttttggtttttttggtatttaggtaatttttaggtaggtttggttgggtattggtgtggggtttggtttatatcggggggtgggaagaagggttttgtttcgtttttttgtatgtgggttttgttttttgtagaataattttaggtttgtaatggtgttggtatttgttagagtaaagtagaatttttttttttttagattttagtggttgagttgggtcgttagggtagggatggtgagggtttaaatgttagggtagagtaggttacggtatttcgtttatttataaatgttttcgtagattttggtgatggttgtattgggggtgtagtttttagaattattcgaagtttacgtagattgtttttttaagtacgggggtgggggaggttggttttttgagtagggttcggtttttgtattagtgtagttttattttttttttagtttaggtttaggttgttgggggtgtagagagggcgagttgtaagtggaggtgagaagggagttcgtgggacgtaggtttagagagaagttttcgaggaatttttttgttttttttacgagcggagttttggggtagtttcgtgtttttgttatagttattttaggagatgatggttgtgggttgtgtttgtgggtgtgtgtatttgtgtatttgtgtgtgtgtgaagagggagagagatagaggggagtgagatagagatttggagaggggatgggagagagagattggaaggggaaggaggaggagagaggtaggaaagtagagagggatagggagagtgcggagggataggattattagggaaatagggagagggagggagaagagagggagagaggaggtgtgagaaatagtaggagagagagggagggcgcgggagagagagggattttaagaagggggaatttttttatagtttttttttattgttttttagagatatttttggggtcgtttttgtagagggggttgttgcgagttgttggagggagtgagggtgatgcgtttttcggtgttttaaaatgaggttttcgtttgtattttagtaatttagatttagggaaaatattattaggattttttaatagtaagggaggttttgttagataggtttaagtttttaggaagttgggttttgtttttgagttgggggtttttaggtttttgttagagttatttttttttaagatatttataagtcggtttttagtaaattttaaacgttacggttgtttttatggcgttgtttttttatttttttatttttaaattgtaggatttttaattttatttaaaatagcggatgtttttttgttttttggggtattaggatgtgttgtgagtgttgagggtagacgtgggattcggaaggtttagttgggaatttacgttttgtaatgagttgttttgagtttttggacgaggtggaaaattattttagttttagttttttgtaaagatagattagtagttatatttttttacgggttttttgtgatgttattgaggcggtgaaaggagtatttgtttttaatggtatttattattaagtcggattttagtaattatttgcgtggtaggagttattatattggagtttcgtagtagttaaggagag

SEQ ID NO: 1349 - DNA, 2483 bp, Artificial Sequence
  chemically treated genomic DNA (Homo sapiens)
ttttttttggttattgcgaggttttagtgtgatagtttttgttacgtagatggttgttgagattcgatttaatggtgggtgttattagaggtaggtgttttttttatcgttttagtgatattataaagaattcgtggaggggtgtaattgttgatttgtttttataggaaattgagattggagtaattttttatttcgtttaaggatttagggtagtttattgtagagcgtgggtttttagttgggtttttcggattttacgtttgtttttagtatttataatatattttggtgttttagaaaatagagaaatattcgttgttttgaatagaattaggaattttatagtttagaggtagagaagtgagagagtaacgttatgggaataatcgtggcgtttagaatttattggggatcggtttgtaggtgttttaagaggaagtggttttggtaggggtttgaagatttttagtttaggggtagggtttagttttttggaggtttgggtttgtttgatagagttttttttgttgttgaggggttttggtggtgttttttttgggtttgggttgttggagtgtaggcggaggttttattttggggtatcgggagacgtattatttttattttttttagtagttcgtagtaattttttttgtagaggcggttttagggatgtttttgagagatagtgggagaaagttgtagggaggttttttttttttggaatttttttttttttcgcgtttttttttttttttttgttgttttttatatttttttttttttttttttttttttttttttttttgtttttttaatggttttgttttttcgtattttttttgtttttttttgtttttttgtttttttttttttttttttttttttaattttttttttttattttttttttaggtttttgttttatttttttttgtttttttttttttttatatatatataggtgtataaatgtatatatttataaatatagtttatagttattattttttgagataattgtggtagaaatacggagttgttttaaggtttcgttcgtgaagggaatagagaggtttttcggaggtttttttttgagtttgcgttttacgagttttttttttatttttatttgtagttcgttttttttgtatttttagtagtttggatttgggttgggagggaggtggggttgtattggtgtagaggtcgggttttgtttagggggttagttttttttattttcgtgtttgggggagtagtttacgtgagtttcgagtggttttgggggttgtatttttagtatagttattattagggtttgcggagatatttgtgggtggacgggatgtcgtggtttgttttgttttggtatttgaatttttattatttttgttttgacggtttagtttagttattggagtttgggaggagggaggttttgttttgttttgatagatgttaatattattgtaggtttgaggttgttttgtagaagatagagtttatatgtagggagacggggtaggatttttttttttatttttcggtatgagttaggttttatattagtgtttagttaggtttgtttaggggttgtttgggtgttaggggggttaaggtagtgttcggtgggatagagtttgtttagattcgaggggatggaggggttggagtcgtttatttgggaacgaaggattagagttcggtgagttttggttcgtttgggttaggtcggttgtgtttttgtttttacggttttttttatttttatggttatttttatgtgttagaagttatggtggaagtaagtttgtgagttaatttagtattcggtttagtttttttgagattgtgtgttagtgtgtgtgtttgcgtgttagtgtgtgtatgggtttgtttgtgtttgtgtgtgtttgtgcgtttttgtatgtttgtgtttgtgtgtatttgtatgtgtttgtgtttgtgtgagtttgtgtgtttttgtgtttttatatgtttgtgtgtatttgtgtgtgtttttgtatgtttgtgtgtgtgtttgtatgtgtttgtgcgtgtttgtttatattgtatttgtgtgtttgtgtgtgtgtatgtgtgtatgtttgtgtgtattttgtgtgtttttgtgtgtgtttgtggtttgtgtgtgtgtgtgtatgtttgtgtgtgtgtttgtggtttgtgtgtgtgtgtgtgtatgtttatgtgtgtgtttgtggtttgtgtgtgtgtgtgtgtgtatgtttgtgtgtgtgtttgtgtttttattttagacgggtttgggagtttagaaatttagattttatattttttagttgtaggatgatgatgttcgattggattatgttttaagttattttttacgagaaaattttacgtttttataattgtagttaatattgtatttttttatttttagttaatttggttatatgttttaaaattatagtttgttatttagtttcgtttat

SEQ ID NO: 1350 - DNA, 2439 bp, Artificial Sequence
  chemically treated genomic DNA (Homo sapiens)
tagttgggattgtaggtacgtattattatgtttagttaatttttgtatttttagtagagacggggttttattatgttggttaggttggttttaaatttttgattttgtgatttattcgttttagatttttaaagcgttaggattataagcgtgagttattgtgtttagtttcgagtaaagttttaaaagtggaatgggtttttcgtttttaacgtaggttttttatatggtagttttattaaacggagtagattttatttttatgtatatgaaataatagtattaagttatttttttttttgtttataatattttagttaagttggttttttttttatttttaagatattgtaaatttttttttatattggagttttttatgttgttttttcggttgagatgtttgtttttgttttttttatcggttaggtttcgtttttgtaagttttagtgtaaatgtttttgttaaagttgtttattttgatttttttttaatttaaattaggtttttttgataattttttattatttttgtttatttgttttttttttagaatttattatattttatttattatttttcgagatggagttttgttttttttgtttaggtggagagtaatgatttgtttttattttattaaaatttttgtttttcgggttcgggattattttgtcgtaggtttttaagtagttgagattataggagtttgttattacgtttggttaatttttttgtatttttagtagagacggggttttattatgttggttaggttggtttcgaatttttgattttaggtgattcgattgttttagttttttaaaatgttgagattataggcgcgagttatcgcgttaggtttatgttttgtaattatataacgtgttttgttatttttgtaatttgtgttgtttttttttacgaaggtataggtatatttgtttagtttttggttacgtgggtatttggcgttgagtatttatttgttcgtgttgattgatgtttttttttagtttttattttttttttagaagttttttttttttgtttcgagaggggttgagttagtcgtggtttttttttatttcgattttagtggagataagtcggggaagtttttgggagttgcgcgggtgagtagagttgagattcggtatggttgtattggtcgggttattgtagggtgattggcggttcggtttgataatacgtttatttgagttatttttggtaaaggttattaggttttaggatggaatacgtatgggggaaatgtttttttcgtgatacgtttatttcgttttaaagtgagacgagggagggagggcgcggttgttaggtaatgaagtttagagtttattagagttgagggattgatgtgttgcgtatgggttgggttttatttttaggaagtttaggataaaattttgtttatgttagagggttttggttaaattttgttttgtgtgtttgggtgaagttttgtttttataagtggttttagtttttttagagtaagaattatttgtattttatttatttatattatttatttatttatttatttgagatggagttttattttgtttattaggttggagtatagtggtgtaatttcggtttattgcgaattttatttttcgggtttaattgatttttttagtttagttttttaagtagttgagattataggtatgtgttattatatttagttaatttttgtatttttagtagagatagggttttgtcgtgttggttaggttggtttcgaatatttgattttaggtgatttgttcgttttggtttattaaagtgttgggattataggcgtgagttatcgcgttcggtttgttttttaaaatttttatttgatagatgaggaaatggaggtttaggtttcgttgtattaagaagagggttttggattttgatttaggtttgggtgaagtttaggttttttgatttagggtggaggtataaatagggtaaataggtaaaaataagcgaaataaataaaaaaaaagtataattattaatgttattgaaaagaattatttaagattttgaggttaggtgcggtggtttacgtttgtaattttagtattttgggaggtcgaggtaggcggattatgaggttaggagatcgagattattttggttaatatattgaaattttgtttttattaaaaatatataaaaaattagttggtgtggtggtatacgtttgtagttttagttatttgggaggttgaagtaggaggattatttgaatttaggaggtggaggttatagtgagtcgagattgtgttattgtattttagtttgggcgagagagtaagagtttattttaaaaaaaagaaaaaaaaagattttgaaatgtaaagttgtaaaattttgtatttttttttatagttttaggtttgttgataggtaga

SEQ ID NO: 1351 - DNA, 2439 bp, Artificial Sequence
  chemically treated genomic DNA (Homo sapiens)
tttgtttgttagtaagtttggggttgtagagaagggtataggattttatagttttatattttaaaattttttttttttttttttttgagatggatttttgttttttcgtttaggttggagtgtagtggtataatttcggtttattgtaatttttattttttgggtttaagtgatttttttgttttagttttttaagtagttgggattataggcgtgtgttattatattagttaattttttgtgtgtttttagtagagatagggttttaatgtgttagttaggatggtttcgattttttgattttatgattcgtttgtttcggttttttaaagtgttgagattataggcgtgagttatcgtatttggttttaaagttttaagtaattttttttaatggtattagtgattatgttttttttttgtttgtttcgtttgtttttatttgtttattttgtttatatttttattttaagttaagaggtttgagttttatttagatttgggttaggatttagagttttttttttagtgtagcgaggtttgggtttttatttttttatttgttaaatagaaattttaaaaaataggtcgggcgcggtggtttacgtttgtaattttagtattttggtaggttaaggcgggtagattatttgaggttaggtgttcgagattagtttggttaatacggtaaaattttgtttttattaaaaatataaaaattagttggatgtggtggtatatgtttgtgattttagttatttgggaggttgagttaggagaattagttgaattcgggaggtggagttcgtagtgagtcgagattgtattattgtattttagtttggtagatagagtgagattttattttaaatgaataaataaataaataatataaataaataaaatataaataatttttattttgaaggaattaaaattatttgtgaagataggattttatttaaatatataggatagaatttggttaaagttttttaatatgaatagggttttgttttgagttttttggaaatgagatttagtttatacgtaatatattaattttttaattttagtaaattttagattttattatttggtagtcgcgttttttttttttcgttttattttagagcgaggtgggcgtgttacggaagaggtattttttttatgcgtgttttattttggagtttggtaatttttgttaaagatgatttaggtaaacgtgttattaagtcgagtcgttagttattttgtagtgattcggttagtatagttatgtcgggttttagttttgtttattcgcgtagtttttagaaattttttcggtttgtttttattggaatcgggatggaagggagttacggttggtttagtttttttcggagtagaaagaggaaatttttgaaaagaagatgggggttgggggaggatattaattagtacggataagtaagtatttagcgttaggtgtttacgtggttaggaattaaatagatgtgtttgtgttttcgtaaaggagggtaatataggttataaaaataataagatacgttatgtgattataaagtataggtttggcgcggtggttcgcgtttgtaattttagtattttgggaggttgaggtagtcggattatttgaggttaggagttcgagattagtttggttaatatggtgaaatttcgtttttattaaaaatataaaaaaattagttaggcgtggtggtaggtttttgtaattttagttatttgggagtttgcggtaggataatttcgaattcgggaggtagaggttttggtgaggtgagggtaggttattgttttttatttgggtaaaaagagtaaaattttatttcgaaaaataataaataaagtatggtaagttttagaaagaaaataaatgagtaggaatgataaaaggttattaagaggatttgatttaaattggggaggggttaagatggataattttaataggagtatttatattgagatttgtaggagcgggatttggtcggtgaagagggtaaggataagtattttagtcgaaggaatagtatagaggattttaatgtgggaaagagtttgtagtgttttagaaatggaaaaggggttaatttagttaaaatattgtgagtaagggggagagtggtttgatgttattattttatatatataaagataaaatttatttcgtttaataaagttgttatgtggggagtttacgttgggaacgggaaatttattttatttttaaaattttgttcgaggttgggtatagtggtttacgtttgtaattttagcgttttgggagtttgaggcgggtggattataaggttaggagtttgagattagtttggttaatatggtgaaatttcgtttttattagaaatataaaaattagttgggtatgatggtgcgtgtttgtaattttagtta

SEQ ID NO: 1352 - DNA, 2450 bp, Artificial Sequence
  chemically treated genomic DNA (Homo sapiens)
gattttggtttattgtaatttttattttttaggtttaagcgatttttttgttttagttttatcgggtagttgggattgtaggtacgtattattatgtttagttaatttttgtatttttagtagagacggggttttattatgttggttaggttggttttaaatttttgattttgtgatttattcgttttagatttttaaagcgttaggattataagcgtgagttattgtgtttagtttcgagtaaagttttaaaagtggaatgggtttttcgtttttaacgtaggttttttatatggtagttttattaaacggagtagattttatttttatgtatatgaaataatagtattaagttatttttttttttgtttataatattttagttaagttggttttttttttatttttaagatattgtaaatttttttttatattggagttttttatgttgttttttcggttgagatgtttgtttttgttttttttatcggttaggtttcgtttttgtaagttttagtgtaaatgtttttgttaaagttgtttattttgatttttttttaatttaaattaggtttttttgataattttttattatttttgtttatttgttttttttttagaatttattatattttatttattatttttcgagatggagttttgttttttttgtttaggtggagagtaatgatttgtttttattttattaaaatttttgtttttcgggttcgggattattttgtcgtaggtttttaagtagttgagattataggagtttgttattacgtttggttaatttttttgtatttttagtagagacggggttttattatgttggttaggttggtttcgaatttttgattttaggtgattcgattgttttagttttttaaaatgttgagattataggcgcgagttatcgcgttaggtttatgttttgtaattatataacgtgttttgttatttttgtaatttgtgttgtttttttttacgaaggtataggtatatttgtttagtttttggttacgtgggtatttggcgttgagtatttatttgttcgtgttgattgatgtttttttttagtttttattttttttttagaagttttttttttttgtttcgagaggggttgagttagtcgtggtttttttttatttcgattttagtggagataagtcggggaagtttttgggagttgcgcgggtgagtagagttgagattcggtatggttgtattggtcgggttattgtagggtgattggcggttcggtttgataatacgtttatttgagttatttttggtaaaggttattaggttttaggatggaatacgtatgggggaaatgtttttttcgtgatacgtttatttcgttttaaagtgagacgagggagggagggcgcggttgttaggtaatgaagtttagagtttattagagttgagggattgatgtgttgcgtatgggttgggttttatttttaggaagtttaggataaaattttgtttatgttagagggttttggttaaattttgttttgtgtgtttgggtgaagttttgtttttataagtggttttagtttttttagagtaagaattatttgtattttatttatttatattatttatttatttatttatttgagatggagttttattttgtttattaggttggagtatagtggtgtaatttcggtttattgcgaattttatttttcgggtttaattgatttttttagtttagttttttaagtagttgagattataggtatgtgttattatatttagttaatttttgtatttttagtagagatagggttttgtcgtgttggttaggttggtttcgaatatttgattttaggtgatttgttcgttttggtttattaaagtgttgggattataggcgtgagttatcgcgttcggtttgttttttaaaatttttatttgatagatgaggaaatggaggtttaggtttcgttgtattaagaagagggttttggattttgatttaggtttgggtgaagtttaggttttttgatttagggtggaggtataaatagggtaaataggtaaaaataagcgaaataaataaaaaaaaagtataattattaatgttattgaaaagaattatttaagattttgaggttaggtgcggtggtttacgtttgtaattttagtattttgggaggtcgaggtaggcggattatgaggttaggagatcgagattattttggttaatatattgaaattttgtttttattaaaaatatataaaaaattagttggtgtggtggtatacgtttgtagttttagttatttgggaggttgaagtaggaggattatttgaatttaggaggtggaggttatagtgagtcgagattgtgttattgtattttagtttgggcgagagagtaagagtttattttaaaaaaaagaaaaaaaaagattttgaaatgt

SEQ ID NO: 1353 - DNA, 2450 bp, Artificial Sequence
  chemically treated genomic DNA (Homo sapiens)
atattttaaaattttttttttttttttttttgagatggatttttgttttttcgtttaggttggagtgtagtggtataatttcggtttattgtaatttttattttttgggtttaagtgatttttttgttttagttttttaagtagttgggattataggcgtgtgttattatattagttaattttttgtgtgtttttagtagagatagggttttaatgtgttagttaggatggtttcgattttttgattttatgattcgtttgtttcggttttttaaagtgttgagattataggcgtgagttatcgtatttggttttaaagttttaagtaattttttttaatggtattagtgattatgttttttttttgtttgtttcgtttgtttttatttgtttattttgtttatatttttattttaagttaagaggtttgagttttatttagatttgggttaggatttagagttttttttttagtgtagcgaggtttgggtttttatttttttatttgttaaatagaaattttaaaaaataggtcgggcgcggtggtttacgtttgtaattttagtattttggtaggttaaggcgggtagattatttgaggttaggtgttcgagattagtttggttaatacggtaaaattttgtttttattaaaaatataaaaattagttggatgtggtggtatatgtttgtgattttagttatttgggaggttgagttaggagaattagttgaattcgggaggtggagttcgtagtgagtcgagattgtattattgtattttagtttggtagatagagtgagattttattttaaatgaataaataaataaataatataaataaataaaatataaataatttttattttgaaggaattaaaattatttgtgaagataggattttatttaaatatataggatagaatttggttaaagttttttaatatgaatagggttttgttttgagttttttggaaatgagatttagtttatacgtaatatattaattttttaattttagtaaattttagattttattatttggtagtcgcgttttttttttttcgttttattttagagcgaggtgggcgtgttacggaagaggtattttttttatgcgtgttttattttggagtttggtaatttttgttaaagatgatttaggtaaacgtgttattaagtcgagtcgttagttattttgtagtgattcggttagtatagttatgtcgggttttagttttgtttattcgcgtagtttttagaaattttttcggtttgtttttattggaatcgggatggaagggagttacggttggtttagtttttttcggagtagaaagaggaaatttttgaaaagaagatgggggttgggggaggatattaattagtacggataagtaagtatttagcgttaggtgtttacgtggttaggaattaaatagatgtgtttgtgttttcgtaaaggagggtaatataggttataaaaataataagatacgttatgtgattataaagtataggtttggcgcggtggttcgcgtttgtaattttagtattttgggaggttgaggtagtcggattatttgaggttaggagttcgagattagtttggttaatatggtgaaatttcgtttttattaaaaatataaaaaaattagttaggcgtggtggtaggtttttgtaattttagttatttgggagtttgcggtaggataatttcgaattcgggaggtagaggttttggtgaggtgagggtaggttattgttttttatttgggtaaaaagagtaaaattttatttcgaaaaataataaataaagtatggtaagttttagaaagaaaataaatgagtaggaatgataaaaggttattaagaggatttgatttaaattggggaggggttaagatggataattttaataggagtatttatattgagatttgtaggagcgggatttggtcggtgaagagggtaaggataagtattttagtcgaaggaatagtatagaggattttaatgtgggaaagagtttgtagtgttttagaaatggaaaaggggttaatttagttaaaatattgtgagtaagggggagagtggtttgatgttattattttatatatataaagataaaatttatttcgtttaataaagttgttatgtggggagtttacgttgggaacgggaaatttattttatttttaaaattttgttcgaggttgggtatagtggtttacgtttgtaattttagcgttttgggagtttgaggcgggtggattataaggttaggagtttgagattagtttggttaatatggtgaaatttcgtttttattagaaatataaaaattagttgggtatgatggtgcgtgtttgtaattttagttattcggtggggttgaagtaggagaatcgtttgaatttgggaggtggaggttgtagtgaattaagatt

SEQ ID NO: 1354 - DNA, 2481 bp, Artificial Sequence
  chemically treated genomic DNA (Homo sapiens)
ggtataaagatattaggttgaataggttttttatttggggggtttgtggttttcgaaatgtattttagatattttgtataggtgtgcgtttttattttggttgttgtgtgagttgaggataaaattttggttgttgtgggagttgagtttgtgggtaggttgagttaggggtgggagtgagagggaggggtgagaggggtttgagtatttatttagcgtatgttttatagaattagtttgttttaggaagtttcggtgtttagtgttataatgtatattttagttttgtgtttgtatattagatttcgggttcgttttatatgggtgttttgagttgattttttttgttggagttgttgaagggttttgtaggttttaatttatagttagtttttaattttgttattagtaggggttttagtttatagtaacgtagttgtttttattgtaggttaattttgttatagcgttgttaatttgaaatatttagtttagagtgagtttttggggaggcgggaggttgtttaagtattttatttgttgtgtgggtaagaagcggtttgtattttattagagtttggggatttaggatttagatttgttgtttcgtagttgtgtgattttgggaaggttaggttttattttgggtgtgttttttttttttgaagatttaattcggtttgtgtgttaggagtggagggtttgttggagtttgaggaagatggtagttgggtcggtagtagggtgagtagggtttgagtggggttaggttttttatattggataatgatgtttattgtaaagtttatgttttggatttttgataaatattttagtaatcgatttgatattttattatgtttaagttgatttgtttttatgttggatatgtgtttattaggacgtgtttttggttgttattggtagggtttggaatgaggatatttgttgtgtattttgttttggagttttagataggtaaaaaaatatttatgtggttttatttaggttatttttttgtttgtatgaattttaggttatttttagaaagggttttatagtttcggtgttttattttttgatttttgttaagtcgtttttagtagtagttggaattttttgaagtggttgttatagatgttggtaaagttcggtttgggatgtttttattttgtattaggtacggggttgtttttgttgtatatttatttggaaattatttatatgttaagtatcgtagaggtaaggggagtttgttattggattgcgtttaatacggttgtagggatatagataagtatattttttggtagaggtacgggttcggttggttggagttgtagtagttgtgtgtggttatagagtttttaaatgagggagatggatggtttcgttttatagtgtgtttagagtatgtttacggtgtttgggaagattagggatttattatgttcggttttggttttttttatagtgaagtttttttgttggtaggatttatggttaagtatgggggtaggggttgggggagttttgttagtgatttttcgtaggtagtaaggtttttgggagttggttaggaaaatagaaattttattttggagtaggtgcgtaaattaatagtttagaaattaataaggtttttattaaggattatgagttatttgtgttgttttgtttgttttggtatttgcgtaggatacggggtggggggcgggggaagtatatgttaatagggagttggtggtcgttttgagagttagttttttttttataatttgtttgaaatttttttttttgtagaagatggaatttagtatatttcgagagtttattgtataggttaggtgtatttatgtttattgtttttattagtaaaagagtaaaattaaaattaaataaacgaagattttggtaagattgtttgattttgttttgaggtgagtatatagtagtatcgggaaagtgcgtaatttataaagatggtgtagtttgtaggttaggaggggttggggtttgtcgagggtagttggggttttgtagtttgatttataatattgtatttagagcggggaggtgttgtttttaggtttatttgtgatttttgaggtataggtagagggtcgggcgtgtatgatattgtataggagtttttttcgtagtgtggaatttatttacgtcgtttgtttttttagtttttaaatgtatttggggtttgagattagaaatagtagaagttttggtggttagtggaatagttatttaagtggatttttattttttgggtattttttgagtatttttttgttaggtattgttttaggggttggtgacgggaagtttattttgtttatgaggttttttcggtatagaggtggatattgagggatcgttggtttatacgtatgttgaaatatgtgtttagttgatgtttttttaagtgagtttttttgtaggataggattatatagtgtttttaaa

SEQ ID NO: 1355 - DNA, 2481 bp, Artificial Sequence
  chemically treated genomic DNA (Homo sapiens)
tttgaggatattgtgtggttttgttttgtaggagggtttatttgggaagatattagttgagtatatattttaatatgcgtgtgagttagcggttttttagtgtttatttttgtgtcgaaagagttttatgggtaaggtgggtttttcgttattagtttttgaaatagtgtttagtagggaggtgtttaaagaatgtttaggagatgagggtttatttaggtaattattttattaattattagagtttttgttgtttttgattttagattttagatgtatttggggattgagggagtaggcgacgtgggtgggttttatattgcggagaggatttttatgtagtgttatatacgttcgattttttgtttgtattttaggagttataggtgggtttggagatagtattttttcgttttgagtgtagtgttgtggattaggttgtaaagttttagttgttttcgatagattttagttttttttgatttgtaggttgtattatttttatgagttacgtattttttcgatgttgttgtgtgtttattttaaggtaggattaagtaattttgttagagttttcgtttgtttgattttggttttgtttttttgttgatagaaatagtaaatataaatgtatttgatttgtgtagtgggttttcgagatgtgttgggttttattttttgtaaagagaaggattttaagtaagttatgagaaaggagttggtttttagagcggttattagttttttgttgatatgtgtttttttcgttttttatttcgtgttttgcgtaagtattagaataaataggatagtataggtggtttatggtttttggtgggaattttgttaatttttgagttgttggtttgcgtatttgttttaggatggagtttttgtttttttggttagtttttagaggttttgttgtttgcgagaagttattgatagagtttttttagtttttgtttttatgtttggttatggattttattagtaaggaggttttattgtgagggaaattagagtcgggtatggtgagtttttggtttttttaggtatcgtggatatgttttgggtatattgtgaagcgaggttatttattttttttatttggaagttttgtgattatatatagttgttgtagttttagttagtcgggttcgtgtttttgttagggaatgtgtttgtttgtatttttgtagtcgtgttgaacgtagtttaatggtagattttttttgtttttgcggtgtttggtatgtggatgatttttaggtgaatatgtagtagaggtagtttcgtgtttggtgtagggtggaggtattttaggtcgggttttgttaatatttgtggtagttattttaaagagttttagttgttgttgaagacgatttggtaaaggttagagagtgagatatcggggttatgagattttttttaagggtggtttgaggtttatataagtaaagagatgatttgggtgaagttatatggatatttttttgtttgtttggggttttaaagtaaggtgtataataagtgtttttattttaggttttgttagtggtagttaagagtacgttttggtagatatatgtttagtatggaaataaattaatttggatatagtggagtgttaggtcgattgttaagatgtttgttaaaaatttaggatatgggttttatagtggatattattgtttagtgtgggaagtttggttttatttagattttgtttattttgttatcgatttagttgttattttttttagattttagtaggttttttatttttagtatataggtcggattgaatttttaggaaagaagagtatatttagggtgggatttgatttttttaaggttatataattgcggagtagtagatttgggttttggatttttaaattttgatgagatgtaggtcgttttttgtttatatagtaggtaagatgtttggatagtttttcgtttttttaaaaatttattttgggttggatgttttaggttggtaacgttgtggtagagttagtttgtagtgaaaatagttgcgttgttgtaagttggggtttttgttgatgatagggttgggggttgattgtagattgaggtttgtagaattttttagtaattttagtagagggaattagtttaaggtatttatgtggagcgggttcggggtttggtgtgtaggtatagggttggagtgtgtattgtggtattgggtatcggaattttttggagtaggttagttttgtgaagtatgcgttgagtaggtgtttaggttttttttattttttttttttatttttatttttggtttagtttgtttataggtttagtttttatagtagttaggattttgtttttagtttatatagtagttaggatagagacgtatatttgtgtaaagtgtttaagatgtatttcggggattataggttttttagatgaaggatttgtttagtttgatgtttttgtgtt

SEQ ID NO: 1356 - DNA, 2223 bp, Artificial Sequence
  chemically treated genomic DNA (Homo sapiens)
gtttttatatcggtcgtgattttttttatgttttttttatttatttatttatttatttatttgtttatttattttatatttgtatattttttatgtttttagtattttattatatattagaatataaaaggtaattttgtttttatggggtttggagagtaatggggaaatagatgaataattttgtatgtgttttgaagttatagggaatttatatttaatttatatttgtttttttatagtaaagttttttgtagaaaggatttgaattaatttgttagaaaaggtataaggaataatatgatatattttaattaaagaagataattaaaattaaaggagaaagtgtttattgagtatttattatgttttaagtattttcgatatatttttttattttatggtttttatattttcgagttagtgttattttttttttagagataagtaaagcgaggttgattagttttagttgagagttaaatagttgagttaggttttaaagtttatatgatattatagaatagttgtcgatgagttttggatttgacgatgagttttttagtagtttgggggagaaggaaagtggaatatattattcgattgtttattagataagaaaaagttagatatttttttgaagggaagtaaagttttttttagtagtgaatttatttgtttttttttaagtgggagttggaagagagtttgtggggtggaatatagggggttttgttaggattgtttaagttgggcgtttttatggtatatatgtgaggaggttgttacgtgaatgtttatggttttttggaaaatgttcgtttttagtgaatatcgttttcggtgtttgtgtatgtgtacgtgtgtatgtgtatatgtgtttgtgtgtttttttttgttttattgttttttttttttttatttggttttttttttattttatttgtttgtttgtttgtttgtttgtttgtttttatttttgtttttttttggtaaaagtttttgttgtttaaaattttgttagtttttaggaagtgttgttttgttaaaagtttgtatacgagattttcgtgggttaggattgattttttttttatatagggttgggcggggtaagtaggaaggagtttgttatagttaaggtgacgtatttttgtcgggttagttcgaatagtagttgggtcggtaagcgataggagtacgggttattttttttttagaggcgtcggaatggatttgtgttatttaggtaagtaattgtcgttaatttttttgggttttagggtgtttttttttagaatgggatagtagtttttgttttatagggttttagataaaggaatatagcgtaggtgggaaatgtagttgtaagaagtaaatatttgtgggtttagtttgtgtgtttagttgcgttttaggggttggatatatagtagtagtaaagtagacgttgtttttttttttataggtttgtgttttagatgaggagatcggtagtgattttaatgtgattttatatgttagttgatggtaggtaggatgaagaatagtaaagtagggtaaggaagataggaatgtatggtggaaaaggttttaagaggagatgttgtttgatgagggatttgaggaagatgttagttaaggggttttttaaggaataaatattttagttagaaggaatagttagtttaaaggtttagaggtggatttagaaaagtgatttgcgattaagatgatgatgggatgttggtgatggcgatgtttgtttgggtgatataagggttttgaggtttttttttggttttcgggggttggggtggtttttggggaggttgaggacgttgtttagagttaggggagggttaggagtgagtaatagaggttttggttgaaattttttttagttattaagataatgtgtttggggagaaagaggagaaaggaggttgtaaagatggtgaggaaaagaatattagggtcgtgttttgggaggtaaattgaaggttcggtagaggggttaagtttttgtattttggatgttagtatgttttagagttgtaatagttttggtgaatacggttgttggaattttagaatttaagggttcgtgggagttgtttgttttttaggtttagatgattttagttttgtttaggagtatttttgttttaaacgtatttaatgtggagtagtttggtttcgtttattgggtatttttttttt

SEQ ID NO: 1357 - DNA, 2223 bp, Artificial Sequence
  chemically treated genomic DNA (Homo sapiens)
ggaagggggatgtttagtgggcggggttaggttgttttatattaggtgcgtttgaagtaagggtgtttttggataaggttgaggttatttggatttggggagtagatagtttttacgagtttttaggttttggaattttagtagtcgtgtttattagaattgttgtagttttggagtatgttgatatttagggtgtagaaatttggtttttttatcgggtttttaatttgttttttaaaatacgattttgatgtttttttttttattatttttgtagtttttttttttttttttttttttagatatattgttttagtagttggggagggttttaattagagtttttgttgtttatttttggtttttttttggttttaggtagcgtttttagtttttttaaagattattttaattttcgggggttaaaaaggggttttaaggtttttgtattatttagataagtatcgttattattaatattttattattattttaatcgtaagttatttttttgagtttatttttgagtttttggattggttgttttttttggttggaatgtttgttttttagaaagttttttagttgatattttttttaggttttttattagatagtatttttttttggggttttttttattatgtatttttgttttttttattttgttttattgttttttattttatttgttattaattgatatatggaattatattagagttattgtcggtttttttatttagagtataagtttatgaagggggaaatagcgtttgttttgttattgttgtgtgtttagtttttagaacgtaattggatatataggttgagtttataaatgtttgttttttgtagttgtattttttatttgcgttgtatttttttatttaggattttgtgaggtaggggttgttgttttattttaaaagagagtattttgaggtttagagaggttgacggtagttgtttatttgggtggtataggtttatttcgacgtttttggggaaaagatgattcgtgtttttgtcgtttgtcgatttagttgttgttcgggttggttcggtaaggatgcgttattttgattgtaataggtttttttttgtttgtttcgtttagttttgtgtggggaggaagttagttttggtttacgggggtttcgtgtgtaggtttttgataaaatagtattttttaaaaattggtagagttttgagtagtagggatttttgttagggagggatagaggtggaaataaataaataaataaataaataaatagatgaagtgaggggagggttagataaaaaagagaaagatagtgagatagaaagaaatatatagatatatatgtatatatatacgtatatatgtatagatatcgagggcgatgtttattgaggacgaatattttttaggggattatgggtatttacgtggtagtttttttatatatatgttataggagcgtttaatttggatagttttagtagggttttttgtgttttattttataagtttttttttaatttttatttgagaagagataaatgaatttattgttaggaagggttttgtttttttttaaagaaatatttggtttttttttgtttagtgaataatcgggtaatatgttttatttttttttttttttaggttgttgggaaatttatcgttaaatttaaagtttatcgatagttattttatgatgttatgtgaattttggggtttgatttagttgtttgatttttagttagggttagttagtttcgttttgtttatttttgaaaggggaataatattaattcggggatatggaaattatggagtgagaggatgtgtcggagatgtttgggatatagtaggtgtttaataaatatttttttttttgattttaattattttttttggttaaaatgtattatgttattttttgtgttttttttggtaggttggtttaaattttttttgtaaaaagttttgttgtaaagaaataggtataaattaaatgtgaattttttataattttaggatatatgtagagttatttatttgtttttttattattttttaggttttatgagggtaaggttattttttgtgttttggtgtgtggtaaaatgttggggatatagagggtgtgtaagtgtggaatgaatgaataaatgaatgaatgaatgaatgaatgaagggaatatggaagagattacggtcgatgtgaaagt

SEQ ID NO: 1358 - DNA, 2495 bp, Artificial Sequence
  chemically treated genomic DNA (Homo sapiens)
ttttcgatggatattggagttattatttttaatataatggaggatcgttttcgagtgttggagatttagaggtatagggagatgtttcgtttttcgggggatgttttttttttttattattattattttagtttttatggggattttttttttaaggttttttatggtattttattgttaagtttaagtttttttataggatttggttttatttttttttgtttttttcgtatttttttttttgtattttttttttggattttgggttttttaggatttagttttggtttttttttttttggttattttttataagattttgattattttcgtggttttttgggttatttgtgttattgttagttatttttaagttttcgattaaagtttaggtttttttttttgtggtttttgttttttagttagtttttttgtgtattttatagaattttatgtttaagtgtttttaattgaattttttattttttttttagttggttttttgttttcgatttttttatgttatttagcgagttttattgggtgttttggaggagtttaggtcggtggtttttttttttttatttgtttttagtggtttgggtttagttgtttattttttatttttttttgtttattttttttttttttttagttattttttgggtttttattattagtgttattgttggaaataggggttttttatgtttgttttgttgtatggatcgaagttcgtcggtcgtttcgggggttttttttattgggatattattttattttttttttattagggtatatttggtatatatttttattggggatttattatatttttttttttttttttttattagggtatacgtggtttttttttattgtagggtttttgtttgggttgatttagagacgtaaggatatagtgtttagggatttttttttgggggtttgtttattttttttttgtaaaatgggaagttgcgtgtcggtgattgtttcgtttataggtttttttttttttgggattggttagattttttttagatggttttatttttgttatggttgattggtttaggttggatacgtgatttaagtgaaatttaatgggatttttttttgtgattttgaattcggggaggagatttggagtttggaggtggtagcgatttgggagtcgcgtgggtttgtttgttttatatattgtttttttgtttttttttttaatttatggtttttttagaggataatttttttttttaaatttttcggacgaggtttttgtggtagtcgagagagttacgtagcgggggtgtttttttcgtttgtgggggagttttaggcggttcgtatagtttcgtggtggtcgggtttggttacgtgtgtttttcggtttttatgtggttttagtagggcgttcgttttttttttagggtttttttttttaggagggatagtaggaaggtaggtaaggataggatttgagtttatatttcgttcgcggttatttgtttgattaggaggaaggggaggggataggagtgattttacggaggttatttgggagttggggttgggcgattttagggttggatgattttagggttgggtgattttagggttgggtgattttagggttgggtgattttaaggttgggtgattttagggttggatgattttagggttgggtgattttagggttgattattggcggagtatttggggtgggtgttatgggtatttgagagggaattttgatttgagcggaggttagaatttttttttgaggaagtgttttattttattgagtttttagaggttggtggtaggttgaataggggattatgttagtagagggattgttttttagagattttggattattattacgatgggttgattttataaatttagttattgttatcggaggtttggttgaattttagagttttttttttagcgtcggttttttggtttgtaatggggagggttggatttttttgtattgatatttttatggtatggttgcgggaggggcgtttattttgttggtttggtggttgtggagcggtcggaggtggcgtgtgttaaagttgttgttggtgttttttttggttgttttggggtgatgataggagttgacggtttggtagtagtttttagggaggtagtagtcgggttggcggcgggtggtggcggtggtgggagggggtttttggagagaataaagtattgaggatgttgggttttaggggcgatagaggagtgggggatgggggtagggttttggagtgtgtggtttatagggaggttatggtacgggtgtgtgtgcgggtgtaggatttggaatttatttcgtggttgtgtgagtttaggtaggttatttagtttttttgggttttagtttttatagttgtgtaattggaataatattattattatattattgtatttttagtgttgagagtagtgagtggtatagagtaggtattta

SEQ ID NO: 1359 - DNA, 2495 bp, Artificial Sequence
  chemically treated genomic DNA (Homo sapiens)
tgaatgtttattttgtgttatttattatttttagtattggggatataataatgtaatgatggtattgttttaattgtataattgtggaaattgaggtttagagaggttaagtgatttgtttgggtttatataattacgaggtgggttttaaattttatattcgtatatatattcgtgttatggtttttttgtgggttatatattttagaattttgtttttattttttatttttttgtcgtttttggagtttagtatttttagtgttttgttttttttagaagtttttttttattatcgttattattcgtcgttagttcggttgttgtttttttgggagttgttgttaagtcgttagtttttgttattattttaaggtagttagagggagtattagtagtagttttggtatacgttattttcggtcgttttatagttattaggttagtaggatgggcgtttttttcgtagttatgttatgggagtattagtgtagggggatttagttttttttattataaattaagaaatcgacgttggagaagaaattttgaagtttagttaggttttcggtgatagtggttaaatttgtaaaattaatttatcgtggtgatgatttaaagtttttggaaggtagtttttttgttggtatagttttttgtttaatttgttattagtttttgggagtttagtggggtggggtatttttttagaggagggttttgattttcgtttaggttaaagtttttttttaggtgtttatggtatttattttaggtgtttcgttaatagttagttttggggttatttagttttgaggttatttagttttgaggttatttagttttgaagttatttagttttgagattatttagttttgaggttatttagttttgaggttatttagttttggggtcgtttagttttagtttttaggtgattttcgtggaattatttttgttttttttttttttttttggttaggtaggtgatcgcggacgaggtgtggatttaggttttgtttttgtttgtttttttgttattttttttgggggaggaagttttgggagggaggcgggcgttttgttggggttatatggggatcgaggagtatacgtggttaggttcgattattacgagattgtgcgggtcgtttggggtttttttataggcggggaaggtattttcgttgcgtgattttttcggttgttataggaatttcgttcgaggagtttaaggaaaaaggttgttttttgagggggttataggttgaaggaaggggtaagaaggtagtgtgtggaatagataggtttacgcggtttttaagtcgttgttatttttaggttttaggtttttttttcgggtttagaattataggagagaattttattgggttttatttgggttacgtgtttagtttggattaattagttatggtaggggtggggttatttggagggagtttggttagttttagagaagaaagagtttgtgggcgaggtagttatcgatacgtagttttttattttataggagggaggtggataggtttttaaggaaagatttttgggtattgtgtttttgcgtttttggattaatttagataaaggttttgtagtgggagggagttacgtgtgttttggtgaagaggaggaagaagaggtgtggtaggtttttagtggaggtgtgtattaggtgtgttttggtggagaggaagtagggtaatgttttaatggagaggattttcgaggcggtcgacggatttcggtttatgtagtaagatagatatgagagatttttgtttttaataatgatattggtaataggagtttaggagatgattgggaggagggagggagtggatagggagagatagagggtgagtagttgaatttaggttattgaggataggtagagggagaggagttatcggtttgggtttttttaggatatttagtggggttcgttgggtgatatggggggatcgagggtaggaagttagttagggggaggatgaagagtttagttggaaatatttgagtatgaggttttgtggggtatataagagagttggttagagggtaggggttataaggagagaggtttgagttttgatcggggatttaggggtgattggtagtgatataggtggtttaggaggttacgggagtagttaggattttataggaaatggttagaagagagggggttaggattgggttttgaggaatttaaaatttaggagaagggtgtagaggaaggagtgcggggagagtagggaggggtgagattagattttgtaggagaatttggatttagtaatgggatgttataggggattttgaggagagggtttttatgggggttaggatgatggtgataagaaggggagatatttttcgaaaaacgaggtatttttttatgtttttgagtttttagtattcgggagcgattttttattatgttgagaataatgattttagtgtttatcggggg

SEQ ID NO: 1360 - DNA, 2390 bp, Artificial Sequence
  chemically treated genomic DNA (Homo sapiens)
atagattagatttattgatagttaagtagaggtaggaagtgtttttaggagaggaaagtgaggtatttgtttttatgtaggagattgtataggtttatgtagatgttttatgttggttaatagggagttttgtatatataattttgaatattttttgtttaaagtgggtgggattatttttttttaagttatgagaaatagattttatagttattttagtttaatttgatttttattatttatttatttttttaatttatttatttatttaataaatattttcgtaggtttgttggggattatgttttgggttgggttttggttgtagtaatttttaggtttgtttgtaatttttttgttagtttgttattttattgttgggtttttttttatttaagttttttttttttagatagttcgaagggtttgtgtttattttaggttattaagtttttttattgaaatataggagatttttttagtttattaggtgattttgagtaagttttttttttaaattatatttagtgaatattggagagaagaaagttgatagaagtcgggttgggttaggtttggttgtggggatatttgagggtagttaggtgtttgtagaagaggaggggttggtgttgaggtttgagatgggaaaagattgtagtggttggagtttgagtgtttggttttgggttgggaagaatagagtttgggattggtagtaggagtggagagggtggtattaagatttgaaaatggggtaagggtgggggtcggggtaagttttgagttggtagggagttaggaaggttataggattagggtaagaatttagttgtttttgaggttttggagagggtgtagatttttgaattatttgttttattttaaggtaggtgtgttaatgtttttttttggagtaaagggttgattaggtttacggtagaaaggtgaaggtagatagatagttttttttttgttgttagttgggatttgggttaggtagatgggtatatttttttttttttattttatggttgttttagttttagtagttagtttgaaggatttttagggggtagttattttgtttcggttttttttaggttgggaagtgggagtttgtgtttttaaatttttagtaggttgaaatggttgatgatattattggttttcgggagcggtagagttggagtcggagttaagggagtttaggttgtcgggggttgtagatatggagggttagagtagtaggggtagtaggaggttagggattcgggttggtttgggttttttgtttatgttttagggtgttgtttaaattggggtattttttaaggtaagatttttgagatttagtgtttttcgtttttttgatttttggttttatatattttttttatatatattgtaggttttttggtgtttttgattgaggggttggtatttttttttgtttagcgagtaggggttaggtgaagagagtattttgggggttgaggggtagtgataggatgttcggagatagatgaagttagttatttttaggagtttttgggagagttttggattgggtattagaggatttagttgtgttttatttttgttgtgtgattttggttaagttgttttttttttttgagttaatgtaaaatgagggggtttgtcgttgaagattaaaattgtgatatttgggatggttaagttgttagtattggaggcggtgtgatagttggggggaagtcggtatatagtgtgatatttggagttaaggagggtgtttaaaatgttattttaaagaattgagtttgagaagggaggtggagatggagttttaggtattttgaattgagaaggatacgggatagaaatagaagtgcgtttttagaggtagggtttttttgcgttttgttattttatttagggttattttggggtaagtatagatatttttttgttttttttggtgaaggatattttattttgttttttggagataggggatattagagagaatagatggggaaggaggataggtttttataggatttcgtgattttttattttttttatttgtcggatataaatgggatatttgtttgtttgtttttttaggtaggggagaaagtggaggatgtaagagggtataatttgggtatagagagatgtgatattaggattaatttagaattttggatttgttttgaatgttagatttatatttggtgaggatggattatttaacggggttagatggaattttagtaaatgttgggtttataaatgtagataatgggagatgaagattttttagaatataatgtggttaggaattttagattttatttttttattttatagatagagaaattgaggcgttgggtagagaggta

SEQ ID NO: 1361 - DNA, 2390 bp, Artificial Sequence
  chemically treated genomic DNA (Homo sapiens)
tatttttttgtttagcgttttagtttttttgtttgtaaaatgaagggatggggtttagggtttttggttatattatattttggggaatttttattttttattgtttgtatttatgagtttaatatttgttagaattttatttagtttcgttgaatagtttatttttattaagtgtgaatttagtatttagagtaagtttaggattttaagttgattttggtgttatatttttttgtgtttaggttgtgtttttttatattttttatttttttttttatttgaaaggataggtaagtaggtattttatttatgttcggtaggtgggaggggtggggagttacggagttttgtagagatttattttttttttttatttattttttttgatgttttttgtttttagaagataggataaagtgttttttattaaggagggtagaagaatgtttatatttgttttaggatggttttaggtagggtaatagggcgtagggaggttttgtttttggagacgtatttttgtttttgtttcgtattttttttagtttagagtatttaaaattttatttttatttttttttttaaatttagttttttgaggtggtattttaggtattttttttggttttaagtgttatattgtgtgtcggtttttttttaattattatatcgtttttagtattaataatttagttattttagatgttatagttttagtttttagcgataagtttttttattttgtattggtttagagaggaaaagtaatttggttaaggttatatagtaaaggtggagtatagttgggttttttgatatttagtttaggatttttttaagggtttttggagatggttaattttatttgttttcgggtattttgttattgttttttagtttttagggtgttttttttatttagtttttgttcgttgagtagaggaaagtattagttttttagttaggagtattagggagtttgtagtgtatgtggggggggtgtgtggaattagggattaggaaagcggggggtattgggttttaggggttttattttggagggtgttttagtttgggtaatattttggggtatgggtagggaatttaggttagttcgggtttttggttttttgttgtttttgttgttttggttttttatgtttgtagttttcggtagtttggatttttttggtttcggttttagttttatcgttttcgggaattagtgatgttattagttattttaatttgttgagaatttaaaggtataggtttttattttttagtttggaagaggtcgaagtaaggtggttattttttgggaattttttaaattggttgttgaggttggaatagttatggagtggggaggggagagtgtatttatttgtttggtttaggttttaattggtagtaggaaggaggttgtttgtttatttttatttttttgtcgtaggtttggttagttttttgttttagggaggggtattaatatatttgttttaaggtaggataggtggtttagaggtttgtattttttttagggttttagagataattgagtttttgttttgattttgtgatttttttggttttttgttagtttagagtttgtttcggtttttatttttgttttatttttaggttttggtgttattttttttatttttattgttagttttaggttttattttttttaatttagaattagatatttaggttttagttattgtagtttttttttattttaggttttagtattagtttttttttttttgtagatatttagttgtttttagatgtttttatagttaggtttaatttagttcggtttttgttagtttttttttttttagtatttattgggtgtggtttgggaggggaatttgtttaaggttatttggtgaattgagaaggttttttgtgttttagtgagaaaatttagtgatttaggatgagtataagtttttcgagttatttgggggaagggaatttgggtggagaagggtttagtagtggggtaatagattgataagagagttataaataggtttgagaattgttatagttaggatttagtttaggatatggtttttaataggtttacgggagtgtttgttgaatgaataaatgaattagaagagtgaatgggtgatgagggttagattgggttgggatggttgtgggatttgttttttatggtttagagaggagtgattttatttattttaggtagaaagtgtttagagttgtgtgtgtagagttttttgttaattaatatggagtatttgtatgggtttgtgtagttttttatatgaaggtagatgttttattttttttttttgaaggtattttttatttttgtttgattgttagtaggtttagtttgt

SEQ ID NO: 1362 - DNA, 2497 bp, Artificial Sequence
  chemically treated genomic DNA (Homo sapiens)
aatttttacggttaagtgttgagataagagttttggggtttaaggttttttaggtagggtgcggtgagggttcgtcggaggaagggtttttttttgtttattttggttgggcgttgtgcgggattgtaggagtttgagttggggtaaaaggaattttaggggagatagttagatttaaggttaattgtttagtttagtttaggattttagttttttgtaataagatgggttaggtttttcgttggagtttgtttagtaaggggtttgtgggtttttgggtaagtattagtcgggttttatttttagtttggggtttttttttagttttttttttggcgtagtttagttagagtttgtttattttttgggggttttcgttttttttttttttggttttgtattgcgtgagggcgtattttttagaattagttttttagagtttgttgagattaggagatttggaggttattttagggatattttgtttttgtgttttagataggtgttttttttattatgggtgatgaatgtcgaggagttgttattataattagtgtggaatgtgtcgttttttttagggaggaaaattttattttggaaatatattttagatgtaagttgaattttatttacggggttataaaattatttttttaattatttggtgttgttgggggttggtattattaattttggagatgttatttagagttaagatattatttggggaaaaaaattaggttcgtattttatgaggaatttttttttatgttttgtagaggttttaggagatggacgagattgttcgggtattaggtagggaggggtagggacgtagttatttttatagttatttttacggtttaggagttatgttttattttattagtttttgttagattttttttattagagatggttttatcggtataagggaagattgaggttagagaggaatggaggaattggagggttggaatagttggtgggttggacggtttagttttatttgttttgtttgtttttagtagatattgtttttttttttatttttaaagtttttattcggtttagatttttttttgagattagtattatttaatagttttttataaaaaattgtttttttgattatcgagggtaataatgaaaatacgtaattgaatttttaagaaattattatttttataatttgcgtttagttttcgagataaattaaacgttttttttgtatggtgagtcgtttattgcgtattagagaggggttgatattgttttttattatcgatgcgggatttattaagaagaatgttttatattgtttttcgggaggtttttggtatttttagtttatggttttgagcgggtagagttggttagttggaggcgtcgggcgggtggttaggtgggtttttttttgattatttttggttttgttattggttagttgcgtggtggtgtgggtggtaagtgggagggttagttagaattttagtttagatttttaagaaaattaggtttgtgcgtagtcgggtagcgatagttttttgagaagtgtaattttggagttagagtggggaaaaggtagggaagtcgggtaggaggaaggaagtggagatggtagagagggaggatttatttatttgttttttatttgttggttaaagttgattttatttaattgcgttagtgtttagaggatttaagatattataaggttaggtagtagagcggttttgggggaggcgaggtttcgttgaggtaaggtatcgtttggtatagggttcgggagtaggtgggggtagtagggtggttatatttatttaaggagttgttgggttggttagtagaggggcggggaggtggggttagttatcgggatgggttgtttatttgtgagtagttggtagtgggttttttgttggtagttgttagtggttggatttttatggttttttggttggttggaggtcgtttgggttgtggggaagtagaagtttttagtttgtggattgagttttttgaaaatgtttgtaggttgtatttagtagagttaattttaagtaaaggattcgagtgatattatttacgtgtaaattatcgttttttttagcgtggttgtttgtttgagggtttagagttattttttggggaatattgtttagttagaaatttggtagtggtggttgtatagcgaggaggggtgttgttaggggatagaggatttgttttttgggaacgggagaattgaggtttaaagagtggttttttatttgatttaggtaaatttagggttaagggtaataggttgaggttattaggagtttaaaggttggttttgaaggtgagatttttttttgaggaagtaagtggttttaagtagtattttttggtagtcggtttagaggattggagtggggtgggtcgggaggaatatcgttcgggacggggtgggtgtttatatttataattgtgtttttgtttttttttttttttt

SEQ ID NO: 1363 - DNA, 2497 bp, Artificial Sequence
  chemically treated genomic DNA (Homo sapiens)
agggagggagagaaggtaggagtatagttgtgggtgtaggtatttatttcgtttcgaacgatgtttttttcggtttattttattttagttttttgggtcggttgttagagggtgttgtttgaggttatttgtttttttagaagaaggttttatttttagagttagtttttgagtttttggtgattttagtttgttgtttttgattttgagtttgtttagattaagtgggaggttattttttgggttttagttttttcgtttttagggagtaggttttttgttttttgatagtattttttttcgttgtgtagttattattgttaggtttttgattaggtagtgttttttagggggtggttttgggtttttaggtaaatagttacgttgggaggggcggtggtttgtacgtgaatagtgttattcgggttttttgtttgaagttggttttgttgagtgtagtttgtagatatttttaggaaatttagtttataggttggaggtttttgtttttttataatttaaacggtttttagttagttagagagttatgagaatttagttattagtaattgttagtaggaaatttattattagttgtttatagatggatagtttatttcggtagttggttttattttttcgtttttttgttgattaatttagtagttttttgggtgggtgtggttattttgttgtttttatttgttttcggattttgtgttaggcggtgttttgttttagcggggtttcgttttttttagagtcgttttgttgtttgattttgtgatattttgggttttttgggtattggcgtaattgggtggggttagttttggttagtaagtggggggtaggtgggtaaattttttttttttgttatttttatttttttttttttattcggtttttttgttttttttttattttggttttagggttgtattttttagaaagttgtcgttgttcggttgcgtataggtttgatttttttgggagtttgggttaagattttgattggtttttttatttattatttatattattacgtagttagttagtaatagggttaggagtgattaggagggggtttatttgattattcgttcggcgtttttagttggttaattttgttcgtttagggttatgagttggaggtgttaggagtttttcgggaggtagtgtgaggtattttttttagtaagtttcgtatcgatgataaagggtagtattagtttttttttgatgcgtagtgagcggtttattatataggggaggcgtttaatttatttcgggaattgggcgtaagttataaaaatggtaattttttggagatttaattacgtgtttttattgttattttcggtaattaaggaaataattttttataaaaggttgttggatgatattgattttaggagaggatttgggtcgggtgggggttttgggaatgaagaggagggtagtgtttgttgggggtaggtagggtaagtggagttgagtcgtttagtttattagttgttttagttttttaatttttttatttttttttggttttagtttttttttatgtcgatggggttatttttggtagggagggtttggtaggagttgatgaagtgaggtatggtttttgggtcgtgagggtggttgtgagggtagttgcgtttttgtttttttttgtttggtgttcgagtagtttcgtttattttttgaggtttttgtagggtatagagaggggttttttatggagtgcggatttgatttttttttttaagtgatgttttggttttaaataatatttttaggattaatggtgttagtttttaatagtattaggtgattgaaaaaatggttttatggtttcgtgggtgaaatttaatttgtatttgaggtgtatttttaagatgggatttttttttttgggagaggcggtatattttatattaattataatggtagtttttcgatatttattatttatagtgggggggatatttgtttggggtataggggtagggtgtttttggggtaatttttaggttttttaattttagtagattttggggggttggttttaggagatgcgtttttacgtagtgtagggttaggggagggggaggcgggagtttttaggaaatgaataaattttagttgggttgcgttagggaggaggttggaaggaggttttaggttgagggtaggattcggttagtgtttgtttagggatttataggttttttgttgagtagattttagcgaggggtttggtttattttgttgtaagaggttggagttttgggttgagttgggtagttgattttggatttgattgttttttttgaaattttttttattttaatttaggtttttgtagtttcgtatagcgtttagttaggatgggtaggaggaagtttttttttcgacgggtttttatcgtattttgtttgaggggttttgagttttagggtttttgttttagtatttggtcgtggagatt

SEQ ID NO: 1364 - DNA, 2349 bp, Artificial Sequence
  chemically treated genomic DNA (Homo sapiens)
ttggtttttattttagttttgatataaacgttatgagggtttttagattagttatttttttttttgtgggatttttagagttttaaagttggaaaagagaagttaagttgtagtttttgttgggtaattttaaatgttaggtagtttatttataaatatatggaaaggttttttttaggggaattggagtttgtttttagagtttttaagtttacgttttaaataaaattttaaaattatgaatgtgtgtatgatggaatggtaaataggtagggtgtaattttttttattggtataaggaggtgtcgttaggatgttaatttattttgatttaggtgttaagtttttttttaattttgtatataaacgtatagatatttgtattgatagtgtaagaaatttatttatgtttattattatttaaaaaatagtattttttattaagtattttttatatgtttggtattttttatatttaggtttatagttagttttgaaagggaggtattatttttattttataggtgaggaaataagtttagagaggggaagtgatttgtttagtttgtatgtgttgagttgggatttgaatttaggtttttcgttttagtatttattttattgggtatttcgtgtttataaagtttttttttgggtaatggttttttggtttagttgattttggatttttttttagtttgtttagtttttcggatggtatttaatgaggatttttaggtttgaataagattttttttaatcgtgattttatttaagtattttatgatgagattcgtgattgtttttattttatagataaggaaattgaggtttattatggttaagttatttttttagggatatatagtttaggagagtaagggttggggttgaagaaattttgttttttcgatcggattttttagtttatatattttttatggtttatttagtttcgaggagtttttagtagaatttttaattttatattatagtgtgttaggtatggtttatttttttttttttcgttggtgttttttattagggattttattttgttttgttgttcgtttttttttggtttttgttggattttttttaagcgttcggtatgttttttattgattttgaagagtggttagtgttttttgtagttcgggttcgggggtgtggatgaaggagttttaggtagttttatgagtatagagagtatcgtaggttgcggtgagtttcggtttatttttttagttatatgattgtagttttttatgcgtattttagcgggtatggattagggttagtttttgagtatttttggttaggaagtttaggtattttagtgggttgttagggacggttttggttaagtggtaggaggttttgtattagcggagggtaggggagttttttagggttatttttaggaagtttagtattttaaatagttttgtttgaatttttattttgtattggtttagtttagttagataaagtttttgggatgtttgtttttggtggttttattaggcggtagttgagtagtggaacggaagcggagtttagtaggttcggtgcggcgggattaatgaatggagttgcgggaggaggaggaaagaggttggagtatggggtgattttgggtttgtaatcgaatttattagtcgggtaggacgttgattggttgaggagtgtatttgttagggtttacgtttttattttgtttgtttttttagtattatttagttatttgttgttagttttgtttagattgggattatgggagttaaagttttaagttgtgggatggggattaggttggggtttttatatttttttgaagggaaggaaaagggtttaggagtttggaggagttttttagaatttattttttttatttttattatagcggtggttgttatatttatttttattaggttggtagggggttatgggtttttgttagggttgggtgaaggaagggttggggttttgaagttattattttgggagtttttaaggtttttgggaaagggagtgttatttggggtgtttttttgttaagttttggtttttagaaaggttttcggtatatttaggggatagagttttagggtttttcgttttttaggattttaagtatgggtttggttttgtagtaatttttttggtttgataattgggggagacgtagcgggaataggttttgagagttatatagggtagggttgatgttttggatttgaaagaattatggtttttagagtggtagagagtggtttagggtgtatgtttgtggttatttttatttttggttatttggggggatatagtaggtattatgtgtgtttt

SEQ ID NO: 1365 - DNA, 2349 bp, Artificial Sequence
  chemically treated genomic DNA (Homo sapiens)
gaggtatatatgatgtttgttgtgtttttttaggtggttagggatggaggtggttatagatatatattttgggttattttttgttattttagggattatagtttttttaaatttagagtattagttttgttttgtgtggtttttaaggtttgttttcgttgcgttttttttagttattagattaggagggttgttgtaaggttaggtttatgtttggagttttaggaagcggggagttttggggttttgttttttgagtatgtcgagagtttttttaagaattaggatttggtaggggagtattttaggtggtatttttttttttagaagttttgggaatttttagggtggtagttttagagttttagttttttttttatttagttttggtagaggtttatggttttttgttagtttgatggaggtggatgtggtagttatcgttgtggtaagggtgagaagggtgggttttaagggatttttttaagtttttgaatttttttttttttttttaaggagatgtgaaagttttagtttggtttttattttatagtttagggttttggtttttatagttttaatttaggtagggttggtagtaggtgattggatggtgttgagaaggtaggtagaatgggggcgtgggttttggtaagtgtattttttagttaattagcgttttgttcggttggtggattcggttataagtttaagattattttatattttagttttttttttttttttttcgtagttttatttattggtttcgtcgtatcgggtttgttgggtttcgttttcgttttattgtttagttgtcgtttggtggggttattaagggtaggtattttaggggttttgtttgattggattgggttagtgtagaatgggggtttaggtagggttgtttgggatgttgggttttttgggggtggttttggggggtttttttgtttttcgttggtataggattttttgttatttgattaaggtcgtttttggtaatttattggggtatttgagttttttggttaaggatgtttagggattggttttgatttatgttcgttgggatgcgtataggaggttgtagttatgtagttgggaggatgagtcggagtttatcgtagtttacggtgttttttgtgtttatgagattgtttggggtttttttatttatattttcggattcgagttgtagagagtattggttattttttagagttagtgggaggtatgtcgagcgtttgaggagagtttagtaggggttaggaagaagcgagtagtagggtagagtggagtttttggtggagggtattagcgagagaagagaggatggattatgtttggtatattgtggtgtggagttggagattttgttgggaatttttcggagttgggtgagttatgaggggtgtgtgggttggggggttcgatcggggaagtaaggtttttttagttttagtttttatttttttaggttgtgtgtttttgggggagtgatttgattatggtgaattttaatttttttatttgtaaagtgggggtaattacgaattttattatggggtgtttaaatgaggttacggttggggaaagttttatttaaatttgggagtttttattaaatgttattcgagggattgggtaggttgggggaggatttagggttaattgagttaaaaagttattatttaggaggaggttttgtgggtacggggtgtttagtggaatggatgttgagacgaaaggtttgggtttaaattttaatttagtatatataagttgagtaagttattttttttttttggatttatttttttatttgtaaaatgaaggtgatattttttttttagggttggttgtgaatttggatgtgggaagtgttaggtatgtgggaaatgtttagtaaagagtgttattttttagatggtaataaatatagatgaattttttgtattattagtatagatgtttgtgcgtttgtgtgtagggttgggggagggtttggtatttgagttagagtaggttggtattttggcgatatttttttgtgttagtgagaaaggttgtattttgtttgtttgttattttattatatatatatttataattttggagttttatttggggcgtgggtttgggaattttggaggtagattttaatttttttgaggaagatttttttatgtatttatgggtgggttatttggtatttagagttgtttaatagaggttgtagtttggttttttttttttagttttgaaattttgagagttttatagaagggagagtgattggtttgaggatttttatggcgtttgtgttagggttggggtgagaattag

SEQ ID NO: 1366 - DNA, 2355 bp, Artificial Sequence
  chemically treated genomic DNA (Homo sapiens)
atgtttttttggtaggaagagggtagagatttggtttttattttagttttgatataaacgttatgagggtttttagattagttatttttttttttgtgggatttttagagttttaaagttggaaaagagaagttaagttgtagtttttgttgggtaattttaaatgttaggtagtttatttataaatatatggaaaggttttttttaggggaattggagtttgtttttagagtttttaagtttacgttttaaataaaattttaaaattatgaatgtgtgtatgatggaatggtaaataggtagggtgtaattttttttattggtataaggaggtgtcgttaggatgttaatttattttgatttaggtgttaagtttttttttaattttgtatataaacgtatagatatttgtattgatagtgtaagaaatttatttatgtttattattatttaaaaaatagtattttttattaagtattttttatatgtttggtattttttatatttaggtttatagttagttttgaaagggaggtattatttttattttataggtgaggaaataagtttagagaggggaagtgatttgtttagtttgtatgtgttgagttgggatttgaatttaggtttttcgttttagtatttattttattgggtatttcgtgtttataaagtttttttttgggtaatggttttttggtttagttgattttggatttttttttagtttgtttagtttttcggatggtatttaatgaggatttttaggtttgaataagattttttttaatcgtgattttatttaagtattttatgatgagattcgtgattgtttttattttatagataaggaaattgaggtttattatggttaagttatttttttagggatatatagtttaggagagtaagggttggggttgaagaaattttgttttttcgatcggattttttagtttatatattttttatggtttatttagtttcgaggagtttttagtagaatttttaattttatattatagtgtgttaggtatggtttatttttttttttttcgttggtgttttttattagggattttattttgttttgttgttcgtttttttttggtttttgttggattttttttaagcgttcggtatgttttttattgattttgaagagtggttagtgttttttgtagttcgggttcgggggtgtggatgaaggagttttaggtagttttatgagtatagagagtatcgtaggttgcggtgagtttcggtttatttttttagttatatgattgtagttttttatgcgtattttagcgggtatggattagggttagtttttgagtatttttggttaggaagtttaggtattttagtgggttgttagggacggttttggttaagtggtaggaggttttgtattagcggagggtaggggagttttttagggttatttttaggaagtttagtattttaaatagttttgtttgaatttttattttgtattggtttagtttagttagataaagtttttgggatgtttgtttttggtggttttattaggcggtagttgagtagtggaacggaagcggagtttagtaggttcggtgcggcgggattaatgaatggagttgcgggaggaggaggaaagaggttggagtatggggtgattttgggtttgtaatcgaatttattagtcgggtaggacgttgattggttgaggagtgtatttgttagggtttacgtttttattttgtttgtttttttagtattatttagttatttgttgttagttttgtttagattgggattatgggagttaaagttttaagttgtgggatggggattaggttggggtttttatatttttttgaagggaaggaaaagggtttaggagtttggaggagttttttagaatttattttttttatttttattatagcggtggttgttatatttatttttattaggttggtagggggttatgggtttttgttagggttgggtgaaggaagggttggggttttgaagttattattttgggagtttttaaggtttttgggaaagggagtgttatttggggtgtttttttgttaagttttggtttttagaaaggttttcggtatatttaggggatagagttttagggtttttcgttttttaggattttaagtatgggtttggttttgtagtaatttttttggtttgataattgggggagacgtagcgggaataggttttgagagttatatagggtagggttgatgttttggatttgaaagaattatggtttttagagtggtagagagtggtttagggtgtatgtttgtggttatttttatttttggttatttgggggga

SEQ ID NO: 1367 - DNA, 2355 bp, Artificial Sequence
  chemically treated genomic DNA (Homo sapiens)
tttttttaggtggttagggatggaggtggttatagatatatattttgggttattttttgttattttagggattatagtttttttaaatttagagtattagttttgttttgtgtggtttttaaggtttgttttcgttgcgttttttttagttattagattaggagggttgttgtaaggttaggtttatgtttggagttttaggaagcggggagttttggggttttgttttttgagtatgtcgagagtttttttaagaattaggatttggtaggggagtattttaggtggtatttttttttttagaagttttgggaatttttagggtggtagttttagagttttagttttttttttatttagttttggtagaggtttatggttttttgttagtttgatggaggtggatgtggtagttatcgttgtggtaagggtgagaagggtgggttttaagggatttttttaagtttttgaatttttttttttttttttaaggagatgtgaaagttttagtttggtttttattttatagtttagggttttggtttttatagttttaatttaggtagggttggtagtaggtgattggatggtgttgagaaggtaggtagaatgggggcgtgggttttggtaagtgtattttttagttaattagcgttttgttcggttggtggattcggttataagtttaagattattttatattttagttttttttttttttttttcgtagttttatttattggtttcgtcgtatcgggtttgttgggtttcgttttcgttttattgtttagttgtcgtttggtggggttattaagggtaggtattttaggggttttgtttgattggattgggttagtgtagaatgggggtttaggtagggttgtttgggatgttgggttttttgggggtggttttggggggtttttttgtttttcgttggtataggattttttgttatttgattaaggtcgtttttggtaatttattggggtatttgagttttttggttaaggatgtttagggattggttttgatttatgttcgttgggatgcgtataggaggttgtagttatgtagttgggaggatgagtcggagtttatcgtagtttacggtgttttttgtgtttatgagattgtttggggtttttttatttatattttcggattcgagttgtagagagtattggttattttttagagttagtgggaggtatgtcgagcgtttgaggagagtttagtaggggttaggaagaagcgagtagtagggtagagtggagtttttggtggagggtattagcgagagaagagaggatggattatgtttggtatattgtggtgtggagttggagattttgttgggaatttttcggagttgggtgagttatgaggggtgtgtgggttggggggttcgatcggggaagtaaggtttttttagttttagtttttatttttttaggttgtgtgtttttgggggagtgatttgattatggtgaattttaatttttttatttgtaaagtgggggtaattacgaattttattatggggtgtttaaatgaggttacggttggggaaagttttatttaaatttgggagtttttattaaatgttattcgagggattgggtaggttgggggaggatttagggttaattgagttaaaaagttattatttaggaggaggttttgtgggtacggggtgtttagtggaatggatgttgagacgaaaggtttgggtttaaattttaatttagtatatataagttgagtaagttattttttttttttggatttatttttttatttgtaaaatgaaggtgatattttttttttagggttggttgtgaatttggatgtgggaagtgttaggtatgtgggaaatgtttagtaaagagtgttattttttagatggtaataaatatagatgaattttttgtattattagtatagatgtttgtgcgtttgtgtgtagggttgggggagggtttggtatttgagttagagtaggttggtattttggcgatatttttttgtgttagtgagaaaggttgtattttgtttgtttgttattttattatatatatatttataattttggagttttatttggggcgtgggtttgggaattttggaggtagattttaatttttttgaggaagatttttttatgtatttatgggtgggttatttggtatttagagttgtttaatagaggttgtagtttggttttttttttttagttttgaaattttgagagttttatagaagggagagtgattggtttgaggatttttatggcgtttgtgttagggttggggtgagaattaggtttttgttttttttttattaggggggtat

SEQ ID NO: 1368 - DNA, 2475 bp, Artificial Sequence
  chemically treated genomic DNA (Homo sapiens)
ttaggatattggtttttaaaattatataattatagttttattgttgtatttaagaaaatgaattttttataagtttttatttattttttgaattgttttgtggaagattttataagttttttaatttaggatattataagggtttttgtgttatatttggttttatgtttttttaatttttttaagtttagaattatttatgatgttgagttgtattaagggttagttattttgtagtagaagaattattgttattgttattatttgttttgtgattattatttaaattcgttaatagagttttcgaatttatttaattgggtataagtaggtagtggtatatggttattttcgtggagtttcgggatgttgtggggttttttgtacgttgagttatataaatagggagttttatgttagttgtagttgttagtattaatatacgtgtttaatttttttttaaattttaggtttatttttttgtttgaggttttaatggagttattgagttgtatttggttattaaagtttatttaggatttttgttatttttatattaagtatgaggtttttagtttttaattttgaatgtgttgttattttatttagaattatgttttttttttaattattagtgttaggaggataagttattaggataattatgttttatgaggtaaattttgattttggggtttggaaatttagaagttattgattagttaatagtaatttaaataatgtatttataaagttagggaatgtaaatgtggttggggtttttaggagggtattggtggttatgagaatagggtggtatttgttttgagtaggatcgggatagtaggtgtggttttagtttgttgggttttgtagtttttatttttgtttttgttttgttttagtagttaggtatggtttcgtttttgtggggtttttttttttttagggaagtcggttatttaggttttgattttttttaattttgtttttaggtttattattttttatttattttttttagagatatttaagatattaatagtaggattgggatgtgtttacgaaaagaatttaaattttagtttaagttataggtataaagtatagtttaatagatagggaaggggtagggtaagggagtgtgattttggcggtagttggagaaggtattgttggagtatgtttaggaggagttcgttagtgttagggtaatgggataggaagggtaagttaagttcgagtttagggaatgtaaaggaaatagtagttatgttttttttacgtcgttttggtatttttaagtagtttcgtataaaatttttgcgtatatatatatatgtatgtttattttttttttttttttttttttttttttatttgtttgatagttttttttaggtttggattttacgtttgatttttgttttggtaagtttgtttttttttttagtttgttaggggtatattttgtatgtttatttttatattttaaggtttttaattttaaaaggaggcgggggataatttagaaagttggttaaagtgagatgtaatagagggttttagagatagttatcgtttaatgtagggtttgatttgtaggttgtattggttttatgatcgtagttttttttgtaattggggtttatttattttttgtatagtatttttacgggttaggtagtattgggtaagagggaggaggggaggtttcgaattagggtgattttgtttagttttaaatatttttatatattagaagggtttatttttgaatgttattttttagcgattttttaaggagcggtttcggttagtgataatatattgatagttaatttataatttgtagggtatagagatagagatagagattttagcggtaggagggatgtaattattaatgattgtgtgttttttgttttttgagatagagtttcgttttgttattaggatggagtgtagtggtgcgatttcggtttattgtaatttgattttttggtttaagtaatttttttgttttagtttttcgagtaggtgggattataggtataggttattacgtttagttaatttttgtatttttttttttttttttagtagagacggggttttattatattggttaggatggtttcgattttttgattttatgatttattcgtttcggttttttaaagtgttgggattgttttttaatagttatattgatttttataatattgagtttttaatatgagatatttatgttagaatgtattaaaatttaaaataagaaagtttatagggtaggaaaagttttattttagggaatttttgttaagattgtttttatgagttaaatcggtaaagtttttataatttaagtaagaataattttatttttggtagatatgaaattttatgaatataattcggtgattatgttaaaattataggatagggtattttataggggagatttttatggta

SEQ ID NO: 1369 - DNA, 2475 bp, Artificial Sequence
  chemically treated genomic DNA (Homo sapiens)
tgttatgaaaattttttttgtggagtgttttgttttatggttttagtatagttatcgagttgtatttatggggttttatgtttattaagaataagattgtttttgtttaaattgtgaaagttttatcggtttagtttatagaaatagttttggtaagagttttttgagataaaattttttttgttttgtgaatttttttgttttgaattttaatgtattttaatatgagtgttttatgttagaagtttagtgttgtggaggttagtatagttattaaaaaataattttagtattttgggaagtcgaggcgggtgggttatgaggttaggagatcgagattattttggttaatatggtgaaatttcgtttttattaaaaaaaaaaaaaaaaatataaaaattagttgggcgtggtggtttgtgtttgtaattttatttattcgggaggttgaggtaggagaattgtttgaattaggaagttaagttgtagtgagtcgagatcgtattattgtattttattttggtgatagagcgagattttgttttaaaaaataaaaaatatatagttattgatggttgtattttttttgtcgttgagatttttgtttttgtttttgtgttttgtaggttgtgggttggttattagtatgttattattggtcggaatcgttttttggaaggtcgttgggaggtggtatttaaaggtgagtttttttggtgtgtgggagtgtttgaagttgggtagagttattttgattcggggttttttttttttttttttatttagtgttgtttggttcgtaggggtgttgtgtagggagtgggtgagttttagttgtagggagggttgcggttatggggttagtgtagtttgtagattaggttttgtattgggcggtggttgtttttggaattttttgttgtattttattttggttagttttttagattgtttttcgtttttttttgaagttaaagattttggagtataaaaatgagtatgtagagtgtgtttttggtaggttggaggggaggataagtttgttaggataaaggttagacgtagaatttagatttgaaggaaattattaggtagatagagagagagagagagagagagagagagtgagtatgtatgtgtgtgtgtgcgtaaagattttatgcggagttgtttggaaatattaagacgacgtaaaggaaatatggttgttgttttttttatattttttgggttcggatttggtttgttttttttgttttattgttttggtattggcgagttttttttggatatattttagtagtgttttttttagttgtcgttagggttatatttttttgttttgttttttttttgtttgttgggttgtattttgtgtttgtggtttgagttaggatttgggtttttttcgtaaatatattttagttttgttgttgatgttttaagtatttttaagaaggataaatgaggagtgatgggtttggggatagggttgaaaagggttaaggtttgggtggtcggtttttttggagaaaagagggttttatagaggcggggttatgtttggttgttgggatagggtaggagtagaggtgggggttgtagagtttagtagattggggttatatttgttgtttcgattttgtttaggatagatgttattttgtttttatgattattagtgtttttttgagagttttagttatatttgtattttttggttttatgagtgtattgtttagattgttattgattaattaatggtttttgggtttttaggttttagagttaaagtttgttttatagagtataattattttggtagtttgtttttttgatattggtggttgaagagaagatatgattttgagtgggatgatagtatatttagagttggggattgggggttttatgtttggtgtgagaatggtaagggttttgggtgggttttaatggttaagtgtagtttagtgattttattggagttttaggtaggagagtgaatttaaaatttagaaaaagattgaatacgtatgttggtgttggtagttgtagttggtatagagttttttatttgtgtggtttaacgtgtaaggggttttatagtatttcggagttttacggaggtgattatgtgttattgtttgtttgtgtttagttaaatggattcgggaattttgttagcggatttaaatagtggttataaaataaatagtaataataataataatttttttgttgtaggataattggtttttgatgtagtttagtattatgagtggttttgggtttaaagagattaaagaaatataaaattaaatgtggtataagaatttttatggtgttttaggttgggaggtttataaaattttttataggataatttaagaaatgagtggggatttgtggaagatttatttttttaggtgtagtaataggattgtggttgtgtggttttaggagttagtattttgg

SEQ ID NO: 1370 - DNA, 2223 bp, Artificial Sequence
  chemically treated genomic DNA (Homo sapiens)
aattaggtttaaaaagattgttttaaaagagtgaattttggtaatttattataaaataattgtaatgtagattgtgtatggaaatgattggagatattttaaggttatagtgtttttataaattgagttgaaagggaattgttaggatgattttgtttaattttttttttttatataggaagaattattttaaattcgagaggttaagtgatttggttaaagttatatagttattattagttaattcgtatatattgatttttttgtggggttgggtagatgaggaattttttgtttttttttttgtttgtagagattttttttgaggttatttttcgagttttggtaagtatttttgtttttggtagttttgtgtttcgatttaattttattttttttattttattttatttttgagatagggttttattttgttatttaagttggagtgtagtggtgtaattttggtttattgtagtttttattttttgggtttaagcgatttttttgttttagttttttaagtagttgggattatagacgtttgttattacgttaggttaatttatggttttttgtatgtgttttttgtgtttttgtagagatagtgtttttttatgttgtttaggttggtttttaatttttgagtttaagtgatttgttcgttttagttttttaaagtgttaggattataggtgtgagttatcgtgttcggatttaattttattttttaatttgttttgttttgttttttttaggaggtttttagttttttcggattggttgagaaaagtggtttggttggtttggggttagcggtatttattttttttttaattgtttaattttttttttttatcgaattgtttaattttttttttttaattgtttaatttttttatttttataattttttttcgttataattgagggaggcggtgttgaaaaatagttgattttagtaatgttgtttacgtgattattgtagttgtagttttcgttttattttttgttttgggttaggtgggtattattaggggtttttttggtaaggagtatcgggtaggtattcggttttgttaatttattattggaatagttggggggatagtagataggtacggtcggatagatttgatagattaggtattaggttttttgcgttggtttcgggttttttaagtaggaacgtgaatggttttaagatgttttatatggttttattagttttttttttttttttgttttttatttttaggagggttgttttgttttttttttttttgttttttggttttatgtttttcgttattatagattttttttcgttttatttttttgtagatttagtcgtgtattgtaggtatggaggattaattagtgataggaagttgcgtttttcggagcggtgattagttgtggttaggagagttttagtagggttagttttaggagtttttttcgatttttgtttattgtttatttatttgttgttgttatgaggtattttggggttttttttttttttttgggggttttgggggtttttattgagatgtgtggtgagtaattcgtttttattttgtgtttttttttttttgggtttttagtggggtggttagggtataggatgagggaatttatttgtttttttaagtttttatagtagtttgggtttagttggattttagtatttaatatattttattgtgattgattatatgtttgattttttattagataagattttcgttaatttagttattcgtttatatatttatttagcgtatattgagttttttttgtgttaggtttagtgttagtttttggggaacgtgtaaagtatgagataagtttaatttttgttattttagagtttatgttttagggaagggggatagataaaagaaatggttaggtgtttttatttgaaattttagtattttggaaggttgaggcgggaggggaggatcgtttgagtttaatagtttaaggttagtttgggtaatatagggagattttatttttataaaaaataaaaaaaattaaaaaatagttgggtatggggaagattttttgaagattaagaggatatatgggagttgaaattcgaaggaagaaaaggagttggtaggaaaggagtgggggatatatattttaggtagtaggaagtgagttttcggaggttttgtttgttttagttttgtgttttaaggggttttt

SEQ ID NO: 1371 - DNA, 2223 bp, Artificial Sequence
  chemically treated genomic DNA (Homo sapiens)
agagattttttggggtatagagttggagtaggtaggattttcgaaggtttattttttgttgtttagaatgtgtgttttttattttttttttgttagtttttttttttttttcgagttttagtttttatgtgtttttttggtttttagaaagttttttttatgtttagttattttttaattttttttattttttgtagagatggggtttttttatgttgtttaggttgattttgaattgttgagtttaagcgatttttttttttcgttttagttttttaaaatgttgagattttaggtgggagtatttaattattttttttgtttgttttttttttttagaatataagttttaggatggtagggattagatttgttttatgttttgtacgttttttaaaggttaatattgggtttgatatagaaaaggtttagtatgcgttgaatgaatgtgtgaacgaatgattgaattaacggagattttgtttggtgaggagttaaatatataattaattataataggatgtgttaaatgttgaggtttagttaagtttaaattgttatgggagtttagaagggtaggtaagtttttttattttatgttttagttattttattaaggatttaggaggaaagaggtataggatagaggcgagttatttattatatattttagtgagggtttttaggatttttagaaggaagaggaaggttttaaggtgttttatggtagtagtaggtgggtgagtagtgagtaagaatcgggaaagatttttggggttggttttgttgaggtttttttgattatagttggttatcgtttcgagagacgtagttttttgttattgattaattttttatgtttgtaatgtacggttaagtttgtagaggggtggggcgggggaaggtttgtggtggcggggaatataaggttaaagaatagaggaaggaagggtagagtagtttttttggaggtagggaataaagggaggaggagggttagtgggattatgtgagatattttgaggttatttacgtttttgtttaaagagttcgggattagcgtagagggtttgatgtttgatttgttaagtttgttcgatcgtgtttgtttgttgtttttttagttgttttagtggtggattggtaggatcgggtgtttattcggtattttttattaaaggagtttttggtagtgtttatttagtttaggataaggagtggaacgggagttgtagttgtagtggttacgtgagtagtattgttggagttagttgttttttagtatcgttttttttagttgtggcgggaggggattgtgggggtgggggagttgggtagttggggagggggagttgggtagttcggtggggggggggagttgggtaattgaggggagggtgggtgtcgttggttttagattagttaggttattttttttaattaattcgaaagggttgggagttttttggagaggataaaataaaataagttaaagaatgggattaagttcgggtacggtggtttatatttgtaattttagtattttgaaaggttgaggcgggtagattatttgagtttaggagttggagattagtttgggtaatatggggaaatattgtttttataaaaatataaaaaatatatataaaaaattataaattagtttggcgtggtggtagacgtttgtaattttagttatttggggggttgaggtaggaggatcgtttgaatttaagaggtggaggttatagtgagttaagattatattattgtattttagtttgggtgataaagtgagattttgttttaaaaataaaataaaataaaaagaatgagattgaatcgagatataaagttattagaagtaggggtatttgttagaattcggaaagtaattttaaaaaaaatttttgtaaatagggaagagaataaaagattttttatttgtttagttttataggagaattaatgtatacgagttaattagtggtggttgtgtgattttggttaggttatttaatttttcgagtttaaaatagttttttttgtgtgagaagagagggttaggtaagattattttaatagtttttttttagtttaatttgtgaagatattatgattttaaaatatttttaattatttttatgtataatttgtattgtaattattttatggtaaattgttaaggtttatttttttaagataatttttttgagtttgatt

SEQ ID NO: 1372 - DNA, 2448 bp, Artificial Sequence
  chemically treated genomic DNA (Homo sapiens)
ggtgtttatagggtatttaagtagatataggttgaggaggtagaatatatgtgaatttggagttaagaagagaggtaagggttggaaatagggatttaagatttttggatagttgtgagtgtgtataatgagggttagatgtagagaaaattaggagattatagagagtagaatttagggtggggatttgggagttagtagttgggtatgggtttggtagaaagggaagttaaggaggaggagagggggtagttttagatattaaggaggggagagtgattagaaagaaaatttttttgtagagatataggggatggggaagaattgtagattgaattggggtaaaggattgttggttttaattagagagatttgagggagagatgaggttgagagttaggggattttgttatgttttagtataaaaatagtatttgatatagatgggtgtttgggagttgttgtcggatgaatgagtggatagatgtatggatggacggatggatggaaggatgatagattgatggataaatagatgaatagatgaatagttggatggataattggatggatgggtagatagaatgattttagagattagaaaaagttttatgtattaagtgggattgaatcgcgtttttatgggtagaaagtagaggaatttttatttgagttaggaatgatttagtgtttttaatttagggagaaagttagtttggttttattggggatatttgtgtgggggatttagaggttttttaaatgaggttagacgaggttggataggtttaagttaatttagtatttttttgttatattgtataggaggggatgtgttatttagggagttgttgggatttatgggttttagtgttgttattagtatcgatagttttagagaggaaagatatatattggggtaattttaaggttgtgtgtggtatttgttttggatagtagataggtatagggatatttttagggggttggttatttttttgttttatgtttaggttttagtttcgtttattgtaattttgtgttcgttatgtttagtaggtttttgttttagtttagtttttagagagtagattttaggtgttggtttcgggggttttggtttgagttttagttattgtgttatgttttcggaattgggattaaggttatcgttttaggtaagtggtttttaattttttttagtttgttttattttttgttgtttttggaaaatttgttttttttttttggggtttttttttttttgtttttttagttttaagtattgatttttatttttttttatggggtttggaggaggtgtattagttttcgggtaatcggtaggaagggtttttatagtgggagtagtcggatgtagtttggtttcggggtttgagttgggattgggtagggttagggtttttttttttttttagggtagatgtttgagtgagggatagaggttggttttgatgaggggttttgtagtgtttttagggatattgtttagtgatttttggggttaaggatagaggttgttggggtgggtttgggagttgttgagttttatagtttaggggagtagttttaagaatagttgagggtttaggttgaggattggatgttaatttagtttgggagggttatacggtttggtgatatagaggttattttaaggggagattaatggagggtatagagagggttttgggtttaggttgtagttttgtggtttgtgttgggttatgaggatatggggatatagagggacgggtgagattgggtgaggtgttagaatttaatttttttaggatagttattagaaaggagatagttttttagggtagagatgtgtttgtttttggagtttcgttatttttggggtttagtgtttttttgtttacggatcggttttttgttttttttaaagggtatgttagatttaggaaatgattagaggggagtgaatgaggggtgtagagaattttatggttattaggtgaagtttggggttattataggttgttggggtgggtttgggggttgttgagttttatagtttgtgggagtagttttaggaatagttgaggtgaagggttttgtggtcgggtttgtggagataggaaatattttagagttttagaggagttttgaggtttgtttaggtggagtttattttttgttaggagagttaagtgggttgggttggggtagagttcggtgtttgtgagggataggaagttttagtttaaagtaggtttgggtttttttatatattgtttgttaggatagttttataggatgagtaggggatttatagtttacggaggaggttttaggttttggaagaataaagtgggtgatggaggggggtatagggatggaaatgagggatttaggggttaaggttagattttaaatttagattttagagattagagaaga

SEQ ID NO: 1373 - DNA, 2448 bp, Artificial Sequence
  chemically treated genomic DNA (Homo sapiens)
ttttttttgatttttggagtttgagtttagaatttggttttgatttttggattttttatttttatttttatatttttttttattatttattttatttttttaggatttagagtttttttcgtgaattgtgggttttttgtttattttgtaggattgttttggtaggtagtgtgtggggagatttaagtttgttttgaattggagttttttattttttataggtatcgggttttgttttagtttagtttatttggtttttttggtaaggagtgggttttatttagataagttttagggtttttttgaggttttgagatgttttttgtttttataagttcgattatagaattttttattttagttgtttttggggttgtttttatagattatgagatttagtagtttttaggtttattttagtagtttgtgatgattttaaattttatttggtagttatggagttttttgtattttttatttatttttttttggttattttttgagtttaatatgttttttgaggaaggtaggaggtcgattcgtgaatagagagatattgggttttagaggtgacggggttttagggatagatatatttttgttttaagagattgttttttttttggtgattgttttgggagggttggattttggtattttatttagttttattcgtttttttgtgtttttatgtttttatgatttagtataggttatagagttgtagtttagatttagagttttttttgtgttttttattggtttttttttggggtgatttttgtgttattaggtcgtgtggtttttttaggttggattggtatttagtttttagtttagatttttagttgtttttggggttgtttttttagattatgagatttagtagtttttaggtttattttagtagtttttgtttttgattttaggagttattgggtaatgtttttaaggatattgtagggttttttattagaattagtttttgttttttatttagatatttgttttggaagagaggaggagttttgattttgtttaattttagtttaggtttcgggattaggttgtattcggttgtttttattgtggaggttttttttgtcggttattcggagattaatgtattttttttaggttttatggagaaaggtaagggttagtgtttaaggttgggaggatagaggggaggaagttttagagagagaaaatagattttttagggatagtagagggtgagataggttgggaaaggttgagagttatttatttaggacggtgattttggttttagtttcgaagatataatatagtgattgaggtttagattaaaattttcggggttagtatttggggtttgttttttgggggttgggttggagtaggagtttgttgggtatgacgggtatagggttgtagtgggcggggttgggatttagatatgaggtaggggggtggttagttttttagaggtgtttttgtgtttgtttgttgtttaaggtaagtgttatatatagttttggagttattttagtgtgtgttttttttttttgaggttgtcggtgttgatgataatattgggatttataggttttagtaattttttgagtgatatatttttttttgtgtagtgtggtagaggagtgttgagttggtttggatttgtttaatttcgtttggttttatttaaagggtttttgagttttttatataagtgtttttagtgaagttaggttggttttttttttggattgagagtattgggttatttttgatttaagtggagatttttttgttttttatttatggagacgcggtttagttttatttagtgtatgaagttttttttgatttttgagattattttgtttatttatttatttagttgtttatttagttatttatttgtttatttgtttgtttattaatttattatttttttatttattcgtttatttatgtatttgtttatttatttattcgataatagtttttaagtatttatttgtgttaggtattgtttttatgttgggatatggtaggattttttggtttttagttttattttttttttaaatttttttggttaaggttaatagttttttgttttagtttagtttgtagtttttttttattttttatgtttttgtaagaaggttttttttttagttatttttttttttttggtgtttgagattgttttttttttttttttttggtttttttttttattaggtttatgtttaattgttgatttttagatttttattttgggttttgttttttgtagttttttaattttttttgtatttgatttttattgtgtatatttataattgtttaggggttttagatttttatttttagtttttatttttttttttggttttagatttatatatattttgtttttttaatttatgtttgtttggatgttttgtagatatt

SEQ ID NO: 1374 - DNA, 2383 bp, Artificial Sequence
  chemically treated genomic DNA (Homo sapiens)
agagagtcgggtatatgggtaggcgtttattaaggaagaaagtagagtgttgaggttgtttttttaagttataggtaagaagaaattgttgagttagttttagtatttattaatagttatcgatttttcgggaaggttcgagggagatgaataagtagtagttgcgattttattaagtttaatttaaaattttggtggaggaaggtatggaaattagtgttgttggttttaggagaatgttggagttgaatatttttgtatttagatgcgggttttatttaggagtaagaaagtttgtgtaattagatttaatgataaagaggttttatattttttttagtttcggggtatcgggttgtagtcgatagttttaattagatatttcgtagtttttaaggttagtattttagagaagggatgtagggattttttttagagtagaaggtttttagggattttagtatatgtgttttaagtagatatttttttagtttcgaggggtagggtcgtggataagtagttggaagtttattcggttagttttgatttagaagatgatttttgggtgatttttggtgaaggtcggtattagtggttgtagagacgagggggttttttttatattttaagagttaatttaattagatggtcggttattaggtagagacggggttgtttaaggagatttatagtatattttataagatatatattcggttttggttttgtgtttttttgtttgtttttttagttatttattgttcgttgtttattattaggtttttagagtaggtttagttggcgttaagggtttagttgtcggggatgttgagatagagcgagggttaagttttttttggtttttagaaggttttggttaggatgtataggtggtcgtaggcgttagttttggaggtggtcgtaggtagtgggggtgtaggcggtagattttcggtatgaatttaaattattttagttttttagttagttagaaaatagttttaattttattttgttggtttagaagtaggacgaggggagagataaagttaaatttttgattagttttttttgttttggttaggaagttagagtgtgagagtgtgcggggttcggtattcggttttattcggttattcgtgttgaataggatgttttgaaggacgataaggttgtttcggattttgatgttacgtttgttttaaatttttgacggggagaaacgcggggcgttacgcggtatttttaggttatcggtttttattttgggatttaggtgagaagttagggtttcggggttttttgtgattttttggtttttgtttatggagggtagtcgtttgattaaaataggattttttttttttaaggtatatttttaagtcgttttttatttgtttaagatattttttattttaaatggaacgtagttaagaagtaatgtacggttattatgtacgtggttgttttttttttttgggtttgggtattttgggggtgttttaggaagaggtttttatattatggaggtgagcgaggggttttggtcggttcgagggggttgggatggcgaggatggttagattgggcggttgtcgggtttcggggttcggtgggttttttttcggtggtttgattcgtttgtttttgagtaatgattcggtgggtagtagagttttattcgtaattagtttgtatagcgtagttttataggaatttgtttaggtaaaggttttaattattaagatatttttattttaagtagagtttaatattttaagtttattttgtgtttacgttttagaaaaaaaattttttagtaagaacgtaataaataagattgagagttttattaggagtttgtgagttttatattattagacgcgttgtagtttttcgtgatgatcgtttttttttcgagtttcgtatacggcgcgggttatatggaaaaggtatcgtagtttttcgtgacgttttttttttttcggagtttcgtatacggcgcgggttatatggaaaaggtattgtagttttttatgacgatcgttttttttttgagtatcgtatacggtacgggttatatggaaaaggtattgagtgcggtttataggagaggcggggatggaattaggattttaatgtataggttgggggacgtattttggttatttttcgtggcgggatggtttttttaatcggagattttagtagggtttatgttggcggttttgtttgtttttggtacggattattttttatttgtggatgatatttttattttaggtttgtttgtaggatttaggtttttttttaggtgtttttttggtatttagggattttttagtagtatatggagttggggttgtatggaggtgtgtggggg

SEQ ID NO: 1375 - DNA, 2383 bp, Artificial Sequence
  chemically treated genomic DNA (Homo sapiens)
tttttatatatttttatgtaattttagttttatgtgttgttggaaagtttttgagtattaggggggtatttggggaggggtttgagttttgtagatagatttgggatgggggtgttatttataggtgaggagtggttcgtgttagggataggtagagtcgttagtatgggttttgttgggattttcgattgggaaaattatttcgttacgggaggtggttaaggtgcgttttttagtttatgtattggggttttggttttattttcgttttttttgtgggtcgtatttagtgttttttttatgtaattcgtgtcgtgtgcggtgtttagaggaggagcgatcgttatggggagttgtagtgttttttttatgtaattcgcgtcgtgtgcggggtttcgaggaggagaggacgttacggggagttgcggtgttttttttatgtaattcgcgtcgtgtgcggggttcggaggaggagcggttattacggggagttgtagcgcgtttggtgatgtggggtttataggtttttaatgaggtttttagttttgtttattgcgtttttgttggaagattttttttttgaaacgtaggtatagaatgaatttgaaatattgagttttgtttgaaataaaaatgttttgataattagaatttttgtttgaatagatttttgtggggttgcgttgtgtaggttggttacgggtggggttttgttgtttatcgagttattgtttaaaggtaaacgggttaagttatcgaggagggatttatcgggtttcgagattcggtagtcgtttaatttggttattttcgttattttagttttttcgggtcggttagagtttttcgtttatttttatggtgtgggggtttttttttggggtatttttagggtgtttaggtttaggagagaggagtagttacgtgtatggtggtcgtatattgttttttgattgcgttttatttaaagtaaaaagtattttgaataagtgagaaacggtttggaaatgtgttttgggagagaaaggttttgttttagttaaacgattgttttttatgggtaaaggttaagaggttataggggatttcgagattttggttttttatttgaattttagagtgggaatcggtgatttggaggtgtcgcgtggcgtttcgcgttttttttcgttaaggatttgaaataagcgtggtattaggattcgaggtagttttgtcgttttttagggtattttgtttagtacggatggtcgagtggggtcggatgtcgagtttcgtatatttttatattttggttttttgattagggtagggggagttggttaagggtttggttttgttttttttttcgttttatttttgggttagtaggatgggattggaattgttttttggttggttgaagggttgaaatgatttaaatttatatcgaggatttgtcgtttgtatttttattgtttgcggttatttttaagattgacgtttgcggttatttgtatattttggttagggttttttgagaattagagggaatttgattttcgttttattttagtattttcgatagttgggtttttagcgttagttgagtttgttttggaggtttggtggtgggtagcgggtagtgggtggttagaggggtagataggagggtatagggttagggtcgagtgtgtgttttatgggatgtgttgtggatttttttgggtagtttcgtttttgtttggtggtcgattatttggttgaattgatttttggggtgtgagaagggttttttcgtttttgtagttattgatgtcggtttttattaggggttatttaggggttattttttggattaaggttggtcgggtgggtttttagttgtttgtttacggttttgtttttcgggattagggagatgtttgtttggagtatatgtgttgagatttttgaagattttttgttttgaagaagatttttatattttttttttggggtgttggttttgggaattgcgaggtgtttggttggagttgtcggttgtagttcggtgtttcgggattgagggaggtgtggagtttttttgttattaggtttaattatataggtttttttatttttaggtaaagttcgtatttgaatgtagagatatttaattttagtatttttttgggattagtagtattggtttttatgtttttttttattaggattttaaattaagtttgatggaatcgtagttgttgtttatttatttttttcgggttttttcgggaaatcggtggttgttaatgaatgttgaagttgatttagtaatttttttttatttgtggtttaaaaaaatagttttaatattttgtttttttttttgataagcgtttgtttatatgttcgatttttt

SEQ ID NO: 1376 - DNA, 2293 bp, Artificial Sequence
  chemically treated genomic DNA (Homo sapiens)
ttttttgtattattttatggtgttattaaaagttgaattatgggttggtttaattttgtagagaagagattatttaatttatttgtggaaatttattttttagcgatattgatgttttttaagaaatttaattttgggtttgagtgatggttggtgtaaaaaataaatttaagattttagtgttttttagaagtttggatttttagggattttgttgtgagttataggacgttatcggtttttttttttttgtgggttgagtgtgggggttatgtggatttttttatgagtagatgttattagggttattggttttagtttttttttttatagttgtagtgggggttggggttggggtattttagggagggtttttgtatgagtttgtgttatagtgtgtggtattcggcggagggattaagttgatcgttttaggtgagttttttttttttttttttttttcgtttttgggataatttttgttgtttttgtttgtttttgtattttgttttaatttgtggttagtttttttttttgtattttaggtttgagtaaggatttttgttttttttgtttagatttttgtttgttttagtaggttattataattattttatttttgattataggggtaggggattagatagaatgatttattgagtttcgtttgtttgtttgtttgtttgtttttttgtttgtttttttgtttttttgtttgtttttttgattgtttgataggcgtaggttgggtttttaagttttgttttgttttggtttttttagtttgggtttttgtcggaatagttttgtttttgggttatttgggttttattttttggggaattgggaataaggggtttgagggaggtattttttgggagattttagaaggatttagtgttttcggggttgatgttcgggaattatagagttgggatttagagttaggatttagatttagaatgaggtaggaggtggaggggttgttttgggcgtttgggggttgttagggattgagttttgagttagtttgagatttaggaaatttcgttaggagggagaagggagaagtagattttggatattagaaagttaggggaagggttataaaaggagtggatgtgacggaagggcgggtttttgggtttttttagaatatattttttgtgtttagggggattagaggggtagagtttattgcgtgaaagttttattgttatgattaggtagtcgggacgtggggtggatgttagaaaagattttacggaataagagagagtttaggatagtaggtaggtttttcgatttttttaggtttttgttttatatacgggttttagaatatatatttggttggaatagtttgagggattaaaaggttttagtattttatagagttgaggagttaggttagaaaagtaattttagagttcgttgtgtaggggagatatagagttttttttatttgttaggatggtaggaggggatagggttagggcgttgagggttagatgtcggtgttgggggttaaggtttcgagagattttaggataggtggttaggtgtttaaggtaaaatagtttttcgtgtagattagggtatagtggaaaatattttgatttttttgtttggtatagatttttagatatagagtttttgaataagggtattttaatattttattatatattgaggttaggggttttttaggtggatattaggattttgattttttgttttttatttatttcgtaggttagtttaaggttgttttttcggttattttgttttcgtttttttttgaggagttttaagttaataaggttatattggtgtgttttataagtgatttttattcgggagtcgtgatagtggtttggaaggtagatagtagtttcgttaaggcgggagtggagattattatattttttaaataaagtaataataagtacgcggttagtagttatttgagtttgacgtttgagtagtggaagttttatagaagttatagttgttaggttacgtatgaagggagtatcgtggagaagatagtggtttttatagaatgtttataggtttttaatttttattttttattacgggagattagagttgtaggattttaggggaggggtttttttttttattttaaggtattaagtttttttttttgtatttaataaatttttaataaatatttttattgttaattagaaattttgttttattttattttttttttttttatatataatttttagttttttttgggtttttaatttgtggtggaaag

SEQ ID NO: 1377 - DNA, 2293 bp, Artificial Sequence
  chemically treated genomic DNA (Homo sapiens)
ttttttattataaattgagaatttaggaaaggttaggaattatatgtgagaaaagaaaaaatgagataaaataagatttttgattgataatgagaatatttattgagggtttattgagtgtagggagaagggtttgatgttttggggtgggaggagagattttttttttgggattttgtagttttagtttttcgtggtggggggtgagggttgagaatttatgaatattttgtaggggttattgttttttttacggtgttttttttatgcgtgatttggtagttgtagtttttgtgggatttttattgtttaggcgttaggtttagatagttgttggtcgcgtatttgttgttgttttgtttggagggtgtggtggtttttattttcgttttgacggggttgttatttgttttttaggttattgttacggttttcgggtagaagttatttatgagatatattagtgtggttttgttggtttgaagttttttagaggagggcgggaatagagtgatcgagggggtagttttgggttgatttgcggggtggatgaggggtagggggttagagttttggtgtttatttggggagtttttgattttagtatatgatgaggtgttggggtgtttttgtttaggggttttgtgtttgaaggtttatgttaggtagaggggttagggtgttttttattatgttttgatttgtacggggagttgttttattttagatatttgattatttgttttgagatttttcggggttttggtttttaatatcgatatttgatttttagcgttttgattttgtttttttttgttattttgatagataaagagagttttgtgttttttttgtatagcgaattttggggttatttttttggtttggttttttagttttgtgggatattggggttttttggttttttaggttgttttagttaaatgtgtgttttggagttcgtgtatggggtaagggtttggggggatcggagagtttgtttgttgttttgggtttttttttatttcgtggagttttttttggtatttattttacgtttcggttatttggttatagtagtggggtttttacgtagtggattttgtttttttgatttttttgggtataggggatatgttttgaagagatttaggagttcgttttttcgttatatttattttttttgtgattttttttttggttttttggtgtttagagtttgtttttttttttttttttttgacggggttttttgagttttaggttggtttagggtttagtttttggtagtttttagacgtttagggtagtttttttattttttattttattttgggtttggattttggttttgggttttagttttgtgattttcgagtattagtttcgagggtattgggtttttttaaagttttttaggaggtgttttttttagattttttgtttttaattttttaggagatggaatttaggtaatttaaggataaagttgtttcgataagaatttagattgaggaggttagaatagaataaggtttagagatttagtttgcgtttgttagatagttagagagataaatagagagatagagagataaatagagagatagatagatagatagatagacgaggtttagtaggttattttatttagttttttgtttttgtggttagaggtgaagtggttgtagtgatttgttgaggtaagtaagggtttgaatagggagggtagaggtttttgtttaggtttgggatgtagggagaaaggttgattataagttgagataagatatagaaataaataaaaatagtagaaattgttttaagagcggggaaggagaggggagaagagatttatttaggacggttagtttggttttttcgtcgaatattatatattgtgatataggtttatataaaaattttttttgggatgttttagttttagtttttattgtagttgtgaaggaggaagttggggttagtggttttggtggtatttgtttatgagggagtttatatggtttttatatttaatttataaagagaaggggatcggtgacgttttgtgatttatagtaggatttttggaaatttaggtttttggaggatattgggattttgaatttgttttttgtattaattattatttaggtttaggattgaattttttagggagtattagtatcgttaaggagtgaatttttatagatgggttaggtggttttttttttgtaaagttgaattaatttatggtttaatttttggtaatattatggggtggtgtagaggg

SEQ ID NO: 1378 - DNA, 2388 bp, Artificial Sequence
  chemically treated genomic DNA (Homo sapiens)
gtttttatcgtttgatgtcgtagatatcgtagtttttgatgtagggtttggttttatggggtttagtgggtgtttttttcgtgtgtggagatgagaaatcgtaaaaagtaaagatataagataaagagataaagcgaaaatagttgggttcgggggattattattattaagatacggagatgggtagtggttttaaatggttgcgtgtattgttatttattgtatataagataaggggggtagggtaaggagggtgagtcgtttaagtgattgataaggtcgagtaagttacgtgattataggatagggggttttttttttataggtagtcgaagtagagagggaaggtagtatacgttagcgtttttttttatgtatttattagaaagattaaagattttaagatttttattattttttttatcgttattttttgagaattttaaagagggattaggagtataggaggaaagtggataaggagcgtgattattgaagtatagtattatagggaggggtttaggttttcggatggttgtaggtaggtttggatattatttagttttttataagaagttggtggagttgagcgttttttgatttttttaagaaaagggagattttttttcgtggttcgttaagtaacgatgtttttttaggtattggcgttatcgtttgattaaggagttttttagtagtttttatgcgggtgtgatagagggtttattttttgtattttcggttattttttataatagttttttagtatttgattttatatttatcggttattttttggttatattagtaatataataaagagtaatattaaaagttaatgattaataatatttatattaatgattgataatgtttatgattatttttgtatttaatttgtattataattatttttattgtaagtatattttttattatattgaaatagtttgtgtttttagttttttgttttagtatttaggtaatttttcgtttatatttttgaggggttgaattgttttttattttttggaagttgggaggttggaagaggggatgcgtgcgatggatttagtatatagttgggaattcgaggtatatttaagttttcgtttgtgttgtgcggagtttatatttttttttttattggggttttaaaatttttttttatttaatagggtggtgttgtttaaagttttgggtatatattagggttggggagggggtggtggagagggggttttagtttgtttaattattaggtaacggggtatttgttttttttttagttgggtttggattcgcgttttaggtttaggttgtaatgttttttttttttttttttttttttttttgtagtttcgttgggttttgtttaggatagataaagatagagtagtttgtttttatcggaggtttttttgttagtaggaggggttcggagaaaattagaaagagggttagagttagagaaatatgaagtatttcggggttttttatattagtgtttgagtaggaatggggaggggttatgatttataaggttttgggaggttattttaaagagggttgtttaattgtaaggacgttgtaagtaggaagagaagttatagcgttttagaaaagagtgggatagggataagtatatttaagaggttgaatatgaatttatagattaggtatttttgtacgttttgttcgttaggttttttttgttattttttgttaggcggttttgttgggttttagttttggtttttttttgttttagttttatttttgggtttttttttttttggttttttcgttgtttttatttttagttaagttttttgttttgttgtgtggttttacgattgttgtttttgaatgggttattttttttatttgttttagtttagttcgtttgttgagattttttttcgaaaattatgttcgggttggtgtttttcgttttgggagggtgttttttttgtgtgttttttattatttttgggagttttggaattgggagaattgaattaaaggatgatttgagtaattaggtattttgtttttagcgttttggtgtaatttttgtaagatttattttgttttaatataaagttttaggagagggtgtgggggagggaatggtttttgtattagaaaataagttattttttttaaagatgtttttattgtgagtagagtaggatgtatacgattttagatataggttttttttttgtgagtatcgtttattttttagaatgatatttgtaatatggagtgtaggaaaaaatatgatgattaggagaaatgtttttattttaggttaggtacggtggtttatgtttgtaattttagtattttgggaggttgaggcgggcgggttatttgtggtta

SEQ ID NO: 1379 - DNA, 2388 bp, Artificial Sequence
  chemically treated genomic DNA (Homo sapiens)
tgattataagtgattcgttcgttttagttttttaaagtgttaggattataggtataagttatcgtgtttggtttaaaataagagtattttttttgattattatatttttttttatattttatgttgtaggtgttattttgaaaggtgaacggtgtttatagaggaggagtttgtgtttggggtcgtgtgtattttattttgtttatagtggaggtatttttggaagaagtgatttattttttggtatagagattatttttttttttatatttttttttaagattttgtattgaaataaagtaaattttatagaaattgtattaaagcgttgagaataaaatgtttgattgtttaaattattttttggtttaatttttttagttttagagtttttaggaatagtgggaagtatatagaggaagtatttttttagggcgggaagtattagttcgggtatgattttcgggggagagttttagtaggcggattgggttggggtaagtggggaaggtggtttatttagaagtagtagtcgtgggattatatagtagggtaaggagtttggttgggagtgggggtagcgggggaattaggggggagggagtttagaggtggggttggggtagggggaggttagggttgaggtttagtaggatcgtttggtaggaagtggtaggaggggtttggcggataaagcgtgtagaggtatttgatttgtggatttatgtttagttttttagatatgtttgtttttgttttatttttttttgaagcgttgtggtttttttttttgtttatagcgtttttgtagttgagtagttttttttaaagtgattttttagggttttgtgaattatggtttttttttatttttgtttaggtattggtgtgggaggtttcggggtgttttatgtttttttggttttggttttttttttggtttttttcgggttttttttattggtagaggaattttcgataaagataggttgttttgtttttatttgttttgggtaggatttaacggaattgtaaaaagaagagaaagagaaagagaaaggtattgtagtttgagtttgggacgcgggtttagatttagttgagagaggggtaggtgtttcgttgtttggtggttgggtaggttggagttttttttttattattttttttttagttttaatgtgtgtttagagttttgagtagtattattttgttgagtgaggggaggttttgagattttagtggggaaggaagtgtggatttcgtatagtataagcgaaggtttaggtgtgtttcgagtttttagttgtgtgttgagtttatcgtacgtatttttttttttaattttttagtttttagaaggtggggggtagtttagttttttagagatgtgggcggaggattatttaggtgttgaggtaagagattgaaggtataaattgttttagtataataaagaatatatttataataagaatagttataatataaattagatatagagatgattatggatattattaattattagtgtagatattattaattattagtttttaatattattttttattgtattattaatataattaagaaataatcggtgggtatagggttaggtgttgaagggttgttgtgagaagtgatcgagaatgtaagaggtgagttttttgttatattcgtataagggttattggagggttttttggttaggcggtaacgttagtgtttaggaaggtatcgttatttagcggattacgaaagggagtttttttttttttggaggagttagggaacgtttagttttattagttttttgtgggaggttggatagtatttaggtttgtttgtagttattcggaggtttaaatttttttttgtgatgttgtgttttaatggttacgttttttgtttattttttttttgtatttttggtttttttttgaagtttttagaagatagcggtagaagaaatagtgaaagttttaaagtttttgatttttttgataggtgtatagaagaaaacgttgacgtatattgttttttttttttgtttcggttatttataagggaagggttttttgttttatgattacgtgatttgttcgattttattaattatttggacgatttattttttttattttgttttttttgttttgtatgtaataaataatagtgtacgtaattatttggggttattatttattttcgtgttttgatggtagtggtttttcgggtttagttgttttcgttttatttttttgttttgtgtttttattttttacgattttttatttttatatacggggagaatatttattaagttttatagggttagattttatattagggattgcgatgtttgcgatattaagcggtggaagt

SEQ ID NO: 1380 - DNA, 2267 bp, Artificial Sequence
  chemically treated genomic DNA (Homo sapiens)
ttttatttgttttttttaattatatttatttttttttttatttttgtttttttttatttttttttttttttttttttttttttttttttttttttttattttcgtttttatttttatggttttgttttttgatttttatggtattgttatttttgtttttttttttttgtttttttttttttttttttttttttttagtttttagttgggttgtgggtttttttttatttggggatttgttattttttgttggaggataggtaggcgggtaggtgttatgggtgattagagttcgattttttattttatagtttggtagatattaggttttatagtttgtggtataaaggggaagttggtttagtaggtttgggtagggagtgggggattggggttttgatttcgtttggattattgtagatagtagtatttttttttgtgagattagtatatatagtagaaattttggttatagtagttttattttttaattttattttgattttttttttaataattttagttagggatgggtttttaaaagggtttttgttggttgttaatatggggtagggaaaaggggagattttgggaggtaggagattagagtttgaattttgatttagttattgcgcgttgtgtggtttttggtaggtttttatttttaggggggtttttgtgtttgtaattataaggtgggtacgtgtttttgttggatgttatatagaaaagaaggtgataatgagtatagaagcgttttgtaaaggtagatgtgggtttgatatggatagttttttttacggagtgtttattgtgtgtcgaattcgtgttatttcggttagttttcgggataatttgttttatttggtatttttattatgtttattttatagaagaggaaagtgaaggtatagagaggttagagttagtttaggttagttagttttgggtttgtgtgttttttttttttgttgtttagttttgattttggtttgaggttttttggtttgattttttttttgtaggttggggtgggaatgggagagtcgtattgtgtttagttgggttggatatcggagatttgggttttttttttttttttatattgggttttatttttttttgatttatcgatagtgatttttttcgttattttagtttttcgtttttatttaggttacgttatttgatttggaggatagtgttggtggttagaaatatgattgtttgttttagagttttttgttttggtaagttttagatgtttattatattttgtttattattggttttagtatttagttgggtttggttaggtagagtttggtatattatgggtttttagttaataattggtgatttaatggtggttttaatggatcggaatagaaggtagggtacggaggagatagggaaattaaggtaaggagagagaagtaaggaggtagatagaagtaatagataaagagagaggtggagatagagatatagagaggtataggggatatggatagtgaaggagcgagagacggagagatagaggttaagttggggtgattaagttttaggacggaggaatagacgttagaaattatagggtttaatttttttattttataaatggagaaatcgaggtttaggtggaataaatgattttaatatagttatatggcgggaatttatagtatagttggggttagaaggagtttggggagttgtttagttaggttatttgtagtcggttttttagttttaggtagggtatattgcgggggtatttggataggtttttgttttttttttttcggggttttaggtttttcgtggagtttagttttgttttgaattttttttggtttggagttagttttgtttttgtttttttattatttagtattttttcgttttttagtttttttttggttttttattttgggttaagatttggtgggtggggtgtgggtaggaattgtaagatggggtagttattggaattggggttaagacgtttgtggtgagggtttatttattagtttaggttttaaagttaggttatttggggtagtttcgtgttttttttaaagttttaggaatgggttgtttgttagagggtgggggtagagaagggggatggtttattatgttggtggttttattttgagtatttattattattattgtattttttattatattttttttttttttgttttgttttatggagttaatttattttttttttttttttttttttttttttttttttt

SEQ ID NO: 1381 - DNA, 2267 bp, Artificial Sequence
  chemically treated genomic DNA (Homo sapiens)
aaaaaaaaaaaagaaaagaaaaaaagaaaagaaaataaattggttttataagatagggtaaaaaagaaaaagatataatgaaggatataataataataataaatgtttagagtggagttattaatatggtgggttattttttttttttgtttttattttttggtagatagtttatttttggggttttagggggggtacggaattgttttagatgatttggttttgaagtttagattggtgggtgggtttttattataggcgttttggttttagttttagtggttattttattttgtagtttttgtttatattttatttattaagttttggtttaggatgaaaggttaaggagaggttaggaagcgagggggtgttgggtggtggagggatagaggtaaagttggttttaggttagggagagtttaagatagagttgggttttacggggagtttagaatttcgaaaaagaagagataggagtttatttagatgttttcgtaatatattttgtttgggattggggagtcgattgtaggtgatttagttgagtagttttttaggttttttttgattttagttgtattgtgagttttcgttatgtgattatgttgaagttatttgttttatttgggtttcggtttttttatttgtgaaatgggaggattgggttttgtgatttttggcgtttgttttttcgttttgaggtttgattattttaatttgatttttgttttttcgtttttcgtttttttattgtttatgttttttgtgtttttttgtgtttttgtttttatttttttttttgtttgttatttttatttgtttttttatttttttttttttgttttggtttttttatttttttcgtattttattttttgtttcgatttattggaattattattgagttattagttattgattgagaatttatgatgtgttaagttttatttagttaggtttagttaggtgttggggttagtggtgaataagatgtggtgggtatttggggtttgttagggtaggaggttttgggataggtagttatatttttggttattagtattgttttttaggttagataacgtggtttgggtagaggcggggaattggggtggcgagagggattattgtcgataggttaggaaaggatggggtttaatgtggggaaaagaaaaagatttaggttttcgatatttaatttagttgagtatagtgcgatttttttatttttattttaatttataaagaggaagttaggttagggggttttaggttaaggttaaggttggatagtaggagaagaaagtatataggtttagagttggttggtttgggttggttttgatttttttgtgtttttattttttttttttgtgaaatgggtataatgaaagtattaaataaggtagattgtttcggggattgatcgagataatacgggttcggtatatagtaagtatttcgtaaaaaaggttgtttatattaaatttatatttgtttttataaaacgtttttgtgtttattgttatttttttttttatatggtatttaatagggatacgtgtttattttataattgtagatatagaggtttttttaggggtagagatttattaaaagttatatagcgcgtagtggttgagttaggatttaaattttggttttttgttttttagggtttttttttttttttgttttatgttggtagttagtagggatttttttgggggtttatttttggttggggttgttgagaaaggagttagggtagggttggaaggtgaagttgttgtggttagggtttttgttgtgtgtgttggttttataaaggaaagtgttgttgtttgtagtgatttaggcgaggttagggttttagttttttattttttgtttaggtttgttgagttagttttttttttgtgttatagattatagggtttgatgtttgttagattataaaatggggggtcggattttagttatttatagtatttgttcgtttgtttgttttttagtaggaagtagtaagtttttaggtaagagggaatttatagtttagttgagagttgaaggggaggggaagagaaaagggagatagagagagggaggtagagatagtagtgttatgagagttagagagtagggttatggagataaagacggaagtggagagaggaagaaagggagggagagggagaggggagagagtgagaaaagatagaaatagagagagaagtaaatataattaaaaaggatagatagag

SEQ ID NO: 1382 - DNA, 2408 bp, Artificial Sequence
  chemically treated genomic DNA (Homo sapiens)
attataggcgttcgcgttattttcggttaatttttgtgtttttagtagagacggggttttattatgttggttagtttggttttgaatttttgattttaggtgatttatttatttcggttttttaaagtgttgagattataggcgtgagttattgcgtttagtttaaagttatgcgtttgatagagttgtattttatttttttaaaaggaaattggtgtggttattttataggttatgagtaggatttaggtgttttttaggttatacggatggtaagaaagaagtagggttggattttattttagatgatttggtttttagttatgttgtttttttatgtttgttatatttattttatatataagtatgtatgtatgagggattttttaggttttttatacgttaatttagagggtagggtttcgggataagaggtatatagtaaattgtataagttttggatatttggtaagtgtgttatagtttgtaaagtatgtttgtaattaatagtttttttatgttgtttatagtgttattcggatttatttttaggttttgtggatttagtaggttttggtttagttttttttttttgttttatttttttttaggttttttgagttttaggttaattgggttattagtttttttttgtatatgtgttttaagtttttatttttgaatttttttttagaatgtttttttttttattttattttgtatatattttttttattttttagagtttagtttaaatgttttttttaacggtaagtttatttggattgttttaattggaagagaaaggggaaagagagaaggaaaggaataggtattttttgaatgtttattttgtattaggtatgttatgtaattttataataattttgtgatatggtttgtttttgttttattttataggtagaaattgaggggaaatgattcgttggagtttatatagttaggaaggatgtttttggattttttatttagtgtttatttttttgttttagttaggaattttgtggggttgatgagggttaatattttattttttttttttttcgtggttgatttttgggggtggtgatttggttttttttttttttgttaaagttagagttgttgacggtttgttattggttttttagttagggttggtttttgtttttgtggtttagttgttgagtcggggttttgttttttaggggttttttttttttttttgtttataagagttcgatttcggttggttttagatttgatatgttttttgggtttatttcggtaagttttaggtttggaggaggggtgggattagagttttgagtgagtattttgggaggcgaggaatttaggtttttagttttagggatgttattgtgttattttgaatgttatttttattttaattaaggatgagttttaattattaagattagtatttgttttttttatttaaaaataaattatttttgtagttttattgtttaaatttttattattagagttatttttttgagttaggtgttgtttttggaagggtttttttatgttgagtattttagtattcgttggggtgatgtatttatttattagtagttataaaaatttttttataataagtagataagagaatatagagtggggtttagagttaatgagatttagtaagggtgagttttgagatggggataggatggaagatggtattggtgatagatggaaaggataggagagggataggttaaagttatgtattgtttttagtttagttatttttggattttttatgtggattttgattaggtttaagttagttatttgtataaagaggagagtagagggttagggtggaagattataatgttttttttttttgtaggaaggggttataatgattttgtaatgtataaagttagcgggattttggaaggtaggaagaggtatggggagggggtgtttagggggtatggggagggtttaggtttttatgaattttaggaggggggtattataaatgtttattttatagaggtgtaattaaggtttagagttgagaagggatttgtatgttatatatagggaggttgaatgtgaatttgggttttttggtttttaaagttgatttgttatattttttggtagaggttgtagtttttgggtatgatttttttgattatttttgtgtgtgtttgtttgttttataaagtttttggatttattattagtttttaaaagtttggaagaattatataaaagtttagatttagtgattgttttgagaaattggaaggtttggtttgtatttttatttggtaattattggtggtattgggaagaggttatttatttatttggtatttgtgttgtttagtgttttatatttattattgtttttgtttttt

SEQ ID NO: 1383 - DNA, 2408 bp, Artificial Sequence
  chemically treated genomic DNA (Homo sapiens)
ggaaggtaagagtagtgataaatgtgagatattagatagtataggtgttaggtaaatgggtggtttttttttagtgttattaatggttgttaagtgggaatgtaggttagattttttaattttttaagataattattagatttggatttttatgtggtttttttaggtttttaaaggttgatgataaatttaaaagttttataaaataaataaatatatatagagatggttaaagaaattatgtttaaagattgtaatttttgttaaagagtgtaataggttaattttgggaattagaagatttaaatttatatttaatttttttgtatgtgatatataagtttttttttaattttgagttttgattgtatttttgtgaaataggtatttataatgttttttttttaggatttatggggatttgaattttttttatattttttgaatattttttttttatgtttttttttattttttagggtttcgttgattttgtgtattgtagggttattgtggtttttttttgtagaagagaagaatattataattttttattttgattttttgtttttttttttatgtagatggttggtttggatttggttaggatttatatagggagtttaggagtgattgggttaggggtaatgtatggttttggtttgttttttttttgttttttttatttgttattaatgttattttttattttatttttattttaaaatttatttttgttgggttttattgattttgagttttattttgtatttttttatttgtttgttatgggaaaatttttgtggttgttggtgggtgggtgtattattttagcgagtgttgaaatgtttagtataagagagtttttttaaagatagtatttagtttaaagaggtagttttgatggtggaaatttaggtaatagggttataggaataatttgtttttaaatgagggaagtaggtgttggttttgatggttggggtttatttttggttaggatgaggatggtatttaggatgatatagtgatatttttaggattggggatttgggtttttcgttttttagaatgtttatttagaattttgattttattttttttttaaatttgggatttatcgagataggtttagggaatatgttagatttgagattagtcgaggtcgggtttttataggtagggagggaagaggggtttttgggagataaagtttcgatttagtaattgggttatagaaataaaagttagttttggttgaagagttaatggtaagtcgttagtagttttggttttagtagggagggaaaggattagattattatttttagggattagttacgaagaaggagagaggtggaatattggtttttattagttttataaggtttttgattagagtaggagaatgagtattagatgaggagtttagaagtattttttttagttatgtgagttttagcgagttatttttttttaatttttgtttataaaatggggtagaaataaattatattatagagttgttgtgaggttatataatatgtttggtatagagtaaatatttaggaaatgtttatttttttttttttttttttttttttttttttttagttgaagtaatttagataggtttgtcgttagaggaggtatttgaattagattttgaaggatgaggaagatatgtatagagtgagatggaaggagaggtattttaagaaaaagtttagaggtgggaatttggggtatatgtataagaaagagttggtagtttaattggtttggagtttaggggatttgaagggaagtgaggtaggagaagagggttaggttagggtttgttgggtttataaagtttgaagatgaattcggatggtattgtgggtagtatagaggagttgttagttgtaaatatgttttgtaaattgtggtatatttgttaaatatttaggatttgtataatttgttgtgtgttttttgtttcgaaattttgttttttgaattggcgtatgagggatttaagaggttttttatatatatatatttgtgtgtaaaatgggtgtaataagtataggaaaatagtatgattggaaattagattatttgagatgaaatttagttttgttttttttttattattcgtgtgatttggaggatatttgagttttgtttatgatttgtaaagtggttatattagtttttttttaagagggtgaaatgtagttttattaaacgtatgattttaggttgggcgtaatggtttacgtttgtaattttagtattttgggaggtcgaggtgggtggattatttgaggttaggagtttaagattaggttggttaatatggtgaaatttcgtttttattaaaaatataaaaattagtcgggagtagcgcgggcgtttgtaat

SEQ ID NO: 1384 - DNA, 2432 bp, Artificial Sequence
  chemically treated genomic DNA (Homo sapiens)
ttggtttagtatttgagcgtttatttataggatatttatttgtagaggtgttttgagcgttattgtgggttaagggatttttttttttttggagatagtttttgagaagttgaaggttttgggggttttttattaaatgtttttgggaggtgggaaaatattaaatgcgggtgtggtttttttggaatagttttgtgtggggatttaggagttaagttttttagtatacgtttttaatatttttagtaggggttatttttttggagttacgggtggttgttaatattttgtggtttttagtaggtattatttaggtaagagagagaataggtcggggaataatgggttggtttggtcgtaagcgttggggtagattatagatcggatggtttaagtttatgttttggggttatttttgattttttgtaagtgtggtaagggttttttttggatattttgagaagttgtagttgggagaggattattcgtttgtttggatgtttagtttaggtgttagggtttaaatgattagttttaggtcgtagtttttattattcgttttggttgtaggggtttttagaagttattaagggtttggttcggttttgtttattcgtatttgagttttagtttttttatttgtttaagaagggaggtgaatattgattaaattatgtaaatttttagcggtaggattaggtgtggttgggatagttaaggttttttagggtggtggtatttttggagttcggggatgggttttgtttttttttcgggtttttcgttgggtttgggtattttttttttttttttttttttttttttttagaggggatttttgtagagttgttttcgttttagggtttagtttgtgtttgatttaaatagtttttgtttttttttgaggatgagttgggtgtattttttttttgtaggaagatgagggttagagatggaggtttatgttagggttatagagtttggaattttttttggagttaaaatagttttgttttatttattttgcgtattttattttttgttttagtttcgtcgggttcgttttgtatgtaaggcggggttgggatttagggtttgagtttcgttttttggatattcggtttatcgtttgttaaaggttttgtggttggaggtttcggtttttttatttttttatagggttttagggtcgatttaggtttgcgggttaggaatgtgttaacggggtaatttgggttttgttggtttacgtaggtatttgtggattttgagaggggattgggtggggaggggcggggaggggcggggcggggcggtgtcgtagagtgtagggcgggcggggttaggttagtagggagtgagtttgtttggtcgtttcgtttcggagttattgtattgttggttgtagatataggttgtattatgaagttagtttttttgttttgggttttgttgttgttggcgatagttttcggttcgggtttcggatttatagtaggtatgtttttttgtttttttgtgttttcgtttgtttgtttatttgtttgtagttaggtttgggttgatatttttttgggtttagtttttgtttatttgttaggttatttgtggttgtgttaggggtgatgggaagaaattttgagggtttatgtggaggggtagtttatggggatgggaggtttgagtcgggtttattttaaatttgttggtagttaggagggaggcgggggagattagtagaggttttcgtttgtgtttttagttttgatagggcgggattacggagggggagttaggattgtgggtttttattagggtggggttgaatttaggaaagtttagggaaagtttcgaattttagaattaggatattggttttaggttgtttttcgttttttattttattttttatcgatttttttgttatttattttatttgtaagtatttttcggttttttttttcgatttttgtgcgttattaaatttttggttagtatatatttattgttgtttttaagtgttaggtattgtatttggtgaagtggggttagcggggtggtttaggtttaggtttggttttcgattggttttttttgatgggggatggggaagggttagggaagtgtaattttagtttgggtgtatgtatttgttttagtttttttttgtaattttttttttatgttagtttttggaaatatggttttgtttatcggttttatggtttataggagaagttttgggttcggcgtttatagttttttgtggtgtgtatttttatttttttttttttattgttgggatttttgtttgaaatgttttttttttttttagaaaggaggggagcggttttggttttttgttttgagtacggagttttttttggggttttaattgtagtttttgggagagcgagaagtgttacgtttag

SEQ ID NO: 1385 - DNA, 2432 bp, Artificial Sequence
  chemically treated genomic DNA (Homo sapiens)
ttgaacgtgatatttttcgtttttttaggggttgtaattgagattttaaagagagtttcgtgtttagggtagaaggttagggtcgttttttttttttttggggagaggagggatattttaagtaggggttttagtagtggggaaagggaagtgggggtgtatattataaggggttgtgggcgtcgggtttaaaattttttttatgggttataagatcggtgggtaaggttatatttttaggggttggtatgaaggaagggttgtagggagggattggggtaggtgtatgtatttaggttggaattgtatttttttggtttttttttattttttattaaaagaggttagtcgagggttaggtttgggtttgagttatttcgttggttttattttattaagtgtagtgtttggtatttaaaagtaataataaatatgtattggttaaggatttggtggcgtataggggtcgggggaggaggtcgagagatgtttgtaagtgagataagtggtaagagggtcgatgggaaatggggtgggggacggggggtagtttgggattagtgttttggttttggagttcggggttttttttagatttttttggatttagttttattttgatgaggatttataattttggtttttttttcgtgatttcgttttgttagggttggggatataggcggaggtttttgttggtttttttcgttttttttttagttattagtaggtttagggtgggttcggtttagattttttatttttatgggttgtttttttatatggatttttagaatttttttttattatttttagtatagttatagatggtttgatagatggatagaggttgagtttagagggatgttagtttaggtttggttgtagatagatggatagatagacggggatatagaagggtagggaggtatatttgttgtgggttcggggttcgggtcgagggttgtcgttagtagtagtagggtttagggtaggagggttggttttatggtgtagtttgtgtttgtagttagtagtgtagtggtttcgaggcgaggcggttagataagtttattttttgttggtttggtttcgttcgttttgtattttgcggtatcgtttcgtttcgttttttttcgtttttttttatttagtttttttttaaagtttataggtgtttgcgtggattagtaaggtttaagttgtttcgttagtatatttttggttcgtaggtttggatcggttttgggattttgtgggagggtgaggaggtcggagtttttagttataggatttttggtaggcgatgagtcggatgtttagagggcgaagtttagattttgggttttagtttcgttttgtatgtagggcgagttcggcggggttgaagtagaggatgggatgcgtagggtgaataaggtagggttgttttagttttagggaggattttagattttgtggttttgatatagatttttatttttagtttttatttttttgtaggaaggaggtgtatttaatttatttttagggggaggtaggagttgtttgggttagatataggttgagttttggggcggaggtagttttgtaggggttttttttggagggaggaaggaggaaggggagagaaggtatttaagtttagcggggggttcggaagggagatagggtttattttcgggttttagagatgttattattttggggagttttggttgttttagttatatttaattttgtcgttaagagtttgtataatttaattagtatttatttttttttttgagtagatgaggaaattgaagtttagatgcggataggtaaggtcgagttaggtttttggtggtttttgggagtttttgtagttagggcgggtggtaagggttgcggtttgggattggttatttggattttgatatttgggttggatatttagataggcgggtggtttttttttagttgtagttttttaaggtgtttaaaagggatttttgttatatttgtagggagttagaggtggttttagggtatgagtttaggttattcggtttgtgatttgttttagcgtttgcggttaggttagtttattgtttttcggtttgtttttttttttgtttgggtggtgtttgttgggaattatagggtgttggtagttattcgtggttttagagaggtggtttttattgaaagtgttagaggcgtgtgttgggggatttggtttttgagtttttatatagagttgttttagggaagttatattcgtatttgatgtttttttattttttaaagatatttggtgagaggtttttaagatttttagttttttagggattgtttttagaggggagaaagttttttaatttataatggcgtttagggtatttttgtaggtgagtgttttgtaagtggacgtttaggtgttgagttag

SEQ ID NO: 1386 - DNA, 2359 bp, Artificial Sequence
  chemically treated genomic DNA (Homo sapiens)
aggacggatatttcggatttttttttgtatttagtgttgtagggagtaattttagttttgggtttgggatgaatgttttcgttagtttggggttaggagataggttttttttggtttagtatttgagcgtttatttataggatatttatttgtagaggtgttttgagcgttattgtgggttaagggatttttttttttttggagatagtttttgagaagttgaaggttttgggggttttttattaaatgtttttgggaggtgggaaaatattaaatgcgggtgtggtttttttggaatagttttgtgtggggatttaggagttaagttttttagtatacgtttttaatatttttagtaggggttatttttttggagttacgggtggttgttaatattttgtggtttttagtaggtattatttaggtaagagagagaataggtcggggaataatgggttggtttggtcgtaagcgttggggtagattatagatcggatggtttaagtttatgttttggggttatttttgattttttgtaagtgtggtaagggttttttttggatattttgagaagttgtagttgggagaggattattcgtttgtttggatgtttagtttaggtgttagggtttaaatgattagttttaggtcgtagtttttattattcgttttggttgtaggggtttttagaagttattaagggtttggttcggttttgtttattcgtatttgagttttagtttttttatttgtttaagaagggaggtgaatattgattaaattatgtaaatttttagcggtaggattaggtgtggttgggatagttaaggttttttagggtggtggtatttttggagttcggggatgggttttgtttttttttcgggtttttcgttgggtttgggtattttttttttttttttttttttttttttttagaggggatttttgtagagttgttttcgttttagggtttagtttgtgtttgatttaaatagtttttgtttttttttgaggatgagttgggtgtattttttttttgtaggaagatgagggttagagatggaggtttatgttagggttatagagtttggaattttttttggagttaaaatagttttgttttatttattttgcgtattttattttttgttttagtttcgtcgggttcgttttgtatgtaaggcggggttgggatttagggtttgagtttcgttttttggatattcggtttatcgtttgttaaaggttttgtggttggaggtttcggtttttttatttttttatagggttttagggtcgatttaggtttgcgggttaggaatgtgttaacggggtaatttgggttttgttggtttacgtaggtatttgtggattttgagaggggattgggtggggaggggcggggaggggcggggcggggcggtgtcgtagagtgtagggcgggcggggttaggttagtagggagtgagtttgtttggtcgtttcgtttcggagttattgtattgttggttgtagatataggttgtattatgaagttagtttttttgttttgggttttgttgttgttggcgatagttttcggttcgggtttcggatttatagtaggtatgtttttttgtttttttgtgttttcgtttgtttgtttatttgtttgtagttaggtttgggttgatatttttttgggtttagtttttgtttatttgttaggttatttgtggttgtgttaggggtgatgggaagaaattttgagggtttatgtggaggggtagtttatggggatgggaggtttgagtcgggtttattttaaatttgttggtagttaggagggaggcgggggagattagtagaggttttcgtttgtgtttttagttttgatagggcgggattacggagggggagttaggattgtgggtttttattagggtggggttgaatttaggaaagtttagggaaagtttcgaattttagaattaggatattggttttaggttgtttttcgttttttattttattttttatcgatttttttgttatttattttatttgtaagtatttttcggttttttttttcgatttttgtgcgttattaaatttttggttagtatatatttattgttgtttttaagtgttaggtattgtatttggtgaagtggggttagcggggtggtttaggtttaggtttggttttcgattggttttttttgatgggggatggggaagggttagggaagtgtaattttagtttgggtgtatgtatttgttttagtttttttttgtaattttttttttatgttagtttttggaaatatggttttgtttatcggttttatggtttataggagaagttttgggttcg

SEQ ID NO: 1387 - DNA, 2359 bp, Artificial Sequence
  chemically treated genomic DNA (Homo sapiens)
cgggtttaaaattttttttatgggttataagatcggtgggtaaggttatatttttaggggttggtatgaaggaagggttgtagggagggattggggtaggtgtatgtatttaggttggaattgtatttttttggtttttttttattttttattaaaagaggttagtcgagggttaggtttgggtttgagttatttcgttggttttattttattaagtgtagtgtttggtatttaaaagtaataataaatatgtattggttaaggatttggtggcgtataggggtcgggggaggaggtcgagagatgtttgtaagtgagataagtggtaagagggtcgatgggaaatggggtgggggacggggggtagtttgggattagtgttttggttttggagttcggggttttttttagatttttttggatttagttttattttgatgaggatttataattttggtttttttttcgtgatttcgttttgttagggttggggatataggcggaggtttttgttggtttttttcgttttttttttagttattagtaggtttagggtgggttcggtttagattttttatttttatgggttgtttttttatatggatttttagaatttttttttattatttttagtatagttatagatggtttgatagatggatagaggttgagtttagagggatgttagtttaggtttggttgtagatagatggatagatagacggggatatagaagggtagggaggtatatttgttgtgggttcggggttcgggtcgagggttgtcgttagtagtagtagggtttagggtaggagggttggttttatggtgtagtttgtgtttgtagttagtagtgtagtggtttcgaggcgaggcggttagataagtttattttttgttggtttggtttcgttcgttttgtattttgcggtatcgtttcgtttcgttttttttcgtttttttttatttagtttttttttaaagtttataggtgtttgcgtggattagtaaggtttaagttgtttcgttagtatatttttggttcgtaggtttggatcggttttgggattttgtgggagggtgaggaggtcggagtttttagttataggatttttggtaggcgatgagtcggatgtttagagggcgaagtttagattttgggttttagtttcgttttgtatgtagggcgagttcggcggggttgaagtagaggatgggatgcgtagggtgaataaggtagggttgttttagttttagggaggattttagattttgtggttttgatatagatttttatttttagtttttatttttttgtaggaaggaggtgtatttaatttatttttagggggaggtaggagttgtttgggttagatataggttgagttttggggcggaggtagttttgtaggggttttttttggagggaggaaggaggaaggggagagaaggtatttaagtttagcggggggttcggaagggagatagggtttattttcgggttttagagatgttattattttggggagttttggttgttttagttatatttaattttgtcgttaagagtttgtataatttaattagtatttatttttttttttgagtagatgaggaaattgaagtttagatgcggataggtaaggtcgagttaggtttttggtggtttttgggagtttttgtagttagggcgggtggtaagggttgcggtttgggattggttatttggattttgatatttgggttggatatttagataggcgggtggtttttttttagttgtagttttttaaggtgtttaaaagggatttttgttatatttgtagggagttagaggtggttttagggtatgagtttaggttattcggtttgtgatttgttttagcgtttgcggttaggttagtttattgtttttcggtttgtttttttttttgtttgggtggtgtttgttgggaattatagggtgttggtagttattcgtggttttagagaggtggtttttattgaaagtgttagaggcgtgtgttgggggatttggtttttgagtttttatatagagttgttttagggaagttatattcgtatttgatgtttttttattttttaaagatatttggtgagaggtttttaagatttttagttttttagggattgtttttagaggggagaaagttttttaatttataatggcgtttagggtatttttgtaggtgagtgttttgtaagtggacgtttaggtgttgagttagggagagtttgttttttggttttaggttggcgagggtatttattttaggtttagggttgaagttgttttttatagtattgggtgtaggggagggttcgaggtgttcgtttt

SEQ ID NO: 1388 - DNA, 2436 bp, Artificial Sequence
  chemically treated genomic DNA (Homo sapiens)
tattgggtgggtattattaaaggattatttttaaataaaggtaaaattacgattttcgtgtaattatagaatgaatatttattagagattttatttaaagtattaattaatgatagaataaggaaaatggtataattggtttaaaggagaatttaagtattatatatagatatgtaggtaaatataaatgttggtatttatttataagtagatacgaaatcggttaataatttgaggataataattaattgtattttattggatataatttatttgtatttttatggtattaagtatttgtattattattggttttttttttaagtttcgagagttaggaaatagtttaaagatgatgaaaggtatagatattttggagagttatgttagatagaatatttagtaatttttatagattttttggtttatattaatattttttataattttttttgatagtatagtgtagttattattattttagagaagaagtgaggggttatgttgtgttttttggatttttgttttttaatttgtaaaatgggtatgataagagtttttgataatttagagatatgaggttttgttgggataagtatcgtgggaaacgtgaagtgttaagggatagtgttttaaattttagtgtggtttttttttttgatttagtttatatttttgttttattttggaagatttatttttttttttttatattaattttgatttgataatatttttgaaattagagaatgaggtgttgattttgtatgttttttttttttaatatatatgaatatagataaaaagttattgagataagaaaggtaagtttatttttgtattaattaatttagtgttttgtgggaagtataggattaggaagaaattaaatgatagtttataaatatatatatatatatatatatatatatatatatattttattaattattattattattatcgtcgttattattaatgtattttgtaaatttatatataatttgtaaatttttttttgaaataagagagagagggtaattgaaattatttaaggtagtatttggaatacgtaggttaaagattgagttagggagggattgttattatatgggttgtggggaggtagagtttttttgtgttttcgagagtattttttttcggggttttattagtttttaattcgtttttcgaatttttatttttttttttgttttgcgtttttggaaatttagatagcggttttattttcgtgatttatttagtaggaatgtgggagttttcgaattgttttagttaaagttttttaattttttttcggtgatgaatgggtgaggtttttaaatgaaatgtggaggtttttagttttagttcgcggtttttttttttttcggcgtaattatttttgtgtagaatatgttaagtgttttgtttttcgggaatttgtttcgtatgtaaatatttggtgattaagcgaggtttatttaattaagtattttgtaatgatttttaaattaaagaatagtggattaggagtttagttcgtgttggtgatgggaaaggtagttttatattataaggaggtagatagtgatttggtgtggggaggcggtcgggttaagcggggtagagtaggcgttttgggaattttgttagaattatttatttatttatttaattaatttatttttggagtattttttggagttagagtagttggtgaataataataataataataatagggttaggtattgtgttaataagtttgttgaataataagagtgaggaggagttagagatagttattgagagttgattttattaggtatgaattgttagtagtagtgacggtaataataagtatttttattgtagtagtaaatttttgaataggattttgttgtggttttgcgtgttttgaaattgttgggtttttgttatggatttggtttttggaaatagtttttatttttgttgttgttttattgatttattggttttttatttattagtggtttattttttatatttgtgtaatgggtagttggatttagattttttttaagatgtttttgggttttaggagtttagggtgttttttttgtttttgggggttataggaatggtggcgttattttgggggttttagttgtaatattgtagaaggttttagagtttagttttatatagttttaggatagagtaagggtgatttttagtttagatttttataaattgtgggatttttattaggtagtttgttttttttgacggataagttttttattttttaattgaaataatttttttatttgtttttagggtttttgtaagggaattatatagatttatggatatagatgttttttgaaaattatttatttggtggtagaagttattatgttttaaatttggatttacgaatatatttta

SEQ ID NO: 1389 - DNA, 2436 bp, Artificial Sequence
  chemically treated genomic DNA (Homo sapiens)
tggggtgtgttcgtgggtttaagtttgagatatgatggtttttgttattaggtagatggtttttaaagggtatttatgtttatgagtttgtgtgatttttttataggagttttggaagtagatggaagggttattttaattgagaggtgaaggatttgttcgttagagaggataagttatttggtgaaggttttataatttatgaaggtttgagttgagagttatttttgttttgttttggagttgtgtagggttgggttttgaagttttttgtaatattgtagttgaggtttttaaagtggcgttattatttttgtggtttttagaagtagaggagatattttaggtttttaagatttaaaagtattttagagaagatttagatttaattatttattatatagatgtgggaagtgagttattggtgggtgagaagttagtgagttagtaagatagtaataaagatgggggttgtttttaaaggttaagtttatggtagaaatttagtagttttagggtacgtagggttatagtaaaattttatttaaggatttgttgttgtaatgaaaatgtttattattgtcgttattattattagtagtttatgtttagtagagttagtttttaataattatttttggtttttttttatttttgttatttagtagatttattagtatagtgtttggttttattattattattattattgtttattagttattttggttttaagaagtgttttaaaaataaattgattgaatgaatgaatgagtgattttagtagagtttttagagcgtttattttgtttcgtttggttcggtcgtttttttatattagattattgtttgtttttttgtgatatgaagttgttttttttattattagtacgaattggatttttaatttattgttttttggtttaagagttattataaagtgtttaattaagtaagtttcgtttaattattaaatgtttgtatgcgaaataagttttcgggaagtagggtatttgatatgttttgtatagaaataattacgtcgaggagggggagggtcgcgggttgggattgggagtttttatattttatttgagggttttatttatttattatcgaaggggaattaaaaggttttagttggagtaattcgagaatttttatatttttgttggatgaattacgggagtggggtcgttgtttgggtttttaaaggcgtagagtaaggggagaggtgggaattcgagaggcgagttgggggttggtggggtttcggggaggggtgttttcggggatataggggagttttgtttttttatagtttatgtgataataatttttttttggtttagtttttggtttgcgtgttttaagtgttgttttagatagttttaattgtttttttttttttattttaggaggaggtttgtaaattgtatatgaatttgtagaatatattggtggtggcggcggtggtggtggtggtggttagtggagtgtgtgtgtgtgtgtgtgtgtgtgtgtgtgtgtgtttgtaggttattatttaatttttttttaattttgtattttttatagagtattggattagttggtataagaatgaatttattttttttattttaatggttttttgtttatatttatatgtattagaaaaaaaaaatatatagaattagtattttattttttgattttaagggtattattaaattaaagttggtataaaggaaaaaaaataaattttttaaggtagaataaggatgtgaattaaattaggaaggagggttatattgaggtttgggatattgttttttagtattttacgttttttacggtatttgttttagtaggattttatgtttttggattgttaaaggtttttattatgtttattttgtagattaagaaatagaggtttaggaaatataatatagttttttattttttttttgggatggtggtggttgtattgtattgttagaaaaaattataaaagatgttgatatgggttaaaaaatttataaagattgttgaatgttttgtttagtataattttttaggatatttatgttttttattatttttgagttattttttaattttcgaagtttaagaaaaaaattaatagtaatataaatgtttggtgttatagaaatgtaaatgaattgtgtttagtggaatgtaattgattattatttttaagttattgatcgatttcgtatttatttgtaaatgaatgttagtatttgtgtttgtttgtatgtttatgtgtggtgtttaaatttttttttgaattagttgtgttattttttttgttttgttattaattaatgttttaaataaaatttttgatgggtgtttattttgtaattgtacgagagtcgtgattttgtttttatttaaaaatgattttttaatggtatttatttaata

SEQ ID NO: 1390 - DNA, 2391 bp, Artificial Sequence
  chemically treated genomic DNA (Homo sapiens)
ttatttttggtatttttagggttgtttacgttgtatttttgttttgtttgtttttattatgagtagttgtattgttgagggttatttgggggaataagttggttggcggttaggtattttttatttgagaatatggcggtttaaaatttaattatgatgtttatgtttttacgtagtcgtttttttttttgagtaggaaattttgggggatagttttaaataattataagaggataacggttgagtgtttggagttagggattagaggttagttatataaagtagtgagaaggtgatgtagataattttttaatgataaaaggttagtttaaagttagttattagtaaggatgatttggtttatttttatgggaaggtgtggtggttcgggagtttttttatgttttttttttttattgtttatagtagtttttatagttttttattgaagttgtatttgtggtagattagggtaaggaagttgtatttatataatagtatagtttatgggtgtagagttttaggtagtgggtgtttgtaatttttcgtgtaataagtttttatattaatagggaaattaaatggacgtatttaattttttaaattagttgaattgagggaaaatttgtttatatttcgttgggaggttagttttaagtatacgggatatatgtatagggttgaaaggtatttaaatttatagggttagggatattgaaggaggaggttggtgagtataattgggtaattgtgtatttttgtgagtgattttttgggggtttggggcgatggagtatttggaggggttgggtcgtttttggatgttgtatagtatattttgggggagtatttgaagtagttaaaggtagtggagtagattttttcgcgaagtatattgcggatggttgtatttggaattatatcggtatgtaggagggatagttttagggttagtagtttgtgagggagtttcggattcggttagagtaggagtttggtttggggttaagtttattttatggatttttttttttgtttttttaggagtagtttattgaaatgtgtttttcgtttatagaagtatcgtgatatatagacgttttatgatatattgtatatattaggggttttgtgttttttaggaagagggtttttatttgaagcggggttcgatggtcgttacgtgtcggtttatgttttttttggttttgtcgatgtttagggatatggagcgttgtagtaggttggagaagatttttatttggttagagttgtagtatttggcgattttaaatcgttgtattaggaattgagcgaaaagaggaagacgttgtggtggtggggttgagtcgggttaattttggggtcggtagagatagttgaggaggggttttgggttgattggtcgagtttgtcgaaggttttgggttcggttatttttattttaggaatagttttggttttttaggtggagtattttatagttttcgtgggggaataggtacgtacgtcgatttagatgtagtggggggttatttcggggggatagggtttgggttgatttgttttcgaggtagttagggggtttgttttttttattttagtagaaaataggttaaatttttgttttattgttatgtgttagtttttgttatttttcgtatgaattataggtatagaaggaatgttagtttttttgtgaaatataaaaaggggttattgttaagttttttttaattaaaaaaaggaatacgtgtttattgaataagatttagaaattaagaaaagtatgaagaaaaaattgaagatcgtttatagttttatattttagggttatttgtgttagtgtttggtgtattttttttagtttttcgaggttgtattttgtttaattcggtttatcgtgtggatattgtaggtgtgaggtggtagtattcgggatgtatttgatgttttgataggtattgggtaggtgatttttttttataattttgataattttttgtggttgtgagcgggaagatttttttgtgggttgttgagttggtaagggtagaagagggttttggatttagggtttggttttttttttttattttatatagattttattcgatatttttatttcgttaattagattaggaaggtttatggagtcgaggcgagtttgtagttattatggttaggtttgggagtttagggttaggttgtttttatggtttagttatgtttagttaggtttttatttcgtgggggggtatgaggggtgtttagagggagtagtatggtgttcgggagatatttgggtgttgtagagagtaagaggtgtagtttatatatggaaagtttttatgatttttgggtgtttttataaggagattaataaatagt

SEQ ID NO: 1391 - DNA, 2391 bp, Artificial Sequence
  chemically treated genomic DNA (Homo sapiens)
gttgtttgttggtttttttgtaaaaatatttagaaattatgggggttttttatgtgtgagttgtattttttattttttgtagtatttaggtgtttttcgggtattatgttgttttttttgggtattttttatgtttttttacggaatggggatttggttgagtatgattgggttatgggagtagtttgattttgggtttttaggtttggttatggtggttgtaggttcgtttcggttttatgggtttttttaatttggttagcgggatgaaggtatcgggtagggtttgtgtggggtggagaggaggagttaggttttggatttagaatttttttttgtttttgttagtttagtagtttatagaggggttttttcgtttatagttatagagggttattagggttatagagaagagttatttatttagtgtttgttagggtattaggtatatttcgggtgttgttattttatatttgtaatgtttatacggtgaatcgggttgaatagaatgtagtttcgagaggttggagaaaatatattaagtattgatatagatgattttgggatgtgggattataggcgatttttaattttttttttatattttttttggtttttaaattttatttagtgagtacgtgtttttttttttaattagagaaaatttgatagtagtttttttttgtgttttatagaggagttaatattttttttgtatttgtagtttatgcgggagatggtaggggttggtatatgatagtggagtagaaatttggtttgttttttgttgagataaaggaagtagattttttggttgtttcggaagtaagttaatttaaattttgttttttcgaagtgattttttattatatttggatcgacgtacgtgtttgtttttttacgaaggttgtggggtgttttatttggggggttaggattgtttttggggtgggggtagtcgagtttaaggttttcggtaagttcggttagttagtttagaatttttttttagttgtttttgtcggttttagggttagttcggtttagttttattattatagcgttttttttttttcgtttagtttttggtgtagcggtttgagatcgttaagtattgtagttttgattaagtggagattttttttagtttgttgtagcgttttatgtttttgaatatcggtagggttaaggggagtatgaatcggtacgtggcggttatcgggtttcgttttaagtgagggttttttttttggggagtatagggtttttggtgtgtatagtgtgttatggggcgtttgtgtattacggtatttttgtagacggggaatatattttagtgagttgtttttggaagggtagggaagagagtttataaggtgaatttggttttaggttaggtttttgttttgatcgggttcggggtttttttataggttgttgattttggggttgttttttttgtatgtcgatgtggttttaaatgtaattattcgtaatgtgtttcgcgagaagatttattttattgtttttgattattttaggtatttttttaagatgtgttgtgtagtatttagggacggtttagtttttttaagtgttttatcgttttagatttttaggaagttatttataggaatatatagttgtttagttgtgtttattaatttttttttttagtatttttggttttgtggatttaaatattttttagttttgtgtatgtgtttcgtgtatttagagttagttttttagcgagatgtaggtaaatttttttttagtttaattgatttaggagattaagtgcgtttatttaatttttttgttaatgtgaaggtttattgtacgaagaattgtaaatatttattgtttggggttttgtatttataggttgtgttgttgtgtgagtgtagtttttttgttttgatttgttataagtgtagttttagtggaaagttgtaggggttgttgtgggtagtgagggaggagggtataagagggttttcgagttattatatttttttatgggaatgggttagattatttttgttaatgattggttttgggttgattttttgttattaagaaattgtttgtattatttttttattgttttgtgtgattggtttttagtttttgattttagatatttagtcgttgtttttttatggttgtttgaagttgttttttaaagttttttatttaaggagagaagcggttgcgtgaagatataagtattatgattaaattttggatcgttatgtttttagataagaagtatttgatcgttagttagtttgtttttttaggtaatttttaatagtgtagttgtttatggtggaggtaggtaggataggggtgtaacgtgggtagttttgagggtgttagaggtag

SEQ ID NO: 1392 - DNA, 2258 bp, Artificial Sequence
  chemically treated genomic DNA (Homo sapiens)
ggttgaagtgtaatgatatgattatagtttattgtaattttgaatttttgggtttaagtgattttttcgatttagttttttaaagtgttaggattataggtatgagttattgtatttggtacgtggatatttttgatttattttaattagggaaggtatttaataaatgttaatttttttttttttttttttaattatttgattttagtattttaggaaatgaggattgggatattggatggtttgggagaggaggaaagaggtgtttagggaaaaggaagaaattgggaaatagaagattacggataaataaaagaggaggggttaatttagaatagggaagacgggttaggcgtaggggtttatatttgtaattttagtattttgggaagtcgagataggcggattacgaggttaggagttcgagattagttttgttaatatggtgaaatttcgtttttattaaaaatataaaaattatttgggcgtggtggtatttaattgtagttttagttgtttaggaggttgaggtagaagaatcgtttgaatttgggaggcggaggttgtagtgagttgagatcgtgttattgtattttagtttgggtaatagagtaagattttattttaaaaataaaaaaaaagaaaagaaaagaatagagaagatgattttaattattagagttttttaataaaggtaggttttggttgtttgggggaggttgagagttttttgttattagaggtatgtaagtagaggttgagggattgtgagttatatagatgtgtttgtgaggattcgtaatggttaggaggtagatttttttatttagtaaattttgggagagggttgtttttgtttggttttgtaatggggtagggaagttaaggtgaataggatattatttttggttttagggagcgtttagtttaggaaataagtaaatcgttgagatttttttattttgtagttttgtgttttgaagtatttaagttttggagggagttggttggggatttttagtgtgcgttttttggtattgatttattgaagttggagttggttggggaatggtaggaggacgtcgtagtgttattagtgcggaggatacgttgtaatttgttagtgttatttcggttgtagttggttaggaattattttgttgttaacgtttttttttttagtagttatggagtatataatttgtatagtatttgttagtgtttttatttttttttgtaggagggagagtgtggatatttattttttttttgtatttttttagtatgagttttcgtttttaattatattaatttatttagtgttttttaatatattttgggtatttttatttttgtatttttagttattagaattttttattagcggtggttatttttgtttatttatttatttatttgtttatttatttaattatttatttatttatttatttatttatttaattatttatttatttattcgttatttatttatttttttatttatttatttaattatttatttatttatttatttatttatttatttattttttatttatttaattttgtaattcgttttagtttaatttaatttaatttatttttatttaatttataaggttattgggttttgttatgtattatatatatgtgataagtgaggtatgtttttgtttttaaggagtttatgggaagaattttttttattttttatggttagttttgtattttatttttgttaattttttgttatgttttttagtagaagtaacggattttgaagggttgttttgtgaggagagtttagttttggtttttatgaattgtagaggatagagtttagataaggagagaggtaaagggtggggaggaggtgagagtgagatgagttagtgggacggggattttggttttgtggagggagttgtttttagttagttgtgagtatttagtagtgtattgggggatgaagggaaagagaagggggtaaggaaattattattggagaagtgggttagtgtggcggtgaggaggtgagttttgtagttaatggattatttggtttattgttttagttttattatatttttgttgtgtgaatttgggtatatattttaatatttttgagtttttatgtttttatttgtaaaatgaggataataagatttattttataatgttgtttttagtattaatatatgtagtgtttaaattaatgcgtggtataaagggagagtttaatagattttagtttt

SEQ ID NO: 1393 - DNA, 2258 bp, Artificial Sequence
  chemically treated genomic DNA (Homo sapiens)
aaagttggaatttattaagttttttttttgtgttacgtattaatttaagtattgtatgtgttaatgttaaaggtaatattgtgagataggttttattatttttattttataaatgaggatatggaggtttagagatgttaagatatgtgtttaggtttatatagtaggaatatggtggagttgagataataagttaggtagtttattggttgtagagtttatttttttatcgttatattaatttatttttttaatagtggtttttttgtttttttttttttttttttattttttaatatattgttgagtatttatagttaattggaagtagttttttttataaagttaaaattttcgttttattagtttattttatttttattttttttttattttttgtttttttttttgtttgagttttgttttttgtaatttatgaaagttagaattgaattttttttataggatagttttttagagttcgttgtttttgttgaagggtatggtaaaggattaatagaggtgagatgtaaagttggttatggagaatggggaggattttttttatgggttttttgagggtagaggtatgttttatttattatatgtgtgtggtatatggtaaagtttagtaattttatgagttgaataaaggtgaattgaattgaattgaattgaagcggattgtaaagttgaatggatggaaggtgggtgggtggatggatgaatggatggatggatgattgaatggatgaatggggggatggatggatgacggatgaatggatggatgattgaatggataggtgggtggatggatggatgattggatggatggataggtggatggatgaatggataggagtgattatcgttggtagggaattttggtaattgaaggtatagaggtaggaatgtttaaggtgtgttggaaaatattgaataaattagtgtgattggagacgaggatttatgttagggagatgtagaaaaagaataaatatttatatttttttttttataaggagaggtggaggtattggtaggtgttgtataagttgtgtgttttatggttgttgggaagggaggcgttaatagtaggatggtttttggttagttgtaatcggggtgatattgatagattatagcgtgtttttcgtattaataatattgcggcgtttttttgttattttttagttagttttaattttagtggattaatattaaaaggcgtatattgaaaatttttagttaattttttttaaggtttggatgttttaaagtatagaattgtagagtaaaaggattttagcgatttgtttattttttgggttgggcgttttttggggttagggatggtgttttatttattttggtttttttgttttattataggattaggtaaggatagtttttttttaaagtttgttgagtgaaggaatttattttttggttattgcgagtttttataaatatatttgtgtggtttataattttttagtttttatttgtatatttttaatgataggaggtttttaattttttttaagtagttagagtttgtttttattggaaagttttgatgattaaaattattttttttattttttttttttttttttttttatttttgagatggagttttgttttgttgtttaggttggagtgtagtgatacgattttagtttattgtaattttcgttttttaggtttaagcgatttttttgttttagttttttgagtagttgggattatagttgagtgttattacgtttaggtaatttttgtatttttagtagagacggggttttattatattggtaaggttggtttcgaatttttgatttcgtgattcgtttgtttcggttttttaaagtgttgggattataggtgtgagtttttgcgtttggttcgttttttttattttgaattaatttttttttttttatttgttcgtggttttttattttttaattttttttttttttttggatattttttttttttttttttaaattatttaatattttagtttttattttttggggtattgaagttaaataattaaggggaggaagaagggaattagtatttattgagtattttttttagttgagataagttagaaatgtttacgtgttagatgtagtggtttatgtttgtaattttagtattttgagaggttgagtcgggaggattatttgaatttaggagtttaaggttgtaatgagttatgattatgttattgtattttagtt

SEQ ID NO: 1394 - DNA, 2486 bp, Artificial Sequence
  chemically treated genomic DNA (Homo sapiens)
agaataatagtaagatagtttgaatttgttttttttttttataataatttaaaaattaatatgattttatttatatgaaatatttagaaatatatttgtatatgtggatatttttatcgtatattttttatttaggttgttttaaagtggtattttttttttttttgtttatgttttttttttttttttattttttttgttgatacgtggtttttttttgtttttttttttagtagttttagtagattaggtttaattagttaataagtttttggatttggggaataaaagtatatttttttggatttttgaggatttgttttgttagggtgttttttttaatttaatttttttttttcggtagtttattttttttagattttgtaatttatttaattttatttatttgtatttatttcgtggatttttttatatttttatttgaatattaggaatttttaggttatgtttatatgtttttggtttttttgtagtttttttttttttttttttttgtgatgttattaagtcgaagtttttttttagattttggagtgtagtagggatttttttggtttttgttttagggattaagggggtggaagagtggatttttgtgttttttttatgtttgtgtttttattagggttagttgtaaaaggtagggattaggttgtttaggtagggattatggtattaggtagggattatggtatttttagagttgagttttatgtttagtaaaagatacgtgtttagtaattatttgatagagatttattttttattatatgggatatattatattggatttaggatggggttgaattgggagaggtagttgtggatttgtttttcgttttgtttttattttaagagttgatggggtatttattaggaagagtatttttgggtagggagagggttatgagtagttttgttttgtatgtgagatatagtttagttcggttataagatttagatgattatgattgtaatttaggggaagtagagaatgaagattgattagaataattttttgggaatgtgttttgggttttttagagggaagagttttttttttatttagcgttgtaggatttatagaggaaggagagttttggttattagggaggagttatatgagaggattcggtgtttttataaatgggaacgtgagtttatgaaagtcggtttttgttttgggtttgattgtgatttatgaggatattgtgtagttattatttgagttttttataataaatagtgagagcgttacggatagatttattttcgaggagtttagtaaagtgggaggattgaggttatagggagaagatataggtattatttggtttggttttgatagggggtagtggatagaatagtgcggaggtagtggggtttttagaggttttggttattttgttatattatggtttgtttcggtttggatattagagggtatttggggattatttttgagaagattgaggttgattagagtagaattagttatttgttttgtttagtgttttttgtttagggtttatagttgcgttttttatattcgtgggattatatagttttatttttgttattttttgatatttttaggtatagggatttgatttagggtttagggtgggattagaaagttgggggtttgatttgtatggatggatttttttatttttagagtatgaagaggggtagggagagatttggggaggttttgttttagttgtgggtataagaggtagtatttaggataatttttagtatggtttggtttttttttttttttatttttttcgtttattgtataggtgattggatataggtttaggggaggggttttgggaagtttatggatttttgtttttttttgttgtttttagaagtcgaataatgatgtttgtgttttttttatttttagggttttgggtttagtttgtgttgacgtagtcgtttttagtgtttggggttttagggtagagggttattattttttgtattgggagtagttttaatatcggggtaggttatgatgtatattggtattagtagtttttaggaatagtttttaaattttttatttatggtaatagtaatcggtttttaggggtttttgatcgattttttggttttaagtttggtattttagtttttttggttattattgggttttaggttgaggatgaggttgattattattgttagttttatgatagtagtttgagtggttttatagtgttttaggttcggggggaattgagataagaatttatttttttttttgttaggagggtgagtttcggtagttgttgtttaggtttggtttgtggtttttgcggttgttgttttttttatggttttaggggtatttagggttttgtttgggagtggaggttttttttttttttttgtttttagagttaggaatagggaatttaggaagtagaatattttttttttttaatttg

SEQ ID NO: 1395 - DNA, 2486 bp, Artificial Sequence
  chemically treated genomic DNA (Homo sapiens)
taagttaagggagagggatattttgttttttggattttttgtttttgattttgaggatagaaggggaggaggagtttttatttttaggtagggttttggatgtttttgggattatgagggaagtagtagtcgtagaagttataggttaggtttgagtagtagttgtcggggtttatttttttggtagaggaggaagtgggtttttgttttagtttttttcgggtttggagtattgtggaattatttaggttgttgttataggattggtagtaataattagttttatttttagtttggagtttagtgatggttagggaggttgaggtgttagatttggagttagagaatcggttagggatttttgagggtcgattgttgttattatagatgaggagtttgggggttgtttttggaagttgttggtattagtgtatattataatttgtttcgatgttggagttgtttttagtgtaggagatggtgattttttgttttggggttttagatattgagggcggttgcgttagtatagattgggtttaggattttggaagtgggagagatataggtattattattcggtttttagagataataggagaaagtaagaatttataggttttttagggttttttttttggatttgtatttagttatttgtgtagtgagcgaggagagtgaggaggagaggagattaggttatgttggagattgttttgagtgttgttttttgtgtttatagttgaagtagagtttttttaaatttttttttgtttttttttatattttgagagtgggagggtttatttatgtaaattagatttttagttttttaattttattttgggttttgggttaggtttttatgtttgaggatgttagggggtggtaggggtggggttgtgtggttttacgggtgtaaaggacgtagttgtgagttttgagtagaggatattaggtaggataggtggttggttttgttttgattaattttagtttttttaggaatgatttttaagtgttttttagtgtttagatcgagataaattatggtatgataaggtgattagagtttttagagattttattgttttcgtattgttttgtttattgttttttgttagggttaggttaggtggtgtttgtgttttttttttgtgattttagtttttttattttattgggtttttcgggagtgaatttgttcgtggcgtttttattgtttattgtagaggatttaggtggtgattatataatgtttttataggttataattaaatttagagtagggatcgatttttatggatttacgtttttatttgtggggatatcgggtttttttatgtggtttttttttggtggttagggtttttttttttttgtggattttgtagcgttgaatagaagggaagtttttttttttaggaggtttagggtatatttttagagggttattttggttaatttttattttttattttttttgaattgtagttatagttatttggattttgtgatcgggttgagttgtgttttatatataggataaggttgtttatggttttttttttgtttaggaatgttttttttggtggatgttttattagtttttagggtgagggtagagcgaggagtaggtttatagttattttttttagtttagttttattttgggtttagtataatgtgttttatgtgataagaggtaggtttttgttaagtagttgttgagtacgtattttttgttgggtatagagtttagttttggaaatgttataatttttatttaatgttataatttttatttagatagtttaatttttattttttgtagttaattttgatgaaaatataggtataggaagggtataggagtttatttttttatttttttaatttttggggtagagattagagaagtttttgttgtattttagggtttgagaagagatttcgatttggtggtattataggggaagaaggaagaagggattataggagaattaagggtatatgggtatgatttgaagatttttggtgtttaggtgaagatgtaaggaagtttacgaagtagatatagatgaataagattagataaattataggatttaggagaagtggattgtcgggaaggagagattggattgagaaagatattttggtagggtaagtttttagaaatttaagaagatgtatttttgttttttaagtttaggagtttgttgattggttgggtttgatttgttggggttattggagaggaaggtagggaggagttacgtgttagtaggagaggtgaggagagggggagaatatgagtagaagaagaggagatgttattttaggatagtttggatgggaggtgtgcgatgggaatgtttatatgtatagatatatttttagatattttatataaatgggattatgttaatttttagattgttgtgagagaagaagataaatttaaattattttgttattatttt

SEQ ID NO: 1396 - DNA, 2411 bp, Artificial Sequence
  chemically treated genomic DNA (Homo sapiens)
tgtggatatttttatcgtatattttttatttaggttgttttaaagtggtattttttttttttttgtttatgttttttttttttttttattttttttgttgatacgtggtttttttttgtttttttttttagtagttttagtagattaggtttaattagttaataagtttttggatttggggaataaaagtatatttttttggatttttgaggatttgttttgttagggtgttttttttaatttaatttttttttttcggtagtttattttttttagattttgtaatttatttaattttatttatttgtatttatttcgtggatttttttatatttttatttgaatattaggaatttttaggttatgtttatatgtttttggtttttttgtagtttttttttttttttttttttgtgatgttattaagtcgaagtttttttttagattttggagtgtagtagggatttttttggtttttgttttagggattaagggggtggaagagtggatttttgtgttttttttatgtttgtgtttttattagggttagttgtaaaaggtagggattaggttgtttaggtagggattatggtattaggtagggattatggtatttttagagttgagttttatgtttagtaaaagatacgtgtttagtaattatttgatagagatttattttttattatatgggatatattatattggatttaggatggggttgaattgggagaggtagttgtggatttgtttttcgttttgtttttattttaagagttgatggggtatttattaggaagagtatttttgggtagggagagggttatgagtagttttgttttgtatgtgagatatagtttagttcggttataagatttagatgattatgattgtaatttaggggaagtagagaatgaagattgattagaataattttttgggaatgtgttttgggttttttagagggaagagttttttttttatttagcgttgtaggatttatagaggaaggagagttttggttattagggaggagttatatgagaggattcggtgtttttataaatgggaacgtgagtttatgaaagtcggtttttgttttgggtttgattgtgatttatgaggatattgtgtagttattatttgagttttttataataaatagtgagagcgttacggatagatttattttcgaggagtttagtaaagtgggaggattgaggttatagggagaagatataggtattatttggtttggttttgatagggggtagtggatagaatagtgcggaggtagtggggtttttagaggttttggttattttgttatattatggtttgtttcggtttggatattagagggtatttggggattatttttgagaagattgaggttgattagagtagaattagttatttgttttgtttagtgttttttgtttagggtttatagttgcgttttttatattcgtgggattatatagttttatttttgttattttttgatatttttaggtatagggatttgatttagggtttagggtgggattagaaagttgggggtttgatttgtatggatggatttttttatttttagagtatgaagaggggtagggagagatttggggaggttttgttttagttgtgggtataagaggtagtatttaggataatttttagtatggtttggtttttttttttttttatttttttcgtttattgtataggtgattggatataggtttaggggaggggttttgggaagtttatggatttttgtttttttttgttgtttttagaagtcgaataatgatgtttgtgttttttttatttttagggttttgggtttagtttgtgttgacgtagtcgtttttagtgtttggggttttagggtagagggttattattttttgtattgggagtagttttaatatcggggtaggttatgatgtatattggtattagtagtttttaggaatagtttttaaattttttatttatggtaatagtaatcggtttttaggggtttttgatcgattttttggttttaagtttggtattttagtttttttggttattattgggttttaggttgaggatgaggttgattattattgttagttttatgatagtagtttgagtggttttatagtgttttaggttcggggggaattgagataagaatttatttttttttttgttaggagggtgagtttcggtagttgttgtttaggtttggtttgtggtttttgcggttgttgttttttttatggttttaggggtatttagggttttgtttgggagtggaggttttttttttttttttgtttttagagttaggaatagggaatttaggaagtagaatattttttttttttaatttgggatataaagtttttatattgaagttt

SEQ ID NO: 1397 - DNA, 2411 bp, Artificial Sequence
  chemically treated genomic DNA (Homo sapiens)
gaattttagtgtagagattttgtgttttaagttaagggagagggatattttgttttttggattttttgtttttgattttgaggatagaaggggaggaggagtttttatttttaggtagggttttggatgtttttgggattatgagggaagtagtagtcgtagaagttataggttaggtttgagtagtagttgtcggggtttatttttttggtagaggaggaagtgggtttttgttttagtttttttcgggtttggagtattgtggaattatttaggttgttgttataggattggtagtaataattagttttatttttagtttggagtttagtgatggttagggaggttgaggtgttagatttggagttagagaatcggttagggatttttgagggtcgattgttgttattatagatgaggagtttgggggttgtttttggaagttgttggtattagtgtatattataatttgtttcgatgttggagttgtttttagtgtaggagatggtgattttttgttttggggttttagatattgagggcggttgcgttagtatagattgggtttaggattttggaagtgggagagatataggtattattattcggtttttagagataataggagaaagtaagaatttataggttttttagggttttttttttggatttgtatttagttatttgtgtagtgagcgaggagagtgaggaggagaggagattaggttatgttggagattgttttgagtgttgttttttgtgtttatagttgaagtagagtttttttaaatttttttttgtttttttttatattttgagagtgggagggtttatttatgtaaattagatttttagttttttaattttattttgggttttgggttaggtttttatgtttgaggatgttagggggtggtaggggtggggttgtgtggttttacgggtgtaaaggacgtagttgtgagttttgagtagaggatattaggtaggataggtggttggttttgttttgattaattttagtttttttaggaatgatttttaagtgttttttagtgtttagatcgagataaattatggtatgataaggtgattagagtttttagagattttattgttttcgtattgttttgtttattgttttttgttagggttaggttaggtggtgtttgtgttttttttttgtgattttagtttttttattttattgggtttttcgggagtgaatttgttcgtggcgtttttattgtttattgtagaggatttaggtggtgattatataatgtttttataggttataattaaatttagagtagggatcgatttttatggatttacgtttttatttgtggggatatcgggtttttttatgtggtttttttttggtggttagggtttttttttttttgtggattttgtagcgttgaatagaagggaagtttttttttttaggaggtttagggtatatttttagagggttattttggttaatttttattttttattttttttgaattgtagttatagttatttggattttgtgatcgggttgagttgtgttttatatataggataaggttgtttatggttttttttttgtttaggaatgttttttttggtggatgttttattagtttttagggtgagggtagagcgaggagtaggtttatagttattttttttagtttagttttattttgggtttagtataatgtgttttatgtgataagaggtaggtttttgttaagtagttgttgagtacgtattttttgttgggtatagagtttagttttggaaatgttataatttttatttaatgttataatttttatttagatagtttaatttttattttttgtagttaattttgatgaaaatataggtataggaagggtataggagtttatttttttatttttttaatttttggggtagagattagagaagtttttgttgtattttagggtttgagaagagatttcgatttggtggtattataggggaagaaggaagaagggattataggagaattaagggtatatgggtatgatttgaagatttttggtgtttaggtgaagatgtaaggaagtttacgaagtagatatagatgaataagattagataaattataggatttaggagaagtggattgtcgggaaggagagattggattgagaaagatattttggtagggtaagtttttagaaatttaagaagatgtatttttgttttttaagtttaggagtttgttgattggttgggtttgatttgttggggttattggagaggaaggtagggaggagttacgtgttagtaggagaggtgaggagagggggagaatatgagtagaagaagaggagatgttattttaggatagtttggatgggaggtgtgcgatgggaatgtttata

SEQ ID NO: 1398 - DNA, 2386 bp, Artificial Sequence
  chemically treated genomic DNA (Homo sapiens)
ttgatggagaaattttattcgaaattttaaagtagggtagggatatttttattagatatttttgtagtttttgttttgtgggacgaagtaagggatgatgatatattcgtttgtttattcggaagtgagttttaggttattgtattagaagggtgataatttaatataagttattgttaagtaattttcgcgtgtttagtatttatatttttttgttttattttgattattatattgtataggagttattatttttatttttcgtttttatttatagatgaggatatcgagatttagagagttttttgttttgttttgttttttgagatggagttttgttttgttatttaggttggagtgtaatggtacgattttagtttattgtaatttttgttttttgggtttaagagatttttttgttttagttttttgagtagttgggattataggtatttgttattatatttagttaattttgtattagagatggggttttattatgttggttaggttggtttttaatttttgatttcgtgatttatttgttttagttttttaaagtgttgggattataggtatgagttatcgcgtttggtttgttttattttttgttttgtttgtttgttttgttttgtttttagagatagggtttggttttgttttttaggttagggtgtagtggtgcgattatagtttattgtagttttaaatttttgggtttaagtaattttttcgttttagtttattaggaattggaattataaatgtatgttattatttttagttaatattttttttttttggaaaaatgaagttttattatgttgtttaggttggttttaaatttttgggtttaagtgatttttttgtagtgttgggattataggtatgagttattttgttcggttaattttagagagttttgatgaagttataaaattttgattatggagttagaatttaaatttaggtatgtgaggtttgagtttaggtttttattagggttattgtgttgtaattgttattattttttggtattttaagtgatattcgagtattatttaagggaaatggtttatatttcggtaatttttttattcgttttatttttttttttgaattagggatttcggtagagatagagttttagtagtttttattcgttttttcgtgtcggttttgtttatttacggatgagttagttggaatgtttggatattttagtttagcggttgtggtattaggagttgttaggaggcgggaatgtagagaatgtggtttattgtgttttcgttcgtttaggttgaattcgtagagaggtttggaaggtgaatgatataatgtttgttaagggtttgggacgataggtgtatgtgaagatgaggataaagattgattttttttttggggttgttagtatagtttcgtattttttttatatatgttcgtattttaggtttagatatttcgtgttttgggtttttatgaagggtaagaaattattgattaggaagtaagaagaagaaaaagaaatgttttaggtttttaaaagaaagagtgtttgatttttttatttaaatgttattttgaaatatagtttttttgtttttcgtttttttttttttttagagatagggttttgttttgttatttaggttggagtgtagtggtacgtttatagtttattgtagtttttaatttttgggtttaagcgattttttcgttttagttttttaaagtattgggattataggcgtgagttattgtattaggttttgaaatattgttttgattttgttttttttttatttagatgtttttgtgtaggtcgataattttttttggtgttttttttgtgcggggttgtgtttgggtattgagtagatagtagtgaagaagatgatgatagtttttttttagggagttttttttttggagagaggtttagataattaaaaagtgagtgcgtttacgtttgtaattttagtattttgggaggttaaggcggatggattataaggttaggagttcgagattagtttggttaatatggtgaaatttcgtttttattaaaaatataaaaattagttagttatgatggtgggtatttgtaattttagttatttaggaggttgagataggagaatcgtttgaattcgagaggcggaggttgtagtgagtcgagattgcgttattgtattttagtttggacgatagagcgagattttgttttaaaaaagaaaagtgagtgtgtgattatagatgagtagtgtgggggaggaaataaattaggtttatgatggaaattaggggaatggggtttttttaaaatgaaattaaatttcgagagttgcgtgttgtttaaatgtgttattttattgtttat

SEQ ID NO: 1399 - DNA, 2386 bp, Artificial Sequence
  chemically treated genomic DNA (Homo sapiens)
gtgggtagtgaggtgatatatttaggtagtacgtagttttcggagtttgattttattttaaaggaattttatttttttaatttttattatagatttagtttgtttttttttttatattgtttatttgtaattatatatttattttttttttttgagatagagtttcgttttgtcgtttaggttggagtgtaatggcgtaatttcggtttattgtaattttcgtttttcgagtttaagcgatttttttgttttagttttttgagtagttgggattataggtgtttattattatggttggttaatttttgtatttttagtagagacggggttttattatattggttaggttggtttcgaatttttgattttgtgatttattcgttttggttttttaaagtgttgggattataggcgtgagcgtatttattttttaattatttgaatttttttttagaaaggaaattttttggggaaggattattattattttttttattattgtttatttagtgtttagatatagtttcgtatagagaagatattagaaaagattgtcggtttgtataaaggtatttgagtaggagagagatagaattaaagtagtgttttagggtttggtgtagtggtttacgtttgtaattttagtgttttgggaggttgaggcgggaggatcgtttgagtttaggagttggaagttgtagtgagttgtgagcgtgttattgtattttagtttgggtgatagagtaagattttgtttttaaaagaaaaaaaaaacgaaaaataaaaaagttgtgttttaggatggtatttgggtaaagaggttaaatatttttttttttaagagtttgggatattttttttttttttttttgttttttaattagtggttttttgttttttataggagtttagggtacggagtgtttgggtttggaatgcggatatgtgtgggagggatgcgaaattgtgttggtagttttaagaaaagaattagtttttgtttttatttttatatgtatttgtcgttttaaatttttgataaatattgtgttatttattttttaaatttttttgcggatttagtttgggcgggcgggagtatagtgagttatattttttgtattttcgttttttgatagtttttggtattatagtcgttgagttgggatgtttaaatattttaattgatttattcgtgggtgagtaaggtcgatacgaggggacgggtggaggttgttggggttttgtttttgtcgaagtttttaatttagagaagaaagtggggcgggtgggggaattgtcgggatatgggttattttttttgaatgatgttcgggtgttatttgaggtgttaggaagtggtggtagttgtagtatagtggttttggtggaagtttgggtttagattttatatatttagatttgagttttggttttatggttagaattttgtaattttattaaaattttttgagattggtcgggtagagtggtttatgtttgtaattttagtattgtaggaggattatttgagtttaggagtttgagattagtttgggtaatatagtgagattttatttttttaaaaaggaaaaatattagttggggatggtggtatgtatttgtagttttagtttttggtaggttgaggcgagaggattgtttgagtttaggagtttgaggttatagtgagttatggtcgtattattgtattttaatttggaaaataaagttagattttatttttgaaaataaaataaaataaataaataaaataaaaaataaaataggttaggcgcggtggtttatgtttgtaattttagtattttgggaggttgaggtaggtggattacgaggttaggagttggagattagtttggttaatatggtgaaattttatttttaatataaaattagttgggtgtggtggtaggtgtttgtagttttagttatttaggaggttgaggtaagggaattttttgaatttaggaggtagaggttgtagtgagttgagatcgtgttattgtattttagtttgggtgatagagtaagattttattttaaaaaataaaataaaataaaaaattttttgggtttcggtgtttttatttgtaaatggaggcggggggtgagaataatggtttttgtgtagtgtagtggttagaatgaagtaagaaaatgtgaatattgagtacgcgagagttgtttagtaatgatttgtgttaggttgttatttttttgatgtaatgatttgagatttattttcgggtgggtaggcgagtgtgttattattttttgtttcgttttataggataaaggttgtaaaagtatttggtgggaatgtttttgttttgttttgggatttcgggtaggatttttttattag

SEQ ID NO: 1400 - DNA, 2500 bp, Artificial Sequence
  chemically treated genomic DNA (Homo sapiens)
tttgaatgaggttattgaatgtgtacgggaggtttagcgttgttttattttagtttgatggagaaattttattcgaaattttaaagtagggtagggatatttttattagatatttttgtagtttttgttttgtgggacgaagtaagggatgatgatatattcgtttgtttattcggaagtgagttttaggttattgtattagaagggtgataatttaatataagttattgttaagtaattttcgcgtgtttagtatttatatttttttgttttattttgattattatattgtataggagttattatttttatttttcgtttttatttatagatgaggatatcgagatttagagagttttttgttttgttttgttttttgagatggagttttgttttgttatttaggttggagtgtaatggtacgattttagtttattgtaatttttgttttttgggtttaagagatttttttgttttagttttttgagtagttgggattataggtatttgttattatatttagttaattttgtattagagatggggttttattatgttggttaggttggtttttaatttttgatttcgtgatttatttgttttagttttttaaagtgttgggattataggtatgagttatcgcgtttggtttgttttattttttgttttgtttgtttgttttgttttgtttttagagatagggtttggttttgttttttaggttagggtgtagtggtgcgattatagtttattgtagttttaaatttttgggtttaagtaattttttcgttttagtttattaggaattggaattataaatgtatgttattatttttagttaatattttttttttttggaaaaatgaagttttattatgttgtttaggttggttttaaatttttgggtttaagtgatttttttgtagtgttgggattataggtatgagttattttgttcggttaattttagagagttttgatgaagttataaaattttgattatggagttagaatttaaatttaggtatgtgaggtttgagtttaggtttttattagggttattgtgttgtaattgttattattttttggtattttaagtgatattcgagtattatttaagggaaatggtttatatttcggtaatttttttattcgttttatttttttttttgaattagggatttcggtagagatagagttttagtagtttttattcgttttttcgtgtcggttttgtttatttacggatgagttagttggaatgtttggatattttagtttagcggttgtggtattaggagttgttaggaggcgggaatgtagagaatgtggtttattgtgttttcgttcgtttaggttgaattcgtagagaggtttggaaggtgaatgatataatgtttgttaagggtttgggacgataggtgtatgtgaagatgaggataaagattgattttttttttggggttgttagtatagtttcgtattttttttatatatgttcgtattttaggtttagatatttcgtgttttgggtttttatgaagggtaagaaattattgattaggaagtaagaagaagaaaaagaaatgttttaggtttttaaaagaaagagtgtttgatttttttatttaaatgttattttgaaatatagtttttttgtttttcgtttttttttttttttagagatagggttttgttttgttatttaggttggagtgtagtggtacgtttatagtttattgtagtttttaatttttgggtttaagcgattttttcgttttagttttttaaagtattgggattataggcgtgagttattgtattaggttttgaaatattgttttgattttgttttttttttatttagatgtttttgtgtaggtcgataattttttttggtgttttttttgtgcggggttgtgtttgggtattgagtagatagtagtgaagaagatgatgatagtttttttttagggagttttttttttggagagaggtttagataattaaaaagtgagtgcgtttacgtttgtaattttagtattttgggaggttaaggcggatggattataaggttaggagttcgagattagtttggttaatatggtgaaatttcgtttttattaaaaatataaaaattagttagttatgatggtgggtatttgtaattttagttatttaggaggttgagataggagaatcgtttgaattcgagaggcggaggttgtagtgagtcgagattgcgttattgtattttagtttggacgatagagcgagattttgttttaaaaaagaaaagtgagtgtgtgattatagatgagtagtgtgggggaggaaataaattaggtttatgatggaaattaggggaatggggtttttttaaaatgaaattaaatttcgagagttgcgtgttgtttaaatgtgttattttattgtttattgaatatattatatttttttgttttattgttttagtttttgtaatttttttattcgggtt

SEQ ID NO: 1401 - DNA, 2500 bp, Artificial Sequence
  chemically treated genomic DNA (Homo sapiens)
aattcggatggggagattataggaattgaggtagtgaggtagaaaaatatggtgtgtttagtgggtagtgaggtgatatatttaggtagtacgtagttttcggagtttgattttattttaaaggaattttatttttttaatttttattatagatttagtttgtttttttttttatattgtttatttgtaattatatatttattttttttttttgagatagagtttcgttttgtcgtttaggttggagtgtaatggcgtaatttcggtttattgtaattttcgtttttcgagtttaagcgatttttttgttttagttttttgagtagttgggattataggtgtttattattatggttggttaatttttgtatttttagtagagacggggttttattatattggttaggttggtttcgaatttttgattttgtgatttattcgttttggttttttaaagtgttgggattataggcgtgagcgtatttattttttaattatttgaatttttttttagaaaggaaattttttggggaaggattattattattttttttattattgtttatttagtgtttagatatagtttcgtatagagaagatattagaaaagattgtcggtttgtataaaggtatttgagtaggagagagatagaattaaagtagtgttttagggtttggtgtagtggtttacgtttgtaattttagtgttttgggaggttgaggcgggaggatcgtttgagtttaggagttggaagttgtagtgagttgtgagcgtgttattgtattttagtttgggtgatagagtaagattttgtttttaaaagaaaaaaaaaacgaaaaataaaaaagttgtgttttaggatggtatttgggtaaagaggttaaatatttttttttttaagagtttgggatattttttttttttttttttgttttttaattagtggttttttgttttttataggagtttagggtacggagtgtttgggtttggaatgcggatatgtgtgggagggatgcgaaattgtgttggtagttttaagaaaagaattagtttttgtttttatttttatatgtatttgtcgttttaaatttttgataaatattgtgttatttattttttaaatttttttgcggatttagtttgggcgggcgggagtatagtgagttatattttttgtattttcgttttttgatagtttttggtattatagtcgttgagttgggatgtttaaatattttaattgatttattcgtgggtgagtaaggtcgatacgaggggacgggtggaggttgttggggttttgtttttgtcgaagtttttaatttagagaagaaagtggggcgggtgggggaattgtcgggatatgggttattttttttgaatgatgttcgggtgttatttgaggtgttaggaagtggtggtagttgtagtatagtggttttggtggaagtttgggtttagattttatatatttagatttgagttttggttttatggttagaattttgtaattttattaaaattttttgagattggtcgggtagagtggtttatgtttgtaattttagtattgtaggaggattatttgagtttaggagtttgagattagtttgggtaatatagtgagattttatttttttaaaaaggaaaaatattagttggggatggtggtatgtatttgtagttttagtttttggtaggttgaggcgagaggattgtttgagtttaggagtttgaggttatagtgagttatggtcgtattattgtattttaatttggaaaataaagttagattttatttttgaaaataaaataaaataaataaataaaataaaaaataaaataggttaggcgcggtggtttatgtttgtaattttagtattttgggaggttgaggtaggtggattacgaggttaggagttggagattagtttggttaatatggtgaaattttatttttaatataaaattagttgggtgtggtggtaggtgtttgtagttttagttatttaggaggttgaggtaagggaattttttgaatttaggaggtagaggttgtagtgagttgagatcgtgttattgtattttagtttgggtgatagagtaagattttattttaaaaaataaaataaaataaaaaattttttgggtttcggtgtttttatttgtaaatggaggcggggggtgagaataatggtttttgtgtagtgtagtggttagaatgaagtaagaaaatgtgaatattgagtacgcgagagttgtttagtaatgatttgtgttaggttgttatttttttgatgtaatgatttgagatttattttcgggtgggtaggcgagtgtgttattattttttgtttcgttttataggataaaggttgtaaaagtatttggtgggaatgtttttgttttgttttgggatttcgggtaggatttttttattaggttggagtggggtagcgttgagtttttcgtgtatatttagtgattttatttagg

SEQ ID NO: 1402 - DNA, 2340 bp, Artificial Sequence
  chemically treated genomic DNA (Homo sapiens)
gttttattaagttttttagaggggaaaaattttaggttgggaggggaggtgatttgtttagagttatatagtttttggagggtagaggggaggttaatatttgtttttgtgattttgatattgaagtaaaaatgggtgattttaataatttaatagtgtttaggtttgattttgtttttataaatatagagatttaagtttttatttttgtagttatatttataattttatagtgtggtttttgaattttatgattgtaaagttggtattatgttataggtattattttgtaatgcgatttttttatttttttgttttagttatgttttttattagggatatagtatagtttgttttttttttattagtttagaggtttgaatagagggatagaggtgagggttagagacgtgaagttttatgatttgtttgtttagttttttgatacgggattttggtaagttattttttttttagggttttagtttttttatagggtttggtataagtaggtgtttagatttagggtgagtgagataatttttgagttttttgtgttttaaaagaaatttgttgtttttattgggttttagtagtagtattttggggttagtttgggtgtggttcggttataaggatatgtcgggttttaggttatttttttttttttattttttttgatttttttaaattttttaaagagatgggtatttttaatatttattttttttttggggttagttggtcgtgtttgagggtgttagaattagagttgagttcggggagttttgtgaatttatttaagttgttttttttatttttttttatagtttattcgtttagtaggagggagggagtaattagatttaagtttgggtgtaaatttcggttttgttattgtttttttgtttgatttgaattagttatttaatttttttgagtttatttataaaagttgaatgattttttttttatagagttattgtaagaataaggatatgggggtagattatattatttttaatttattaagggatttttttttgatagagattgagtaagatttaattgttttgagttgtgtggattttacgtttagttgtgtatttgtgtaataattagatacgtttttcggttttttagatatattttggaattcgaaagggaaagtgaaagttataattttttagtagtttatgattaagtatagtaaatacgttgttttttagtattatttgtagtttaggtttagtttttttgttgttgtatttagaggagtagtcgtagattagatattcgggttttttttatttaatttatttgttttatatttttaggatttaaggtttgttgtgttagttgtttatgttttaggtagttagaattagagttgagtttggggagttttttgaatttatttgagtcgtttgttttttaattttcgtttcgatttttgtagtttaagggtatagtaggtgggggagagaagttagatttaagttttagtgtaattttaggttttgtttttgttttattgtttgatttgaattagttatttaatttttttgagtttaagaaagatttgttattgattgatcgtggggttttttagattatttttcgttttttcgtttttttatattttttagatgtttgttttatttttatatatgttattagtattagtatagttttttatatatgttgggtggatgtttattgtatatttattgtaatgtttttgaggttatgttttttgttatgtttttgatatagagttttgttttgtagtttaggttggagagtagtggtataattatagttattttaagtggtataattaagttatttttttattttagttttcgagtagttgggattataggtgtttgttattatatttagttaattttttgtaattttagtagagatggggttttattattttggttaggttggttttgaatttttgattttaagtgatttatttgttttggttttttaaagtgttgggattataggtgtgagttacggcgtttagtttattgtattttttttgtgattttgtgtttttatagtttagtttttattaataaatgagaatatataatatttggttttttatttttgagttattttatttagaataatggtgtttaattttatttagattgttacggatgttattattttttttttttttatagttgagtaatattttatggtatatatatatataggggtgtgtgtgtgtgtgtgtgtgtgtgtatatatatatatattttttttatttatttgttggttgatgagtatttaggttggttttatattttttcggtt

SEQ ID NO: 1403 - DNA, 2340 bp, Artificial Sequence
  chemically treated genomic DNA (Homo sapiens)
aatcgaaaaaatatggaattaatttaaatgtttattagttaataagtggatgaagaaaatgtgtgtgtatatatatatatatatatatatatatatatttttatatatgtatatgttatggaatattatttagttgtaaaaaggaagggaataatggtattcgtaataatttggatgaagttggatattattattttgagtgaagtaatttaggaatggaaaattaaatattgtatgtttttatttattagtaggagttaagttatgaagatataaagttataagaaggatataatgggttgggcgtcgtggtttatatttgtaattttagtattttgggaggttaaggtaggtggattatttgaggttaggagtttaagattagtttggttaagatggtgaaattttatttttattaaaattataaaaaattagttgggtgtagtggtaggtatttgtaattttagttattcggaagttgagatgggaggatggtttgattgtgttatttgaagtagttatgattgtgttattgttttttagtttgggttatagagtaagattttatattaaaaatataatagaaaatataattttagaagtattataataaatatgtaataagtatttatttagtatgtgtgggggattgtgttgatgttgatggtatgtgtgggagtaaggtaggtatttgaggaatgtgggggaacggaaggacggggagtaatttggagagttttacggttagttagtggtaggttttttttgagtttagaaaggttaggtaattagtttagattagatagtaaaataggggtagagtttggaattgtattgaggtttgagtttgattttttttttttatttgttgtgtttttaaattgtagagatcggggcgggggttggggggtaagcggtttagatgggtttaaaaaattttttaggtttaattttggttttgattgtttgagatatgggtagttgatatagtagattttgaattttgaggatgtgaggtaggtgggttggatgagagggattcggatgtttggtttgcggttgtttttttaagtgtagtagtaaggaggttgggtttggattgtaggtggtgttggggagtagcgtgtttattgtgtttggttatgagttgttgggaagttgtgatttttattttttttttcgaattttagggtatatttgggaggtcggaggacgtgtttggttattatatagatgtatagttggacgtgggatttatatagtttagaatagttggattttgtttagtttttgttagaggaagattttttggtaagttggggatagtgtgatttatttttatgtttttatttttgtaatagttttataagggaaggattatttagtttttgtagataagtttagagaggttaggtagttggtttagattagataggaaagtagtggtagagtcgggatttgtatttaggtttgagtttgattgtttttttttttttgttgggcgggtaaattgtagagagaggtggggaaaatagtttagatgggtttataaagtttttcgggtttagttttggttttgatatttttagatacggttagttgattttagaagaaaggtaggtgttgggggtgtttatttttttgggaaatttgaaggaattaaagaaggtggaggaggggaggtgatttggagttcggtatgtttttgtggtcgggttatatttaggttggttttagggtgttgttgttgaagtttaatgggaataatagattttttttgagatataaggaatttagaggttgttttatttattttgagtttgagtatttatttgtgttaggttttgtggggaaattgaggttttgggaggggaatgatttgttagggtttcgtgttaggaggttgagtaggtagattataggattttacgtttttggtttttatttttgtttttttgtttagatttttgagttgatagagaagaaataggttgtgttgtgtttttaatgggaaatatggttgagataggggagtgagaaggtcgtattgtagaatggtatttgtggtatgatgttagttttgtaattatgagatttaaaagttatattgtggaattgtgagtataattataggagtgagagtttaggtttttgtgtttgtagaagtagaattaaatttggatattgttggattattaaaattatttatttttgttttaatattagagttataagggtagatgttggttttttttttgttttttaagagttgtgtgattttgggtaagttatttttttttttagtttaagattttttttttttaaaaaatttgatagagt

SEQ ID NO: 1404 - DNA, 2495 bp, Artificial Sequence
  chemically treated genomic DNA (Homo sapiens)
ggttttatgattagttttgttttatatgggaggaaatcgaggtttagaaaagtgatttggttagtttttttgtttttgtttaatggtttagtgaggatttgttgattgtgagaatgattttagtttagagtatgtttttaggttgtggtgaggttttggtttagggtaggttcggaagtagtttgtttttagattgatatgatgttagtttttaggtggtaggagtataatggtattttttagaaaggagggaggtatttagttcgggtttttgagtttttttttgtttgtttgtttaaatagagataagttttgttttgttgtttaggttggagtttggagtgtagtggaatgattatggtttattgtagtttttattttttgggttaaagtgatttttttattttagttttttgagtagttgggattataggtatatattattacgtttggttaattttttaattatttttggtagagatagggtttcgttatgttgttcgggttggttttgaatttttggttttaagtgattgttttattttggttttttaaagcgttaggatgatagattattttttttgtttagttggtttttttgtttttagtttgtgttaggtatggttttttttttatcgttgggttgtttttcggtttttaggagtttttttttcgttgtttattggattatcgtttgttttggagttttttttgggttttaggttttagtttttgcgttggagttggtggtttttttagagtttgtggtgaaggttgtgttttagggtaggttagggaggggatttatggggatagatcgttgaagcgataagtatttataatgtagggattattgttgggtttttagataagttttagaggattagtttttggtagtggttatattgttacgtgttttagagtttattttgggagattttttttttggagaattttaggaagtttttagagtttttgttcgttagtttttgagaggtttagagggggtagagatttatttgaggttattgagttgttttgaatttttttttgtattatcgggtttaaagatttatttttttatgtcgtttggaattgttggtttagtttggaggcgtagcgtagggataggttgttttcgtttggtaggagtttttttttacggttcgtaggtttggtagttgggatagggttgaatgggaggtattgtcggtagattaggtaagttaggtttttttaggttgaggtgaagaaggggcgggcggcgggcgggagtagcggttggagttatagggttttttgtttgttttagtcgaggattgaggtttcggtttgaatttttgggttagttcgatagggagggggtattagtagttggttcgggagttagtagttttgggtttttttttgttatgtgggttgtttttttagaggttgttttttagtttttgaaaaatatattttattaataagtagttttgaggttatagtgggggtttaggttcgtatttggtatatagtgggtgttttagaataggtgatttttttttttcgtttgtgtttatatattgatataaatagtttaatattggatatataggattttagatatttattttttttatttaattttagattattgggagttatttaaattgattttttcgaattttattattttgtggtatatagtattttattgtgtaaatgtattatattgatttagttatttattttggatattggttatttttaattttttgttatttataaataatattgtaaagaatatttaaatacgtatttttttaagttcgtgtttgttttttaaataatatatttagattatggttaatgtttatgtattttgattttttagatttttgtttttgatggaattgtattttttattgtttgtttttttaattggaaataggggttaggtatagtggtttatgtttgtaattttagtattttgggaggttgaggtgggaggattatttgagtttaggagtttgagattagtttgggtaatatagattttgttttaagagaaaaaaaaaaggtcgggcgcggtggtttacgtttgtaattttagtattttgggaggcggaggcgggtggattacgaggtcgagattaagattattttggttaatatagtgaaattttatttttattaaaagtataaaaaattagtcgggtgtggtggtaggcgtttgtagttttagttatttgggaggttgaggtaggtaaatggtatgaacgcgagagtcgagatggcgttattgtattttagtttgggtaatagagtgaaattgttttaaaaaagaaaaaaaatatatatatatatatatatatatatatatatatatatatatatatatatatatatatgtatgtgtgtgtgtatatatttatgtgtgtatatatttatatataataaaaatataaatgtatatgtttatatatatttatatatgttaaataatgaat

SEQ ID NO: 1405 - DNA, 2495 bp, Artificial Sequence
  chemically treated genomic DNA (Homo sapiens)
gtttattgtttaatatatataaatatatataaatatatatatttatatttttattatatataaatatatatatatataagtgtatatatatatatatatatatatatatatatatatatatatatatatatatatatatatatatatatgtatatatttttttttttttttgagatagttttattttgttgtttaggttagagtgtagtggcgttatttcggttttcgcgtttatgttatttgtttgttttagttttttaagtagttgggattataggcgtttgttattatattcggttaattttttgtatttttagtagagatagggttttattgtgttagttaggatggttttgatttcgatttcgtgatttattcgttttcgttttttaaagtgttgggattataggcgtgagttatcgcgttcggtttttttttttttttttgagatagagtttgtgttgtttaggttggttttaaatttttgggtttaagtgatttttttattttagttttttaaagtgttgggattataggtatgagttattgtgtttgatttttgtttttaattaaaggaataaatagtagaagatgtaattttattagaagtaggaatttgaaaaattaagatatatgaatattggttatggtttggatgtattatttaaaaaataaatacgagtttgggaagatgcgtatttggatattttttgtaatattgtttgtaaatagtaaaaaattggaggtagttaatgtttaagatgaatggttaagttaatgtgatatatttatataatggaatattatatattatagaataatgagattcggaagagttaatttggataatttttagtaatttgaggttaagtgaaaaaaatgagtgtttagaattttgtgtgtttagtattaaattatttatgttaatgtgtaagtataaacggaaggaaagggttatttgttttgaagtatttattgtgtgttaggtgcgggtttgaatttttattgtgattttagagttatttattaatgggatgtgttttttagagattaggaagtagtttttgggagggtagtttatatggtaggagggagtttaggattgttgattttcgggttagttgttggtgttttttttttgtcgggttggtttaaggatttaggtcggggttttagttttcggttggggtaggtaggaggttttgtaattttagtcgttgttttcgttcgtcgttcgttttttttttattttagtttggggaagtttggtttgtttggtttgtcgataatgttttttatttagttttgttttagttgttaggtttgcgggtcgtggaggggggtttttgttaggcggggatagtttgtttttgcgttgcgtttttaggttggattagtagttttaggcggtatggaggggtgagtttttgggttcgatggtgtaaggggggatttagagtagtttagtggttttaggtaagtttttgttttttttgggttttttagaggttggcgggtaggggttttggggattttttggggttttttaggaagggggttttttaaggtgggttttgagatacgtggtaatgtggttattgttaggaattggttttttggggtttgtttgagagtttagtagtggtttttgtattatgaatgtttgtcgttttagcgatttgtttttatgggttttttttttggtttgttttgaggtatagtttttattataggttttggagaagttattaattttaacgtaggggttggagtttgggatttaaaggagattttaaaatagacgatagtttagtgagtagcgagggggaggtttttgggggtcggggaatagtttagcgatgggggagaggttatgtttgatataggttgagaatagaggggttagttgggtaggggaggtgatttattattttagcgttttgggaggttaaggtgggataattatttgaggttaggagtttaagattagttcgggtaatatagcgagattttgtttttattagaagtaattaaaaaattagttaggcgtggtggtgtgtgtttgtagttttagttatttaagaggttgaggtgagaggattattttagtttaggaggtgaaggttgtagtaagttatagttattttattgtattttagattttagtttgggtaatagagtaaggtttgtttttatttaaataaataaataaaaaaagatttaaggattcggattggatgttttttttttttttggggggtattattatgtttttgttatttgggagttggtattatattagtttgaggataggttgttttcgagtttattttggattagagttttattatagtttgagaatatgttttgaattggagttatttttatagttagtaagtttttattgagttattgggtagaggtaaagggattaattaggttatttttttgagtttcggtttttttttatgtaaaataggattaattataggatt

SEQ ID NO: 1406 - DNA, 2492 bp, Artificial Sequence
  chemically treated genomic DNA (Homo sapiens)
taaaaattttttagagtttttttttttgggtttaggaaagtgttaattattttgagtttttttgttttttattttttacgtagtggaggttttatgattagttttgttttatatgggaggaaatcgaggtttagaaaagtgatttggttagtttttttgtttttgtttaatggtttagtgaggatttgttgattgtgagaatgattttagtttagagtatgtttttaggttgtggtgaggttttggtttagggtaggttcggaagtagtttgtttttagattgatatgatgttagtttttaggtggtaggagtataatggtattttttagaaaggagggaggtatttagttcgggtttttgagtttttttttgtttgtttgtttaaatagagataagttttgttttgttgtttaggttggagtttggagtgtagtggaatgattatggtttattgtagtttttattttttgggttaaagtgatttttttattttagttttttgagtagttgggattataggtatatattattacgtttggttaattttttaattatttttggtagagatagggtttcgttatgttgttcgggttggttttgaatttttggttttaagtgattgttttattttggttttttaaagcgttaggatgatagattattttttttgtttagttggtttttttgtttttagtttgtgttaggtatggttttttttttatcgttgggttgtttttcggtttttaggagtttttttttcgttgtttattggattatcgtttgttttggagttttttttgggttttaggttttagtttttgcgttggagttggtggtttttttagagtttgtggtgaaggttgtgttttagggtaggttagggaggggatttatggggatagatcgttgaagcgataagtatttataatgtagggattattgttgggtttttagataagttttagaggattagtttttggtagtggttatattgttacgtgttttagagtttattttgggagattttttttttggagaattttaggaagtttttagagtttttgttcgttagtttttgagaggtttagagggggtagagatttatttgaggttattgagttgttttgaatttttttttgtattatcgggtttaaagatttatttttttatgtcgtttggaattgttggtttagtttggaggcgtagcgtagggataggttgttttcgtttggtaggagtttttttttacggttcgtaggtttggtagttgggatagggttgaatgggaggtattgtcggtagattaggtaagttaggtttttttaggttgaggtgaagaaggggcgggcggcgggcgggagtagcggttggagttatagggttttttgtttgttttagtcgaggattgaggtttcggtttgaatttttgggttagttcgatagggagggggtattagtagttggttcgggagttagtagttttgggtttttttttgttatgtgggttgtttttttagaggttgttttttagtttttgaaaaatatattttattaataagtagttttgaggttatagtgggggtttaggttcgtatttggtatatagtgggtgttttagaataggtgatttttttttttcgtttgtgtttatatattgatataaatagtttaatattggatatataggattttagatatttattttttttatttaattttagattattgggagttatttaaattgattttttcgaattttattattttgtggtatatagtattttattgtgtaaatgtattatattgatttagttatttattttggatattggttatttttaattttttgttatttataaataatattgtaaagaatatttaaatacgtatttttttaagttcgtgtttgttttttaaataatatatttagattatggttaatgtttatgtattttgattttttagatttttgtttttgatggaattgtattttttattgtttgtttttttaattggaaataggggttaggtatagtggtttatgtttgtaattttagtattttgggaggttgaggtgggaggattatttgagtttaggagtttgagattagtttgggtaatatagattttgttttaagagaaaaaaaaaaggtcgggcgcggtggtttacgtttgtaattttagtattttgggaggcggaggcgggtggattacgaggtcgagattaagattattttggttaatatagtgaaattttatttttattaaaagtataaaaaattagtcgggtgtggtggtaggcgtttgtagttttagttatttgggaggttgaggtaggtaaatggtatgaacgcgagagtcgagatggcgttattgtattttagtttgggtaatagagtgaaattgttttaaaaaagaaaaaaaatatatatatatatatatatatatatatatatatatatatatatatatatatatatatgtatgtgtg

SEQ ID NO: 1407 - DNA, 2492 bp, Artificial Sequence
  chemically treated genomic DNA (Homo sapiens)
tatatatatatatatatatatatatatatatatatatatatatatatatatatatatatgtatatatttttttttttttttgagatagttttattttgttgtttaggttagagtgtagtggcgttatttcggttttcgcgtttatgttatttgtttgttttagttttttaagtagttgggattataggcgtttgttattatattcggttaattttttgtatttttagtagagatagggttttattgtgttagttaggatggttttgatttcgatttcgtgatttattcgttttcgttttttaaagtgttgggattataggcgtgagttatcgcgttcggtttttttttttttttttgagatagagtttgtgttgtttaggttggttttaaatttttgggtttaagtgatttttttattttagttttttaaagtgttgggattataggtatgagttattgtgtttgatttttgtttttaattaaaggaataaatagtagaagatgtaattttattagaagtaggaatttgaaaaattaagatatatgaatattggttatggtttggatgtattatttaaaaaataaatacgagtttgggaagatgcgtatttggatattttttgtaatattgtttgtaaatagtaaaaaattggaggtagttaatgtttaagatgaatggttaagttaatgtgatatatttatataatggaatattatatattatagaataatgagattcggaagagttaatttggataatttttagtaatttgaggttaagtgaaaaaaatgagtgtttagaattttgtgtgtttagtattaaattatttatgttaatgtgtaagtataaacggaaggaaagggttatttgttttgaagtatttattgtgtgttaggtgcgggtttgaatttttattgtgattttagagttatttattaatgggatgtgttttttagagattaggaagtagtttttgggagggtagtttatatggtaggagggagtttaggattgttgattttcgggttagttgttggtgttttttttttgtcgggttggtttaaggatttaggtcggggttttagttttcggttggggtaggtaggaggttttgtaattttagtcgttgttttcgttcgtcgttcgttttttttttattttagtttggggaagtttggtttgtttggtttgtcgataatgttttttatttagttttgttttagttgttaggtttgcgggtcgtggaggggggtttttgttaggcggggatagtttgtttttgcgttgcgtttttaggttggattagtagttttaggcggtatggaggggtgagtttttgggttcgatggtgtaaggggggatttagagtagtttagtggttttaggtaagtttttgttttttttgggttttttagaggttggcgggtaggggttttggggattttttggggttttttaggaagggggttttttaaggtgggttttgagatacgtggtaatgtggttattgttaggaattggttttttggggtttgtttgagagtttagtagtggtttttgtattatgaatgtttgtcgttttagcgatttgtttttatgggttttttttttggtttgttttgaggtatagtttttattataggttttggagaagttattaattttaacgtaggggttggagtttgggatttaaaggagattttaaaatagacgatagtttagtgagtagcgagggggaggtttttgggggtcggggaatagtttagcgatgggggagaggttatgtttgatataggttgagaatagaggggttagttgggtaggggaggtgatttattattttagcgttttgggaggttaaggtgggataattatttgaggttaggagtttaagattagttcgggtaatatagcgagattttgtttttattagaagtaattaaaaaattagttaggcgtggtggtgtgtgtttgtagttttagttatttaagaggttgaggtgagaggattattttagtttaggaggtgaaggttgtagtaagttatagttattttattgtattttagattttagtttgggtaatagagtaaggtttgtttttatttaaataaataaataaaaaaagatttaaggattcggattggatgttttttttttttttggggggtattattatgtttttgttatttgggagttggtattatattagtttgaggataggttgttttcgagtttattttggattagagttttattatagtttgagaatatgttttgaattggagttatttttatagttagtaagtttttattgagttattgggtagaggtaaagggattaattaggttatttttttgagtttcggtttttttttatgtaaaataggattaattataggatttttattgcgtggggggtggggggtagggaggtttagggtgattggtatttttttgggtttaaaggaggaggttttgaggggtttttg

SEQ ID NO: 1408 - DNA, 2354 bp, Artificial Sequence
  chemically treated genomic DNA (Homo sapiens)
aatatttatatttgttaggagttgtagttattgattggtagcgttttatttatttattgaatattggttgagtatttgtaatgtgttaggtacgttgttagttaaggaggtagttattaaatatatagataaataaataaatgtgagatgataatagttatgagtgttttgtagtagacgtgtagggatttgtgagagaatgtagtagggagggttttaatttagggtgtgtggttagggaaggtttcgttaaagatgtagtttttaagttgagatgtaaaggaggtagtgaagagttttttttagtagagggaatattatgagtataggttttggggcggacgttttagaatattttagaaacggaaaggaggttagtgagaaaaagggagtttaggagtagaggttggggaaggttgtagggttttaggggtattggaggtaggtagggtaaggattttggattttattttgagtatagggtgatggggtaggagagtttaagtagggagggtgaaatttattttgattggtagttttgtgaaagaggattggttgggtatggagatttaaggatgaggaaaggatattttagagtgttagggcgcgtaaattaaattttatattttaggaagatagaggttagaggaattaggagggttttttggaggaggtggtatttattttgggtttaagagattataggaaaatggaggttagtattttaggtttggggaagagtttgggtaaaggtttggtagtaagagaataaaggtggggtttgatgggttagaggataagtgattttttaaggttataagatattttgatggttgggattttatttttgatggagtaaggtttttgatatttaattgaggtttggcgttaaggattgatattaaggaagtggatttttgtaaatttggtattcgagggtttatttttttaatttttgtgtagttgggaggtgaggtaagaggaagtgtgggttataggttaggtttagagagtttggaggaggagtttttgttagattggagagaagtaggtttgagtttttttaaaggtagtttttggggatttttaggattataggttgagacgagacgtagggtggttggaggaagtgagaggtgaatttagtttgggattggttgggcgagattttttatttgttttttgggattatcgtttattatggttgtggtttagtagttgcgggtcgagaggtgagtgtcggggtgtggtcgttttcgggtttttttattgttttttataggttttagggataaaggttagtttttttgtagtttttgattaatatgagaggttggggttgagttagaatttaaatatttagaaatgtaattttttagaattgttttaacgaaattttgagttgtggtttattatttttagatataaatgagaatattgaggttttaagagtgggagtgatttgtttacggttatataacgagtgatcggtagtgtttggagaggaatgtaggtgttttgggttttaggttggggttttttgttttatatggtgattagtaatgattttttattttttgcgtaaatagaatttatagaatttggtttgttttttcgttaattagggtttgttttaaatgttattttttttaagaagtttttttgatagtttttattttattgttgtttgattttttgttttattttttttttttgtttggtttttatattataggaataatattatatgtttatttattatttttttttgaacgttggtttttttatgagaagtaagttttacgaggttgtgttcgttttgatcgttgttgtattattaggaggtagtttatttttattgagtattaggattaagggtttaataaatgttgttgaatgaatgaataaatgaatgaatgaatgggtggatttttgagacggaaaaggttttagatttttttagtttaattttgttattgtatagattggaaatttgaggtttagggaggataagagatttatttagggttatagagagtgattggtaaggttggggtttggagtacggttttattagtatttagtttcgtcgtttgggaagtatttttagaatttttttttagtagttaggtttgagttttaagttgcgggggttttgaggacgtaaagtttggtttttgtattttttggattggaatagtaggtgatttttgttatttacgtggaggttatttagggggttattagagataggttaggttggtgtgtgtttacgcggggaatagaaggtttatgttggggtttggggttggaagtagaatttgaagcgtgggttggggtaagggtagtagaag

SEQ ID NO: 1409 - DNA, 2354 bp, Artificial Sequence
  chemically treated genomic DNA (Homo sapiens)
tttttgttgtttttgttttaatttacgttttaggttttatttttagttttaggttttaatatgggttttttgtttttcgcgtaggtatatattagtttggtttgtttttggtgattttttgagtggtttttacgtaggtaatagaggttatttgttgttttaatttagggggtgtaggggttaggttttgcgtttttagggttttcgtagtttagagtttagatttggttattgaggaaaaattttgaaaatgttttttaagcgacgaggttagatgttggtgaggtcgtgttttaagttttaattttgttagttattttttgtgattttgagtaagttttttattttttttgggttttagatttttaatttgtataatggtaaggttggattagaagaatttaagatttttttcgttttaaagatttatttatttatttatttatttatttatttatttagtaatatttattgagtttttggttttggtgtttaatagggatgagttattttttagtgatatagtagcgattaaaacggatatagtttcgtggagtttgttttttatgggggagttaacgtttaagaaaaaataataaatgagtatataatattatttttgtaatataagaattaggtagaaaagggaaatagggtaaagggttagatagtaatgaggtaggggttgttaggaaggttttttggaggaggtgatatttgaggtaagttttgattagcggaagaataagttagattttgtgaattttgtttgcgtagaagatggaaagttattgttgattattatgtgaagtaaagggttttagtttgggatttaggatatttgtatttttttttagatattgtcggttattcgttgtgtgatcgtgggtaagttatttttatttttggagttttagtgtttttatttgtgtttgagggtggtgagttatagtttaaagtttcgttaaagtagttttgagaggttgtatttttgagtatttgggttttgatttaattttagttttttatgttgattagggattgtagaaggattggtttttgtttttaaggtttatgaggagtagtgagaaggttcgggggcggttatatttcggtatttatttttcggttcgtagttgttgggttatagttatggtgggcgatggttttagggagtaggtggagagtttcgtttagttagttttaggttgagtttattttttattttttttagttattttgcgtttcgttttagtttgtggttttgggagtttttaggagttgtttttggggaggtttaggtttgtttttttttagtttggtagaggttttttttttaggttttttgggtttagtttgtggtttatatttttttttattttattttttagttgtatagaaattgaggaagtggattttcgggtgttaggtttgtaggaatttatttttttgatgttagtttttggcgttaagttttagttgggtattagaagttttgttttattagagatggggttttagttattagggtgttttgtgattttgaggagttatttattttttggtttattaagttttatttttatttttttattgttaagtttttgtttaaatttttttttaggtttagaatgttggtttttatttttttgtgattttttaggtttagagtaaatgttattttttttaggaagtttttttggtttttttggtttttgtttttttagagtgtgaagtttggtttgcgcgttttggtattttgggatattttttttttatttttagatttttatgtttagttaatttttttttatagggttgttaattagagtgagttttattttttttgtttaaatttttttgttttattattttgtgtttaggataaagtttagagtttttgttttgtttgtttttaatgtttttgaggttttgtagttttttttagtttttgtttttgagtttttttttttttattggtttttttttcgtttttagaatgttttaagacgttcgttttaaggtttatgtttatggtgttttttttgttggaaaaagttttttattgttttttttgtattttagtttagaagttatatttttagcgaggttttttttgattatatattttaaattaaggttttttttattatatttttttataggtttttgtacgtttattgtagagtatttataattattgttattttatatttgtttgtttatttgtatgtttaatgattgtttttttggttagtagcgtgtttggtatattgtaagtgtttaattaatatttagtgaatgaatgaaacgttgttagttagtgattgtagtttttaataggtatgggtatt

SEQ ID NO: 1410 - DNA, 2282 bp, Artificial Sequence
  chemically treated genomic DNA (Homo sapiens)
tgtagttattgattggtagcgttttatttatttattgaatattggttgagtatttgtaatgtgttaggtacgttgttagttaaggaggtagttattaaatatatagataaataaataaatgtgagatgataatagttatgagtgttttgtagtagacgtgtagggatttgtgagagaatgtagtagggagggttttaatttagggtgtgtggttagggaaggtttcgttaaagatgtagtttttaagttgagatgtaaaggaggtagtgaagagttttttttagtagagggaatattatgagtataggttttggggcggacgttttagaatattttagaaacggaaaggaggttagtgagaaaaagggagtttaggagtagaggttggggaaggttgtagggttttaggggtattggaggtaggtagggtaaggattttggattttattttgagtatagggtgatggggtaggagagtttaagtagggagggtgaaatttattttgattggtagttttgtgaaagaggattggttgggtatggagatttaaggatgaggaaaggatattttagagtgttagggcgcgtaaattaaattttatattttaggaagatagaggttagaggaattaggagggttttttggaggaggtggtatttattttgggtttaagagattataggaaaatggaggttagtattttaggtttggggaagagtttgggtaaaggtttggtagtaagagaataaaggtggggtttgatgggttagaggataagtgattttttaaggttataagatattttgatggttgggattttatttttgatggagtaaggtttttgatatttaattgaggtttggcgttaaggattgatattaaggaagtggatttttgtaaatttggtattcgagggtttatttttttaatttttgtgtagttgggaggtgaggtaagaggaagtgtgggttataggttaggtttagagagtttggaggaggagtttttgttagattggagagaagtaggtttgagtttttttaaaggtagtttttggggatttttaggattataggttgagacgagacgtagggtggttggaggaagtgagaggtgaatttagtttgggattggttgggcgagattttttatttgttttttgggattatcgtttattatggttgtggtttagtagttgcgggtcgagaggtgagtgtcggggtgtggtcgttttcgggtttttttattgttttttataggttttagggataaaggttagtttttttgtagtttttgattaatatgagaggttggggttgagttagaatttaaatatttagaaatgtaattttttagaattgttttaacgaaattttgagttgtggtttattatttttagatataaatgagaatattgaggttttaagagtgggagtgatttgtttacggttatataacgagtgatcggtagtgtttggagaggaatgtaggtgttttgggttttaggttggggttttttgttttatatggtgattagtaatgattttttattttttgcgtaaatagaatttatagaatttggtttgttttttcgttaattagggtttgttttaaatgttattttttttaagaagtttttttgatagtttttattttattgttgtttgattttttgttttattttttttttttgtttggtttttatattataggaataatattatatgtttatttattatttttttttgaacgttggtttttttatgagaagtaagttttacgaggttgtgttcgttttgatcgttgttgtattattaggaggtagtttatttttattgagtattaggattaagggtttaataaatgttgttgaatgaatgaataaatgaatgaatgaatgggtggatttttgagacggaaaaggttttagatttttttagtttaattttgttattgtatagattggaaatttgaggtttagggaggataagagatttatttagggttatagagagtgattggtaaggttggggtttggagtacggttttattagtatttagtttcgtcgtttgggaagtatttttagaatttttttttagtagttaggtttgagttttaagttgcgggggttttgaggacgtaaagtttggtttttgtattttttggattggaatagtaggtgatttttgttatttacgtggaggttatttagggggttattagagataggttaggttggtgtgtgtttacgcggggaatagaaggtttatgttggggttt

SEQ ID NO: 1411 - DNA, 2282 bp, Artificial Sequence
  chemically treated genomic DNA (Homo sapiens)
aggttttaatatgggttttttgtttttcgcgtaggtatatattagtttggtttgtttttggtgattttttgagtggtttttacgtaggtaatagaggttatttgttgttttaatttagggggtgtaggggttaggttttgcgtttttagggttttcgtagtttagagtttagatttggttattgaggaaaaattttgaaaatgttttttaagcgacgaggttagatgttggtgaggtcgtgttttaagttttaattttgttagttattttttgtgattttgagtaagttttttattttttttgggttttagatttttaatttgtataatggtaaggttggattagaagaatttaagatttttttcgttttaaagatttatttatttatttatttatttatttatttatttagtaatatttattgagtttttggttttggtgtttaatagggatgagttattttttagtgatatagtagcgattaaaacggatatagtttcgtggagtttgttttttatgggggagttaacgtttaagaaaaaataataaatgagtatataatattatttttgtaatataagaattaggtagaaaagggaaatagggtaaagggttagatagtaatgaggtaggggttgttaggaaggttttttggaggaggtgatatttgaggtaagttttgattagcggaagaataagttagattttgtgaattttgtttgcgtagaagatggaaagttattgttgattattatgtgaagtaaagggttttagtttgggatttaggatatttgtatttttttttagatattgtcggttattcgttgtgtgatcgtgggtaagttatttttatttttggagttttagtgtttttatttgtgtttgagggtggtgagttatagtttaaagtttcgttaaagtagttttgagaggttgtatttttgagtatttgggttttgatttaattttagttttttatgttgattagggattgtagaaggattggtttttgtttttaaggtttatgaggagtagtgagaaggttcgggggcggttatatttcggtatttatttttcggttcgtagttgttgggttatagttatggtgggcgatggttttagggagtaggtggagagtttcgtttagttagttttaggttgagtttattttttattttttttagttattttgcgtttcgttttagtttgtggttttgggagtttttaggagttgtttttggggaggtttaggtttgtttttttttagtttggtagaggttttttttttaggttttttgggtttagtttgtggtttatatttttttttattttattttttagttgtatagaaattgaggaagtggattttcgggtgttaggtttgtaggaatttatttttttgatgttagtttttggcgttaagttttagttgggtattagaagttttgttttattagagatggggttttagttattagggtgttttgtgattttgaggagttatttattttttggtttattaagttttatttttatttttttattgttaagtttttgtttaaatttttttttaggtttagaatgttggtttttatttttttgtgattttttaggtttagagtaaatgttattttttttaggaagtttttttggtttttttggtttttgtttttttagagtgtgaagtttggtttgcgcgttttggtattttgggatattttttttttatttttagatttttatgtttagttaatttttttttatagggttgttaattagagtgagttttattttttttgtttaaatttttttgttttattattttgtgtttaggataaagtttagagtttttgttttgtttgtttttaatgtttttgaggttttgtagttttttttagtttttgtttttgagtttttttttttttattggtttttttttcgtttttagaatgttttaagacgttcgttttaaggtttatgtttatggtgttttttttgttggaaaaagttttttattgttttttttgtattttagtttagaagttatatttttagcgaggttttttttgattatatattttaaattaaggttttttttattatatttttttataggtttttgtacgtttattgtagagtatttataattattgttattttatatttgtttgtttatttgtatgtttaatgattgtttttttggttagtagcgtgtttggtatattgtaagtgtttaattaatatttagtgaatgaatgaaacgttgttagttagtgattgta

SEQ ID NO: 1412 - DNA, 2398 bp, Artificial Sequence
  chemically treated genomic DNA (Homo sapiens)
tagagattaaacggaggcgtgttaagtatagtgtcgggtatggagggggagtttaggagagttgttacgtgagttggggaagttaacgatatgatatatttggttttttttagttttgatagtttgcgattttgtgatttcgagattttagaattatggtacgagattttgagattaacgtttttgtttttgtagtcgatcgggaggttataggaaggttttttttttgtttttttgggagtttttattttttgtttttttagttttagttttttaagtttattttgggtagaggatgggtttttaggattttatttttcgggatattattcgggttttagtttttttatttgtttatggggtgagggtttttttttttgtcgttaggttggttattattttgttgttttttttttttgtttagtttttaggtgtttttagggtatttttaattagggtttttataaggtatttatttttagatcgtttgcgggtttaggtttttttttaggttttcggttacggttgtttatagagttttttttatttggttttcggttttgattttttaattagagtttggtacgttattttttatttttaggatatattttgggggggtaggggtaaggataggggggagaagttttttagggtgaggaagagaagaggggagtaagggatatagaagttaatagaaatagaggggaaagggggtcgggaggaggtggagaaagagagagagagagaaagagggagggggagagagagagagggagagggagaggagatcgtgagtaggaggaaaggtagaatgagggggagtgatgagagatgcgtgatagggagaagacgagaaggaaagagaggagaggagatacgggtgagagggagagatgtagagagaggtaggagggaggaaggagaatgagggggtggtagggagagtgatagagagggattgtgttatagatggtgatatggagttcgtgaaggagggagtaagtagggaggggttgagggtcggagagtaggtgtggggggtgggggcggggtgtaggttaagggaggaggttcggagagggagtaggaggggcgtagattttgttatcggggagattttagttatttacgttcgttggttttggtttttgtagggagttggagagaagaatgtgtttagtgtttaggggagtcgaggttgttagttagtagttagagtagttcgtgaggttattgcggtataggtttttcggggtagtagttgtgttttaaggtaaggttgggtgtggggttggttagttcgggagtttatagtttagttttgtagtcgggtatatcggtcgtagtacggattattggggaggtcgggtgggggttattagttttgggattggttatatttggagagttttaggtagggtgaggagtggaaggatagaatagagaattaatattttaggttttgagggtaaaattattgtgtagtgagaaaatagatttttattattttgtaattgataaaatttaaaatagaataataataattgaggttagtattttgtaatgtaggtttatttatgagaagaatagagttttttttatagatattattttttgtttaattggagtttagagttagtgttttattaaatcgattgtaaatgtttattcgtaaaaattatttttagtttttaggttgtataaaaataggtagtgggtgggatttgtttcgtgggttatatttattgatttttggtttaagagattttgtcgtatagttttgagtataggtttagatgttttgggatgtcgtgtttttgtttgtgttgatttttgttttagtataggagtgataaggaaaggaatagttagagacggaagggaaaaggatatacgttttggttgagtatttattatgtgttaggttgtatttaggttgttttttaaattgggttattttttgggattagggttggattttttttgttattaggtatttggtattgtagagaattggaagttgaatgtatttagaggtgttattatgtatgcggtagtatatagtaggatatatttatttttagtcggagtcggtttggttttttaacgttgttcgtttttttgttttgtgttcgggataaggtttttgttttaggttttagttttttattgtttttgttcgtataagtttatgaggtgtgggtgggtttttgggagcgtgtttttagggttaagggtgggttttttatggtattgattatttatttttatttacggttttttattgtttttagaataaagttttttcgtcgtagtttatttggtattgtatttttgatttttgtcgtttgcgcgggtttttttttttgttgattttattcgtttttttgtgttt

SEQ ID NO: 1413 - DNA, 2398 bp, Artificial Sequence
  chemically treated genomic DNA (Homo sapiens)
gggtatagaggagcgagtgaaattagtagaggaggaggttcgcgtaggcggtaggaattaaggatgtagtgttaggtgggttgcggcgagagagttttattttgagggtagtgagaagtcgtgggtaggggtgggtggttagtgttatggaaaatttatttttgattttgaggatacgtttttaggagtttatttatattttatgaatttgtacggataaggataatgggaggttgagatttggagtaagggttttgtttcgggtataaggtaaagggacgggtagcgttaagagattaggtcggtttcggttggaagtgggtgtgttttattgtgtgttgtcgtatgtatggtggtatttttggatgtatttaatttttagttttttgtagtgttaggtatttagtgataaaggaggtttagttttggttttagggaatggtttagtttggaaagtagtttaggtatagtttggtatatagtaggtgtttagttaagacgtgtgtttttttttttttcgtttttgattgtttttttttttattatttttgtgttgaggtaggaattagtataggtaggggtacggtattttaagatatttgggtttgtgtttaggattgtacggtagagttttttagattaaagattagtaaatatggtttacggggtaaattttatttattgtttgtttttgtatagtttaggagttgagaatggtttttacggatgaatatttgtaatcggtttgatgaaatattaattttaaattttaattaagtaaaaggtgatgtttgtaaaaagaattttattttttttatgagtggatttatattataaaatattggttttaattattattattttattttgagttttgttagttataaaatagtaaaaatttgtttttttattgtataatgattttgtttttaaagtttaaaatattggttttttgttttgtttttttattttttattttgtttggggttttttagatgtaattaattttaggattaatgatttttattcggtttttttagtggttcgtgttgcggtcggtgtgttcgattgtagggttggattgtggattttcgggttggttagttttatatttagttttgttttgggatatagttgttgtttcgggggatttgtgtcgtagtggttttacgagttgttttggttattggttggtagtttcggtttttttgagtattgagtatatttttttttttaattttttgtaggagttaaggttagcgggcgtgggtggttgaaattttttcggtaatagggtttgcgttttttttgtttttttttcgggtttttttttttaatttgtatttcgtttttattttttatatttgtttttcggtttttagtttttttttgtttatttttttttttacgggttttatgttattatttgtggtatagtttttttttgttattttttttgttatttttttattttttttttttttttttgtttttttttgtattttttttttttattcgtgtttttttttttttttttttttttcgttttttttttgttacgtattttttattatttttttttattttgtttttttttttatttacggttttttttttttttttttttttttttttttttttttttttttttttttttttttttttttttattttttttcgatttttttttttttttatttttattggtttttgtgttttttgtttttttttttttttttttattttgggaagttttttttttttatttttgtttttgtttttttaggatgtgttttggagatggggggtgacgtattaggttttggttgggaagttagggtcggagattagatgggagaggttttgtggatagtcgtggtcgagggtttgggagggaatttgagttcgtaagcggtttagaagtgggtgttttgtggggattttagttaggagtgttttgggggtatttggggattgggtagggagaggggatagtagaatgataattagtttggcggtaaggagggaagtttttattttatgggtaggtaaggaggttggggttcggatgatgtttcgaagggtggggttttggaagtttattttttgtttaggatgaatttgggaggttggggttggggaggtagagggtggggatttttagggaggtaggagggaggtttttttgtgatttttcggtcggttgtaggggtaggggcgttagttttagaatttcgtgttatgattttaggatttcggaattatagaatcgtaggttgttagggttggagggagttagatgtattatgtcgttggtttttttagtttacgtggtagtttttttgagttttttttttatattcggtattgtgtttggtacgttttcgtttaatttttg

SEQ ID NO: 1414 - DNA, 2479 bp, Artificial Sequence
  chemically treated genomic DNA (Homo sapiens)
tggaagataagcggatttattttttagggttgtttgtagagattaaacggaggcgtgttaagtatagtgtcgggtatggagggggagtttaggagagttgttacgtgagttggggaagttaacgatatgatatatttggttttttttagttttgatagtttgcgattttgtgatttcgagattttagaattatggtacgagattttgagattaacgtttttgtttttgtagtcgatcgggaggttataggaaggttttttttttgtttttttgggagtttttattttttgtttttttagttttagttttttaagtttattttgggtagaggatgggtttttaggattttatttttcgggatattattcgggttttagtttttttatttgtttatggggtgagggtttttttttttgtcgttaggttggttattattttgttgttttttttttttgtttagtttttaggtgtttttagggtatttttaattagggtttttataaggtatttatttttagatcgtttgcgggtttaggtttttttttaggttttcggttacggttgtttatagagttttttttatttggttttcggttttgattttttaattagagtttggtacgttattttttatttttaggatatattttgggggggtaggggtaaggataggggggagaagttttttagggtgaggaagagaagaggggagtaagggatatagaagttaatagaaatagaggggaaagggggtcgggaggaggtggagaaagagagagagagagaaagagggagggggagagagagagagggagagggagaggagatcgtgagtaggaggaaaggtagaatgagggggagtgatgagagatgcgtgatagggagaagacgagaaggaaagagaggagaggagatacgggtgagagggagagatgtagagagaggtaggagggaggaaggagaatgagggggtggtagggagagtgatagagagggattgtgttatagatggtgatatggagttcgtgaaggagggagtaagtagggaggggttgagggtcggagagtaggtgtggggggtgggggcggggtgtaggttaagggaggaggttcggagagggagtaggaggggcgtagattttgttatcggggagattttagttatttacgttcgttggttttggtttttgtagggagttggagagaagaatgtgtttagtgtttaggggagtcgaggttgttagttagtagttagagtagttcgtgaggttattgcggtataggtttttcggggtagtagttgtgttttaaggtaaggttgggtgtggggttggttagttcgggagtttatagtttagttttgtagtcgggtatatcggtcgtagtacggattattggggaggtcgggtgggggttattagttttgggattggttatatttggagagttttaggtagggtgaggagtggaaggatagaatagagaattaatattttaggttttgagggtaaaattattgtgtagtgagaaaatagatttttattattttgtaattgataaaatttaaaatagaataataataattgaggttagtattttgtaatgtaggtttatttatgagaagaatagagttttttttatagatattattttttgtttaattggagtttagagttagtgttttattaaatcgattgtaaatgtttattcgtaaaaattatttttagtttttaggttgtataaaaataggtagtgggtgggatttgtttcgtgggttatatttattgatttttggtttaagagattttgtcgtatagttttgagtataggtttagatgttttgggatgtcgtgtttttgtttgtgttgatttttgttttagtataggagtgataaggaaaggaatagttagagacggaagggaaaaggatatacgttttggttgagtatttattatgtgttaggttgtatttaggttgttttttaaattgggttattttttgggattagggttggattttttttgttattaggtatttggtattgtagagaattggaagttgaatgtatttagaggtgttattatgtatgcggtagtatatagtaggatatatttatttttagtcggagtcggtttggttttttaacgttgttcgtttttttgttttgtgttcgggataaggtttttgttttaggttttagttttttattgtttttgttcgtataagtttatgaggtgtgggtgggtttttgggagcgtgtttttagggttaagggtgggttttttatggtattgattatttatttttatttacggttttttattgtttttagaataaagttttttcgtcgtagtttatttggtattgtatttttgatttttgtcgtttgcgcgggtttttttttttgttgattttattcgtttttttgtgttttaggcgtatttagttttatgtatttatttatttatttttgtaggt

SEQ ID NO: 1415 - DNA, 2479 bp, Artificial Sequence
  chemically treated genomic DNA (Homo sapiens)
atttgtaggaataagtgaatgaatatatgaggttgggtacgtttggggtatagaggagcgagtgaaattagtagaggaggaggttcgcgtaggcggtaggaattaaggatgtagtgttaggtgggttgcggcgagagagttttattttgagggtagtgagaagtcgtgggtaggggtgggtggttagtgttatggaaaatttatttttgattttgaggatacgtttttaggagtttatttatattttatgaatttgtacggataaggataatgggaggttgagatttggagtaagggttttgtttcgggtataaggtaaagggacgggtagcgttaagagattaggtcggtttcggttggaagtgggtgtgttttattgtgtgttgtcgtatgtatggtggtatttttggatgtatttaatttttagttttttgtagtgttaggtatttagtgataaaggaggtttagttttggttttagggaatggtttagtttggaaagtagtttaggtatagtttggtatatagtaggtgtttagttaagacgtgtgtttttttttttttcgtttttgattgtttttttttttattatttttgtgttgaggtaggaattagtataggtaggggtacggtattttaagatatttgggtttgtgtttaggattgtacggtagagttttttagattaaagattagtaaatatggtttacggggtaaattttatttattgtttgtttttgtatagtttaggagttgagaatggtttttacggatgaatatttgtaatcggtttgatgaaatattaattttaaattttaattaagtaaaaggtgatgtttgtaaaaagaattttattttttttatgagtggatttatattataaaatattggttttaattattattattttattttgagttttgttagttataaaatagtaaaaatttgtttttttattgtataatgattttgtttttaaagtttaaaatattggttttttgttttgtttttttattttttattttgtttggggttttttagatgtaattaattttaggattaatgatttttattcggtttttttagtggttcgtgttgcggtcggtgtgttcgattgtagggttggattgtggattttcgggttggttagttttatatttagttttgttttgggatatagttgttgtttcgggggatttgtgtcgtagtggttttacgagttgttttggttattggttggtagtttcggtttttttgagtattgagtatatttttttttttaattttttgtaggagttaaggttagcgggcgtgggtggttgaaattttttcggtaatagggtttgcgttttttttgtttttttttcgggtttttttttttaatttgtatttcgtttttattttttatatttgtttttcggtttttagtttttttttgtttatttttttttttacgggttttatgttattatttgtggtatagtttttttttgttattttttttgttatttttttattttttttttttttttttgtttttttttgtattttttttttttattcgtgtttttttttttttttttttttttcgttttttttttgttacgtattttttattatttttttttattttgtttttttttttatttacggttttttttttttttttttttttttttttttttttttttttttttttttttttttttttttttattttttttcgatttttttttttttttatttttattggtttttgtgttttttgtttttttttttttttttttattttgggaagttttttttttttatttttgtttttgtttttttaggatgtgttttggagatggggggtgacgtattaggttttggttgggaagttagggtcggagattagatgggagaggttttgtggatagtcgtggtcgagggtttgggagggaatttgagttcgtaagcggtttagaagtgggtgttttgtggggattttagttaggagtgttttgggggtatttggggattgggtagggagaggggatagtagaatgataattagtttggcggtaaggagggaagtttttattttatgggtaggtaaggaggttggggttcggatgatgtttcgaagggtggggttttggaagtttattttttgtttaggatgaatttgggaggttggggttggggaggtagagggtggggatttttagggaggtaggagggaggtttttttgtgatttttcggtcggttgtaggggtaggggcgttagttttagaatttcgtgttatgattttaggatttcggaattatagaatcgtaggttgttagggttggagggagttagatgtattatgtcgttggtttttttagtttacgtggtagtttttttgagttttttttttatattcggtattgtgtttggtacgttttcgtttaatttttgtaaataattttgggaggtgggttcgtttgtttttta

SEQ ID NO: 1416 - DNA, 2500 bp, Artificial Sequence
  chemically treated genomic DNA (Homo sapiens)
tttttgggagttttttcggtgtagttattgggatggaatgtatataggtttttggtagaggtttagattagtaagttgggagggtggggagtgttttagtttttgtgtgggagtgaatgcgggtggggtgtaggattaaggatgtggtttagtggggggtttattaggggttttttagtttttttatttggagaggggtggtgttagtagggttggttttaggattgggattaggatataggttttagagtttttttattttttataaaggaaggtaagttgtaatttttgtgggaagggggtttaagggggtttagttattcgggggatttagtattattagatttgtttattttttttggttagttttagttattcgggggtttagtatttttagatttgtttgttttttttgtttattatttttattaaagtttataggtgggtttgttttaggattttttttgaaatagtttgtatttttggggttatttacggatgggattttatgggtatttttgaatttaagtgggagtcggaggagggatatagggaggtttatttattgtttgttttaaatttgatattattttttattttttgggttatttttagttgtatataattcgttggttgggtgggtttaggtgtatgtggtttttacggtatagttatattcgatttttgtgtgtgttttttgtagtgacgtattggttttgcggttggtttgtatcggggacgagatggacgtgagttttagggtttcgcgtttggtttagtttttcgaggtggttatgtataggtagtcggtttatgttttatgtttttatatttggggaggggttttgggcggtgggtggaggttttgaatatagtatagggttgggttttgaggaagttttgtgggggatgtgttttgatattggggttatattgaaatttttggttgtttttcgtattttttttgggagtttttagtttttggtattcgttttttgttatttgtttttggtatttttgggtaataaagtagagtttagggtttttttttttttcgtcgtttttattgagtttagatggtatatttttatcgtggttttaagagggggtgttacgtgagttcggattttagattttgggggttgggttttttagcgagttttcggtgggggaatagagtgggtagtggtttgtgagggttttgtagaatgggggtttattttttacgtggttagttttggaagatagggttaaatattcggtgggttggcgggcggttggttggcggaggaagtaggaagttggaatgaatttgattataaatagtttatattacgcggtttttgtaggtggaggcgtttacggaaagggtttcgggtggttgtggggtgggagggtataggtttttgttttttatagttgtgatggtgttatttaagtataggttgtttttatttgtttttgtagtaatggttttgtttttttattttttttgtttatagtttgggtttggtttttatttacgattagattgaggatattagggatgtttttagaagttttatggacggttttattatatttaaggagaatataatgaggttttggagattttcgaatttcgggttttgggtaagagttttgagatttttgattttgatttgcgttgcggttagtgggggttgttagagtcgttttttggggcgttatagtttttattatttcgtattattatttgtgttatttgtgtttatatttgtttgattttatgggtttttgggtttgagatgtttggttttgagtgtataaattagtgtatggttttgggtttttttttggttcgagagtttttatttggtaggtaggattttcgttttttggttagggtaggggtttttttgagtagtttttttggtagtttggttttatggtgtttattcggtatcgtttattataagggtagttgattgtttttatttgtgtttatcgggtgtttttgtttgtgtttcgtagattggtaggtttaggttacgttggtttttttggttacgtttttagggttatttttttttttttttgaattttttttttttttggttttttcgagtttttttttagtttttatttttttgggtttttttttggtatttcgttgttattcgtttggttttattgtcggggtttgtttcgagtttgatttttttgttttgtttttataggtgttttgcgaataggtgttgttggcgttgttgttgttgttggcgttgttgttgtcgttgtttagcgggggtttgtatttgttgtttaagtgaggtttcggcggtttagggcggggttggttttatttttatgattattgttttggaggtggcggtttgttgttgttatttttttaattgtttttttatgatgtttttttatatttaaatttcgagatagtgttggaatattgttgaggttttatatttaggttttttgttttttttttattttagttttt

SEQ ID NO: 1417 - DNA, 2500 bp, Artificial Sequence
  chemically treated genomic DNA (Homo sapiens)
gaaaattggaataaaaaaaaaataaaaaatttgagtataaaattttagtagtgttttagtattatttcggggtttaaatataaaaaggtattatgagaaaatagttaaaaagataatagtagtaggtcgttatttttagggtagtggttatgggggtggggttagtttcgttttgagtcgtcggggttttatttgagtagtaggtgtaggttttcgttgagtagcggtagtagtagcgttagtagtagtagtagcgttagtagtatttgttcgtaggatatttgtgggagtaaagtagaggagttaggttcggggtaggtttcggtaatggggttagacgggtgatagcggagtgttaaggggaagtttaggagggtggggattgggaaggagttcgaggggattagagaaggaaggagtttaggagagggggaaagtggttttgaggacgtggttagagaggttagcgtggtttgggtttgttagtttgcgggatataggtaaagatattcggtgggtataggtgagggtagttagttgtttttgtggtgggcggtgtcgagtggatattatgggattaggttattaggaaggttgtttagggaggtttttgttttggttaggagacgggagttttgtttgttaggtgaaggttttcggattagagggagatttaggattatgtattggtttgtgtatttagaattaggtattttaaatttaaaagtttatgggattaggtagatgtggatataggtgatatagatgatgatacggagtggtggggattgtggcgttttaaggagcggttttgatagtttttattggtcgtagcgtaagttagggttagggattttaaggtttttatttaggattcggggttcggggatttttagaattttattatgttttttttaagtgtggtgaaatcgtttatgaaatttttaagaatatttttgatgtttttagtttggtcgtagatgaaagttagatttaggttatagataaagaggatggggggataaagttattattgtaggagtaggtaggggtagtttgtatttagatgatattattatagttgtggggagtaggggtttgtgtttttttattttatagttattcggggtttttttcgtgggcgtttttatttgtaggggtcgcgtggtatggattgtttgtggttaaatttattttaattttttgtttttttcgttagttagtcgttcgttagtttatcgggtgtttggttttgttttttagagttggttacgtggaaaataaatttttattttatagggtttttataagttattgtttattttatttttttatcggagattcgttgagaggtttagtttttaggatttaggattcgagtttacgtagtatttttttttaagattacggtggaaatgtattatttgggtttaatgaggacggcgagagagaaaagggttttgggttttgttttgttgtttaggaatgttagggataggtggtagggggcgagtgttaggagttgggggtttttaggagaggtgcgggaagtagttaagggttttagtatagttttagtgttaaggtatattttttatagagtttttttagggtttagttttgtgttgtgtttagggtttttatttatcgtttagggtttttttttaggtgtagaggtatagggtataggtcggttatttgtgtatggttatttcggagagttgggttaggcgcggggttttgaggtttacgtttatttcgttttcgatgtaggttagtcgtagggttaatgcgttattgtagggagtatatataggagtcgggtgtggttgtgtcgtggaggttatatgtatttggatttatttagttaacggattgtgtgtagttgggagtggtttagaggataagagatggtgttagatttggggtaggtagtgagtgggtttttttgtatttttttttcggtttttatttggatttagagatatttatgaggttttattcgtgggtggttttagaggtgtaagttattttaaaaagaattttggggtaggtttatttgtgggttttggtggaaatggtggataaggggaataggtaggtttgggggtgttgagttttcggatggttgaggttgattaaggggaatggataggtttggtggtgttgagtttttcggatggttgagtttttttgagttttttttttataggggttgtagtttatttttttttgtgggaggtgagggggttttaagatttgtgttttggttttaattttgaaattagttttgttggtattatttttttttaaatggggggattaagaagtttttagtaggttttttattaaattatatttttgattttatattttattcgtatttatttttatataaagattaagatattttttatttttttagtttgttggtttgggtttttattagggatttgtgtgtattttattttagtgattatatcgggggaatttttaggga

SEQ ID NO: 1418 - DNA, 2467 bp, Artificial Sequence
  chemically treated genomic DNA (Homo sapiens)
ttttggaggaggcggggtttggttttggtttcggatcgtcgagatcggttacgttgcgtcgtttggacgtcgggtttttttatttatagttttgcgatttttacgagttcgattttttttgcgttttagtttttttatttataaaatggagataatgttttcgcgcgttgagttcgagcgcggtcgtgttgttatattattgttgttgttatgtcgttaatgacggtatagtttttatggaaggggggttaaggaaggtacggggattttttcgtaggatatggggtgggtattagttttaagttatgtatataatttattttgaggttaggatttgggtttttttcgtgtttattgggggttttagtcgttgtttttatttttttaggttttagttttttataatgggcgcgtttttttgtttgagagggaggttttagttaagttttagtttttatcgtaaaaagttatatagtaaatatttaatggattttaaatttataaaaattattttatagagttttatgaggtagggaatgttattgtatttatttcgtagatgaggaaatttggggtatcgatattttttagagttaatatgtaaattaggtatttggtttgagtgatagattggtgtaggtggttagtagtttaatttgtattgagcgtttattgggtttttatagcgattttgaattgtgtttttgtttatagtgattcggtcggttcgggtatggtagatttagtggcgggtatcgcgggttcggcggttaagagcgtgcggttatttcgttttagtgaggtttacgtggaggttatgaaggaggatttggtcgagtggtttaatgttttgtacggtttgggtttttcgggtggtggcgatggttttttgatagggttggttacgggtacgattttgtgttaatatgttaacgtcgtgatcgaggttgttcgtgtattggtagtcgttcgttcggttcgaggtgtggttttttaggcgtatagtgtagtgtttggtttttttatggcgcgcgataacgtggttatttttatcggttggtgtcgcgtggagttgggtgtgtcggaggtgtttatgtttgagattgaggatttggtgttgcgtaagaacgagaagagcgtggtgttgtgtttgttggaggtggcgcggcgtggggtacgtttgggtttgttggttttacgtttcgtgtagtttgagtaggagattgagcgggagttgcgtgttgtatttttagtttttaacgtttttgtcgttggggaggatattattgaaatcgttttcgtattagggatttttgttcgcggttttcgtatgatatttagcgatttgcgtaatttcgacgagttggtgagttttttagtattaggtgttagggattcgatagtatagttagtgtttgtaatttgtttttgaattttttagggtttattttgttatttgtagaatagtttgttttataaaaagagtgtatatgttgagtattaaatcgaggaatgtatatttgattttaaggaaatgggtagtttatagagagggaggtgtcggggagatgacgtagtttagtcgggtttgggataggatgcgggtttttggtacgatttttttttattttgtgtgttaattgtgttttaattgagtttgtgtatttttttttttggggggtcgtatgatcggggcgttttttttgtgttttttttgtagttagttttaggtagatgtatttataattttatggaggttcgaggttgagcgggtgttgtgatgttcggttgagacgaggtatggaaaaatttgggtaaggtgtttggtatatagtaggtgttttagggggttttgtaggtttttttattttttaggtatttttgggaagtttagttgggttgttgttgttgttgggagtagggattttgtttggaattataggattcgttttattttaagtataggcgttgttgggttttgtttttaagtttttttttttttaggatttgggtggtttttgttatttttgagggttggattaagagttttttttttattagaaggttaggattataatgtgtttgtttgggaggtagatagcggatggtagtgggtagagtttggggttttattttttgttttggattagggttatttaaggttttatttgtttattttttttggcggtattattgtcgttgtgggcggggaggcgggtagggttgtttatatagttagtttggtagcgttttggttttggtggggggttgtatgtggtgcgtgtttattcggttagtggtttgtgtgtgtatgtgttcgatgtgtttgtggtacgtttttatattagtgtttatttaggggtatggggttttttgtatttgtgttttgtagtttgtttggtttttttgtgggttttagtttttttgtttgagaagtgggtgaagcgggagtgaggacgggttttgg

SEQ ID NO: 1419 - DNA, 2467 bp, Artificial Sequence
  chemically treated genomic DNA (Homo sapiens)
ttagagttcgtttttattttcgttttatttattttttagataagaaggttggggtttataggaaggttaggtaggttataggatataggtgtagggggttttatgtttttgggtgggtattgatgtggaggcgtattatagatatatcggatatatgtatatatagattattggtcgggtgagtacgtattatatatagttttttattagagttagagcgttgttaagttggttatgtgggtagttttgttcgttttttcgtttatagcggtagtggtgtcgttagaggaaataagtaggtggggttttgagtgattttggtttaggatagggggtggggttttaggttttgtttattgttattcgttatttgttttttaggtaggtatattgtagttttgattttttgataagaaggaaatttttggtttagtttttaggggtggtaggggttatttagattttgggagaggagagatttgggggtagggtttagtaacgtttatgtttagagtagaacgaattttgtaattttaaataggatttttgtttttagtaatagtagtaatttagttaggttttttaggggtgtttggggagtggggagatttgtagagttttttggggtatttattgtgtgttaggtattttgtttaggtttttttatgtttcgttttaatcgagtattatagtattcgtttaatttcgagtttttatgaggttgtgggtatatttgtttaagattgattgtagggagggtatagaggaggcgtttcgattatgcggttttttagaagaaggaatgtataagtttagttgaggtatagttagtatataaagtgagggaagatcgtgttaggagttcgtattttgttttaggttcggttgggttgcgttattttttcggtatttttttttttgtgggttatttatttttttggggttaggtatatatttttcggtttggtgtttaatatgtgtattttttttgtggggtagattgttttgtagatagtagggtggattttgggaggtttagggatagattgtaggtattggttgtgttgtcgggtttttggtatttggtgttgggggatttattagttcgtcgaggttgcgtaggtcgttgggtgttatgcgggggtcgcgggtaggagtttttggtgcgggggcggttttagtggtgttttttttagcggtaggggcgttgggggttgggggtgtagtacgtagttttcgtttaattttttgtttaaattgtacgaggcgtggggttagtaggtttaggcgtgttttacgtcgcgttatttttagtaggtatagtattacgtttttttcgtttttgcgtagtattaggtttttagttttaaatatgagtattttcggtatatttagttttacgcggtattagtcgatgaaggtggttacgttgtcgcgcgttatgaaggagttaggtattatattgtgcgtttggaaggttatatttcgggtcgggcgggcggttgttaatgtacgggtagtttcggttacggcgttggtatgttggtatagggtcgtgttcgtggttagttttgttaggaagttatcgttattattcgggagatttaggtcgtataaggtattgagttattcggttaggtttttttttatggtttttacgtaggttttattggagcgaaatggtcgtacgtttttggtcgtcgagttcgcgatgttcgttattgggtttgttatgttcggatcggtcgagttattgtgggtaggaatatagtttaggatcgttgtggggatttagtaagcgtttagtataaattaagttgttggttatttgtattagtttgttatttaggttaaatgtttggtttatatgttggttttgggaaatgtcggtgttttaagtttttttatttgcgaaatgggtatagtaatattttttgttttataggattttatgggataatttttataaatttagggtttattaagtgtttgttgtgtggttttttgcggtggaaattggggtttggttggggttttttttttaggtagggaggcgcgtttattgtgaagggttgggatttagagaagtgaagataacggttaaggtttttagtggatacgaaaggaatttaggttttgattttagagtgggttatgtgtatggtttagggttggtgtttattttatgttttgcgggaaggttttcgtgttttttttggttttttttttataagggttgtgtcgttattaacgatatagtagtagtaatagtgtaatagtacgatcgcgttcgggtttagcgcgcggaggtattatttttattttatagatgaggaaattgaggcgtagaaagggtcgagttcgtgaaggtcgtagagttgtgggtggaggagttcggcgtttaggcggcgtagcgtggtcggtttcggcgattcggggttagggttaggtttcgttttttttaaga

SEQ ID NO: 1420 - DNA, 2385 bp, Artificial Sequence
  chemically treated genomic DNA (Homo sapiens)
tgtggttgtgtgggtattatatatgtgataatttattaagttgtgtttatttacggtttgtttttattgtaggtaagttatatttttataagatcgtttggaaagagatattatttattaggtaagaaaaattattaaatggttagaaaaatatttaatgaatgatatgttagatttgttagattttttattttgaaaattattgaggaaagttaaagaattcggttaaatgaattagatttggattatggttggaaaattttatttaaaaaaaaagtcggttaggtgcggtggtttacgtttgtaattttagtatttagggaggtcgaggtgggtggattatttgaggttaggagttcgagattagtttgattaatatgatgaaattttatttttattaaaaatataaaaaaattagttgggcgtggtggtgcgcgtttgtagttttagttatttagggggttgaggtaggagaatcgtttgaatttaggaggtggatgttgtagtgagttgagattgtgttattgtattttagtttgggagatagaacgggatttcgttttaaaaaaaaaaaaaatttgttgggcgtggtggtttacgtttgtaattttaatattttgggaggttaaggtgcgtggattgtttgagtttaggagtttttaattagtttggttaatatggtgaaattttgtttttattaaaatataaaatattaattgggtatggtggtgggcgtttgtggttttagttatttaggaggttgaggtaggagaattgtttgaattcgggatatggaggttgtagtgagttaagatcgagttattgtattttagtttgggtaatagaatgagatttcgttttaaaaaaaaaaaaaaaaaaggatgttcgttttttttaagatttgtagatttaaggtgattttagttaaagttttagtagtttgttgtttttaagttaataagttttaagggttagtacgtattttttgttttgttggtcggattgggtttggtgattttgtcgtcgtaggttttttgtagtataggttttgagagtaacggtgcggttgtttgattgttacggaataaatatatattaggcgagtattagtttgaggtcgaggggtatatggagttggtttgagtttagttaggagtttggaagtaagtttagtttttttcggtcgtgttttcgagggtttgatcgcgaaacgttcgtacgtacgggttggagttgtttgttacgcgtggtaattgcggtaggaatttgatttacgtacggacgttagtatttataagtgagaggcgttttagatacgtggtgtcggttttggaagtagttggtgggtggtgaggaaatgttatagttttggaaagatagaggtttttgtaaggtggtgttaaaatgttaggttgaattaatagttatttgcggggattttgaaggtaggtaattcgtttagtgaattggtagtatcgggtaggagggtttggagggagaattttggtggtatggttggtgtgtgaggattaaaggtagaggagattttttttttttagtatggtaatttggtattgggttaagtttttagttgtttttcgttggtgatttggtaaaggggaatataaatttttttggtcggtaatattgtttacggtaatattgttttgtggtaggtagattacgtggggattggggagttattggtgtttgggaggttacgttattggtttttttgagtgatttttatatttgggaatgtgttttgcgggttatagtcgcgggattgttgtaggaggaatttcgtttttcgtggggtaagaggtattttcgtgagtgggttttagtttttgaatcgtagtgggaattagggaggcggtaatatttgcgtgtcgttataaagatttttattatgttttcgtaaagatttttattatatcgttttgaagatttttatatattttcgtaaagattttattatattattttaaagatttttatatatattcgtaaagattttattatattattttgaagattttatatattttcgtaaagattttattatatcgttttaaagatttttatatattttcgtaaagattttattatatcgttttgaagattttatatattttcgtaaagatttttattacgttgttttaaagatttttatatattttcgtaaagatttttattatattattttaaagattttatatattttcgtaaagatttttattatatcgttttgaagatttttatatattttcgtaaagattttattatatcgttttgaagatttttatatatattcgtaaagattttattatattattttgaagattttatatattttcgtaaagattttattatatcgttttg

SEQ ID NO: 1421 - DNA, 2385 bp, Artificial Sequence
  chemically treated genomic DNA (Homo sapiens)
taggacggtgtgatggggtttttacgagggtgtgtggggtttttaggatggtgtgatggggtttttacgagtgtgtgtgggggtttttaggacggtgtgatggggtttttacgagggtgtgtgggggtttttaggacggtgtgatgggggtttttacgagggtatgtggggtttttaggatggtgtgatgggggtttttacgagggtatgtgggggtttttaggatagcgtgatgggggtttttacgagggtgtgtggggtttttaggacggtgtgatggggtttttacgagggtatgtgggggtttttaggacggtgtgatggggtttttacgagggtgtgtggggtttttaggatggtgtgatggggtttttacgagtgtgtgtgggggtttttaggatggtgtgatggggtttttacgagggtatgtgggggtttttaggacggtgtgatgggggtttttacgagggtatggtgggggtttttatgacggtacgtaggtgttgtcgtttttttgatttttattgcgatttaggggttgggatttatttacggagatgttttttgttttacgggaggcgaagttttttttgtagtaatttcgcggttatggttcgtagggtatatttttaggtgtggggattatttaggaaggttagtgacgtggttttttagatattaatgattttttagtttttacgtggtttgtttgttatagggtagtgttgtcgtaagtaatgttgtcgattaaaggagtttatgtttttttttattaggttattagcgggaggtagttggaggtttagtttagtgttaaattattatgttgaagaggaaagattttttttgtttttgatttttatatattagttatgttattagggttttttttttagatttttttgttcggtgttgttagtttattgggcggattgtttgtttttagagttttcgtagatgattgttgatttaatttggtattttgatattattttatagaggtttttgtttttttagagttgtgatatttttttattatttattagttgtttttaaagtcgatattacgtgtttgaggcgttttttatttgtgggtgttggcgttcgtgcgtgagttaggtttttgtcgtagttgttacgcgtggtaaataattttaattcgtgcgtacgagcgtttcgcggttaggttttcgagggtacggtcgggaggagttgggtttgtttttagatttttggttgggtttaggttagttttatgtgtttttcggttttaggttagtgttcgtttggtgtgtgtttgtttcgtgatagttaggtaatcgtatcgttgtttttagagtttgtgttgtaaaaggtttgcggcgatagggttattaggtttagttcggttagtaggataggaagtgcgtgttggtttttggagtttgttggtttaagaatagtaaattgttgggattttgattgggattattttgaatttgtagattttggggagaacggatatttttttttttttttttttttgagacggagttttattttgttgtttaggttggagtgtagtggttcgattttggtttattgtaatttttatatttcgggtttaagtaatttttttgttttagttttttgagtagttgggattataggcgtttattattatgtttagttaatattttgtattttagtagagatagagttttattatgttggttaggttggttggaaatttttaagtttaggtaatttacgtattttggttttttaaagtgttgggattataggcgtgagttattacgtttagtagattttttttttttttgagacggagtttcgttttgttttttaggttggagtgtagtggtataattttagtttattgtaatatttattttttgggtttaagcgatttttttgttttagttttttgagtagttgggattataggcgcgtattattacgtttagttaatttttttgtatttttagtagagatggggttttattatattggttaggttaatttcgaatttttgattttaggtgatttatttatttcggtttttttaagtgttgggattataggcgtgagttatcgtatttggtcgattttttttttaaataaagttttttaattatgatttagatttggtttatttaatcgggttttttgattttttttagtggtttttaggatagaaggtttggtaagtttggtatgttatttattagatgtttttttagttatttggtggttttttttgtttagtaaatagtatttttttttaaacggttttgtgaaggtatgatttatttatagtgaggatagatcgtaagtagatatagtttgatggattgttatatgtgtgatatttatatagttata

SEQ ID NO: 1422 - DNA, 2500 bp, Artificial Sequence
  chemically treated genomic DNA (Homo sapiens)
aattttttggttttttggagatttttttgtattttttattattttaagtttttagatttaatttttatttaattgtggttggtaagggggagggtagcggaagagagtcgggtttttttgataaagttttaattttttggaatttagatgttttttatttttgtttttatttttttgtttttttttaattttttgattattttttaaagtgtaggtgatttattattgttattagggttaggggaagttttttggatagagagtatgggagttttgggttttggttttggttttgttattaatttttatgtgatttttgtgatttttttgtttttttgggtttgttttttggttagtttagcgagaattaggtgattgttatcggtttatattttttggagtttttggttttttttagagttgttttggtattttcgggtgggagtgggggattgttttgttttatatatttttaggaggtttggttgaattttagatttgagtcgagggtgggataattgttttttgcgggggatgttttttttagaggtgtgggttggttttagggaatttgggattttgagggtttttgggtaggaaggaggttaaggtttttttttggttagagtgtttagttttagttttggggtagtggggaagaggttgtttaacgttggggtggggttttggtagggaagatggcgtcgaattgggagagggaggaaagagattagtttggtgattttggggtagggtaggagggggagttttttattgtgtgttttttttttaggaggatgaagaagtttttaatttaaaggagggtggcgttagaaagttttagggaagagttttaggataggatgaggtttcgtagtagtagatttgtttcgtagttttttattttttatttttttaaagatttttatttgaatttcgttttttttaaattttttttgagttttttatttgattgttttagtttttttgaatttttagttaattttttggttttttttaagcgtttttttcgtatttttttgattatagtagttggtggtatagtgtgcgtatttgtgggtaggagttagtgaaggtttttttttttttttttaaagttttaggttttacggtttgttattcgtaaaattttaattacgagggggcgtttttttgttcgtcgtttcgtagggagattcggtttaggtcgttggagtttcgagttttagggtttttgtgatggaagggcgggcgcggtttttatatttggttttttagttttatttaaggaggattgttagatagtttcgttttgaggtgtaggaggtcgggtcgtttcggttattttgaatttattcgaagttagagggttcgagttcggggggcggtcgggtgtttatttttagagtttgtttagcgttttgttgagtttagcgttgtgtaggtgcgggtattggttcgcgagttttttgcgcgttgtttgagtttatattatgaaggcgtttatgggtcgtttgacgtgcggtttgtttttgttggcgtcgttgacgcgtacgggtatgggtattagcgtttagtcgtagtcgttgagtatttggttgacggtttcgcggatgtatacggggaatttgttatcgttcgtttcgtcgttttgttgtttttttttgattttgtttagttcgtttggtttcgggttggttcgtaggttcgattcgtcgtcgtcgtcgtcgggttttagcgagggcgcgtttttcggggataggtagcggggttttttcgagtttacggggtttagttttattttcgataggttttgttttttcgttatgtcgttttcggtcgtcgtcgtcgtcgtttcggtcgtttttttcgggttagtcgtcggggttttcgtaaagagtttaacgtttatttggatggaaggagggcgcgatggagcggtcgcgcgcgtagtttcgagggcggttcgagataggacgtgggtatagtttcgaggtggcggttttttttgttttagttaaatttatttggtttttggggtttacgtatatgttagattttaggtgggtgcgtttcgtttttgtgtttttttattatttggttttaatcgttttttggtgtgggtggttttttttttagtttttttttttgggtggaggtttgttgatgataaggaagaaaaaaacggagtttttattttgttttaatttcggtttttggaattttttatttttttttttatttttttttttttttttagtttgttttaacggggtttagaggagagttaggtggggggtaagggcggggtgtcgtttttttttattttatagtagggttttaggtttgggcgggttagggaggagtaggttgcgtatttattttttcggattttttttttagtttggggttcgtttttaggaagtggaaaatcgtgttttaaggtgtgcggtttagttcggggttgggaggtgacgttggtgggttgggagggaggggt

SEQ ID NO: 1423 - DNA, 2500 bp, Artificial Sequence
  chemically treated genomic DNA (Homo sapiens)
gttttttttttttagtttattagcgttattttttagtttcgagttggatcgtatattttgggatacggttttttattttttaaggacgagttttagattggaggagaggttcgaggaggtgagtgcgtagtttgtttttttttggttcgtttaggtttgggattttgttgtgaggtggagagaggcgatatttcgtttttgttttttatttggtttttttttaaatttcgttggggtaggttgagggaagaaggaaaggtgagagaaaaggtgggaaattttaggggtcgggattagagtaaaataaaggtttcgttttttttttttttattattaataaatttttatttaaaaaaggaggttaaaaaaaaagttatttatattaagagacggttgggattaggtggtgggaagatatagaggcgggacgtatttatttagagtttggtatgtgcgtgggttttaggggttagatgggtttagttggagtaggaagggtcgttatttcggggttgtgtttacgttttgtttcgggtcgttttcggggttgcgcgcgcggtcgttttatcgcgttttttttttatttaggtgggcgttggattttttgcgaggatttcggcggttggttcgggggaggcggtcgaggcggcggcggcggcggtcgggggcgatatggcggaggagtaggatttatcggaggtggagttgagtttcgtgggttcggaggagtttcgttgtttgttttcggggagcgcgttttcgttagggttcgacggcggcggcggcggatcgggtttgcgagttagttcggggttaggcgagttgggtaaggttaagaaggagtagtaggacggcgaggcggacgatgataagtttttcgtgtgtattcgcgaggtcgttagttaggtgtttagcggttacgattggacgttggtgtttatgttcgtgcgcgttaacggcgttagtaaaagtaagtcgtacgttaagcggtttatgaacgtttttatggtgtgggtttaggtagcgcgtaggaagttcgcggattagtattcgtatttgtataacgttgagtttagtaagacgttgggtaagttttggaggtgagtattcgatcgtttttcgggttcgggttttttagtttcgggtggatttagggtagtcgaggcggttcggttttttgtattttagagcgggattgtttggtagttttttttggatagggttggaagattaggtgtgggggtcgcgttcgtttttttattataaggattttggaattcggaattttagcggtttaggtcgggtttttttacggggcggcgggtaggaaggcgttttttcgtggttggaattttgcgggtggtagatcgtggggtttggggttttggagggagggaaggaggtttttattaatttttgtttatagatacgtatattatgttattagttgttgtggttaggaggatacgagggaaacgtttggaaagaattaaagggttggttggagatttagggaaattgaggtagttagatggagaatttaggggaggtttaaagaaaacggaatttagatgagagtttttggaagagtgagggatgaagaattgcgggataaatttgttgttgcgggattttattttattttagggtttttttttgggattttttgacgttatttttttttgagttgggggtttttttatttttttagggagaggatatatagtaaggggtttttttttttgttttgttttagagttattaagttgatttttttttttttttttttagttcggcgttattttttttgttagggttttattttaacgttgagtaattttttttttattgttttagagttggagttgagtattttggttagaaggaaattttggttttttttttgtttaggggtttttagagttttaggttttttgggattagtttatatttttaggaaaaatatttttcgtagggagtaattattttattttcgatttaggtttggggtttagttaggttttttggggatgtgtggaataagatagttttttatttttattcgggagtgttagagtagttttgaaagagattagggattttaggagatgtgagtcggtagtagttatttgattttcgttagattgattaagagataggtttagaaaggtaaaggaattataaaggttatatagaagttggtagtagagttagggttagaatttaggatttttatattttttgtttagaggattttttttgattttggtgatagtggtggattatttatattttgaggagtggttaggaggttggggggaagtaagaagatgagaataagagtgaggagtatttgggttttagaaaattagggttttgttagaggagttcggttttttttcgttgtttttttttttgttagttatagttgggtagagattgggtttagaggtttagagtggtagaaggtgtaggaggatttttaagagattaaaagatt

SEQ ID NO: 1424 - DNA, 2402 bp, Artificial Sequence
  chemically treated genomic DNA (Homo sapiens)
ttttgtttttcggtttggttttcgaagattttagaagaattcggaatttgtttttattcggaatttagggattattttttgtatttagtaggtttttgtttttttgcgtggaaagcggttgggtgagttttggtatcggggttattatatttgagtgttgggggttacggagggaggggtttagatattatttgggaaggattttagagtgtagttttagtttaggttattcggggaagggagtcggtaaagtgggattttgagtttttacggttttttcggttgtttttgtttagaggttgttcggcgttttttttttttgttttattgaggagttgtcgtttttgaattttagttaattttttcgtttttaggtgaagaaattgaggttttggggttaggaaggggtttgtttaggttgttgatttttttgggtagtatcgagtttaggttttttttgtaattatgtattaggattagagagggtagggggtttgtttaacgttatatagtttgagtgaggaggagttggtttgggatttaggttttttgacgtttaggttaggttttttcgttttttttggttatggtttttagtttggatattaaggggttgggagttagttgtgtttttattatttttatgttatagggtaggatggagtttggtatttttcgttttaggttggttgttggtgtgatatgggtggttttagtcgagtgaatgttttcgttttttatagtttagggggttttttgttttggttattaatttttgttatgtgatttttttattttaatgtttgattgagtttgaaaatattgagaagatttaggggttgaaaagggaggaagagggaggttagaaggcgttagtcgagttagcgaagtttttataggagaggaagtgggttaggggaataggaaggagggttgggttggtttttgggtttgtttttgtttcgggtatgtggtgagtttagttttttgtttgtaatgaggaggaggaagatgaatagtgtttttgttaattttggttttttcggtttatgggatgggagatgttattattttacgtatttattttagttagttttatataggtcgatcggggaggttttttttgagtttaatttgataagttttgaggagtgagttgtatttattttgttttgtttgggatagggtggggggtttttgggtagggggttgggggttgtaggagtacggtgggcggtcgttttgtatttgtttgaggaaggattatttttttcgttaagtttttgtttggttgtgttcgtttttagtttttgtgtttttttttaattcgttatttcgtaagggttggtttaagggtttttttttatagggttcgtattttttgtttaggttggtatgttgacgtgtttttagaatttggtttttattttttttttgtgtttttaggtttagagaaaatgaggggtttagtgagtttggggttttttagatcgtgacgtttttttttgttttttttgtgtaggtttgggaggcgatggagtcggagtttttgtacgatttgttgtagttttttaagggggtggagtttttagcggaggaggagtttttaaaaggtgtgtgtttacgtaggtttgagggtggagggtgaaggtttgtgtggtaagagtgagtttggttatgtttgggatttgtagtatttttttagttgttagttgagcgtttaattttgtttatttttgtttttattttttgttttatgtttgatttaatttttttttttgggattttttatagagttagaattttttttttttagatgagagacggtgtggattacgatggtgaatattgattgtttttattttgtgagttttttgagtgtttttattgtattagtattttttattaatagtaatttatttatttttaagggcgggtattagtgtttgttttatatagatgaggaaattgaggtataaggggtgacgtgttatagtaataggaaatttttagtaagtggtggatttgggttttgagtttaaggagggtggttttagaattgaggttttatacggattacgtagcgatgtttattatggagtgatattttgtagggtgtggggtttttgacgtgttttttttatacgtgtgggttttttttaaaagtggggtgagtataggatggagtaatttaacgattataggtcgtttttttagtaaagttttgtgttatgagttttttggggggttggcggttatagtttttgtaattttttttttaggagatggtttaaaagaaggatatgggtaggtatttagagttgttattttttttgtgttttttgaaagaaataaatgaataatagtttgtaaggaagtagcgagatgttttagtggggaag

SEQ ID NO: 1425 - DNA, 2402 bp, Artificial Sequence
  chemically treated genomic DNA (Homo sapiens)
tttttttattgggatatttcgttgtttttttgtaagttgttgtttatttgttttttttagagaatatagagagggtgatagttttgggtatttgtttatgttttttttttgagttattttttagaagggaggttgtaggaattgtggtcgttaattttttaaagggtttatgatatagagttttattgaaagggcgatttatagtcgttgaattgttttattttatgtttattttatttttgaaagggatttatacgtgtgaggggagtacgttaggagttttatattttgtaaagtattattttatggtgggtatcgttgcgtggttcgtgtggaattttagttttgggattattttttttgggtttagaatttaggtttattatttgttaagagttttttgttattgtggtacgttattttttgtgttttagtttttttatttgtataaagtaggtattgatgttcgtttttgagaataaatgagttgttattggtaagaggtgttggtgtagtaggggtatttagaaggtttataggatgagagtaattagtatttattatcgtaatttatatcgttttttatttggagagaagaggttttagttttgtagaaggttttaggaggaggagttaggttaagtataaagtagaaggtggaggtaggggtgagtagaattgggcgtttagttgatagttgggaaggtgttgtaagttttaggtatggttaggtttatttttgttatatagatttttattttttatttttagatttgcgtgggtatatattttttgagagtttttttttcgttgggggttttatttttttggggagttgtagtaggtcgtataagaatttcggttttatcgttttttaagtttgtatagaggaggtaggagagggcgttacggtttgagaagttttaaatttattgagttttttattttttttagatttggaggtatagaaggagggtagaagttaggttttggggatacgttagtatgttagtttaggtagggggtacgggttttgtgagaaagagtttttgagttaatttttgcggggtgacgggttagaaaaaggtatagaagttgagggcgggtatagttaagtaaaggtttggcggaggaagtggtttttttttaggtaggtgtagagcggtcgtttatcgtgtttttgtagtttttagttttttatttagggattttttattttattttagataggataaagtaggtatagtttattttttagagtttgttaggttgagtttaagggaaattttttcggtcggtttgtgtggggttggttgaggtggatacgtggaatggtgatattttttattttataaatcggaagggttagggttgatagaggtattgtttattttttttttttttattataggtagaaggttgggtttattatatgttcgggataggggtagatttagaggttagtttagtttttttttttgtttttttggtttatttttttttttgtgaaggtttcgttggttcggttggcgttttttggtttttttttttttttttttttagtttttgggtttttttagtgtttttaaatttaattagatattgaggtaggggagttatatggtagaagttggtggttagagtagggagttttttgagttgtgggagacggaggtatttattcgattggagttatttatgttatattagtagttagtttggggcgggggatgttagattttattttgttttgtagtatggaggtggtggggatataattgatttttagttttttaatatttaagttgagggttatggttagagaaaacgaaagagtttggtttgggcgttaggaagtttgggttttaggttagtttttttttatttaggttgtgtgacgttgggtaaattttttgttttttttggttttgatgtatggttataaggagggtttggattcgatgttgtttaaagggattagtagtttgggtaagtttttttttggttttagggttttagtttttttatttggagacggaggggttggttgaagtttagaggcggtaattttttagtagaatagggagggaggacgtcgagtagtttttgagtaggggtagtcggaggggtcgtggggatttaaggttttattttatcgattttttttttcgggtggtttgggttgggattgtattttgggattttttttaggtggtgtttgggttttttttttcgtgatttttaatatttaagtatggtggtttcgatgttagaatttatttaatcgttttttacgtaggaaaataaaggtttattgagtgtaaagggtggtttttggatttcgaatggaagtaagtttcgggtttttttggggttttcggggattaggtcgggaggtagga

SEQ ID NO: 1426 - DNA, 2439 bp, Artificial Sequence
  chemically treated genomic DNA (Homo sapiens)
gagatgtagtaggaggtatagttttatttgttgttggagggagttaggtgagatttttttatatagggagtaggcggaatagtagcgtgggaagggggttggtattggagttagtcggattcggtttaaatttaggttgtgtcgttttttggttttgtgattttgagtaagtttttttattaatttgagttttagagtttgtatttgtaaatgagggtttggcgtatggtgttttggtgaggattagaagatatgatgtttaatttatgtgttttttgataataatattaataatggttattgatgatataagttgtgagtagtgtgttagggattgtatatgtttgaaattgtgttttaaatttatcgggttaggtacggtggtttacgtttgtaattttagtattttgggaggtcgaggcgggtagattatttgaggttaggagttcgagattagtcgggttaatatggtgaaattttatttttattaaaaatataaaaattagttgggtgtggtggtacgagtttgtaattttagttattcgggaagttgaggtaggagaatcgttggaattcgggaggtagaggttgtaaggagtcgagattatattattgtattttagtttgggtaataagggtgagattttattttaaaaaaaaaaaaaaaaaaaataatttattaaatttttataatttagtgttttttggtttcggttttatcgatgttttaggttaggtaattttttgttggggattgttttgtgttttgtagggcgtttgatagtatttttggtttttatatattagatgttaataaatttttattaattgtgataattagaaatattttttagatatggttagatgtttttagggggttagaattattttttattgagaattatagttataatttaatgaagtaggtatatcgagtattaaaaggatttatttacgttaaagagttagtaatggtggttttgggatataggttggttggttattatattgtaaaagttgtttttttttttgttttttcgatttatttttttagggtttatcgttagttgtaggttacggttgcgaagtatagtcgagtttttttttttattgagttgtgttaggcgtatggcgattatgtagtttttatttttgagtcgtagtagttttaggttgttcgttttttagttttttcgtagtcgttgatagcgtttttgagtttgttgttggtttcgtagtcgttgttttagttttgttcgttttttttcgagtattcggtttcgggtttgtagttgttgttttcgttgtagttggtttttgcgagtttttcgtagtcgtcgtatttttgttattaagaattgggttaggtttttaggtttttttttatttgttaggatagaataggggatagaataggtagtttaggtaagtaaaatttaggagataatatattgtgttaaaaaatttaaattataaaaatattagagggaaattttggaatatatttgtagaattgggagtaggggaggtttttttaaataatatataaaatttaggagttataagagaaaaaagatggataaatttatataaaaatgtttaaatttttgaaaaatgaaagatgtaataaagttaataagtaatagagtgggagaaaatataataagaatttagagtcgtaatatataaagagtttttataaattaataagattaataattaaataaaaatatggataaaaattattaataggtaagttttaaaataaaaatagttaataaatataggaaaatatgtattaatttattaataataattatagtagttattaatatttgttaattttattttttgtgttagatatattttaatttttatgataatattgtaaggtaggtattattattgtatttattttaaagatagaaaaattgaagtatagagtagttatttatttaaggtttaataattagtaatttgtgaattgtattatttaatgaaatataaatttaaaataataatattattttttatatattagaatggtaaaaacgtttaaatatgatttttaggatttaaatgggtttttatatatttttggtaggaggtatgttgatttaatagttaaaatatatagattttttgagaaattttttttagaattttttcgtttgagatatatttgtataaagacgtatatataaggatgttttcgtatcgttgtaataatataaaattggaaatttaggtatttattaattggaaatgggttaaatgaattatgttttaattttattaatgaatagtatgtagttatttaaaataagtgtatgtaatagaggtgaaagaattattaaaattagttgttttaagaaaaagtaaaatatatacgtaggcgtgtgtgcgtgtgtgtatgtgtttgtgttttttatataaaaa

SEQ ID NO: 1427 - DNA, 2439 bp, Artificial Sequence
  chemically treated genomic DNA (Homo sapiens)
tttttatataaaaaatataaatatatatatatacgtatatacgtttacgtgtgtattttgtttttttttagaataattgattttagtgatttttttatttttgttatatatatttgttttaagtgattgtatattgtttattagtgaagttaggatataatttatttaatttatttttagttgatggatatttaggtttttagttttgtattattataacgatacgggaatatttttgtatgtgcgtttttgtgtaaatgtgttttaggcgaagaggttttgagaagaattttttaaagagtttgtgtattttaattgttaaattaatatattttttattaggaatgtgtaagggtttatttgaattttggggattatgtttaaacgtttttattattttgatatgtaaaaaataatgttattgttttaagtttatattttattgagtgatatagtttataggttattagttattaaattttgggtaaataattgttttgtgttttagtttttttgtttttaagatgggtataataatagtatttattttatagtgttgttataaagattaagatatatttagtataaagaatgaagttaataaatattagtagttattgtaattattgttgataggttggtgtatatttttttgtatttattaattatttttattttgggatttgtttattgatagtttttgtttatatttttatttggttgttgattttattgatttgtaggagttttttatatattacggttttgagtttttgttatatttttttttattttgttgtttattaattttgttatattttttattttttaaaggtttaaatatttttatatggatttgtttatttttttttttttataatttttggattttgtgtgttgtttaggaagattttttttgtttttaattttataaatatattttagaatttttttttagtgtttttatggtttgagttttttgatatagtatgttattttttggattttatttgtttgagttgtttattttgttttttgttttgttttggtagatgaggaggggtttgagggtttgatttaatttttgatgatagaggtgcgacggttgcgggaagttcgtaagagttagttgtagcgggagtagtaattgtaggttcggggtcgggtgttcgaggaggagcgggtagggttggagtagcggttgcgggattagtagtaggtttaggagcgttgttaacggttgcgggaggattgggaggcgggtagtttggagttgttgcggtttaaggatgagaattatatgatcgttatgcgtttggtatagtttagtgaggagaagaattcggttgtatttcgtagtcgtgatttgtagttggcggtaggttttggggagatgggtcggggaggtaagggaaggggtagtttttgtaatgtagtagttagttagtttgtgttttagagttattattgttggttttttgacgtggataagtttttttagtgttcggtgtatttattttattgggttatgattgtggtttttaatggggggtgattttgattttttagaaatatttggttatgtttaggaaatatttttggttgttataattagtggggatttattggtatttggtgtgtagaggttagggatgttgttaaacgttttgtagggtataggatagtttttagtaaagaattatttagtttaaaatatcggtagggtcggggttaagaaatattgggttatgaggatttgataagttgttttttttttttttttttttgagatggagttttatttttgttgtttaggttggagtgtagtggtgtgatttcggttttttgtagtttttgtttttcgggttttagcgatttttttgttttagtttttcgggtagttgggattataggttcgtgttattatatttagttaatttttgtatttttagtagagatggggttttattatgttgattcggttggtttcgaatttttgattttaggtgatttgttcgtttcggttttttaaagtgttgggattataggcgtgagttatcgtatttggttcggtgagtttaagatatagttttaaatatgtatagtttttagtatattgtttataatttgtgttattagtagttattgttgatattattattaagagatatataggttaaatattatgttttttaatttttattaaagtattatacgttaagtttttatttgtaaatatagattttgagatttagattagtgaaaggatttgtttaaggttatagagttaggaagcggtatagtttggatttgaatcgggttcggttggttttagtgttagttttttttttacgttgttgtttcgtttattttttgtgtggggaagttttatttgattttttttagtagtaagtgaggttgtgttttttattgtatttt

SEQ ID NO: 1428 - DNA, 2451 bp, Artificial Sequence
  chemically treated genomic DNA (Homo sapiens)
ttgaggttgggagttcgagattagattgattaacgtggagaaattttgtttttattaaaaatataaaattagttgggtgtggtgggatatgtttgtaattttagttattcgggaggttgaagtaggagaatagtttgaatttgggaggtggaggttgtggtgagtcgagatcgtgttattgtattttagtttgggtaaaaagagtaaaatttcgttttaaaaaaaatttagttaggtatggtggcgtgtatttgtaattttagttattcgggaggttgaggtaggagaattgtttgaatttaggaggcgtaggttgtagtgagttacgattgtgttattgtattttagtttgggtgatagagcgagattttattttaaaaaataaaataaaataaaattatattgattttatatcggttttttattttatgtttattattttgtaagttttgatataaagataagttttgttttcgttttgttaggatttttatttttgaatgtttaagtatgttttggaagtttttaggggtaggaaagggtttggaaatagatttttttttgtgtaatttttgttttagggtagatagattttttttattagaagttttttttagttttaatttaggtttgtgatgtagtagggcgcgttattatttgttagagttatggtggttcggggtgtttagtttaggtttttttagttattgttttatgtaagttattgttttgtgtttttttagggaggggttggagataggtttgaggaggaggcgttatttacggagaaattaattaaagttttgtttaggaagtttagagattttttgtttttttagcggtgagttttggtttgttgttttttcggttttattttttttggttggtagtagtgatttggtttttagggtggtgtggagtaggtgtagggttcggagtagttttttgtttgtttagtgattttttgtttttttttattgtttcgttttgttttatttatttttgatagtgtttgatttttagtgtttttcgtgtttgggtgaagggtttgtgtttttgagttgagttgttggtaggtattttggaggtagagtaggttaattttggtatgaatttggcggttttggtattcgtaatttgttttgatatttttttcgtgagttaggtggtgagttattttataatgtaattttaaattgaggttttttgtttttttttaggatttttttttttatagtattattatatgtatatagtcgtaaaaaggttaagaggaaatattttcgacgggtttaggattttaaaaagtttttaagggtttttcgtattagtaaggtttagcgtcgtcgttttataggtaaagtacggtatagcggggagtgagatcgagaacgaagcggtgttttagtttaggttgcggggatttgtttttgtttagtttggttgtttttgtagtttagtttgtatttaggtaatgattgtatagtttaaggttgggaagttaggatttttttggtttggggttagttgtttttgtttggggttagttgtttttgtttggggtttgaattttcgaaggagtaggtagttgagagtaggttttttttaggaagagtttttagagttacgtgggggtatttttttaaatgtgtattttatttggtatttattagatttgtgcgtttgtgatttgtttgtttttgatattacgtataagggtaggtttttggggtggtggaaatggttagggtttatgggtttgtttttagtagttagttttgtggttgtaataaagtatagttttttttgtgttaagattttaattagggttaaggattagtgtgttcgttgttagaatttagagtttatttgttgttttgaaaagtaggtttttgaggttagtgggggagtagtgttttttatgttttttatcgaggagtttttgtgtttgttttttgttttcggttttaggagtttttttaattgatattgaagtggtggaagtagttgagtgttaggttattttttattattatattggggtagcgtttttaggtttttagtagtttttaggtgggttttaacgtggaaggattaattaattttttttaaagtagttgtagtcgggtttggtggtttacgtttgtaattttagtattttgggaggtttaggcgggtagattatttaaggtcgggagttcgagattagtttggttaatatggtgaaattttgtttttattaaaaatgtaaaaattagttaggtgtggtggtatacgcgtgtaattttagttatttgggaggttgaggtggaagaattatttgaattttggaggcggaggttgtagtgagtcgagattacgttattgtattttagtttgggtaacgttgtgattttgttttaaaaaaaaattaaaaaataaagtagttgtattttgattcgtataaaagta

SEQ ID NO: 1429 - DNA, 2451 bp, Artificial Sequence
  chemically treated genomic DNA (Homo sapiens)
tatttttgtacgagttaagatgtaattgttttattttttagtttttttttgagataaggttataacgttgtttaggttggagtgtaatggcgtgatttcggtttattgtagttttcgtttttagggtttaagtgatttttttattttagttttttaagtagttgggattatacgcgtgtgttattatatttggttaatttttgtatttttagtagagatagggttttattatgttggttaggttggtttcgagttttcgattttaagtgatttgttcgtttgggttttttaaagtgttgggattataggcgtgagttattaagttcggttgtaattgttttagaaagaattaattaatttttttacgttgggatttatttgggagttgttggaagtttggggacgttgttttagtgtggtgatgggggatgatttggtatttaattgtttttattattttagtgttagttgaggagatttttggggtcgaggataagggataggtatagaggtttttcggtgaagggtatggggggtattgtttttttattggttttaggagtttgttttttagagtagtaggtgggttttggattttagtaacggatatattgatttttaattttggttaggattttaatatagggagaattgtattttattgtagttatagggttaattgttggagatagatttatgggttttggttatttttattattttaaaaatttgtttttgtgcgtggtattaaggataaataaattataagcgtataaatttgatgagtgttaggtggggtgtatatttgggaagatgtttttacgtggttttgaaggttttttttgggggaggtttgtttttagttgtttgttttttcgggaatttaaattttaggtaaaggtagttgattttaggtaaaggtagttggttttaggttagagaggttttggttttttaattttgagttgtgtagttattatttaggtgtaggttgggttatagggatagttaagttgagtaaggataggttttcgtagtttagattggggtatcgtttcgttttcggttttatttttcgttgtgtcgtgttttgtttgtgagacggcggcgttgggttttgttggtacgaggggtttttgggggttttttggagttttgggttcgtcggggatgtttttttttgatttttttgcggttgtgtgtatgtagtgatgttgtgagggaggagattttaggggagggtagaaagttttagtttaagattgtattgtggggtgatttattatttggtttacggaggggatgttaggataggttgcgaatgttaggatcgttaagtttatgttagagttggtttgttttatttttagagtgtttgttagtaatttagtttagagatataggttttttatttaggtacgaaaagtattggaggttagatattattaggggtgggtgggataggacggggtaatgaggagaggtagaggattattggataggtagagggttgtttcgggttttatatttgttttatattattttaagggttaggttattattgttagttaggaggggtgggatcggggaggtagtaggttaagatttatcgttgagagagtagggggtttttggattttttgggtaaggttttggttggttttttcgtggatgacgttttttttttagatttgtttttagtttttttttaaagaggtataagataatgatttatatggagtagtagttggggggatttgggttgggtatttcgagttattatggttttggtaagtggtggcgcgttttgttgtattataggtttgggttgggattagagaaggtttttgatggaagaagtttatttgttttaaagtaaggattatataggggaaggtttgtttttaaatttttttttgtttttagaagtttttaggatatatttaaatatttaggaatgaaaattttagtaaaacggggataagatttgtttttgtattagaatttgtagaatagtgagtataaaatgaaagatcggtgtgagattagtatggttttgttttgttttgttttttgagatggagtttcgttttgttatttaggttggagtgtagtggtataatcgtggtttattgtaatttgcgttttttgagtttaagtaatttttttgttttagtttttcgagtagttgggattataggtgtacgttattatgtttggttaagttttttttgagacggagttttgttttttttgtttaggttggagtgtaatggtacgatttcggtttattataatttttattttttaggtttaagttatttttttgttttagtttttcgagtagttgggattataggtatgttttattatatttagttaattttgtatttttagtagagatagggtttttttacgttggttagtttggtttcgaatttttaattttag

SEQ ID NO: 1430 - DNA, 2384 bp, Artificial Sequence
  chemically treated genomic DNA (Homo sapiens)
ggggtttttggaattatttaattgtagtttttatttttatatttagttttttaggaggttttgttaggtttgtttttaaaaacggtcgttttaggtttttatagtttttttgtagtagtgagtaaatagtgaaatagtattttttagtttagaggttattatggttttttttttgtcgagtttagagtagtgttttgtggtaatgtattgagggttattttttattttttttgtgataagggttattgtcgtgtgtatttttaggttatttcgagttaaattagtgatgattaattttttttttattttatttttttttgtggtttatttgtttggatatttttttaaattttatcgtttgagtttattgtttttattacgttttgatggtgcgttaggttttttttaatatgtttttatgtttattagggatttatggttatttggaagaaggcgtgtggagagattcggaaggttagttttagtaggttttcgtggatgtatcggtttttagttatatgttttaggggtaggtttttttggttaggagtttttttgtgggcgaaggtgtaggttttttagtgttatagtttttgtagggatttgtttcgttttattcgggttttttatcgttgttttttttttacgaagtagaggtaggttattttattggttttgtttggttttgttgtgaagtgttgcgttagggaggtttttagttttgttagttttttagggtttagtttttggagtaagtggtgaaaagtttttattaggttgtgttgaggtttatttaggttaggtatttttttttagtagggttttcgttgagatttgggggtggaagtaggtaatggttatggtttggtggcggcggttggtgcgtatagttagttgtttttagtggtttgtgtacgtttttgggtcgtatgtcgagtatggagtggatttgtgggaattacgagttggtttaagtgtttataattgggtaagtagtttttttgtttttttttttggttatatttttttttatttggttgaaatggtaggtattttagaattttcggggtaggattattattttttgtttttatatcgtataggatttttcgggagtttcgttataggtttttatcggatgaatttttggaaggtttttattatttgtttggtggtttcggggatgtgtacggtgttaaacggggttgttatagtatacgtttcgtttttgtatttgtcgagtcgatagtttacggtgttattttttttatttatttcgacgttaattagaaatttatatttattacgatatttagtttgtagggagagagagttgtattttattttggttgtttagcgtttgggtttggaaattttgatttttttataggggttggtagttaaataagaggaatagttgataattatgtgatgttattagaagaaaatataaagtagggagattaataggaagggtgagtaaaagtaaagttttttaaaatttaggataggggtttgtggttatcgaagtttagtttgatttgttggggtgatggtttgattttttttagcgggtagtaggttttgttgtgtttgtgtttttgttcgagtagttagggtagtaaggtacggttggtgttttcgatttttttgtaagaggagtagatcggtggttggattttatttattgttttcgatttatgttaggttattttttaaatgtttaggtttttgattttttttttgggatgttattgtgtttattgtgacgtgggtgttttgttggttagtttttaaaggggtcgttagattttgtgttgggttttttaattggtgtatggataggttgaggaagtataggtcgggtagagttttggttaagaggggcgttttgcgtttatatttatttggtaagtttttgtagtatttgttcgtattttagttgttttcgtttaagttgtttagtatagggtattgtttatagaggggttattacgtcggttattcgtgttattggtggtttatttttatttttttgtcgtttttttttggttatggggtcggttttgggtcgggttaggcgtatattgagtgggcggtttttttagagggtattatgtaaaacgcgtagggttttgtttttttttgtagcgttgcggaatgttataaaggcgtagggtggttgtttaaagagtttggttttgtggggttgtagattaaagcggtttaggaagcgtcggacgtcgttgaagttggcgtggcgaggtacgttttgtagttttagtttaaagattttagaggtaaataagttatttttgatgtagttgtagagttcgggttgaggtttcggttttgtagtcgttttagcgttttttttttttatt

SEQ ID NO: 1431 - DNA, 2384 bp, Artificial Sequence
  chemically treated genomic DNA (Homo sapiens)
ggtggagaaagagggcgttggggcggttatagggtcggggttttagttcgggttttatagttatattagggatgatttgtttatttttgagatttttaaattggagttgtagaacgtgtttcgttacgttagttttagcgacgttcggcgttttttgggtcgttttggtttgtagttttataaaattaaattttttgggtaattattttgcgtttttgtgatatttcgtagcgttgtagagagggataaggttttgcgcgttttgtatggtgttttttggaaaggtcgtttatttagtgtgcgtttggttcggtttaaggtcgattttatggttaggaggaggcgataggagggtgagagtgagttattagtaatacgagtggtcgacgtggtgatttttttatggatagtgttttatgttgagtagtttgagcggaagtagttggagtgcgagtaggtgttgtagaaatttgttaagtgagtgtgggcgtaagacgttttttttggttagggttttgttcggtttgtgtttttttagtttgtttatgtattagttgggaggtttagtataggatttggcggtttttttgggagttagttagtaagatatttacgttatagtgggtataatgatattttaaaggaggggttaggagtttggatatttggggagtggtttggtatgggtcgggggtagtaggtggagtttaattatcgatttgttttttttatagggaaatcgggagtattaatcgtgttttgttgttttggttgttcgagtagaggtataagtataataaggtttgttgttcgttggagggggttaggttattattttagtaggttagattagatttcggtggttataaatttttattttgggttttgaaaaattttgtttttgtttattttttttgttgatttttttgttttgtgtttttttttggtaatattatatagttgttagttgttttttttgtttgattgttagtttttgtggggaaattagggtttttaggtttaagcgttgggtagttagggtaaggtgtagttttttttttttgtagattgagtatcgtaataagtgtgagtttttggttggcgtcggggtggatggggaggataatatcgtgggttgtcggttcggtaagtataagggcgggacgtgtgttgtggtagtttcgtttgatatcgtgtatattttcgaagttattaagtaggtggtgaaggttttttaggagtttattcggtgaggatttgtgacggggttttcgggaagttttatgcggtgtgggagtagagggtggtgattttgtttcgggaattttggagtgtttgttattttagttagatgaaggaaggtgtggttagaggagagagtagggggattgtttgtttagttgtgggtatttgggttagttcgtgatttttataggtttattttatattcggtatacgatttagagacgtatataggttattggaagtagttgattgtgcgtattagtcgtcgttattaggttatggttattgtttatttttatttttaggttttaacgggggttttgttgggggagggtgtttagtttaggtgggttttagtatagtttgatgggaattttttattatttattttagaagttgagttttgaggagttggtagagttgaagatttttttagcgtagtattttatagtagggttaggtagggttagtggagtgatttgtttttatttcgtggaggagggatagcggtaaggagttcgagtggggcggggtaggtttttgtagggattgtgatattgaaggatttgtattttcgtttatagaaagatttttagttaggagggtttgtttttggagtatgtggttggggatcggtgtatttacgaggatttgttagggttgatttttcggatttttttatacgtttttttttaggtagttatgagtttttggtgggtatggggatatgttgagggaggtttgacgtattattaggacgtgatgggaatagtgggtttaggcggtgagatttgggggagtatttaggtaggtgagttataggggagggtgaagtaagaaagaggttggttattattgatttgattcgggataatttagaggtatatacggtagtggtttttgttatagggaggatgaggagtggtttttagtgtattattatagggtattgttttgggttcggtaggagggaggttatggtggtttttgggttgggaaatattgttttattgtttgtttattgttgtaggaaggttgtggggatttggagcggtcgtttttggagataggtttggtaggattttttggagggttaggtgtgggggtgggagttgtagttgggtgattttaggggtttt

SEQ ID NO: 1432 - DNA, 2499 bp, Artificial Sequence
  chemically treated genomic DNA (Homo sapiens)
gatttttagtttatttttagagtatggacgtttttggttttgttattaaggttttttttttttttaagaggttgtttttttattattttaaattttttttaagataatcgtgagatatagagggtttagaaattaggtaagttttaaatataagtttgtataatattaatattaaatatatattataaataaggtttataaatataaaattgataaaaattgataaaaatcgataaattagttatgtttttttaaggaattggtttcgtagtttttgagattttttttaggagagtaatggtttttgcgtgagaaaattttaggatttattattagggggagtagttagtagcgaggatttaagacgggtttttcggcgttgggaggtgggtttgtttttatagagattttcgtgtatattttttagcgttatttgtattatttgttttgatttatagatttttaatatttattttacgttagggaatttaagtaatcgataggtagtgggggttttgtatagtttttaattttttagttttataaagagaaaataggtttatagaggtaaagtgatttgttttaggttacgtggcgatttcggggttggtttgggatttgagttttattttttggattttcggattagggtttttgggatattttgtcgttgttatagttgtttaaagtgaggttatttagatatttaggtgtttggtttgggatatgatgaggtataggaggttagtttaggttgtgattttttttttagaaatacggaaaggaggaagtttgggggtaacggttttgtaagttatgagagggaaggatcggtaggtttcggggagtaaggtaggggggtagttagttcggttatgagttagtttgtgttattagatttttgaattaatggaaagtcggtttcgcgtggttcgttcggttattttattgggtttggggaatttggggttgaggtgggagcgtaatagtttgattttgttttttagtttggaggaggtagaggggtttgtttagtttttattttttaaagtgtattttttagtggttagtagtagaggggaataggtttggggattcgggagttgttattttgcgatggttttttttatttatagagtatttgtcgtattttttatcggtaaggggtgttttcgaggttatcggggtagttgttttttggttatgagttttttgttttttttggagggtttggttttgcgtatttttttttttagggtttggtgggggttgtgttttcggtttcggttcgggttttttttttatttgttgaagattcgttttattgagtgtatgaagcgatggtagttatgtaggaatttgtagttttttagtttgcgttgaaaagtattcgaggtaggggtgggggtgggcggttgagaggtttttcggttagttttcgtgggtttagtcgtgtttgagttgtttagtagttgggttatgtagtagatgttgtttttgagttcgaggatgttcggtttcgttatttgtagtttttttaagttttcgatgtttagtttagatttttttaaattttgggttttggggaggcgttgttttaagtcggttagtttgtgtaggacgtagtttagtgtggtattgagggtttgtaggaagtttcgtttgtttagtttttttagggtttttttattggggaaggtttcggggcgttttttgtagtgtttttttagtttaggaatatttaggttttggatacgtatttggcgggaataggaggattatagggtgaatgttgaggattcggattatatttatagataagtaagttttgaaatgttagattttatgtattttaatttaattttttattggatagattcggaaattgaggttcgagagggaagaggattttaagattattgtaggtaaggtcggagtgatgttggggggttggtgggatgttcgtggggaatgaagagttttaagagggttggattttgttttgtttattgttacgttttagtgtttagattagagtttggtaggtgtgtaggaaatatattgagtaagtaggtgagtatggtgatggtgttcggagtttcgtttcgggattatagagttaggaaagttggagggttagttttagttttttagggttaaggttggaataatatagcgatttagtttttcgatttggttatatggagtggggttaggtttgttttttttgttttttattttttttttaattttatagttttttgagatttagatgttataagggtttaggtgtttatataggggtttaggagtttgttggtgttttgtatgagatttgtttgtttttggagttggttaaggagtacgcggtattttttcgagtagttgtttatagtcgttatgttcgttatgtttggaaataggagtgtaaggattagatttaaggtagagaagaggggtgttatttgatttggtgaggaaagttatagatgggagttt

SEQ ID NO: 1433 - DNA, 2499 bp, Artificial Sequence
  chemically treated genomic DNA (Homo sapiens)
aggtttttatttgtggttttttttattaagttaggtgatattttttttttttgttttaggtttggtttttgtatttttgtttttaagtatggcgagtatggcggttataggtagttgttcgaaagagtatcgcgtgttttttggttagttttagaagtagatagattttatgtaggatattagtagatttttggatttttatgtaagtatttgggtttttgtggtatttgagttttagagaattatggggttaggaagggagtgagaagtagggaggataggtttagttttattttatatggttaggtcggggaattgagtcgttatgttattttagttttaattttgaggagttaaggttggttttttagtttttttagttttgtggtttcggggcgggatttcggatattattattatgtttatttgtttatttagtgtgttttttgtatatttgttaggttttggtttaggtattgggacgtagtagtgagtaagatagagtttagtttttttgaagttttttattttttacgggtattttattagttttttaatattatttcgattttgtttgtagtgattttggggtttttttttttttcgggttttagttttcggatttgtttagtgggagattggattggggtgtatgaggtttagtattttaaggtttatttgtttgtgagtgtggttcggatttttagtatttattttgtgatttttttgttttcgttagatacgtatttaaggtttggatgtttttaaattgagagagtattgtagggagcgtttcggggttttttttagtgaggagattttgagggggttgggtaggcggggttttttgtagatttttaatgttatattgggttgcgttttgtatagattggtcgatttagagtagcgtttttttaaggtttaggatttggagaggtttgggttgaatatcgaggatttggagaagttgtagatggcgaggtcgaatattttcgggtttaggaataatatttattgtatggtttagttgttggataatttagatacggttgagtttacgaaggttggtcggggggttttttagtcgtttatttttatttttgtttcggatgttttttagcgtaagttggagggttgtaggtttttgtatggttattatcgttttatgtatttagtggggcgggtttttagtaagtggggggagagttcgaatcggagtcggagatatagtttttattaggttttgaggaagggggtgcgtaggattagattttttaggaaaggtaagagatttatgattaggggatagttgtttcggtagtttcgagagtattttttgtcggtgaaggatgcggtaggtgttttgtggatgagaggaattatcgtaggatgatagttttcgggtttttaaatttgtttttttttgttattagttattgagaagtgtattttaagaggtgggagttgggtagatttttttattttttttaggttgggagatagagttaggttgttgcgtttttattttagttttaagttttttaggtttagtggggtggtcgggcgggttacgcgggatcgattttttattgatttaggggtttgatgatataggttgatttatggtcgggttgattgtttttttgttttgtttttcgaggtttgtcggttttttttttttatgatttgtagggtcgttgtttttagattttttttttttcgtgtttttgaaggggaggttatagtttgagttggttttttatgttttattatgttttaaattagatatttggatgtttgggtgattttattttaggtagttgtaatagcggtagggtgttttaggagttttgattcgggggtttagggaatggagtttaggttttaggttagtttcgaagtcgttacgtggtttggggtaggttattttatttttgtggatttgttttttttttgtgaagttagggagttagaggttgtataaggtttttattgtttgtcggttgtttggattttttgacgtaaggtggatattaaaaatttgtaaattaggataggtggtgtaaatggcgttgggaggtgtatacggaggtttttgtaaaagtagatttattttttagcgtcgggaagttcgttttgggttttcgttgttggttgttttttttggtggtggattttggaatttttttacgtaggagttattgtttttttagagggggttttagaaattgcgaggttagttttttggagggatatgattaatttatcgatttttattaatttttattagttttatatttataagttttatttatgatgtatatttaatgttaatattgtgtaaatttatatttaaaatttgtttggtttttaaattttttgtgttttacggttgttttggaaaggatttggggtggtggaagggtagttttttagagagaggagggattttggtggtaaggttaaaagcgtttatgttttggggatgggttggaggtt

SEQ ID NO: 1434 - DNA, 2455 bp, Artificial Sequence
  chemically treated genomic DNA (Homo sapiens)
gttgtttttgtaatgatattatatgaaataatttgaaatacgattttaattgtatttggtgggtttcgttaattttgtaagttatggatagaatatttatttaaattgtagttaagtttaggtttatgggaatacgtgattaatttaggtgaatgaaagggattttaaaatattaatttttagtttaggtttttttaagattgtttgtatgttttttaatattattttagtttgagtgttacgtggattttgaatgcggatttgtgtgtatattgttgaaaaataagtaattgaaaattttaggtagcggggtggagtgatgatgaaagatatcgagatttatcgggaagttggaaatttttttttagtttcggtgtttgggttgtatttcgtttttttatttttttaaattattttcgtggtgcgagtgtgttcgtagtagatgttttttaattgttttttgtatttgtagtaggatgagtagtaaataaaattttttagatatcgagttaaagaaggaaggggtttatttagtcgggggtatcggtaagattttcgttttaagagtcgagtttttcgagtgagtaatttttgtgtttttaattttaagtgggtgcgtgtgagagggtcgtgattgattgagtaagttgggggtaagtgattgggagttgtacgtattgttaagtagatcggaataaaataggatagggattttataatgtttttttatataatgtttgtaatttttagataatataatcgattaggttaggggtcgatttttaattattaggtttagggtgtggcgttgggttgtcggtttgtggattttatttttgttttttagtttttattttttttttttttggtcgtagaaattaggtataagataatatgagaggtggtttttttttttatattgatagtaaaattttaagggtaggaatatttttattttttaatattattttaataattaaattaaaattttttatttgagtgtaagggagtggtgatttttttaagtcgggagtttttttattagggggttttttaagggtatttttgtttttagcgggggagtcgttattttattttgttttgtttagtttgagatacgtaattttttttagtttttatttttcgttgaatttttaaggcggggttggggggatgtttaggtttaggaaggaggttgggggttcggtcgttggacgttgtttatcggtagttcggattagagtaggagttttattattatttgcggggataggtgggatatatgtattttcggggttattttagattttttggaggatgttgattgatattgtttagtttgagaattattgtgttttcggagtagaggtttttttattgtttttgggtagcgggcgtcgggtatagggttttttcggatgagcggggcgggtatgagagtatatggaattgggggcgggaggtcggggtagttaaggaggagaaggaggaggcggagggggagggaggggaggaagaagaggaggaggagttttttgtggttattcggaggggagagatttggttgggaggcgttaatcgagttggtcgttgggattttgtatttaggtgcgttaatttttgggcgtacgtttttcgtagattttcgttgaaggagcggtgggcggcgcgtcgcgattttggcgggttatagattatatcgtttgtagggcgttgttggggcgcgtagagcggggttgttttagggtggtttttttaggttggggcgcggcgggcggcggtcgcgggcgcgcgttttattcgggtttcgagtaatcgttatcgtcgttgttaaagttcgttaatatggtggatttggaggtcgtggtggtcgatgttagttatttgatggttatggagaagagtaaggcgatttcggtcgattacgtttgtaagaggatcgttttgttcgaatttacgtattatttgtttcggttcgcgtcggttttcgacgtcgtcgttttttgcggtcgttagcgattttttgcgttcgggagaatcgggagttgagtcgtcgttgtttcggagcgggtgatatagcggagcgggcgatgcggggtcggttttttggttttagtttttgaaatggggtatcggagggcgggtggggggtatttcgggagagagcgttttaaagtgtttggcgtcgcgttttgcgcgtagttagtattttagtaaggggttggttatgatttggttggattagttttatttttgtcgtttttttttttagttttgtttttttttgttttattttcgtggttttatttgttgtattggtgtggtttttttgggttttttgtttgttattcgtttgcgttttattttggtcgtttttttttttcgggttttgtggtttttttttttaattttatttttttagttttttttgggtcgattatttggggattgtagg

SEQ ID NO: 1435 - DNA, 2455 bp, Artificial Sequence
  chemically treated genomic DNA (Homo sapiens)
tttgtagtttttagataatcggtttagagggagttgaaaggatggagttggaaaggggaattatagagttcgggaagaaggagcgattaggatggagcgtaaacgagtgataggtaaggagtttaaagggattatattaatgtaataggtagaattacggggatgggataggagaggatagggttgggggagggggcgatagggatggaattggtttagttaagttataattagttttttgttggggtgttagttgcgcgtagggcgcggcgttaggtattttggagcgttttttttcggagtgttttttattcgtttttcgatgttttattttagagattggagttaggaggtcggtttcgtatcgttcgtttcgttgtgttattcgtttcgggatagcgacggtttagttttcgattttttcggacgtagggggtcgttggcggtcgtagggggcggcggcgtcggggatcggcgcgggtcggggtaggtggtacgtgggttcgggtaggacggtttttttgtaggcgtggtcggtcggggtcgttttgtttttttttatggttattaggtaattgatatcggttattacggtttttaggtttattatgttggcgagttttggtagcggcggtggcggttattcgggattcggatgggacgcgcgttcgcggtcgtcgttcgtcgcgttttaatttgggggagttattttggggtagtttcgttttgcgcgttttagtagcgttttgtaagcggtgtaatttgtagttcgttagggtcgcggcgcgtcgtttatcgtttttttagcgagggtttgcggggagcgtgcgtttaagggttggcgtatttgggtgtagagttttagcggttagttcggttggcgttttttaattaagtttttttttttcgggtggttataaaggattttttttttttttttttttttttttttttttttttcgtttttttttttttttttttggttgtttcgatttttcgtttttagttttatgtgtttttatgttcgtttcgtttattcggagaagttttgtgttcgacgttcgttatttaagggtaatggggaggtttttgtttcggggatatagtagtttttaaattggatagtgttaattagtattttttaggaggtttaggatggtttcggaaatgtatgtgttttatttgttttcgtaggtggtgatgaaatttttgttttggttcgggttatcggtgaatagcgtttagcggtcgggtttttaattttttttttgagtttgaatatttttttaatttcgttttgagaatttagcgaagagtaaaagttggagaaaattgcgtgttttaggttaagtagagtaaagtggggtgacggttttttcgttaggaatagagatgtttttagggaattttttgatggaagagttttcggtttaagaaggttattatttttttatatttaggtgagaggttttagtttggttgttgaaatggtgttgagaaataagagtatttttgtttttggggttttattgttaatataagggaggagattattttttatattgttttatatttagtttttgcgattaaagaaagaaaaagtaaaaattaaaaggtagaaatgaaatttataagtcgatagtttagcgttatattttgggtttggtagttaaagatcgatttttgatttaatcggttatgttatttagagattataaatattgtatagaaaagtattgtgaaatttttattttgttttgtttcgatttatttagtagtgcgtgtagtttttagttatttatttttagtttgtttaattaattacgatttttttatacgtatttatttagagttgaaggtataggaattgtttattcggggagttcggtttttgagacgggagttttgtcgatgttttcggttgaataaattttttttttttttaattcggtgtttgaggagttttgtttgttgtttattttgttataaatataagagataattagggagtatttgttgcgagtatattcgtattacgggggtgatttagggaagtggaaaagcgagatatagtttaaatatcgaagttgggggggaatttttagtttttcgataggtttcggtgttttttattattattttatttcgttgtttggggtttttagttgtttattttttagtagtgtgtatataagttcgtatttaggatttacgtgatatttaggttggagtggtgttaaggaatatgtaggtagttttaggaagatttaagttggaaattaatgttttaaagttttttttatttatttgaattggttacgtgtttttatgagtttagatttggttataatttgagtaaatgttttgtttataatttatagggttaacgggatttattagatatagttaagatcgtattttagattattttatgtaatgttattgtagaagtagt

SEQ ID NO: 1436 - DNA, 2471 bp, Artificial Sequence
  chemically treated genomic DNA (Homo sapiens)
ggttttatgggtgggttttgagatgtggtatacggtatttagggtagggttgggaagggtggggtgtaggggtttttttggttgtagggtttatttattaggtgtttgggtttgttgtattgagtaggtatgggttttggttttttttattgttttttttaggtttagtttgtgtttagggtttaggatagggtttggttagtaggttttaggtttttaagatgtttttagtttttggagtgtgtgtgatgatgagtatttatggagttttttgtatgttgggttttgggtttttgagagggttatcgggtggcgattgagttacgaggtggagggttagttttagggattttaggtgatttcgtgtcggtattacgttttttttttatgggtagttttgggcgtttttttttggttttgggtttagtggtttgtggtttgatttcgtttatttttgtttggttgttttagtagtagtaggagtttatgttggagaaggtgttatggggtaggtggagggttcggttgatttagatgattttttaagtttttttttaatgaatatttgtttagtgtagttttttttttttaaattttttttatataggtagatatttttttggtttagggtaatttgttgagtttttgtttaaatatagtagttttgttgttttttaaatataattaatttaatttgggatttggggattcgaggtgggtagtattgggttttagatgagtttttattattttagatttatgtaggaagagttaggtagggtggggttttggggttatttggtgggtttagggttagggtatcgcgatgtttttattttttatattacggggttttttggttgtagagttggggatttagttgggaatgttggttatagaggtagagagtttttattttgttgggttagttttgatttggtttttttagggtggtttagtgtttttttttgttttttttttggtttttatcgtttatatttttttatttgtttattttggataataattagtatagtgtagtgtggttttgtagtgatattatttgtagagaggttaggtttagtttttttcgttttttaaaaggttagtaggttttaggagttgggggtggggtttggttgtggggtttttatgttttaggggttagggtagattttttttagtcggtaattattgtagattttttttttggttagtattcggggatttttttgtttttgtttcgtttttttattttgtttgttgagatatagggttttacgggttttttttttggggtcgggttgattgtggtttgcgaggggtagttatcgtgttgggtttttttgttagaggtagaaattataaaattatttggaatatatacgttttaagtgatagatttaatttaattttataaatattgatttcgcgtttaatttattcgttttttagtgttagtttatttttgagaagtttagtttggtagtcgtagattttatttaattttagttttataatgttattagttcgtagtttgggagttgggtttatttaggttttggtaggtggggttagagttgggttttgatttttgtatttatatttattattatgtaaagtgttgggaagaggggtggggagttacggtaagttgagggtttaggtttgttttagttcgttagatgttcgttttggttgttttgatttagtagttaatttttgcggggtattgcggttatatggtgattttagtacggggatatttattagaaatggaattgatggattaaagtggaattaagcgaattgatttttttttttgggtattgaaatgttgcgtttaattaagcgattaatttcgtgggtagggtggttgtggggacggaggtgggggataaggggatggtggttatggtggggattgaaaggtggttatggggatagatgaggtgagttaggtggttttggggtcgagttttagtttagtttttggtaaagaggttttgtgtgtagaagttcgggtgtgatgttttttttttatcgattgtgtgatatcggttagttttgtttcggttgagtttcggtggttttgatgtaattttgtggggtttggtggtagggattgatttatttatttgtttatttatttatgtgtttgatatatattgtagtaaaggaaaggtgagagtagttataggttggttagggacgatttagattttagagtgtagcgtgttcgtttttttttttgtgaggtttagttttggtgtgtgtggatttttaggtattttttaggtttattttttattttgtagtgtttcgtttatttgtttatatattttgttttgtggtttgatcgttatttttttgttttgcggttaattggatggtttaagcggattgagttgggtagggtggttatatttgtggagtttgtggttgtggttggaggtttcgtgggtagttga

SEQ ID NO: 1437 - DNA, 2471 bp, Artificial Sequence
  chemically treated genomic DNA (Homo sapiens)
ttagttgtttacggggtttttaattatagttataggttttataggtatgattattttgtttaatttagttcgtttgggttatttagttggtcgtagagtagaaggatggcgattaaattatagaatagagtatgtggataggtgggcggggtattgtagagtggagggtggatttggagggtgtttgggaatttatatatattaaggttggattttataagaggaggggcgggtacgttatattttgaagtttgaatcgtttttggttagtttgtggttgtttttattttttttttgttgtagtgtgtgttaaatatatgaatgaatgagtaaatgagtgaattagtttttgttattagattttatagggttatattaaggttatcgaggtttagtcgggataggattggtcggtattatataatcggtggggggagggtattatattcggatttttgtatatagggtttttttgttagaggttgggttggagttcgattttagggttatttggtttattttatttgtttttatagttattttttagtttttattatggttattatttttttgttttttattttcgtttttatagttattttgtttacggagttgatcgtttgattaagcgtagtattttagtgtttagggagaaaaattaattcgtttggttttattttaatttattagttttatttttgataaatgttttcgtgttggagttattatgtagtcgtagtgtttcgtagagattagttgttaggttagggtagttagggcgagtatttggcgagttggggtaagtttggatttttaatttgtcgtgattttttatttttttttttagtattttatatggtggtaagtgtgggtatagaggttagagtttagttttggttttatttgttagggtttggatgagtttagtttttaagttgcgagttggtgatattgtggggttgggattaaatgggatttgcggttgttaggttgggttttttaggaatgagttggtattggaggacgagtggattagacgcgaggttaatatttgtggaattgaattgaatttgttatttggggcgtgtatgttttaggtaattttgtggtttttgtttttggtaggaaaatttaatacgatgattgtttttcgtaggttatagttagttcggttttaggagagagattcgtggagttttatgttttagtaggtaaggtagggggacggggtaggggtagggaggttttcgagtgttggttaggggaggaatttgtagtggttgtcggttaaggagggtttgttttggtttttggggtatggaggttttatagttaggttttatttttagtttttgggatttgttggttttttaggagacgggggaggttgggtttgatttttttgtaggtggtgttattgtagggttatattgtattgtgttggttgttgtttagggtgggtagatagagggatgtggacggtgggagttaggggaagggtagaaggggatattgggttattttggagaagttaggttagggttggtttagtaggatgggggttttttgtttttatggttagtatttttagttgagtttttaattttgtagttaggaagtttcgtagtgtgaaggatggggatatcgcgatgttttggttttgagtttattaggtggttttagggttttattttgtttggttttttttgtatgggtttggggtgatgggggtttatttgaggtttagtgttgtttatttcgaatttttaaattttaaattggattagttgtgtttagaaagtagtaaagttgttatatttgagtaaaggtttagtagattattttgggttaagagggtgtttgtttgtgtgagggggatttgaggaggaaaaattgtattaaataagtgtttattgaaaagaaatttgggggattatttgagttagtcgggttttttatttgttttataatattttttttagtatgggtttttgttgttgttgggataattaagtaggagtggacggggttaggttataggttattgggtttaaggttaggaaggggcgtttaggattgtttatgggagaagggcgtggtgtcgatacgaggttatttggagtttttgggattggttttttatttcgtgatttagtcgttattcggtggtttttttagaagtttagggtttagtatataggaagttttatgagtgtttattattatatatattttagaggttgagaatattttggaggtttggggtttgttggttagattttgttttgggttttgaatataggttgggtttggaagggatagtgaggggggttagagtttatgtttgtttagtgtagtaagtttaggtatttggtgggtgggttttgtagttagggaggtttttgtattttattttttttagttttgttttgggtatcgtgtgttatattttagagtttatttatggggtt

SEQ ID NO: 1438 - DNA, 2371 bp, Artificial Sequence
  chemically treated genomic DNA (Homo sapiens)
tttttttagtttggagttatttttgaggtttttgttgttttttgaggaggaagaaaatggatttttttttttaggtttttaggttttatgttttaggtttttttatttttttttttttttttttttttttttttttttttttttgagatggagttttgttttgttatttaggttggagtgtagtggcgcgatttcggtttattggaatttttgtttttcgtgtttaagtagtttttttattttagttttttaagtagttggggttataggcgtgtattattatttttggttaattttttgtatttttagtagagatggggtttcgttatgttggttaggttggttttgaatttttgattttaggtgatttgtttttttggttttttaaattgttgggattataggtatgagttatcgcgtttagttttaggtttttttatttttgttttttttttgattttttttttttaaagaggttttttattttaagaagcgtttggtttattggttttggtttcgttttgttgatagttagttattttttgagtttagttaggagattgaaaagttttattgtatttttttaagggttttatagttaggaaaattagtaaaggggaatatagtgtttgtagatcggtgaggtttagggtcgttttataaaaatggatttttggaaaaatataaattagtaatttattttgtgaattttattggtttaaaaaaaaaaaaaaggttattttatttgaataatgaagagagataaattatttttagttttttttttattagtgaataaggatataaatatttaatagaaatggaatatttatataaagttttaggtttgatttattagttattttagttttataaaatttagtatttttattaaaataaaatgatgtttaaaaggtttgtttgtttttaagaaaattgtatttaatatagggtaagattttgttatggtttatttatttatttatttattttttaaataaagtttaaatttttttgattttacgtttgttattatagttggagggaaatcgattttagaatttatttgatatgtcggatttttttgtggtatttattttatcgtttagtagttagttatgatgttataagtttattagattttcggtagggggaaaacgttggggaattggaaagaatggatgttttttattcgttaggaaggtaggggaaggagttgggtatgtttgggaggagaagtcgcgtggttggtgggggataggagtaggtttaatgtttgtgatattaaatgttaggtagaaatttgaaaattttagttatttagatgtttttttaatatttagatgtttggtattgagtagattatgttttcgttttttaggaggtgtttagtatttgggttttgattttaggttttcgggtgagcgtatattgttaggagttgtatattttcgcggttgtttatttttgggtttgggattttttttttaaatttttatatatagatgataggagtaattaggtttagatttttaaaagttgttgaagtagtgatttgagaagtttagtttttggaacgttatgtaagttaaaaaggaggaaaaaaaaaaaaaaatttttagttaatatatatataaatatatgtgatttttaagttataggatttaagaatttaaaataaaattagtaagtttgagaattagggttggagatcgatattgagaagcgttgagtttttttttaggagtacgtttttttttaaattagaaaaatatcgtatagttttgttttttttgataaagttttttgtttttagggagtcgatagttgttaataaaagtatagggtggaatttatttatacgtaggttgggttttaaggagttattaagtgtagaaatggaaatggttttgtttaggagttttgtttttttgcgattggtaatggggatttttggagtttgggggagtttcgtaggttatagatggagtagggttttggttttttggtgtttggttaagtatttgttttacggaagttattatttaggtttgtgatattatagttaattgtttttgataatgagttaggaattgtaggttttttagggttgtaagtttgagattttatagggagtcgggaggagaggtagttggggaggggttatcgttaattaaaatttagtgtttagataataagaaagaagtggttgagggggatagtatcgtttttggtggggagagggtaggaggaagtgggtgtgcggaaggggttgagggtggggtatttgtgtttttattttttattataatttttatttttagtttttatagatgaggatattgaggttaggggtggttgagtggtttgt

SEQ ID NO: 1439 - DNA, 2371 bp, Artificial Sequence
  chemically treated genomic DNA (Homo sapiens)
gtaggttatttagttatttttggttttaatgtttttatttgtaaaggttgggggtggggattgtggtaggagatgagggtataaatattttatttttagtttttttcgtatatttatttttttttgttttttttttattagagacgatattgttttttttaattattttttttttgttatttgagtattgggttttaattggcgatggtttttttttagttgttttttttttcggttttttgtgaagttttaggtttgtagttttgaggggtttgtagtttttggtttattgttaggggtaattagttgtgatgttataagtttaggtggtgattttcgtggggtagatgtttagttaggtattaggaggttaggattttgttttatttgtgatttgcggggtttttttaggttttaggggtttttattattagtcgtagggaggtagggtttttaggtaaagttatttttatttttgtatttgatggttttttgaagtttagtttgcgtgtaaatgagttttattttgtgtttttgttggtaattgtcggttttttggaagtaaggggttttgttaggaagaataaagttgtgcggtgtttttttgatttgggggaaagcgtgtttttgggggagggtttagcgttttttagtgtcggtttttagttttggtttttagatttgttggttttgttttgggtttttaagttttatggtttaagagttatatatgtttgtgtgtgtgttggttgagggtttttttttttttttttttttttttggtttatatagcgttttagagattgaattttttaaattattgttttaatagtttttaaaaatttggatttagttatttttgttatttatgtgtaaagatttagaaaaaaaattttaaatttaagggtgggtagtcgcgaggatgtatagtttttggtagtgtgcgtttattcggagatttgaggttaaagtttaaatgttgagtattttttgggaggcgggagtatggtttgtttagtgttagatatttggatattgagaaaatatttgggtagttggggtttttaggtttttgtttgatatttaatattataaatattgagtttgtttttgttttttattagttacgcggtttttttttttaaatatatttagtttttttttttgtttttttgacgggtaagaaatatttattttttttaattttttagcgttttttttttatcggaaatttgatgggtttatgatattatggttggttgttgagcgatgaagtggatgttataaagaaattcgatatattagatagattttgaaatcggtttttttttagttgtagtaataggcgtgaagttaggagaatttgagttttgtttaaaaaataaataaataaataaataaattataataaagttttgttttgtattaaatgtaatttttttaaaaataagtaaattttttggatattattttattttaatagaaatgttgagttttatgaaattaaagtggttaataaattagatttgaagttttgtgtgagtgttttatttttgttgagtgtttgtgtttttatttattaataaaagaggagttaggaatggtttatttttttttattatttaaatgagatagttttttttttttttttaggttaataaaatttatagggtaaattgttggtttatgtttttttaggaatttatttttatggagcgattttggattttatcggtttgtagatattatatttttttttgttggtttttttggttgtgaagtttttaagagaatgtagtaaagttttttagttttttggttgggtttaggggataattggttgttagtagggcgggattaagattagtgggttaggcgttttttggaatgagaagtttttttgaaaggagagagttaagagaggaatagaagtaaagggatttggggttgggcgcggtggtttatgtttatagttttagtaatttgggaggttaagagggtagattatttgaggttaggagtttaagattagtttggttaatatggcgaaattttatttttattaaaaatataaaaaattagttaggagtggtggtgtacgtttgtaattttagttatttgggaggttgagataggagaattgtttgaatacgggaggtagaggttttagtgagtcgagatcgcgttattgtattttagtttgggtgatagagtaagattttattttaaaaaaaaaaaaaaaaagaagaagaagaagaagaaaaagtaaagggatttgggatatgaagtttaggggtttgggagggggaatttattttttttttttttaaaagatagtaaggattttagaaataattttaggttgaggggg

SEQ ID NO: 1440 - DNA, 2467 bp, Artificial Sequence
  chemically treated genomic DNA (Homo sapiens)
aggttttgtttgttattttggttgtttttcgtttaaggttttgtttgttattttggttgtttttcgtttaggtacgtttgttttttattttagtttttttggtaggttgcggatgtttttatatttttttgttttggtatttgtgtttttatttgaatgttttttttttttgtttgaatgttgttaatttattttttaggttttagtttaaataatttttttttggaagttttttttgattttagttgggtaggagttttttttgtgtttttattgtttttgtatttttttatttatgttagtttttattattgtttgtttttttcgagaatgttttttttttatttttatgtattttttttttaattttacgtttggtacgtatttggtgtttagaaagtgttattgagtgattgaatgagtgaaggaatagtgaatgaattagtttttgttttgttatgattattgttatttttttgggtaagttattgtttttttgagttttagtttttttatttttaaaatatttttgcggtttcgtttgtttttagattgtaagttattgtatatatttttgaagttattaatattaacgttgtagggtatgtttgtaggtttgttagttgggtttgtgtttttaaaattgtgcggtggtcgttagggattttggttagtgaacgtagaaaggggagagattttgtttttgagagtagtagtaggaagagtaggggttttggaggtagttagttttgggttttaatttttgttttagttttttttggttgtgtgatttatagtaatatgtttttgagttttggtttttttatttataaaatagggttatagtattcgttcgtagggttgttgggtggattatatgaagttaagtttttttaaaatttagtttggatgtggaaagtgttagtaattaagagttttttatttttgtagtttaaggaatagtaggtggagtttgtacgtgggtagtggcgttttagatttgtttttttgttttatatataacgtttttttagaaggaagggaagagttaggaggggaggggtaggggtttataggtcgtattaaatggtggttttttatcgtaaaatttagtttaatttgaattttagtattagagggtttatggggtggagtttcgggatttttagtttcgtttttttttaggttaggtgttacggcgtagattcgtacggttttttttcgtttttcgtcgtaagttttcgttgtttatcgttttcgcgtaaggcgttttagttcgtaatttagtagtgtaggtcgggttcgaagaagtgggagcgcgcgggtaggtagacggggcgtacggcggtcgagcgtattatcgggtggtcgagttgtagtagcgttacgtcgtagttatggttgtttttttcgtggtacgggtgtaggagtaggcggtttattttgaaggatatttttttaggttagcgcgagttttgttatattttgtttaggaatacggtttatagtatcgtggaggttatgttggggtggggtggggtggggtggggtggggtgaggtgaggtgggaggaagttgtttttttttatttagggatttttaagatagttagattttcgttcgggatagtgttttttatatttagtttttttttttttttttgaaggtcgtttagttggtggtatagcgtttagtttttatttattcggtttgtttgggttttacgttttagttttatttttttttagatatgggtgtgtttttttaagtttttgttattttatttgtaaatgggaatggtattttttattcgaatgtttttgagagaatttaataagatcgtgtatttaaaaaatgtagtatagtgttaggttttcgatatagatttttttttttttgtgtgttttatagatttaggttgttttgaattttttgaggttggtgggttttagtggggagcgggtgggagttgagcgtggaggaattggattgcggtagttagttgtttgggtggtagatgggtagttttcgggtttttattttttatttgagggtagtggggagtttgagatggggttaaagagagttaggtggttagagcgttttgcgttttagagaggatataaaaggggatttttgtgtagggtttgggggcgggatttggagtttagatttgtttgggggtggattgggggaggttttagtttattaagtagatgggaaagatggttatgaggtttgatgagatgttttttgggggttttttagttttatttgttatttcgtgttatatttcggggagtgttatagtttatgattaggttgggtagttttgttttttattgaatttttagtatttagtatagttttggtatatagtaggagtataagtgttgttgaatgagtgaatgagatgaatgaatgaattattggtttaatttaaagtaagatattaaaagtagatggt

SEQ ID NO: 1441 - DNA, 2467 bp, Artificial Sequence
  chemically treated genomic DNA (Homo sapiens)
gttatttatttttggtattttgttttaagttgggttagtaatttatttatttattttatttatttatttagtaatatttgtgtttttattatgtgttagggttgtgttagatgttggggatttagtaaaggatagaattgtttaatttggttataagttatgatatttttcgaggtgtgatacgaggtagtaggtggggttggggagtttttaggggatattttattaggttttatggttattttttttatttgtttggtgggttgaaattttttttaatttatttttagatagatttgggttttagatttcgtttttaggttttgtatagggatttttttttgtattttttttgggacgtagggcgttttgattatttagttttttttaattttattttaggttttttattgtttttaggtagagggtagagattcgaaggttgtttatttgttatttaggtagttgattgtcgtagtttaatttttttacgtttaatttttattcgttttttattaggatttattagttttagggaatttagagtagtttgggtttgtaaagtatataggaaaaaagaaatttgtgtcgggggtttggtattgtgttatattttttagatatacggttttattggatttttttaagaatattcgagtagaaaatgttatttttatttgtagatgaggtggtagaggtttagagaggtatatttatgtttagggagggatgaagttggggcgtggaatttaggtaggtcgagtgggtgaaggttgaacgttgtattattagttaggcgatttttagggagggaagggagggttgggtgtggagggtattgtttcgggcggggatttggttattttgagggtttttggatggggagaggtagtttttttttattttattttattttattttattttattttattttattttagtatggtttttacggtgttgtggatcgtgtttttgggtaaggtgtggtagaattcgcgttggtttggagaggtgttttttaaggtgagtcgtttgtttttgtattcgtattacgaagaggatagttatgattacgacgtggcgttgttgtagttcgattattcggtggtgcgttcggtcgtcgtgcgtttcgtttgtttgttcgcgcgtttttattttttcgagttcggtttgtattgttggattacgggttggggcgttttgcgcgagggcggtgagtagcggggatttgcggcgggaggcggagggagatcgtgcggatttgcgtcgtaatatttggtttggagaagggcggggttgggggtttcggggttttattttataggttttttagtgttgggatttaaattgggttgaattttacggtagaaaattattatttaatgcggtttgtaggtttttgtttttttttttttagttttttttttttttttggaagggcgttatgtgtggggtaaaggggtaggtttgggacgttattgtttacgtgtaagttttatttgttgttttttgggttgtaagggtggaaggtttttaattattagtattttttatatttaggttggattttaggggaatttgattttatataatttatttaatagttttacgggcggatgttgtggttttattttatggatggagaaattaaggtttagagatatgttgttgtaagttatatagttagagaggattggagtaaagattagaatttagggttggttgtttttagagtttttgttttttttgttattgtttttagaaatagggttttttttttttttacgtttattgattagagtttttggcggttatcgtatagttttggggatatagatttagttggtaaatttatagatatgttttgtagcgttagtgttggtggttttaaaaatgtgtatagtgatttataatttggaagtaggcggggtcgtagagatattttaaggatggggaaattgaggtttagaggaatagtgatttatttaaggggatggtagtggttatggtaaagtaaaggttggtttatttattatttttttatttatttagttatttaatgatattttttgagtattaagtacgtattaggcgtggggttaggggaagggtatataaggatgaagagagaatattttcgggggagatagatagtggtaagagttgatatggatggggagatgtaggaatagtggagatatagaggaggtttttgtttagttagggttaggggaggtttttaggggagggttgtttaagttgaggtttggaagatgagttggtaatatttagataaaggggaaagatatttaggtgaagatataggtgttaagataggaagatgtgagaatattcgtagtttgttagaggggttgaggtggggggtaggcgtgtttgggcgaggagtaattagaatggtagatagggttttgggcgaggagtaattagaatggtagatagggttt

SEQ ID NO: 1442 - DNA, 2340 bp, Artificial Sequence
  chemically treated genomic DNA (Homo sapiens)
gatggcggcgatcggcggcgttgaggcgggattcgggcgagtcgagtgaaggtagcggcgagcggagattttaggagatcgggttgggtttttattttgaggcggtagtagtttcgtttcgtcgttattcgtcgttttgggttcgcgatattatttttggggtgttttaggtttttcgcggtttagtttaggggtcgagtcggggattggagtagcggtcgtagtcgtttttaggaaggggttggagcgggtagaaggaggagggcgggcgggagttgtttaaacggggaaggcgggaaagttgcggggtcgggagggggcgtgcggtcgtttcgggggtttgcggattcgggtcgtttttttttttgttcgggtcgttttcgttttcgggggcgtcgtgaggtcgtcggagacgcgggaattcgggtttaggtcgagttgtgcggttcggaattcgcgatgcgggggtttttcgggttgttagggggaaagggttcgtggtcgcggttacgggagggttggggttgcggttggtaggagaaagtacgaggagtttttttttttttttttttatagagttttgttgagttagttgttgtcgtaaaattgtcgggagaattttattggtttgttttggggattataaaaatggtggttttgggggttgtttgtgtaaattatttggtattttgtgtgttttttgcgtgtaattcggtttggtcgtgttttcgtggtgggcgttttttttatgtaggtttattttttttttattaattattatttgtagatttattttatagcgtgtaaaagcggagaaatatttttgtttttttttttggagggttaagttggtggttgattatatttttttttaatagaataaagtaaaaaattgaattttaaataaagtttgttgattggataaggttttttaaaattcgattgttggttttatggaatgtgtgttgttagttaatttgtgcggtggtcgtggtttcgtttaattgtattgtaatgagaggatttaatttttattttcgattgtcgggatttttgtagtttttagagttggtaggggttgggagtgttgtttaggtaggtttttggagaagggagtggtaagaggattcggagttatcgtgttcggagattggaagaaatttggacgaagttgagaaggtattatttgtttgtatcgtagaagtaataagaaaattttagaaattggtaatcggcggatgtgtatttttttttatttgtattgattggtattttgagtttttgaaaggagtggttggaagaagagaatgtagaattttggatatggtttttattttggaatagatttggagtttagaattttttttattgttcgtgtgacggggtttattttgttttttttttttcgatatttatttatattatggggtgaagaaggttgttgattgtaggagtttaagttattttaaaaaaagtttgaaatttgttttttaattgtaatttgaagttttaaaatgataaagtgttatatttgaggattttttttttttgattattttggttattttaaaggtttatgtttgaatataatttgtatgtttatttattagggaaagagtaattttgttttttttttttttatattttgaagaaaagttttcgaagagttatttaataatttgtgtattttataagtatatatttttatggtattagttttttatttgtattaatagtatgaaatagtgaatttttatttatgttgttatattttagtatattgagataaataaaattatttttgttttttggagttgataatattgaattttataaatttttaaattattgaattgagattgggttttaatatttgttttatatttgttaatatttaatgtaattatgattttttttttttaatgtgaaaattaaatttaatatttatttttattaatttttataatttattttttatttttgaattttgaatttttatagattgtatttaagatttggaaggaatattaggggtttatttgattttatataaatgttgtttgaattttgttttttttttatattgttgtttgagatttatttggtatttttttaaaattaaattttgagttgtaataatattttgattttaaagaacgtagaaatttagggtttatcggtttgtttaagttgtggttgatatagttcgttgtgtttaattttagttttttaagtttttggttgttttagttttttagtgaattggacgtgtttttaggttttatttttttttttttttttaggttatttaatttagtaatttataaaatgttttttagt

SEQ ID NO: 1443 - DNA, 2340 bp, Artificial Sequence
  chemically treated genomic DNA (Homo sapiens)
attgaagagtattttataaattattggattaaataatttgaagaaaaaagaaggaatgaggtttgaagatacgtttaatttattgaagaattggggtagttaagagtttgaaaaattaaaattaaatataacggattgtattagttatagtttgggtagatcgatgggttttgaatttttacgttttttaaaattaggatattattgtagtttagggtttagttttggaaagatattagataaattttaagtaatagtgtgaaagaaaggtagagtttaggtaatatttatataagattagatgaatttttgatattttttttaggttttgaatataatttgtgaaaatttagagtttaggggtagagagtagattgtgaggattaatgaaaatgaatattaggtttgatttttatattagaaaagggaggttataattatattaaatgttggtaaatgtgaaataggtgttaaaatttagttttaatttaataatttgggagtttataaaatttaatgttgttaattttaagaggtaagaataattttgtttgttttagtgtgttaagatatgataatataagtaaaagtttattattttatattgttgatataagtaaaaaattggtattataaaaatgtatatttatgaaatgtataaattgttaaatagtttttcggggatttttttttaggatatgaaaaaggagggggtagagttgttttttttttggtagataagtatataagttatgtttaggtataggtttttgggatgattaaagtaattaggaggaaaaagtttttagatatagtattttgttattttgaaattttaaattatagttaaaaaataggttttagattttttttgaggtaatttgagtttttgtaattaataattttttttattttataatgtaaatgagtatcgaaaaaaaggaaataaagtaagtttcgttatacggatagtaagagaaattttgaattttaggtttgttttaggatgagagttatgtttaagattttgtattttttttttttaattattttttttaagaatttaaaatgttagttagtgtaggtaaaggaagatgtatattcgtcggttgttaatttttgaaatttttttgttatttttacgatatagataagtgatgtttttttaatttcgtttaggttttttttaattttcgaatacggtgatttcgaatttttttgttatttttttttttagggatttatttaggtagtatttttagtttttgttagttttggaagttgtagagatttcgatagtcggggatggggattgaatttttttattgtagtgtaattaagcggaattacgattatcgtatagattggttgataatatatattttataagattagtaatcgaattttgagaagttttgtttaattaataggttttatttgggatttagttttttattttgttttattaggaggaaatataattagttattagtttagttttttaaaagaggggatagagatgttttttcgtttttgtacgttataaagtgaatttataagtagtagttggtggagggaaaatgggtttgtatggagaaggcgtttattacgaaggtacggttaagtcgggttgtacgtaagaaatatataaaatattaggtgatttatataaatagtttttaggattattatttttgtggtttttaaggtaaattagtgggattttttcggtagttttgcggtaatagttagtttaataaagttttgtgaagaggaaaagaagaaagtttttcgtatttttttttgttagtcgtagttttagttttttcgtggtcgcggttacgagttttttttttttgatagttcgagggattttcgtatcgcgggtttcgagtcgtatagttcgatttgaattcgggttttcgcgttttcggcggttttacggcgttttcgagggcggagacggttcgggtagggggaggggcggttcgggttcgtaggttttcggggcggtcgtacgttttttttcggtttcgtagttttttcgtttttttcgtttgaatagttttcgttcgtttttttttttttgttcgttttagtttttttttgggggcggttgcggtcgttattttagttttcggttcggtttttgggttaggtcgcgaagggtttggggtattttagaggtgatgtcgcgggtttagggcggcgggtggcgacggggcggggttgttgtcgttttagggtgggggtttagttcggttttttggggttttcgttcgtcgttatttttattcggttcgttcggatttcgttttaacgtcgtcgatcgtcgttatt

SEQ ID NO: 1444 - DNA, 2468 bp, Artificial Sequence
  chemically treated genomic DNA (Homo sapiens)
acgtttatttcgtagaatggtttatatttaaatagatgatttttgtttttgagatggaatttcgttcgttatttaggttggagtgtaggggcgcgatttcggtttattataattttcgtttttcgggtttaagcgatttttttgttttagtttttttagtagttgggattatagatatgtattattaatgtttagttaattttgtatttttagtagagatggggtttttttatgttggttagattggtttcgtatttttgattttaggtgatttgttcgtttcggttttttaaagtgttgggattataggtgtgagttattatatttagtttataggtgattttttaaattaatattgagattatagtattatgttttttttaaagtagtttggtgaggataattttttatttttattttaaaaaggaataaagaaaattgtagtatgaataaaattagaatggagaatgggttattttttggagtggtttgagttaagagggagttgttttttgttcgtgtttgtttttttgagggttttttgggtatagttgataaattatttaagtttgaaagatatacgttattttattaatatagttatttttttttattgttttagtggtgaaggtgtttgtattgtaatatggaggggtattaaatgttttgcgggttttagttcgttgttataggttaggtttgtttgtagttaagaaggttgtttaaattttagatgttatttggaggtatgaggatttgagtttagaggtggtagtgttttatttagggaagttaatagatcgtgttttaggttttagttttgggttgggttaggattaaattttggttttttttttttggtattaaggggattagtgtttggttgtttgtagggggttagagtagggagggttttaggaagggttttagagtgggtttataggggatttttttttttggttttttggagtttaggtcgtcgagggcgtaaagttgtacgttattttgggtaagttgggttcgtagcgtgggcgcggtgaggacgcgtagtttatgtagtcgtttttaagagtaagagaaagcgtcggggtttttatcgtagtcgtcggtgggaggtatattggggtagtcggggtgcgttattagttcggttgttagggtgtggttcgttagggtattttttaggattcgcgttagggtttcggatacgcggtgagcggatatgtgtcggtcgtaagtgtttaggtttacgaaggcgtttgtttatttgtggggggcgggatattagaggtgggattaggtcgggttatggttaagggttaggtaggttagggaagggacggcggggtgggagggggtaattggggtggcggtagcggtcgacgttagattcgttttcgggttgagaaacggatatagttagttaggtgaatagttagtgcggagggatagaggtagttatggtaggagacggggcggggagttttatcgtaggtcgtggcgggagaaggggtttacggcggttcgggcgtcgcgttttacggcgtaggcgaaggtacgcgcgggggtttttagttaagtgtagttatttatatcgcgttttagcggtagtcgcgtaaagcgtattttataggtttgtagcgtttcggcgaatatttggtatacgtttgcgggcggagcgggttagggaggagtacgtttttttatttgggggtatcgaattttttttatttttttagtttcgtttgggagtaacgttttttaaattgggattattaattacgtatttgggagtacgtgtacgtgttggtgttcgttcgcgtgcgtgggggttttgtttagtagttttcggaagtagtttagttgggtttcgagtttttttcgtatttagagggcgagcgagagatattttgagcgatcgggagtagttgtcgaggatatttttttcgtgttttcgtgtgatggttttagtgtttgaatgcggaagttatttatcgttagtttttaacggttttatagtatttttcgggcggagttttgggggttttcgcgagtatttttttgtagttgcggtttcgtatttgaggtaaatttacgttttcggtcgttatcgtttttcggaattttattttgttaaggaagaagtttttcgggtcgagtagcgatgaggcgttacggcgggtcggatttacggggcggttttcggataggttggcgtggaggttcgtggggatgttgtgtttgagggcggagcgcgagttggagtattagcggtcgcggagtcgcgcgttttaagtcgatcgtcgttttgttagaggttttttttttatttgcgggttagtttcgtcgcgtttttcgtggtcgtatcgttgattagtagggatacgttggttatagtttcggttagaaaggtttttacgatatttttatcgcgtcgcgggtagtaattaaagtcgttcgcggtgatt

SEQ ID NO: 1445 - DNA, 2468 bp, Artificial Sequence
  chemically treated genomic DNA (Homo sapiens)
ggttatcgcggacgattttggttattgttcgcgacgcgatgagggtatcgtggaggtttttttggtcggggttgtgattagcgtgtttttgttggttaacggtgcggttacggagagcgcggcggagttggttcgtaggtgaggggagggtttttagtagggcggcgatcggtttggggcgcgcggtttcgcggtcgttagtgttttagttcgcgtttcgtttttaggtatagtatttttacgggtttttacgttaatttgttcgagggtcgtttcgtgggttcggttcgtcgtggcgttttatcgttgttcggttcggaaggttttttttttggtaagatgggatttcgggaggcggtggcggtcggagacgtggatttgttttaggtgcggagtcgtagttataggaggatgttcgcgaggatttttagagtttcgttcggagggtattgtgaggtcgttaggagttggcggtggatgattttcgtatttaaatattggagttattatacggaagtacgaggagggtattttcggtagttattttcggtcgtttaaggtgtttttcgttcgttttttaggtgcgggaggagttcgaggtttaattaagttgttttcgggagttgttgggtagggtttttacgtacgcggacgggtattagtacgtgtacgtgtttttaggtgcgtggttagtgattttagtttggagggcgttatttttaggcggggttgggggagtaggggaagttcgatgtttttaggtgaaaggacgtgtttttttttgattcgtttcgttcgtaggcgtgtgttaggtgttcgtcgaggcgttgtaggtttatggggtgcgttttacgcgattgtcgttggagcgcggtgtgggtggttgtatttggttggaggttttcgcgcgtgttttcgtttgcgtcgtggagcgcgacgttcgggtcgtcgtgggttttttttttcgttacggtttgcggtgaggtttttcgtttcgttttttattatagttgtttttgttttttcgtattggttgtttatttggttagttgtgttcgttttttaattcggaagcgagtttggcgtcgatcgttgtcgttattttagttatttttttttatttcgtcgttttttttttagtttatttagtttttggttatggttcggtttggttttatttttgatgtttcgttttttataggtggatagacgttttcgtgggtttgagtatttgcggtcggtatatgttcgtttatcgcgtgttcggggttttggcgcgggttttggaaggtattttagcgggttatattttgatagtcgagttgatggcgtatttcggttattttagtgtgttttttatcggcggttgcggtgaaggtttcgacgtttttttttgtttttgggagcggttgtatgagttgcgcgtttttatcgcgtttacgttgcgggtttagtttgtttaggatggcgtgtagttttgcgttttcgacgatttggattttaagaggttaggggaggaggttttttgtgagtttattttggaattttttttggaattttttttattttgattttttatagataattaagtattaatttttttagtattaagaaaggggagttaggatttagttttggtttagtttagagttgggatttggagtacgatttgttgatttttttgggtaggatattgttatttttgggtttaggtttttatgtttttaaatggtatttagagtttgagtagtttttttggttgtaggtaggtttagtttgtggtagcgggttagggttcgtagagtatttggtgtttttttatgttgtaatgtaaatatttttattattggggtagtggggagagatggttatattaataaaataacgtgtgttttttaaatttgggtggtttattagttgtgtttaggagatttttagagaaataagtacggataaagagtagtttttttttggtttaaattattttaggaaatggtttattttttattttggttttgtttatgttgtaattttttttatttttttttagggtgggagtgggagattgtttttattaggttgttttggaagaggtataatattataattttagtattgatttaagaagttatttgtaggttgagtgtggtggtttatatttgtaattttagtattttgggaggtcgaggcgggtagattatttgaggttaggagtgcgagattagtttgattaatatggagaaattttatttttattaaaaatataaaattagttgggtattggtggtgtatgtttgtaattttagttattggagaggttgaggtaggagaatcgtttgaattcgggaggcggaggttgtggtgagtcgaggtcgcgtttttgtattttagtttgggtaacgagcgaaattttattttaaaaataaaagttatttgtttagatgtaagttattttacgggataggcgt

SEQ ID NO: 1446 - DNA, 2782 bp, Artificial Sequence
  chemically treated genomic DNA (Homo sapiens)
tttttttttttttttaggtggtagaaatttagttttagttaaagatatatagaatttttgtagtttgattttttttttgtttttttttttttgttttgtttaattttggtagtttaagttttaagatagaggagagatagatatgttttttttttaagatggggggttttgaaagattgatgtttattagagggttgaaaaggggggttgttttcggagtagagtaaagcgaggatttagtggggttatggagtaatagggggttaggttttgttttttttattaatttagtattaattgttttttgtattaatagttattgattgtttatagggttttgggtattgttttaaaagtggggattaggaggaaagttttttaatggggttgatattttagtagagaaagtaggtaataaataatgaaataaattagaatataggaagagttgttatagaagaggttttttaatgtggggaggggaagataagacgtggagaggtatttacgaggtttatgataaatattttattatttttgtttagttagttttttttttttttttttttagatgcgtatatatatatatatatatattttttttttttttttttttttggtttttgtattagattttttaaattttgtttgatttgtttttgtatatttttagggttttgggattttagtagttggttttttgttttttagggttattagtaaagttagaggaagttggatggtaaagggtagtggggttttttattttttttcggaagaagtgtgttgaggttagacgcgttacgtgatagtgggattcgtttttttggaagttagtttagttggtggagatggtattttagaggtttcggtaggttttttatttagttttgttttacggttgtttgtcgtttgttgaaagattagttcgagtacgattaggacgtggatagttttaaggttatttttattagtaggtttgttttgatttttttagtattggttattatagtttttttttggattgatttttgcgtggttttatttttatgtaggtttttttttttagggttagtttgaggtttatttaggtttagtagtaaagtgttttataaattgtaaagtgttatatatatcgcgtttgtggttatgtgtttaagaatgttgtgattaaagtgaggagaaaggtagtttttgtgttatagtttttattttagatatacgagttcgtggagttgtgggaaagaaggaggaggtgttggacgaagttggaaatggtaaggggaggttggggaaatatttagttgttagcggttttttcggggtacgttgggattagttaagagaatgtaatagttaggggtgggagtttttttcgcggttgtatacgttaggtttttttagttttgtaggtttaaatgaaggtttatgtgaagggggaatcgttttggatagtttagtgttttttagagttatattattattattttttattacgcggaggtggttgaaaaaaaggagttatagatgggtaaggtttgaggggcgtcgggttgacgaggtaaaaaaaaaagtaggtgttgtggtgttgatgggaggtttttttttttttataggacgttaggaaggaaatggggtcgttatagaggtggtgaggtgttagggtttacggagggtttatttgttgcgcgggggcgagtattaggcgttgggtgtacgggggttcgtgcgtgtttgtgtacgtgcgtgggtgtgcgcgtacgtgtgtttaggtcgcgcgtgtaggggtcgtgcgtgcgtttgtgtgcggtgcgcgcgcgtgtgtttcgcgtgtgtacgggcgtggtagaggcgggcgcgcgatttggtcgcggtagtgcgtgttcgtcgttttgcgcgttcgttcgtcggagcgtagtatcgttttcggttaggagtgtgtatgcgtggggtgagtgagcgagtcgggggttcgggcggggtgggttgcggagagtagttacggggcgtcgtcgtttttaggacgttttggtatcgggtttagtttttaggttttacggcgaggcgaggcggtagttggggtcggtcggttattttttttttaatagttggtcgcggttcggggggttgcgggagaggcggagagggggcgtcgggaggggtttgaaggcggttcggtcgagtttcgcgttttttttttcgggtgcgggtcgcggggggcggtcgcggaagggcggggttttcgggcgggcggtttgcggttttcgaggagtttcgagaataaaaggagacggcgacggttttttcgtggttaaaataatttgcgttggcggtagtttaaggtcgggtcgcggttttcgagtttttcgttttaattttttcgtcgtcgttgttttttttttgcgtttggttggaggtcgtaggggtcgatttttttcgggagtcggcgaggtgcgggcgaggtgcggattttcggtcgtagtcgggcggaggtgggacggtatttagttacgtcgcgttttcggttgttttttttttttttttatcgcgcgcgtcgttttgtttcgtttttttttttatttggatttcgggtagatttgttaatttacggttacgtgaggttgggaggggtggggacggtttcgattttagcgtttttttagatgtttttatattttatttttcgtgtagttaggtttttgtaggcggcgcgtttcgtattttgtatgcgggggagagaggtgtttttttttgtagggcgcgggtataggtacggtaaggt

SEQ ID NO: 1447 - DNA, 2782 bp, Artificial Sequence
  chemically treated genomic DNA (Homo sapiens)
gttttgtcgtatttgtgttcgcgttttgtaggaggaagtatttttttttttcgtatgtagggtgcggagcgcgtcgtttgtaaaagtttagttgtacgggagatggggtataaaaatatttgagggagcgttggggtcggagtcgtttttattttttttagttttacgtagtcgtgagttggtaagtttattcggaatttaggtgggaaagggggcggggtaggacgacgcgcgcggtggaggggaggagagggtagtcgggagcgcggcgtgattgggtatcgttttattttcgttcggttgcggtcgggagttcgtatttcgttcgtatttcgtcggttttcggggagggtcggtttttgcggtttttagttaggcgtaggaaggaggtagcggcggcgaaggggttaaggcggagggttcggaggtcgcggttcggttttgggttgtcgttagcgtaggttgttttgattacggaggagtcgtcgtcgtttttttttgttttcggggtttttcgagggtcgtaggtcgttcgttcgggggtttcgttttttcgcggtcgtttttcgcggttcgtattcgggagggaggacgcggggttcggtcgggtcgtttttaggtttttttcgacgtttttttttcgtttttttcgtagtttttcgggtcgcggttagttgttggggagggggtggtcggtcggttttagttgtcgtttcgtttcgtcgtgggatttgggggttgggttcggtgttagggcgttttgggaacggcggcgtttcgtggttgtttttcgtagtttatttcgttcgggttttcgattcgtttatttattttacgtatgtatatttttggtcggaggcgatgttgcgtttcggcgggcgggcgcgtagagcgacgggtacgtattatcgcggttaggtcgcgcgttcgtttttgttacgttcgtgtatacgcgggatatacgcgcgcgtatcgtatataaacgtacgtacggtttttgtacgcgcggtttgagtatacgtgcgcgtatatttacgtacgtatataggtacgtacgggttttcgtgtatttagcgtttggtgttcgttttcgcgtaataggtgggtttttcgtgggttttggtattttattatttttgtagcggttttattttttttttggcgttttgtgagggagggagaattttttattagtattatagtatttatttttttttttgtttcgttagttcgacgttttttaaattttatttatttgtgattttttttttttaattattttcgcgtggtggaaaatggtggtgatgtgattttgaggggtattgagttgtttagagcgattttttttttatataagtttttatttgaatttgtaagattggagggatttggcgtgtgtaatcgcggagggggtttttatttttggttgttgtatttttttggttgattttagcgtgtttcggggaggtcgttgatagttggatgtttttttagtttttttttattatttttagtttcgtttagtatttttttttttttttttatagttttacgggttcgtgtatttggggtggaggttgtggtatagaaattgtttttttttttattttagttatagtatttttgaatatatggttataggcgcgatgtatgtggtattttgtagtttatgaagtattttgttgttaagtttgagtgagttttaggttggttttgggggaggggatttgtatggggatggaattacgtaggggttagtttaggaaggagttgtaatggttagtgttgggagagttagggtaggtttgttggtggaggtggttttggagttgtttacgttttggtcgtgttcggattaattttttagtagacggtaggtagtcgtgaggtagggttgggtggagggtttgtcgaggtttttgaggtgttatttttattagttgagttggtttttaggagggcgagttttattgttacgtgacgcgtttggttttagtatatttttttcgggaaagagtgaagggttttattgttttttgttatttagttttttttggttttgttaatggttttagggggtaggagattaattgttggaattttagagttttggaggtgtgtaagggtaggttaaatagaatttggaggatttggtgtaagagttaggaagagagagagagagagagtgtgtgtgtgtgtgtgtgtgcgtatttgagagagagagagagagagattgattgagtaggaatggtgagatgtttattatgggtttcgtaagtatttttttacgttttgtttttttttttttatattgaggagttttttttgtgataattttttttatgttttggtttattttattgtttattatttgttttttttattggagtgttaattttattagagagttttttttttggtttttatttttagaatagtgtttagagttttgtggataattagtaattattagtgtaaagaatagttagtgttgggttggtggggagggtaggatttggttttttgttgttttatggttttattgagttttcgttttgttttgtttcgagggtagtttttttttttagttttttggtaggtattagttttttaaagttttttattttgagagagaagtatgtttgttttttttttgttttgggatttgggttattaggattagataggatagaggagaagaaatagaaagaaaattagattgtaaaggttttgtgtatttttagttggggttaagtttttgttatttaaaaaaaaaaagaga

SEQ ID NO: 1448 - DNA, 2377 bp, Artificial Sequence
  chemically treated genomic DNA (Homo sapiens)
tattttagggaggttagttgggggtaggttttggatttgttttaggtatttgaagtttaaagaataggatatattggttttgttatttttttttatttttcgtttatttattttttaggttagattattgtatttttgtttttattattgtgtgatttgttcggtaattattttttttttttttttgaaatggagttttgttttgttatttaggttggagtgtagtggcgcgattttggtttattgtaatttttgtttttcgggtttaagtaatttttttgttttagtttttcgagtagttgggattataggtgtatgttgttatgtttggttaatttttttgtattttaatagagatagggttttattgtgttgtttaggttggttttgaatttttgagtttaggtaatttgtttattttagtttttcgaagtgttaggattataggtatgagttatcgtgtttggttttggtaattattttttttttttttttttgtttggtgttttgagatagagttttgtttttatttaggttgaagtgtaatggtatgagtttagtttattgtaattttcgttttttgggtttaagtgatttttttattttatttatttcggtttttaaagttttgggattataggtatgaggtattgtatgtggtttttggtaagtatttaaaagtttgttttgtgatagtttatgatattagatttatttaagtggagggttggatagagttttcgatatattcgttggtatggaggtttagtttaggagtataggagttttgaggaggtttttgatttatcgttttatggttttaaatagttagtggggttttttggtgaaaggtatttttatgttatgaaattgcgttattttcgtggtaatggttgttgataatattggttttcgaagtttttgagtttttaatggtcgattttgtatttaggaagttattagggtggtgatggggttggggtaggagtgggaagggttggggtaatgaggggaagttagggttttgggggaaattttttatttggggtgagggatgtggaggtagatattgggtattggggtagggttagggggtggaggtgttttggggaggagagggtaggattgggttcgtattgggatgtattgttttagtcggttttttgggaagatttcgtatagttggggttttagcgatcgtttcgtaagtatggcgaatattacgttttttagtattagggagtttacgttttgaaaaaggatggatagtaaaggggttaaggtaaagtggtatagggatatatatgagggttcgttttttttttattagagttgcgatttttgatttaattgtttggaggttttggagtataggttttagcgttggtttatttttatttagagatgggggttttattatgttgtttaggttggtttcgaatttttgtgtttaagtgattttttcgttttagttttttaaagttttgggaatataggtttaggtttcggtgtaatgaggtgttatttagatcgtgaatttcggtgtttttaattgcgtaacgggaataatattattcgtatcgcgtaagcgataggttttaaagttattggtgttgcggcgtttatattttttttatttgtaagatggtttcgtatagtcgtagaagtatttttcggggtttttcgttaacgttgggtaggtggttcgggagcgagtagcggaagagtaggttgttgaggttttcgttgtagatttatattaggcgcgtttagttcgcggtcggttttatttgtcgcggtttcggttttttttcggttaggtcggtttcgtttcgttttaggcgcgggcgtaagaggggggcgaaaatatggagtattttgagggtttcgcggttgatttttgatttcgattcgcgtatcggagaggttgatttttgattttttattttacggggtaaatttttagtttttcgggttgtattcggcgttaggtttcgtttaagtattttcggtattattggtaggttcggcgttcggcgttacgcgatagcgacgaggcgcgtcgtcgttttggggtagtgttcgggtatttagattgttgtaagtcgtttttggttaggtagtcgttaatagtttcgttttcggttatagttgtcgtttcggtcgttatggcgcgggttcgatcgggttttaggttaggttgcgtttcgtttttttcggacgggttcggtttttttcggtcgcgttcggtttttttttcggtcggtttgggttttttcggttatattcgggttttttcggttttattcggtttacggttgcggcgttcggtttttttcgtgtttcggttcgggggtttttttcgaaggtcgaattt

SEQ ID NO: 1449 - DNA, 2377 bp, Artificial Sequence
  chemically treated genomic DNA (Homo sapiens)
gaattcggttttcggaaagagttttcgggtcggggtacggagagagtcgagcgtcgtagtcgtgagtcgaatagagtcggagagattcgagtatgatcggagaagtttaggtcggtcggaagaggagtcgagcgcggtcggaaggaatcgagttcgttcgaagggagcggagcgtagtttggtttggggttcggtcgagttcgcgttatggcggtcgaggcgatagttgtggtcggaagcggggttgttggcggttgtttggttaaagacggtttgtagtagtttaagtgttcggatattattttaaaacggcggcgcgtttcgtcgttgtcgcgtgacgtcgagcgtcgagtttattaatggtgtcgggagtatttgggcggggtttggcgtcgagtgtagttcgaggagttgagggtttatttcgtgaggtgggaggttaggggttagttttttcggtgcgcggatcggggttaggggttagtcgcggggtttttaggatgttttatgttttcgttttttttttgcgttcgcgtttggggcggggcggggtcggtttggtcgggagggggtcggggtcgcggtaggtagggtcggtcgcgggttgagcgcgtttggtgtgggtttgtagcggaggttttagtaatttgttttttcgttgttcgttttcggattatttgtttagcgttggcgaggagtttcgggaggtgtttttgcggttgtacggagttattttgtaggtgaggggggtgtgagcgtcgtagtattagtggttttagggtttgtcgtttacgcgatgcgggtagtattgttttcgttgcgtagttgaggatatcgaggtttacggtttgagtaatattttattatatcgaagtttgggtttgtatttttagagttttgggaggttgaggcgagaggattatttgagtataggagttcgagattagtttggataatatagtgagatttttatttttaaataaaaatagattaacgttaaagtttgtgttttagagtttttaggtaattggattagaagtcgtagttttggtgggaggaaggcgagtttttatgtgtgtttttgtgttattttgttttggtttttttgttgtttatttttttttagggcgtggattttttggtgttagaaagcgtgatgttcgttatatttgcggagcggtcgttggggttttagttgtacggagtttttttagagggtcggttggaatagtatattttagtacgggtttagttttatttttttttttttaaggtatttttattttttaattttattttagtgtttaatgtttgtttttatattttttattttaagtagggaattttttttaaaattttgatttttttttattgttttagttttttttatttttgttttagttttattattattttgatagttttttgggtgtagagtcggttattgaaaatttaagagtttcgagagttagtgttgttagtagttattgttacgaagatggcgtaattttatggtatggagatgttttttattaaggagttttattggttgtttgggattatggagcggtgagttaggagtttttttagggtttttgtatttttgagttgaatttttatgttagcggatgtgtcgggggttttatttagttttttatttgagtggatttgatgttatgggttgttatagaataggtttttaaatgtttgttagaggttatatgtagtgttttatgtttgtaattttagaattttgggagtcgaggtgggtgaggtgggaggattatttgagtttaggaggcggaggttgtagtgagttgagtttatgttattgtattttagtttgggtgagagtaagattttgttttaaaatattaaataaaaaaagaaaaaagaaatgattgttaaggttaggtacggtggtttatgtttgtaattttagtatttcgggaggttgaggtgagtagattgtttgagtttaggagtttaaaattagtttggataatatagtgaaattttgtttttattaaaatataaaaaaattagttaggtatggtagtatgtatttgtagttttagttattcgggaggttgaggtaggagaattgtttgaattcgggaggtagaggttgtagtgagttaagatcgcgttattgtattttagtttgggtgatagagtaagattttattttaaaagaaaaaaagaaatgattgtcggataagttatatagtgataggagtaggggtgtagtagtttggtttgaggggtagataggcgaggggtgggaaagaatagtagagttagtgtattttattttttgggttttaggtatttaaaatagatttaggatttgtttttaattggtttttttgagatg

SEQ ID NO: 1450 - DNA, 3534 bp, Artificial Sequence
  chemically treated genomic DNA (Homo sapiens)
agtaaatggttatattatgagttatgaatatagagtgatttatttataatagttatgtaatatgtgggatttaaaaggaattggtatatttatttttattgatattaaaattttttaaatttattattgattgaggaaaataatttggttagatttagtgtttaatatggtagtatttatgaaaaatattaaattaagaatagaaaaattgtatataaagttagagatagattttaaatttttttttttttttttttagatggagttttgtttttgttatttaggttttggagtgtaatggcgtgattatggtttattgtaattttcgttttttgggtttaagtaatttttttgttttagtcggtatagttgggattataggtatgcgttattatatttagttaatttttgtatttttagtagagatagggttttattatgttggttaggttggtttcgaatttttgattttgtgatttgtttatttcggttttttaaagtgttgggattataggcgtgagttattgtattggtcgattttaaatttttatgtttggagattagtaaagggtatggaataatgaaggggaatttttattttattttgtttttgagatagggttttagtttgttgtttaggttggggcgtagtggtgtaattatggtttattgtagttttaatttcgaggttttaagtgatttttttattttagttttttaagtagttgggattataagtatatggtattatatttggttaatttttaaattttttgtagagatggggttttattatgttgtttaagttggttttaaatttttgggtttaagtgatttttttgttttagtttttgaaggtgttgggattataggcgtgagttattacgtttggtttaattttatttattaaatatgttagaattaagtgtttttttttgagatttgtgagtttttttagtgaaaaaatatttaaaaggtttgttagtatgtttataaaaaagaagataggaggggagggataggatttaggagggtagtttatagtttgtttttttcgttttgttttggggcggagtttgtattgcgagttgagttttttttaaggcgtatgttatttttggagttaagtttagtagtgtagtcgtatagttagggtggggtgggttaggcggagaagtaggttgtagagggggtagggtggtggtttggggattttagggaagggttatgggagtacggcggtgtttttagtgttggggtttttaggggttttggtatcgcgagttgatttttgggggtaggaggttattttatgtaggggtagtaggtgttggttattatattgtttagtaaggtggtagtagaggttttttaggttttttttttaggaaaggagtttgggttgttttgatgagttttttgtttttttttttttcgtaggatgaagatgagacgttataagtttttttttatgttttgtatggtcggtttgtgttttattttttttttgtatttttttaagattttgttttatgttattttttttcgagaattggttttttttagttttaatttggtgtttagttttttttggaataatgtttcggttacgttttaggttagtttcgagttaggaggttttgatttgttgcgtattttattttatttttattcgtttttgttgtagtcgttgtcgtttagtaaggcggtcgaggagttttatcgggtggatttggtgttgttcgaggatattatcgagtatttcgtgcgtattaaggtcggcggcgtttgttttaaattcggtattaagatgttggagaggtcgttttcgggacggtcggaggagaagtttgagggggttaacggtttttcggttcggcggttatttcggtattttttgagcgttcgggagcgtacggggggtcgaggcgttcggcgtaagtgggtggagtgcgtgtgtttgttcggttggtacggatttagttgcggcgtgtttattgtggtgtagtattttaatttgtttattaaggagcggttggtgtttagggaggtgtcgcgtcgcgttattaacgttattaacgttaattacgagttcgatttgttggacgtgcgtttttacgagttgggcgacgtggtggacgtttttgtggtgtgcgagtttaattttacggtttatggggagtcgcggtcgtttaagtttcgggagatgttgattaatggtattttcgagtatattcgttataaggtgttttatgtttttttggattatttttcgttcggcggtcggtaggacggttggatcgtcgacgattatttgcgtattttttttatttaggacggcgtttcgcggttgcgtaatttgcggttcgacgacgtttttattattgacgatgcggacgagatttcggttcgtgacggcgtttttttttttaagttttacgatggttggatcgagtttttcgttttttatatgcgtaagtcgttttacggttttttttggaagtagtcgggtattttggaggtggtgttaggttgtacggtggatatgttgtaggtagtgtatgggttggacggtattcgtttgcgtcgtcgttagtattatattatgtttaattttagatagtatgagaatcgtatcggttatattttggtgtagtggtcgttgggtagttttttgtatttcgtcggttggtattgtttttggtgttttacgttcgagggtatttattttaagttcgtgttcgtttagaatggcgattttttacgttggggtgattacgaggataagcgggatttgaattatattcgcggtttgattcgtatcgggggttggttcgacggtacgtagtaggagtattcgtttgtagattttagcgagtatatgtatgcgtttaagtatttgttgaagaattacgatcggttttattatttgttggataatttttattaggagtttaggagtacggcggcgggcgggtggcgttataggggtttcgagggaaggtcgttcgttcggggtaaattggacgaggcggaagtttagagttgtatgatttgatagggtttgtgatagggcgggggtggcggcggtttttagcgttatttttttgttttttgtcggttttttggtttttgaggggattaggagtgggtggggagtgggggtgggggtagggtttttttattgaagtttttgtgaattaagggttaggtttttgagtttagaaaatattttttttgttgggagagggcgtaggtcgtgacgtttgggtggtttttatgattgttaagattgttgtggttaggaggtgttattggagtgtgcgtggtggtttttgggtagcgggggagggtaggtaggattggggaagagagtttgtaggattttattaggtagtttttggggggtggttaggtcgggaaaaagtttattatttggtatttttgggttttgggtttcgtgtgggagatcggtttgttaggaggatttagggttttgtaagtagatgtatttgggtttaggaggaagcgtgg

SEQ ID NO: 1451 - DNA, 3534 bp, Artificial Sequence
  chemically treated genomic DNA (Homo sapiens)
ttacgtttttttttggatttaaatgtatttatttatagagttttgggtttttttggtaggtcggttttttatacggagtttaaggtttagggatgttaaatggtgggttttttttcggtttggttattttttagaggttgtttggtgagattttgtaggtttttttttttaattttgtttattttttttcgttatttagggattattacgtatattttagtggtattttttggttatagtagttttggtagttataagggttatttagacgttacggtttgcgtttttttttaataggagggatattttttgagtttaaaggtttgatttttgatttataagggttttagtagggaaattttatttttatttttattttttatttatttttggtttttttaagaattaaggagtcggtaggaggtagggagatagcgttaggggtcgtcgttattttcgttttgttataaattttattagattatgtagttttagattttcgtttcgtttagtttgtttcgggcgggcggttttttttcgggatttttgtggcgttattcgttcgtcgtcgtgtttttgggtttttggtaggggttgtttagtaggtagtggaatcggtcgtagttttttagtaggtatttgggcgtatatatgtgttcgttggggtttgtaggcgggtatttttgttgcgtgtcgtcgaattagttttcggtgcggattaggtcgcggatgtagtttaggtttcgtttgttttcgtagttattttagcgtgggaagtcgttattttgggcggatacgagtttgaagtagatgttttcgggcgtgaagtattaggagtagtgttagtcggcgaagtgtagggggttgtttagcgattattgtattaggatgtggtcggtgcggtttttatattgtttgaagttgggtatggtgtagtattggcggcggcgtaggcggatgtcgtttagtttatatattgtttgtagtatgtttatcgtgtagtttgatattatttttagggtgttcggttgtttttagaagaagtcgtagagcgatttgcgtatgtggaaggcgaagggttcggtttagttatcgtagagtttgaggaaaaggacgtcgttacgggtcgggatttcgttcgtatcgttaatgatgaagacgtcgtcgggtcgtaggttgcgtagtcgcgagacgtcgttttgggtgaggaaggtgcgtaggtagtcgtcggcgatttagtcgttttgtcggtcgtcgggcgggaagtggtttaggaagatatagagtattttgtggcggatgtattcgaaggtgttattggttagtatttttcggaatttgagcggtcgcggttttttataagtcgtgaagttggattcgtatattataaaggcgtttattacgtcgtttagttcgtggaagcgtacgtttagtaggtcgaattcgtggttgacgttgatggcgttgatgacgcggcgcggtatttttttgggtattagtcgttttttggtgggtaggttggagtattgtattatagtgggtacgtcgtagttgggttcgtgttagtcgggtaggtatacgtattttatttatttgcgtcgggcgtttcggtttttcgtgcgttttcgggcgtttaggaggtatcggggtggtcgtcgggtcgaggagtcgttggtttttttaggtttttttttcggtcgtttcgggggcggtttttttagtattttggtgtcgggtttgaagtagacgtcgtcggttttggtgcgtacgaaatattcggtggtgttttcgggtagtattaagtttattcggtggagtttttcggtcgttttgttgggcggtagcggttgtagtaggggcgagtgggagtagagtggggtacgtagtaggttagggttttttggttcggggttggtttggggcgtgatcggggtattgttttagaaaaagttggatattaggttagggttgagggaggttagttttcgggggaaggtgatataggatagggttttgaagaagtgtaggaaggagatgaggtataggtcggttatatagaatatgagaaagagtttgtagcgttttatttttattttgcgggagagagagagataggagatttattagggtagtttaggttttttttttaggaaggggatttaggaggtttttgttgttattttgttggataatgtggtggttagtatttgttgtttttgtatggagtgattttttgtttttaagagttaattcgcggtattaaggtttttgaaagttttagtattgaggatatcgtcgtgtttttatagtttttttttgagatttttaggttattattttgttttttttgtagtttgttttttcgtttggtttattttattttgattgtgcggttgtattgttaggtttggttttaggagtaatatgcgttttgggaaaagtttaattcgtagtatagatttcgttttaggatagaacggggagagtaggttgtaggttgtttttttgggttttgtttttttttttttatttttttttttatggatatattgataaattttttgaatatttttttattgaaaaaatttataggttttaagggaaaatatttaattttaatatatttaatgaataaaattaggttaggcgtggtggtttacgtttgtaattttaatatttttagaggttgaggtaggaggattatttgagtttaggagtttgagattagtttggataatatagtgagattttatttttatagaaaatttaaaaattagttaggtgtggtgttatgtgtttgtggttttagttatttaggaggttgaggtgggaggattatttgagatttcgaggttgaggttgtagtgagttatgattgtattattgcgttttagtttggataatagattgagattttattttaaaaataaaataaaataaaagtttttttttattattttatgttttttattaatttttaggtataaaaatttgaggtcggttagtgtagtggtttacgtttataattttagtattttgggaggtcgaggtgggtagattataaggttaggagttcgagattagtttggttaatatggtgaaattttgtttttattaaaaatataaaagttagttgagtgtagtggcgtatgtttataattttagttatatcggttgaggtaggagaattatttgaatttagggggcggaagttgtagtgagttatgattacgttattgtattttagaatttgggtgataagagtaagattttatttaaaaaaaaaaaaaaaaaaatttgaggtttatttttggttttatatgtaatttttttatttttgatttaatattttttataaatattattatattggatattaagtttaattaagttgttttttttaattaatgatagatttaaaagattttggtattagtagaaataaatgtattagttttttttaaattttatatattatatggttattgtgaataaattattttgtatttatgatttatgatgtaattatttgtt

SEQ ID NO: 1452 - DNA, 2484 bp, Artificial Sequence
  chemically treated genomic DNA (Homo sapiens)
tttagtagttgagattataggcgtgcgttaataagattggttaagttgtgtatttttagtagagacgaggttttattatgttgggtaggttgattttaaatttttgattttaggtgatttattcgtttcggttttttaaagtgttgggattataggcgtgagttatcgcgtttagtcgggaaatatttattagggataataaaggtttagaagaattttttggggaaattttgtgaggagtataattttagagggtttatagtagttatagttttttggcgtgatattaggtatattgtcggttgtataggttgttgggtataggtaggtatagttagtttggaagagtagttcgttttaaatttttggtttttttttaattaggagtaaatattggtagaaagagttagggtatatttattttttatatttagaatttttatttattattgaattatttggtttgtatagtgttttttgataatgtggtttataaaaattattattaaagttgtttttttatttgatttgggtggggttaaacgaggaaacgagaagttttttgtatgttttaaaatataaattaatgttaggaaattttgaaaatggatgttgtttgttaaatatgaaattattaagggagtttttgtaaaatttattcggtagtatgaggaacggtgtttatagcgtgttttaaacggttacggtttcgttttttatagattaaagtttaagtcgtatatttttatattttaaataaaattacgttatagatattatttacgtgggtacggatatatattaaataaggacgtagtatataattgaggggtgtttcggggagcgcggtaggaatgtttttcgggaagaattttttggtcgtcggagttttcgcgttgtagaggaaattagcgatttatcgtggtttcgaggtaaaagatagatattcgagacgtagtttatattattttggtttaaaaggataagatgtttaataaatatagagaatttagtgtgaagaaaagataaggataaatttggattacgtgtatagattttaggttttgttttagaggagttttgcgggagtttaggatcggttttttttttacggatggttagtttttttttgattgtttttaagttcggttgtgttaagtatttcgcgtcgatataaagtattggtatttgatattttaatagtaataaatttgttagtgttttatatattgttagtttttagagtttattattcgtgtttttagaatagacgttaaggttatgtttttagtcggattgtcgtagtttcgtcgtcgtgatgaggtaggtgtggaggttttagtagttttttcggcgttggcgtggaggtttttttcgcggattatttgaagtagggttacgttgtattgtagttgtatagtattgtaaggattaagtagcgatgttttaatcgtaaacgaagaggaaggtgaaatgaaggtaaagagaattaattattttttaaaatttggttataaatcgttatagaataagttttgtaaagtggattaaagtgatttattgttattttaggtttagatggtgtgatttgcgtggaaattatataatgtttttaatattattgtaatagagttattaacgggttattttttaaattatattgttgatatcgttaaaatttaagaggttagtgtttttaagtgagtagttgtattcgttgagagtaagcggcgtgggttgtaattcgtagatgcgtatagaattgaaaatgttaaatatgtatataaaattgttgataaaagggtttttttttaaaattaagatttaattattaaaaataaatttttatatttaaatgtatatattaatataattggtttgtaataattattttaaatagtttttatatttttttagtttgtgagtaggacgtcggttttttagttgtgtgagtttggtttcggattttttttaatttttcgtgtaaagagtcgaattagttggtagtggattttgtagagataagcggttacgtgtaaattttacgtgttttttatttaaagttggtttgagttttatttttggataggggttgtagtaaattttacgtgttttttatttaaagttggttttgagtatcgtttttggataggggttgaagtgggggtttattttttatggaacggttagacgttatcgtgggttgtaggagtttagtttataatgacgggttttgggcgtggaataatttatttagattttcgggatgtcgagtttgtaaaggggttgttaatggttaggtgggaaatttgggtatcggtagatttgattcgaattttagtatttttatggaaagtagagcgttcgttttagtgtttgtttattttatttatttatttatttttatttttttagtagtattgagcgcgtaaggtttgcgaggagtttgtgcggggcgatttaatgcgtgtaagagatgtgtga

SEQ ID NO: 1453 - DNA, 2484 bp, Artificial Sequence
  chemically treated genomic DNA (Homo sapiens)
ttatatattttttatacgtattgagtcgtttcgtatagatttttcgtaggttttgcgcgtttagtattgttgagaaaatggaggtgggtgggtgggtggagtgggtagatattggagcggacgttttgttttttatgggggtgttggagttcgagttaggtttatcgatgtttagattttttatttggttattggtaatttttttataaattcggtatttcgggagtttaagtgaattattttacgtttagggttcgttattgtgggttggatttttatagtttacggtgacgtttgatcgttttatgggggatggatttttattttagtttttgtttaagagcggtgtttagggttagttttgagtgagggatacgtggggtttattgtagtttttgtttaggagtggggtttaggttagttttgagtgagggatacgtggggtttatacgtggtcgtttgtttttgtagagtttattgttagttggttcgattttttgtacgaggaattgaagagaattcgaagttagatttatatagttgagaagtcggcgttttgtttataaattgggaaagtgtgaaaattatttaagataattattatagattaattatgttgatatatatatttaaatgtagaaatttatttttgatagttaaattttgattttagaagaaaatttttttgttaataattttgtgtatatatttggtatttttagttttgtacgtatttgcgggttgtagtttacgtcgtttatttttagcggatgtagttgtttatttgggggtattggttttttaggttttaacgatgttaatagtgtagtttagaaaatggttcgttagtggttttattgtaataatgttagggatattatatgatttttacgtaggttatattatttgggtttgaggtagtagtgggttattttgatttattttgtaggatttattttgtaacggtttgtggttaagttttgggaagtggttgattttttttgtttttattttattttttttttcgtttacggttaggatatcgttgtttgatttttataatattgtgtaattgtaatgtaacgtggttttgttttaggtgattcgcgggaggggtttttacgttagcgtcgggaaggttgttggggtttttatatttgttttattacggcggcgaggttacgataattcggttgggagtatgattttggcgtttgttttgggagtacggatgataagttttggaagttggtagtgtgtaaagtattggtaagtttgttattgttaaaatgttaaatattaatgttttatatcgacgcgaagtgtttaatatagtcgggtttgggggtagttaggaggaagttggttattcgtggaggaggggtcggttttggattttcgtaggatttttttgaggtagggtttgaagtttgtatacgtggtttagatttgtttttgttttttttttatattgagttttttatatttattgaatattttgtttttttaagttagagtagtgtaaattgcgtttcggatgtttgttttttgtttcgaagttacgatggatcgttggttttttttgtagcgcgagggtttcggcgattagaggatttttttcggaaggtatttttgtcgcgtttttcggggtattttttaattgtgtattacgtttttgtttagtgtgtattcgtgtttacgtagatgatgtttgtaacgtagttttgtttgaaatatgagaatatgcggtttaaattttgatttgtaaggagcggggtcgtggtcgtttggagtacgttgtagatatcgttttttatgttgtcgggtgggttttgtagaagtttttttagtgattttatgtttaataggtagtatttatttttagaattttttggtattgatttatattttgaagtatataggaaatttttcgttttttcgtttagttttatttagattaggtgaaagggtagttttaatggtggtttttatggattatattattagagagtattgtgtaagttaaatggtttaataatgaatgaaaattttgggtgtaaagagtaaatatgttttggttttttttattaatgtttgtttttggttggaaagaaattaaagatttaagacgggttgtttttttagattggttgtgtttgtttgtgtttagtaatttgtgtagtcggtagtgtgtttggtgttacgttaggaggttgtggttgttgtgggttttttggaattgtgttttttataaagtttttttaaaaggtttttttaagtttttattgtttttggtaaatgtttttcggttgggcgcggtggtttacgtttgtaattttagtattttgggaggtcgaggcgggtggattatttaaggttaggagtttgagattagtttgtttaatatggtgaaatttcgtttttattaaaaatatataatttagttagttttgttggcgtacgtttgtaattttagttattagg

SEQ ID NO: 1454 - DNA, 2482 bp, Artificial Sequence
  chemically treated genomic DNA (Homo sapiens)
gtggggggttcgagagtaattgtttttataggggttgttatgtttagatttatggatttggtatgtgttttattagttaggtttaacgacgttagttattaagtatgttttatttgtgcggttggggggttaggggtatttgatattggagttgtttttggttaaggttgttttatttgtggtgttaggtaattttttttttttgggggttttgtgatgggggagaggttgttcgtttagtatttatttttgttttttatcgtttatagtattttagtttgagaggttatagtttaagaaaagagttttttattttacgtcgttcgatatttttatataagtaaaataaaatgtatatttttatatatcgcgatttgggtgggaggcggcgttttggaataaacgttgtcgtcgaattttgtaaatatgatggggtggagatgggggtggcgggcggtaggcgtttattagggaggatttggtttggtttgttttacgggtcggtcgttcggttggtttggcggcgtggagagagatttcgtatgtatatatatttggttgttgagtacgtttttgtgttcgttgggggttagtagggtttaagtattgtttatagtattagcgttaggtttaggggggtgaggttgtaggtgaggttgggtagggtatttgagttttttgagttattagtttcgttattttcgttgtttgtttggtttagacggtagtggttgcgggtgcggtttttgcgtgaatagtttggttttcggcgagggttcgaggtggggaattttggtggttcggagttttcgggtcgtattgtagtgagcgggggtttagtagagttaggtagagttttaaagggtgagttattgatgtgtcgtgggttagagtcgttgttcggcgggttgttatcgggcggtacgcgtttttttagcgtattgtttgtcgaagttggttttttaggttttagtattgaggttttgttagcggtatttggttggtagtatttgggaagttttagcggttttttatcggtggttttgtcggtttagatgggatggtaagggtcggtggttatagcgtagttttgtaggttattggtagttaggcgtttgaggttacggttagttaggcgttgcgggaggttgtagggtatttcggaggaggagtcgcggaatttttgtagttaggtttagagtgggcgtgttcggtagttatatatttaggggttgtcgttgagttttaggtattgtagggtacgtaggggggttagggttttagtgggtagcgttgatagattgttggtaaatagatagagtgttatgaggcggttaaggttacggaaggtatgcgggtgtatatgggttacgcggttttggtgtagtaggagacggtcgaggttgtgtagtttacggaaggcgcgttcgggtacgttggagatgcggttgtcgtgtaggaagaggtgtgtgaggttgtttaggtcgcggaaggtgttattaggtagtgtttgtagcgcgttgttttgtaggtagaggtattgtagggtagttaggtcgcggaatagtttcgggtttagtttttgtaggtcgtagcggtttaggtgtagcgtgtgtaggcggtttaggtcgtggaatgtggtagggtttatagatcggagttgtgtattatcgttgaggtttagttgttttaggagggttaggttagtgaaggtagtcgtattaattcgggttagtatattcgagtgtagttataggatggtgaggttgcggtaggtacggaagttggtagttggtatatgcgagatgcggttgtcgtgtaggaagatgcgttggttggtagtagggatgtttacgggtatagtttgtaggttttgttgggggtagtttgtcgttattttgggtttattgtagtatacgtaggtatttgggtatggggttgttatttgttaggtttgtagttatagtatttatgttagtagtcggttttttgtgggtagaagatagagtggttagtaggaagggtaggggtattggagaagttggaggttttgttagagttaggtgggtttcggagattgggttttaggaggatttggggttgggtttaagatgtggttattattttcgggaatcgtagtgttgggatttttgttttataggttttatggacgatgttgggttagaatatgttttggagttatgtattttattttggaagttatatttgtagattttttatattatatttaggagtagtttattgggttattaggggtatttatttgaaggttttttggaatggatattggtgattgtaggtatttttttaggattttagtgaatatagagttcgtattgtaggagttttcggggggttttagtgggggttttatttatagggtttaggaaatattgtaatggggttggggtttttttgggtacgtttattttaaaaacgggcgtttggatgttcgagggcg

SEQ ID NO: 1455 - DNA, 2482 bp, Artificial Sequence
  chemically treated genomic DNA (Homo sapiens)
cgttttcgggtatttaggcgttcgtttttgagatagacgtgtttagagggattttagttttattgtagtgttttttaggttttgtgggtggaatttttattgggatttttcggggatttttgtaatgcgggttttgtgtttattggagttttgaggaggtatttgtagttattagtgtttattttaggaggtttttaagtgagtgtttttggtgatttagtgggttgtttttgggtgtggtatggggagtttgtagatgtggtttttagggtggagtgtatggttttaaggtatgttttagtttagtatcgtttatgaggtttgtgaagtagggattttaatattgcgattttcgggggtggtggttatattttggatttagttttaggtttttttgagatttaattttcggggtttatttggttttagtaaaatttttagtttttttagtatttttgttttttttgttaattattttgttttttgtttatagggagtcggttgttggtatgggtgttgtggttgtaggtttggtaggtggtagttttatgtttaggtgtttgcgtatgttataatgagtttaaggtgacgataagttgtttttagtagggtttgtaggttgtgttcgtgggtatttttgttgttagttagcgtatttttttgtacggtaatcgtatttcgtatgtgttagttgttagttttcgtgtttgtcgtaattttattattttgtggttgtattcgaatgtgttggttcgaattgatgcggttgtttttattggtttggtttttttggagtagttggattttagcgataatgtatagtttcggtttgtggattttgttatattttacggtttgggtcgtttatatacgttgtatttggatcgttgcggtttgtaggagttgggttcggggttgtttcgcggtttggttgttttgtagtatttttatttgtaggataacgcgttgtaggtattgtttgatgatatttttcgcgatttgggtaattttatatatttttttttgtacggtaatcgtatttttagcgtgttcgagcgcgtttttcgtgggttgtatagtttcgatcgttttttattgtattagaatcgcgtggtttatgtgtattcgtatgtttttcgtgattttggtcgttttatgatattttatttgtttgttaataatttattagcgttgtttattgaggttttggtttttttgcgtgttttgtagtatttgaggtttaacgataatttttgggtgtgtgattgtcgggtacgtttattttgggtttggttgtagaagtttcgcggtttttttttcgaggtgttttgtagtttttcgtaacgtttggttggtcgtgattttaaacgtttagttgttaatgatttgtagggttgcgttgtggttatcggtttttattattttatttggatcggtagggttatcgatgaggagtcgttggggttttttaagtgttgttagttagatgtcgttgataaggttttagtattggagtttggaagattagtttcggtaggtaatgcgttgaagggacgcgtgtcgttcggtgatagttcgtcgggtaacggttttggtttacggtatattaatgatttattttttgggattttgtttggttttgttgagttttcgtttattgtagtgcggttcgagggtttcgagttattagggttttttatttcgggttttcgtcggaggttaggttgtttacgtaagaatcgtattcgtagttattgtcgtttgggttaggtaggtagcgggggtggcgggattggtgatttagaaggtttaggtgttttatttagttttatttgtagttttatttttttgggtttggcgttggtgttgtggatagtgtttgggttttgttgatttttagcggatataagagcgtgtttagtagttaggtgtgtgtatatacggggtttttttttacgtcgttaagttagtcgggcggtcgattcgtggggtaggttaggttaggttttttttgatggacgtttgtcgttcgttatttttatttttattttattatgtttatagggttcggcggtagcgtttgttttagaacgtcgttttttatttagatcgcggtatatagagatatgtattttattttatttgtgtaaaaatatcggacgacgtggaataaagagttttttttttaagttgtggttttttaggttagggtgttgtgggcggtgagaagtaggggtgggtgttggacgggtagttttttttttattataaggtttttagaggaagggagttgtttggtattataggtgggatagttttggttaagggtagttttaatgttaggtgtttttggttttttagtcgtatagatggagtatgtttggtggttgacgtcgttgagtttggttgatggagtatatgttaggtttatgggtttggatatagtagtttttgtggggatagttgttttcgggttttttat

SEQ ID NO: 1456 - DNA, 2395 bp, Artificial Sequence
  chemically treated genomic DNA (Homo sapiens)
tataggttgatatattttattcgtttttttattttagggttttgcgatttattggtaagggtggagtttcgtttatttggttaaaacgaagacgttaaggagggaggtagttgtggttaggcggtattaggtggtgttagtttattagtagagaagtttgaagagtcggtttggaagaatgattattaagtcgaaggttttatatggtgtttgggggtatcgtttttttgtttcgtttgtcgttttttttgtttttattttatttttatttgttagtatgtttttgttttgttttatcgggatttaggtttttggattttatttgtttatattttttgttttgttttgtagttatttttttttttttacgtaagggggtttttatagttttgggtttttagtgattattttagaatgatttttttttaatggttttatagtttttttgtatgggtaggatgtttaattgtagagagatgggtaagaaagtattattattaagaatggaagtaattgggtacgggttgtagtttatttggcgaagtggttattatttagagtaaggagttcgttcgtgagacggcgtttcggagtcgcgagttggaattttgttggtttatattcgagtagtttgcggggaacgaggatattggtttagtttttgttattttcgagtttttttttttattgttttttgtgagttaagattataagttatttatttttttttatatttttatagttttatataggttcggtgtgtagtaaggaatgaaatgggagttttttgatattttgttttttttgatagttttttgtttgtatttttttttttattagttattttttaagttgttgtttagaattaggtgttggggtttgatatgtatattatttagaatgattgagtatttattatgtgtgagttttataggaaagtgttggaatgggtttgaatgtaaggatgttggttttaggttgttatagattcgtggggtggggaggatagataagtgaagggtagttatagtttagggtattaggggttatcgtaggttaggttggggcgtatttagggtcgggtatgggaggggcgttgtgtttgttatatgttgttttttttttagtttttcggggttttttgtttagtttttttgaggttttttagtagtttcggatttgtttaggagggaggaagtatcgtttatttacgtagtcgtttttagaggagtagttcgaggaagagtttaggaagttttcggtggttttgcgttttataagttcgttggttttgttgttttttgagttattcgtgttttttttttttcgtattcgtaggtttttatttgtgtagggaagaattaggggtttttttgggtttttaagagtttttgaaaagtggggtttgggtagagaggtgttttgaggagggaatttcggggattgtaggggatattgtgaggagtatttcgcgggaggtcgaggaagtaaagtttcgggacggagggttttatatttattttagttggcgttattatgtagtttttttagggagtttttgggtgggaattaggattcgtggattagcgatttattgtagtaggaggtgtgtgtattagaggacgggtttagttgtggcgttggggataggcgttttatgttgttggattttttttttaaggttttgtgggataattatgagggtagaggtagggagtagggaggtgagtttagttaggagtatgaaggaaagttatagtttgcggttttgtttagtgtagggtgtgggtttttttgttgttaggtaattcgtagttgttatttttttgatttttttaatgttggtacgtttttttttgttttttttgaattttattagtagatgggtaagacgggtagcggtagttagggatggagttatatttaaattttataatttattgaaattagatagatttgatttggttttagagttagttaaagttttagggtttgttttttgggttttatgtttgtgagtcgggtaggacgattaggtagttgttgttatagtttattttttagtggtttgaggattgcgtttgtttttagttatgtcgttggttagttgttgaggtcggataggtggtgagatatgtaggcgtggggttaggaaggatggtaaggttgatacgttcgtttagagtagggggggtttttgtgagtttagtttgtagttttggggttttcggtttggtttatggttgaagttgtttttttttattttttgtttttttttttttttttttttttttttgagattgagatggagttttatttttgttaatttaggttggagtgtaatgttatgatttcgtttattgtaatttttgtttgttaggtttaagcgattttt

SEQ ID NO: 1457 - DNA, 2395 bp, Artificial Sequence
  chemically treated genomic DNA (Homo sapiens)
gagaatcgtttgaatttggtaggtagaggttgtagtgagcgagattatggtattgtattttagtttgggttgataagagtgaaattttattttaattttaaaaagaaaaaaaggaaagaaagaaaataggaagtggagagaggtagttttaattataagttaggtcggaaattttaaaattgtaggttgggtttataggaattttttttgttttggacgggcgtgttagttttattattttttttggttttacgtttgtatgttttattatttgttcggttttagtagttggttagcgatatggttgagaataggcgtagtttttaggttattgggaaatgggttgtggtagtagttgtttggtcgttttgttcggtttataggtatggggtttagaagataggttttgaggttttggttagttttgaggttaggttaggtttgtttggttttagtgggttgtaaagtttgaatgtggttttatttttagttgtcgttgttcgttttgtttatttgttggtgagatttagagagaataggagaggacgtgttagtattgggagagttaggggaatggtagttgcgagttgtttagtaataagggaatttatattttgtattaggtagggtcgtaggttgtggtttttttttatgtttttggttgggtttatttttttgttttttatttttgtttttatggttgttttataggattttgaagaggaaatttagtaatatgaagcgtttgtttttagcgttatagttgggttcgttttttgatgtatatattttttattatagtgagtcgttggtttacgagttttggtttttatttaggagttttttggaggaattgtatggtgacgttaattggggtgagtgtggagtttttcgtttcggggttttgttttttcggtttttcgcgagatattttttatagtgttttttgtagttttcgggattttttttttagagtatttttttgtttagattttattttttagaagtttttggaggtttagaagagtttttggtttttttttgtataggtgaggatttgcgggtgcggaggaggagaggtacgggtggtttagagagtagtagggttagcgggtttgtggggcgtaaggttatcgaggattttttgggttttttttcgggttatttttttgaggacgattacgtgggtaggcgatgtttttttttttttgagtagattcgaggttgttgggaggttttaggaaggttgggtagggagtttcggggagttggagagagggtagtatgtggtaggtatagcgttttttttatgttcggttttgggtgcgttttagtttggtttgcggtggtttttggtgttttgggttgtgattgttttttatttgtttgttttttttattttacgagtttatggtaatttaaggttaatatttttgtatttaggtttattttagtatttttttgtggggtttatatatggtgggtgtttagttattttgagtggtgtgtatgttagattttagtatttagttttgaatagtagtttgaggggtggttggtgaggagagggatgtaaataggaagttgttagaagaaatagaatgttaaagagtttttattttattttttattgtatatcgggtttgtgtggggttgtggggatgtgaaggagggtgggtgatttgtggttttggtttatagaagatagtgaaggaagaggttcgaaagtgatagagattgagttagtgttttcgtttttcgtaggttattcggatgtggattagtagagttttagttcgcggtttcgaagcgtcgttttacgggcgggttttttattttggatggtggttatttcgttaggtgggttgtaattcgtgtttagttatttttatttttggtgatagtgtttttttatttatttttttgtagttgggtattttgtttatgtagagagattgtaggattattggggaaaggttattttagaataattattgggagtttagagttgtggggatttttttgcgtggaagggaaggagtagttgtagagtaggatagagggtgtgggtaggtgggatttaaggatttgggtttcggtagggtaggatagaggtatattggtaggtgggggtggggtaggggtagggaggacggtagacgggataaaggagcggtgtttttaaatattatatggagttttcggtttgatggttatttttttaggtcggttttttagatttttttattggtgggttggtattatttggtatcgtttgattatagttgtttttttttttgacgttttcgttttaattaggtgagcgagattttatttttgttaataaatcgtaaggttttggggtgaagggacgggtaaagtgtgttaatttgta

SEQ ID NO: 1458 - DNA, 2390 bp, Artificial Sequence
  chemically treated genomic DNA (Homo sapiens)
ttagcgggggttaagtggagttagtttggtgttgttttaagggggttcggttgggatcgtttttaggagggtgacgggttttaataagaatgaatagttaggaattggggttgtaggaggagtgaggggggattatttgtgagaagtagtttgtaggtgagatagcgttattgatggggtggggaggggtattttagaggcgtttatggggtattagtcggatttatttagtaggtgtggagtgggttacgatagattttagtaaatacgttgtatttttggtttcggtttttttttttcgaagattgtgagaggaggtgttattttaaattaagtttagaattttgataattatttagggttgggtattttaatatttgaaatcgtgaatatttttgtgattaaaggagtttaaaagaatttttgttatttgagagagaaaagagaagtttaggaatttgttttagattttatttaagcggtggaaaaaacgggtttttttagggtgtatagggataggttggagggtaaaggaaatggcgtttttttttttaatagttatttttattttgttgggtgtacgtgtgtatttaaaaatttttttagaaaaaagttggtagaaaaaggaatgtattatttttaagatagtagtttaagttatgaatgtattaagaatttgttttgagacgatttttggtagttggtaaaagtgtaattttgagaagaggtcgtgaaatatttttaacgaaatagaaggatttttaaattgaagaacgttgtagaaggtattaagcgcggtgttttcgttttatagatgagtagtttggggtttagcgggtgaagcggtttagttggttggtgtagagtttagtttagtatttagattttttgatttgggaagagttattttttttcgaggttagttgggatgtgcgaaggaaattaggtttcgtggagaaagttatttggattttttagtaagggaaagtttaagtaaagaaaatagttggttaagaggaaagatagtggtggtaatgttgagagagtgtcgaggaaagagtggagagtttgtagttaagacgaatatttatagtaagtttttaatagttaaggatttgaaagttattatcgtttagttggatacgagagtaagaatttagtatattttgtcgggttttgttagttgtgtagagtataaggttttaggtaagttagtgtcggggtaaaatattgttttcgtcgaaagtagagttaagaatggaatggaaaaagattgaggtttgtatagcgtacgtacggggattttaaaatggattcgaaaatattttataatgtaattttgggagatcgtaatataaaaaggaaggaatttaatgtaggtgagttttaatagatattacggcgtgtttttgaaatagatgaaaattgaattgttttttaaatattttgagagggttattaatgataggaattttttcgtttgattattaattattatttcgtttatatagttaggatagttgtggagtaggtcggtttagagggatttttagggtaggtttaggttagtgtttagtttggttttgaattgtgttttgtagagttttatagtaggtttcgtaggaggttagggtattttttttagaaaatttaagttttttagttggataggtttgatttttagttttgtttttagttttcgtttaattatgtaattagggtaagttatataatttttttgagtttgttatttatataatataggagtgttattttgtagggttgttatgaagtttaaataaataatgtgtgtaaaatatttagtatatagtaggtttttattaaacgttatttttttatttttcgtttgtttgggagggtagtgattagcgcggattgtttttgtatttgtttgtagggattttttttgggtaggtaggatggttattgcggtgtttaggtagaagagaggaggagatgagtttggcgttagtttttggttgcgttttaagttgcgtttgtttatattttttttttaattatagtttttttaatcgagttgttagcggtgtttttgtgagttttaatttaggggggattagttaatttgtatagataatagtaagtgtttattgtagtttttttaagagtagtttatatttatttatttattttaatattttaatagagtttaattcgtagtttattggtttttggtgatttttgttttggaggttggggtgggttttaatttttgagttttattaagcgttttagggaatatggaatattggggtgtagggataattttataaatgaatggaggaagggagaatattgaaattttgtttgttagggtattatcgtttattgttttgtataaaggtgtg

SEQ ID NO: 1459 - DNA, 2390 bp, Artificial Sequence
  chemically treated genomic DNA (Homo sapiens)
tatatttttgtgtaaagtagtaggcggtagtgttttagtaaataggattttagtattttttttttttttatttatttgtgaaattgtttttgtattttaatattttatattttttagaacgtttgatagaatttagaaattaaaatttattttaatttttaaaataggagttattaaaggttagtgggttacgggttaaattttgttgaggtgttgaagtgggtgggtgggtgtgaattatttttgaagaggttgtagtaagtatttgttattatttgtgtaagttaattagttttttttgagttgaggtttatagaagtatcgttggtagttcggttaagaaagttgtaattaaaaaggaaatataagtaaacgtagtttgagacgtagttaagggttggcgttaagtttattttttttttttttttgtttaaatatcgtagtgattattttgtttatttaaaggaggtttttataaataagtgtaagaataattcgcgttgattattgtttttttaggtaagcgaggagtggggaagtaacgtttgatgagggtttattgtgtgttaggtgttttgtatatattatttgtttaggttttataatagttttataaggtaatatttttgtgttgtatagatgatagatttagaaaggttgtgtagtttgttttggttgtatagttaaacgagggttagaaataggattaggagttaggtttgtttagttggaaaatttgggttttttagaaggggtattttggttttttgcggagtttgttgtgggattttgtagaatataatttaaggttagattgaatattagtttgaatttgttttgagaatttttttaagtcgatttattttatagttgttttgattgtgtaagcgagatgatgattagtgattagacgaaaggatttttgttattggtaatttttttaaagtatttggaaaatagtttaatttttatttattttagaagtacgtcgtggtgtttattgaggtttatttgtattgaatttttttttttttatgttgcgattttttaagattgtattgtggagtgttttcgaatttattttgaaattttcgtgcgtgcgttatgtaggttttagtttttttttattttatttttaattttattttcgacggaagtagtgttttatttcgatattggtttgtttaggattttgtgttttgtataattagtagggttcggtaggatgtattgaatttttgttttcgtgtttagttggacggtgatggtttttaagtttttggttgttgggagtttattataaatgttcgttttggttataaattttttatttttttttcggtatttttttagtattgttattattgtttttttttttggttaattgttttttttatttaggtttttttttgttagaaagtttaggtaattttttttacgggatttggtttttttcgtatattttagttggtttcgaggaaaggtagttttttttaaattagagaatttggatgttgggttgggttttgtattaattagttgggtcgttttattcgttgggttttaaattatttatttgtgaagcgaaggtatcgcgtttgatgttttttgtaacgttttttagtttggaaatttttttgtttcgttggggatattttacggtttttttttaaggttgtatttttgttagttgttagggatcgttttaaaataggtttttagtgtatttatagtttgagttgttgttttgaaagtagtatatttttttttttgttaatttttttttgagaaagtttttgaatgtatacgtgtatttaatagagtgagagtggttgttaagagagagggcgttattttttttgttttttagtttgtttttgtgtattttggaggggttcgttttttttatcgtttagataaaatttagggtaagtttttgaatttttttttttttttttaggtaataaaaatttttttgggtttttttagttataaagatatttacgattttaggtattaaagtgtttagttttgggtgattgttaaaattttgaatttgatttaaagtggtatttttttttatagttttcgggagggagagatcggagttaggagtgtagcgtgtttgttggggtttgtcgtggtttattttatatttgttgggtggattcggttggtgttttatgggcgtttttgagatgtttttttttattttattagtggcgttgttttatttgtaggttgttttttataggtggtttttttttattttttttgtagttttagtttttggttgtttatttttattgggattcgttatttttttggaggcggttttagtcgagtttttttaagatagtattaggttggttttatttggttttcgttgg

SEQ ID NO: 1460 - DNA, 2444 bp, Artificial Sequence
  chemically treated genomic DNA (Homo sapiens)
tgaggttatgaatataaatttagttttatatgtttcggaattgtatttgaagatgtggttttaaggtagttttatatttagtgttttgggcggggcgggggggtagttttatatttagtgttcggggttgggggggtagttttatatttagtgttttggggtggggggggtagttttacgtttagcgttttgggaggggtagtttcgtgtttagtgttttgggagaggttgttttagttagtgtttttaaagttgtcgttagttgggagaggatggtaggtttttttttgggtttcgggaggttgaattagttaaatgggagaatggggagatgggggagaagggggagatgggggagatgggggagaagggggagatgggggagatgggggagatgggagtaatgggagtaataggagtaatgggagggttttattattttgattttatttttaatcggtttgttttggatatattgtttaatttttagtagttattttattagtttattttattagggggttttagggagatattttttaatagatatagaagcgtaggaggagaacgagggttttcgttttaattttaggtttaaggttattttgtttaggtattgggttacggtattttaagggtgtttttgttgatatattagtttcgaagggttagttattttttagaaataacgttttcgaggtggggagggttttaagttagtatcgtatttgttagatacggaatagagtaggaatcgaagtagggaacgtaggtttaagttatgttagagataggttttttgttttagattgtggtttcggttaggaaaggaggcgcgagcgtgtggttggagaattttatattaaatattttggttttttgagtggaaattatattggtttaggaaaaggaagggggtgagaaggttggttggttggatggttgttttaagtaatgcgaaaagtaaatttacgaaattattttttgaaaataaagtgcgagggttgtgttattttggttgtagtagggtcgtatttgtttttttaattaatgtattattttttttagaaatagaataaagataaaagcggatgtataataaattattttagtttgttagcgttttgagagatgaaaaatttcgtttagagataggattgtgggtttataaaaaaattataaagtttaggtattttgttaagtttttagaacgttgtcgggtcgttttttttttttttatgtttagtcgtgcgtggttgtcgggatagcgtttatttcggtaggcgacgagttagtgtgggaatttaggggtcgttttagtttcgttggggtgttgagttgtagggagtggtttgtatcgattttttttttttttatttacgttatttaaaagtatattagaggggttttgagatgaaattcgtatattttttagagtttttttagattaatgcgcggatgagaacgtgtttattgcggggatgcgttcggttgcggatgtgaagaaattttttcgtaggagtagcgattttgttatatgggtttcgtatacggagttttcgttagttcggggtttcggtttcgggaagtatttgggaggcggcggggaaggttggttttggttggtttgatatacgtttcggggttcgttttttatgggttaggtttggtgttttatttattattgttgggaagttatggaggttttttaagggtgatttgcgaggtgggggtgtttgtttttttttttgaggtaagaggggtttggttttatcgtttgtcgtaaaaaaggaggagtagtttaggtttgtacgtggttttgagtagttcgtcggaaggttttagtttggtttttttatttcgtttttttttttagggtcggtttagttttatagatatcgtttttatttacgagttggaggcggtttttttggtttatgcgttatattttttttggtttttgtaggtgttttattttatttagattttgttttttaatgggtggtatttttaattatttatttttttttttggagacgttaaatttttttgattttttttttttgtttgttttataatcggttggttttgtttttttttttttttcgtgtttagtgttttggttttagttttgggtttttattttattttttaggtttgcgtattattagattgttttgattttttgttcgtcgtttatttgttgttaggtttttttttttttttttttttttttgagatagggttttattttattgtttaggttagagtgtagtggtattattttagtttattgtaatttttgtttttcgggtttaagcgatttttatgttttagttttttaagtagttgggattataggtgcgtattattatgtttagttaatttttgtatttttagtaaagatagggttttattatgttggttaggttggtttcgaattt

SEQ ID NO: 1461 - DNA, 2444 bp, Artificial Sequence
  chemically treated genomic DNA (Homo sapiens)
gagttcgaggttaatttggttaatatggtgaaattttgtttttattaaaaatataaagattagttgggtatagtggtacgtatttgtaattttagttatttgggaggttgaaatatgagaatcgtttgaattcgggaggtagaggttgtagtgagttgagatggtgttattgtattttggtttggataatagagtgagattttgttttaaaaaaaaaaaaaaaaaaaaaagagtttggtagtaggtggacgacgggtagaagattagagtagtttgataatgcgtaggtttgggaggtggggtggagatttagaattgaagttagggtattgggtacggggagaaaggagggataggattaatcggttatggagtaggtaggaaggaggagttaggggagtttgacgtttttagaagggagaatgagtagttgaaggtattatttattgagaggtagggtttgggtgagatgggatatttgtagaggttaaggaaggtgtggcgtatgagttagggaggtcgtttttaattcgtgggtggagacggtgtttgtggggttggatcggttttgggaagggaaacggaataaaaagattaggttggaatttttcggcgagttgtttagggttacgtgtagatttgagttgtttttttttttttacggtaagcggtgggattagattttttttattttaagagggaaggtaggtatttttatttcgtaggttatttttgagaagtttttatggttttttagtagtggtaggtggagtattaggtttggtttatgaaggacgagtttcgaggcgtgtgttagattagttagggttaatttttttcgtcgttttttaggtgtttttcgaggtcgaggtttcgggttggcgggggtttcgtgtgcggggtttatatggtagggtcgttgtttttgcggaggggtttttttatattcgtagtcgggcgtattttcgtaatgggtacgtttttattcgcgtattggtttgggaaggttttgagaagtgtgcggattttattttaaaatttttttagtgtgtttttgagtggcgtgaatgggggagaggggagtcggtgtaggttattttttgtaatttaatattttagcgaaattgaggcggtttttgggtttttatattgattcgtcgtttgtcggagtgagcgttgtttcggtagttacgtacggttgagtatggagaaggaaagggcgattcggtagcgttttaggggtttggtagagtgtttgggttttatggtttttttgtaaatttataattttatttttgggcgaggttttttattttttagagcgttggtaggttgaaatgatttattatgtattcgtttttgtttttgttttatttttggaaaaggtggtatattggttagggaagtaggtacgattttgttgtagttaggatggtatagttttcgtattttgtttttaaaaggtggtttcgtgggtttatttttcgtattatttgaagtagttatttagttaattaatttttttattttttttttttttttgagttagtgtgatttttatttaggaaattagggtgtttggtgtagagttttttagttatacgttcgcgtttttttttttgatcgaggttatagtttgaggtaaagggtttgtttttggtataatttgagtttgcgttttttgtttcggtttttgttttgtttcgtatttgatagatgcgatgttgatttggggttttttttatttcgggggcgttgtttttggagggtggttggtttttcgaggttgatgtgttagtaggggtatttttagggtgtcgtgatttagtgtttgagtaaagtggttttaagtttggggttgaggcgggggttttcgttttttttttacgtttttgtgtttgttaaagggtatttttttgggattttttggtagggtggattgatgggatggttgttgaggattagatagtgtgtttagagtaggtcggttgggggtggggttagggtggtgggatttttttattgtttttattgtttttattgtttttattttttttattttttttatttttttttttttttttattttttttatttttttttttttttttatttttttatttttttatttggttggtttagtttttcgggatttagaggggagtttgttatttttttttagttggcggtagttttgggagtattggttggggtagttttttttagagtattgggtacgaagttgttttttttagagcgttgggcgtgaagttgttttttttattttagagtattgggtgtgaagttgtttttttaatttcgagtattgggtgtgaagttgttttttcgtttcgtttagagtattgggtgtgaagttgttttggggttatatttttaagtgtagtttcggggtatgtgggattgggtttgtgtttatggtttta

SEQ ID NO: 1462 - DNA, 2346 bp, Artificial Sequence
  chemically treated genomic DNA (Homo sapiens)
tttttttttttatagtaggatttgagttatatgtgagttgggaagaggattgttttgttagtggtatggaagtgagaggggttaattttttagattattagttttattattataggttttatcggttttagtatttagttttattatttaatttgttagttttaaaattaatttttttagtattttttgagtatttatttgttttaatgttaagttaaggatagatttggttttcggttttttaggattttgtttttattgggaaggttggatagtggggagtcggtagtttttagtaggtggggttcggaattttttttgtaattttaaaggaggtttaagagaggttgtttttgggaaatttgaaatttagttatatggggttaagttattaggttgtttttttttattgtggttttttgatttatttgttagagtttggatttttttttagggttaaagttttttttttagtttttttttttattgttttttagggggttttattttgagttagaaaaggtgttcgagatagaggttattttttttttatttgtttttgagtatggttttttttgagaggttttgggtttgtgtgatatttttatggatatattgggaaagttagttgttttttcgtttttatttaggaggttggggttatagtagttggggttttagttttttggttttttggttttttttttatttgtttttttggtaggatttagtatgttttgggatagagtttatttgatatgggatagtaggaggttgtttttgttaaaattgggtgaaagtggtgttttcggtatggtttttttagttagaggggttatggtggtttttgtttttggtggagttttcggagtttgaaagagatggaagtttgggggtaaggatggagtttagagagaggtaggtaaatatattatttagaaaaggtaaagtttattttagtgttgatagagagagggtgagttttgtatagtaattttaaaaatatgttattttttttatttaagaggtaagaatcggttgtaagttatggggttattaaatcggtcgtagttatagtaagtagaagaggttacggtttaggtttttttagattttttttgggatatacggttttttgggggggttcggcgaaattattcggattaggagttatcgtatacggttatattaggtttgtcgtagaggtaggtagttaaggttacgtggtaggcggtgatttttttgcggtacgtggtaatgagaggttgcgagagatttatttttttggtttggaatagagtacggagtttttttgggtttttttcgaagttatttttagttaggaagtttatgaaaggtatgttgacggtattacggatatggttcgagtttagttttgggtagggtagaggatatagtttaggggatgtatgaggggtggggattaatggggtttggaggattttattagttatagttggaaggatagatagttttgtaaataaaaataatatttttgttttgtttggagtttaatttatttttagttttatttattattattttttatgatttaagatgtttgtaattttttttttaatatttgttttgaagtagagatgtttaaaattatatttgtttgagaagatagcggtatgagttttagttttattaatttttattttgggtaaattattttatttttttgaattttagtttttttatttgtaaaatgggtttagtggtatatatttattttatagttatgttgagaagagtaaatgggataatttattgtaaatgttatgtgttgagaatatagcggtgaaaggtagagatatagttaggttttttgggagattttagtttaataagaaaggtagatgttaaatagataattatataattaattagatatgtttttattttatagatgaattcgttgagttttggtaaaataatacggtttatttaaggttatatagaaagatgaaggtagatttaggattatatcggggtttttggttttttgttaagtatatagttgtagaaagagtaagtgatttggtgttagatgtgaggttaaattttattggagtaagttatgttagttttttgagttttagtttttttataggaaaaatggaaatgagagtatttattgtgtattggttgttgtacgaagcgggtggtataaggaaagcgttggttttggaggttggtttatttattttgttatgttgcgtttttagttattttattatttatggagggggtagggggagaatagggatagtgtgggtttttttggttttttttaagaatttggatggaagtagagtggag

SEQ ID NO: 1463 - DNA, 2346 bp, Artificial Sequence
  chemically treated genomic DNA (Homo sapiens)
ttttattttgtttttatttaagtttttggaggggattaaaaaggtttatattgtttttattttttttttattttttttatgggtggtgaagtggttgggggcgtagtatggtagggtgggtgggttagtttttaaagttagcgttttttttgtgttattcgtttcgtgtagtagttaatatatagtggatatttttatttttattttttttatggagaaattgaggtttagagagttgatataatttgttttagtgggatttgattttatatttgatattaggttatttgttttttttgtaattgtgtgtttaatagaaaattagaggtttcgatgtaattttgggtttgtttttatttttttgtgtggttttaggtgagtcgtgttgttttgttaagatttagcggatttatttgtaaaatggggatatatttgattagttatgtggttatttgtttagtatttgttttttttgttagattggaattttttagagggtttggttgtgtttttgttttttatcgttgtgtttttagtatatagtatttgtaataagttgttttatttgttttttttaatatggttgtgagataggtatgtattattgagtttattttatagatgagaaaattgaggtttagagaagtgaaatgatttgtttaaggtaaaggttagtggagttgagatttatgtcgttgtttttttaagtaggtgtgattttgggtatttttattttaagataggtgttaggagaggagttgtaggtattttaagttatgagaaatgataataggtggggttgggaataaattgagttttaagtagagtaaagatgttatttttatttgtaaagttatttatttttttagttatagttgatggaattttttaggttttattagtttttattttttatatattttttaagttgtgttttttgttttgtttaggattggattcgggttatattcgtggtgtcgttaatatgttttttatggattttttgattgaggatggtttcgagaagggtttagaagagtttcgtgttttgttttagattaagaaggtggatttttcgtagttttttattgttacgtgtcgtaagggagttatcgtttgttacgtggttttggttgtttatttttgcggtaagtttgatgtggtcgtgtacgatggtttttggttcgagtggtttcgtcgggtttttttagagagtcgtgtgttttagggaaagtttgagaaggtttgagtcgtgattttttttgtttattgtaattgcggtcggtttagtgattttatgatttatagtcggtttttattttttaggtgaaggagatgatatgtttttagaattgttgtgtaaggtttattttttttttgttaatattggaataaattttgttttttttgagtagtgtgtttgtttgtttttttttgggttttatttttgtttttaaatttttattttttttaaatttcggagattttattaaggatagagattattatagtttttttggttggggaagttatatcgaggatattatttttatttagttttggtagaaatagttttttgttgttttatgttaggtggattttgttttagagtatgttgggttttattaggaagataggtgggaagggaattagaaagttagagagttgaagttttagttgttgtagttttagttttttgggtaggggcggagggatagttggtttttttaatatgtttatagaggtgttatatagatttagggttttttagaagaggttatgtttaggagtaggtgaaaggaaggtggtttttgtttcgagtattttttttggtttagagtaagattttttggggagtagtggagggaggggttggagaaagagttttggttttgggagaaggtttaggttttggtaggtgaattaggaagttatagtagaagaaagtaatttgatagtttggttttatgtggttggattttaagttttttagaaatagttttttttagattttttttggggttgtaagaagaatttcgggttttatttattggggattatcggttttttattatttagtttttttagtgaagataggattttggagggtcggagattaagtttgtttttggtttggtattggggtaaataggtgtttaggagatgttgaggaggttggttttggggttggtaggttgggtgatggggttgaatgttgaggtcggtgggatttgtagtggtgggattggtagtttggagggttgattttttttatttttatgttattaataaaatagttttttttttagtttatatgtggtttagattttattgtgggaagaagaa

SEQ ID NO: 1464 - DNA, 2400 bp, Artificial Sequence
  chemically treated genomic DNA (Homo sapiens)
ttattttaaatttatgttttagttgttttttatttaaaatggaaataataatatttattaaataataatatgtataaaatatttagtagatagaagatatttaataaatagtaggtttgtttttattattttttgtaagagttttttgttaattatttggtttatttgtatgtgtaggttaaattttttatgataaattggatcgtgttttgtttttattgttattgttttatatagttttattttgtttgatattatttggggtttagaaattttttttggttgggcgcgatggtttatgtttgtaatgttaacgttttgggaggttgaggtgggcggattatttgaggttaggagtttgagattagtttggttaatatggtgaaattttgtttttattaaaaatataaaaaaaaaattagtcgggtgtggtggtgcgtgtttgtaattttagttatttaggaggttgaggtagtagaatcgtttgaatttaggaggtggaggttgtagtgagtcgagatcgtgttattgtattttagtttgggtaataagagtaaaattttattttaaaaagaaaaaaaaaaaaaaaggttaggtatggtggtttatgtttgtaattttagtatttttggaggttgaggtaggcggattataaggttaggagttcgagattagtttgattaatatggtgaaatttcgtttttattaaaaatataaaaattagttaggtttggtggcgtatatttgtaattttagttatttaggaggttgaggtaggagaatcgtttgaatttgggaagcggaggttgtagtgagttgagatcgtgttattgtattttagtttgggtaatagagcgagattatattttaaaaaaaaaaaaaagaaatttttttgtgtgtaggattttgatgttgtaaagagataaagattgatgttgttaatttttggtttgagtgggtagtgtgtatagttgtagtgttttaatagtttgtttttttttttttgtttttttagttgtttttgggatattttagtatgtggacgagtagtttttgttacgtttttttttatttgtggttttggtgattatgttttggtttttgattgtttaatgttgggtttttgtttatattcgtggtagggttttggattggtgacgtgttattttaatttttggtgtttggttttttggttaattttgatttttggaattagtgggattagtaatatattaaggagttttgtttttttattagagttttggaattcgagattagttggcgatgatttttgaatatcgttatcgttgtaaatattttataattttaggttttggtattgagttattttttatgggtgatattatgaaattttgttttagttagttttgtaggttttgattttgtagagggaagaggtagaaagagagaaattgttagagtataattttatttgagtttaatattatagaaataaagggatgtattaaatggtatttttggaaatttttatgtttttaaatattttttggtaagttgtttttgaagttagtgggggttttttagatagagaggttttttttttaaattttagtgtcgttttgttttttttttttttttttttatttttttttttttttttttgtagagatgtaagaaattgttgttttataaaaattataattgtagtagttaaagttggggttatttcgtgaatttattagagatttaaagattttttattggttttgggttgtgtttagtgtttttggttttagagaataatttgaatgattttttggttttttggtataaattatttttggtgagatatgtggtttaatttataggttttttattagttttttttttaaaattatgtttatttgtttttttttgttagagaatatatagtcgagaatattgtcgaagttgagattgattattgtgtattaggaaagatttggagttaggattttggtgggatttggagtttcgaggtagtaataattgaataagtagttttgttttttaggttgtagaagtttgaatgtatttttttttagaatttgttataggaaattgggggttttgttaggttagtttaattgtatgtaaaagattattatttttagaagttaagttgttttttatgaagaggtaaggaaaggggaaatttatatgtgattttgattttggtatggtttgatagagttttttgaaaattttttgtatgtgtgttaaaattagggaagtatgtgattgttaagtaggtaatttttgatgatttgtaaagttaggtggtagggttttggggagttttagtataatgatattgtgtggtttttttttttgtggaatcgaggggaaattattttttttaatattttgatttgattt

SEQ ID NO: 1465 - DNA, 2400 bp, Artificial Sequence
  chemically treated genomic DNA (Homo sapiens)
aaattaaattaaggtattgggaagaataattttttttcgattttataggagggaagattatataatattattgtgttggggttttttaaggttttgttatttggttttataaattattaggggttgtttgtttggtagttatatgtttttttggttttagtatatatataaggagtttttagggaattttattaagttatattaaaattagggttatatgtgggttttttttttttttgtttttttataaaagataatttggtttttgaggatggtggttttttgtatgtagttgggttgatttgataaagtttttagttttttgtggtaggttttgggagaggatgtatttaagtttttgtagtttaggggatagggttgtttgtttagttattattgtttcggagttttaaattttattaaagttttgattttaggttttttttaatgtatagtagttagttttagtttcggtagtattttcggttgtatgttttttggtagagagaggtagatgaatatagttttagggagaaagttgatgggaaatttgtgagttaagttatatgttttattaggaataatttatgttaggaaattaggaagttatttaagttgttttttgaggttaaagatattgagtatagtttagagttaataaaagatttttgagtttttggtgaatttacgaagtgattttagttttagttattgtaattatgatttttatgggatagtaattttttgtatttttatagaggaagaagagggggagtgggaggggaaggaaagagaatagagcggtattgggatttgaaaggggaatttttttatttgaggagtttttattggttttagaagtaatttattaaggggtatttaaagatatgaaaatttttagaaatattatttggtgtatttttttgtttttgtaatattaaatttaggtgaaattatattttgatagtttttttttttttgttttttttttttgtagagttaggatttgtagaattggttgaaataagattttatggtgttatttatgagagatgatttaatgttaaggtttgaagttatagagtgtttatagcggtggcgatatttaggggttatcgttaattggtttcgagttttaaagttttgatgaagaaataagattttttgatgtgttattgattttattgattttaggagttaagattagttaggaagttaaatattaggagttggggtggtacgttattagtttagagttttgttacggatgtaggtaggagtttagtattaggtaattaggagttagaatatgattattagggttataaataggaagaggcgtgataggaattgttcgtttatatattggggtgttttagggatagttggagagatagaaaggagaaaataggttattagaatattgtagttatgtatattgtttatttaggttagaagttgatagtattaatttttatttttttataatattagaattttatatataaaaagattttttttttttttttttgaaatgtagtttcgttttgttgtttaggttagagtgtagtggtacgattttagtttattgtaattttcgttttttaggtttaagcgatttttttgttttagttttttaagtagttgggattataggtgtgcgttattaagtttggttaatttttgtatttttagtagagacggggttttattatgttggttaggttggtttcgaatttttgattttgtgattcgtttgttttagtttttaaaagtgttgggattataggtatgagttattatgtttggtttttttttttttttttttttttgaggtggagttttgtttttgttgtttaggttggagtgtaatggtacgatttcggtttattgtaatttttattttttaggtttaagcgattttgttgttttagttttttgagtagttgggattataggtacgtattattatattcggttaattttttttttgtatttttagtaggaatagggttttattatgttagttaggttggttttaaatttttgattttagatgattcgtttattttagttttttaaagcgttggtattataggtatgagttatcgcgtttagttaaaaaaaatttttaaattttaaataatattaggtaaaatgaaattatgtggaataataataataaggataagatacggtttaatttattataaaaggtttggtttgtatatgtaaataaattaggtgattaataggaaatttttgtaggaaataatgaaagtaagtttattatttgttaagtattttttatttgttaagtgttttgtatatgttattatttggtggatattattatttttattttgagtaggaagtagttgaaatataggtttgaggtga

SEQ ID NO: 1466 - DNA, 2500 bp, Artificial Sequence
  chemically treated genomic DNA (Homo sapiens)
aataggggtttttgggttttttaataggaagtattagattaggtagttagtagataattatcggtggattatagggttattagagtgagatttatttatagataaagattggttagtgatgaagtttatttgggtgtaaaggtcgagttgagaggtttttattaattggagtgtgttagtgagggtgagtagaaggtggtttttagggagaatatgggtagggtttggagttagtatttttttagggttggaggaagtagatttaggatttgtttgattgggatggggtttttttttgttattttcgtttttatttgtttagttttgttttttcgtttcgagagatgtttttaggtttgggtagatgaagttaggggttttttgtttttttggaaggtttttttttgtttggagtttatgaaagattagtaggtaatgcggtaataaaaaagattttggggtagaggggcgttacgagaggcgggtttggcgttgatatttaatttcgtgttttttttttgtaggatgttggtggattgtgtgtttttggtggaggtggacgatatgatgattatgggtaagaagtttgattttaagtgtgtttttatttatgtgtagtcgttttataattatttgcgacgttacgaattgcgtttgcgcggtaagaatgtttagtttgttcgttcgtatggttagttagtggtaagttgtcgtttttatttttcgggtatcgttttttgtttgtgcgttcgtttatcgttgttttgtttgttgcgatatttttttttttatatatatacgtagcgttttgataaattattggtttttaacgattttgatttttttttgcgttttttgggggtggggagggggtttgaatcgaaggtagtttcgtaaggtttttaattttagtagggatttttagaggtttttttttcgattttttattttattcgttcgtagtaacgaaggagtcgagttttagttaaggtaggagggaatttagtggagttggggaaggaagaaagtggggttgggagaatttttttaattttatttttgttggttcggggacgggtatcggtttttagtaagagaagtattttcgggatgttgagcgttttattttgtttttaggatttaggtaggtaggttttagtttcgtcgcgttttcggatttataggttagcgtggttcgaagttttttttgggggtttcgcgggcgtttatacgtattcggggggtatttgcgcgtcgggcgtcgttttgcggtagaagtcgagtttttgtattagcgtattgattttttcgcgggttattttattgagtgggatgcgttgaggcggaggaggggcggggttagtaggttgggtttcgtttttggtttcgtttttagtttattttttacggttttatttttagtttttcgtagcggcggtttagtagtacgagtttagggtcggttttagggaggtgttttattattaggttgtgattggaggtggtgttaaggagcggggtggtgggtagagggaggtggtggttttcgtagttttattgatgggaatagtattgttttttttgtttagagtttattttgtgttcgggaggggttagggttttcgtttatacgtgagaaaattagggtttaaagaagtaaagggtttttttttttattttgtggtagttattattagttaattttttttgtttatttaatatggagattattttagaattttttgggagttattattaattaatttaatttgttagttgaaaattatttgttatttttttttgaagttacgtggagatttttttaggtgtttattttatttttttttttttagaatagaaggatattagaatggaatgttttgcgtgacgaaagtttttatttggggaggaattagagtattagagattatgattttagtttattcgaggtatagacgagatattgaagtttagtgaggttataaagtaagttaggtgtaggttagatttttagtttaggttagatttttagtttagggatttttttttttttttcgttttagttattgggattatgttgtttattttttaagaggtttagggggaatagagttagggatttttttttttaaatttattttttttaggcggtttagttgttatttttcgtaggtttggagggggataaaatgggataggttaggagttttttacgtttattttagttatatttttaaagttatatttttttatttttgagttgggtcgggttgtgagttattttcggattagtagtttttaaggtttgaaggaaatgttggatttttgtgggtagaagggggaattgtgtatataggtggggagatttaggtttagagatattaggggaaaagagtaaggttagagatttatagtgtgtttgttagttttggggtttgtatattttattggttgtggattgatttttaatgtttaggggaaatgattattttgttttttt

SEQ ID NO: 1467 - DNA, 2500 bp, Artificial Sequence
  chemically treated genomic DNA (Homo sapiens)
agaggagtagggtgattattttttttgggtattgggagttagtttatagttagtaggatgtataggttttaaggttggtaggtatattgtgggtttttggttttgttttttttttttggtgtttttaggtttgagtttttttatttgtatatatagtttttttttttgtttataagggtttagtattttttttagattttgggaattgttgattcggggataatttatagttcgatttaatttagggataaggaagtatggttttggggatgtgattggaataaacgtgaaggatttttgatttattttattttatttttttttagatttgcgggggatgatagttgaatcgtttaaaggaggtgagtttgaaggaagaggtttttagttttgttttttttgagttttttggggagtgggtaatatggttttaatgattggggcggggaggggggaaggatttttaggttgagagtttagtttaggttgagagtttagtttgtatttgatttgttttatgattttattgggttttagtgtttcgtttgtatttcgagtagattgaggttatggtttttgatgttttggtttttttttaggtgaaggttttcgttacgtaggatattttattttagtatttttttgttttgggggaggggaaatgggatgggtatttgggagaatttttacgtaattttagaaaggggtggtagatggtttttaattgataagttgaattgattggtagtggtttttagaggattttgaggtggtttttatgttgggtgggtaagagagattgattagtgatgattgttatagaatggagaggagggttttttatttttttgaattttaatttttttacgtataagcggagattttggtttttttcgggtatagagtaagttttgagtaaaggaggtaatgttgtttttattagtaaggttgcggaaattattatttttttttgtttattatttcgttttttaatattatttttagttataatttggtgatgaaatatttttttggggtcgattttgagttcgtgttgttgggtcgtcgttacgaggaattagaggtgaggtcgtgggaggtgggttgggggcgaggttagaggcgaggtttagtttgttgatttcgtttttttttcgttttagcgtattttatttagtgaaatgattcgcgaagagattaatgcgttagtgtaggagttcggtttttatcgtaaggcggcgttcgacgcgtaggtgtttttcgagtacgtgtgggcgttcgcgaagtttttagaggaaatttcggattacgttgatttgtaggttcgggggcgcggcggagttgggatttatttgtttgagttttggagatagaatgaagcgtttagtatttcgggaatattttttttgttgagagtcgatgttcgttttcgggttagtagggatggggttggggaggtttttttaattttatttttttttttttttagttttattaaatttttttttgttttaattgaggttcgattttttcgttgttgcgggcgggtggggtgggaggtcggaagaagaatttttgaggatttttgttggagttggagattttgcggagttgttttcggtttaaattttttttttatttttaggagacgtagagaggagttaggatcgttgaaaattaataatttattaaaacgttgcgtgtgtatgtgggggggagggtgtcgtaatagatagggtagcggtgggcggacgtataggtaggagacggtgttcggagagtgggggcggtagtttgttattggttggttatgcgggcgggtaggttagatatttttgtcgcgtaggcgtagttcgtggcgtcgtaggtggttgtagagcgattgtatataggtgaagatatatttggggttaggttttttgtttatgattattatgtcgtttatttttattaggggtatatagtttattagtattttgtagggagggggtacggggttggatgttagcgttagattcgtttttcgtggcgtttttttattttaaggttttttttattgtcgtattgtttgttggttttttataaattttagatagggaaaagttttttaggaaggtaggaagtttttggttttatttatttaagtttggaggtatttttcggggcgggggagtagagttaggtaggtggaggcggagatggtagaagagagttttattttagttaggtaggttttgggtttgttttttttaattttggggaggtgttggttttaaattttgtttatgttttttttggagattattttttgtttatttttattggtatattttagttggtagaagttttttagttcggtttttgtatttagatgggttttattattggttaatttttatttatggataggttttattttagtggttttgtggtttatcgatgattgtttgttagttgtttgatttggtattttttgttgagaggtttagggatttttatt

SEQ ID NO: 1468 - DNA, 2470 bp, Artificial Sequence
  chemically treated genomic DNA (Homo sapiens)
gttttttgttttacgaatgttagaagtaagtaaaaatgtttttatttaaattatttttttttttataaaaataagaaaattatgtaattaaaataattttttgtttttttaatgagtttattatttgatttagtaattttttaatatttttatttgttttattgtaagtagttttagtgtatgttggttagatggtttttgggtttatattagtttaattgaattaggagaggagttttagaaggtgtattggatagttatgttagaggtcgtgtgtaattttaggttagattagtggttttttgttttatttgaattttaaaataattgcgaaatttttaaaaaatatattgttgttggggttttatttatatagattaaattatttttaggggtaggttttgggttcgagtttttttgtttttgtttttgtgttttttaatttttttagttgtttttttcgtgagcgaaggttgagaagtatagttgtttttgtgaggaatttagtttttagagagagtttgttcgtcgttttttattttttagagaggttgtagggtgtttagattttgtaggtattgttgtttttcgttaagtttgatgttgttatttaattaatatttgtttatattaattagttgttatatgtattgaaggggagtggttttttttgaagtttttagttgttgattatataagatttggtttgaagtgggatttttggaaatttaattaagataacgatttttaggtttttttaaaagtttattttttaggtataggtaggtaatgaaataatttaattgcggttttttttataatattttttattttatagtatcgatggagtaggagggtgtggataggtttttttgggtttttggtgttttttgttaggtgttaaaataaagaggattattgtgttttttggaattggtttaaacgtttatgtttaagattaagatttagggaaatgtattttcgtttgatatttattagtttttgattgtgaaaagggtattaatttgtgtaatggcgtcgcgattcggtcgcggattttagtttttaaagtcgggtatttttaattaggagaaattaagtggggttgttatatattttgagaataagtaatattatttaaatttaggtagttttaattattaatttaatcgttgaattttcgttgttatatgttttttaaatagattagtataattttaattaggatttaaaatgtattattttcgtttcggaatttagaatttgtagtcgacgggagtttttggaggtttaatgattttaattatggcgagaaatattttttttcggtggggaggggcgcggtcggtggcgaggagggtattttttcgggtcggagaaggtcggatggtagttcgtttcgaaagtttcggttcgttggattgggggttcgggggtggggggaatatagagaagtagggttggtggaggggaggagggattttgtagggcggtatacgacgggtgggagtggggaggaggagggtttttggcgcggggaggagtcgcgggaggggggatgttggtcgtagggtttcggagttttgagttgtgtttgtggttttagcgttttgattttttgttagggaaatttggaaggttaggtcgggttgtagttaagttttggagcgaggagtcggcgggtggagttggtagtattgcgttatttatttttattttttaattttttaagtagtgaagttcgtttggtcgttttggtttttcgttttcgtttttgtcgttgtttttgtttttgtttttttttattttttgtgtgttggttttttgtaggtcgtagattaaggggttttaagttttgaaagtaagttagttaaatgttttgtaagtttggtttagtaaaattatgtatgttgtatatattttaaaagaaattagatatttttttaaagttgtgtgcgttttttttttttattttttttatttttattttagtataaattatttaagaattataggtgattttttttgttggttcgtgagtgttagggtttagtttgtttttttttttttattattattattattttcgtttttggtattaggatttttttatcggttattcgtgtgtttttggtgtgtgattttattttttatggaatgaaaagtttttgtcggaaaatagggtttttggtgaggtaggttttgggagtttttttgtttagcgagaatgttttgtgttatgtagtgatttatgttttagagaatagtagttgattagaatgtttaagagtttggtgtttgggtggttattattaagtgaagaattcgaggaggaggaaaggaaaaagtgaggagtaaggatttaaaatttatttagtggtttttagagggagggggataataggatttaaagagtttgggttttttggtttggggtaggattcgttaagagggatttgtgggcgttagg

SEQ ID NO: 1469 - DNA, 2470 bp, Artificial Sequence
  chemically treated genomic DNA (Homo sapiens)
tttgacgtttataggttttttttggcgggttttattttaggttagagagtttaggttttttgagttttgttatttttttttttttggaggttattaagtggattttaaatttttattttttattttttttttttttttttttcgagttttttatttagtagtgattatttaggtattaggtttttgaatattttggttagttgttgttttttgaagtatgagttattgtatgatataggatattttcgttgggtaagggggtttttaaggtttgttttattaagggttttgtttttcgatagaaattttttattttataggaaatgaggttatatattaagagtatacgggtaatcggtgagaaaattttggtgttaggaacgggggtggtggtggtggtagaagaggagaggtaaattagattttaatatttacgaattagtagggggaattatttgtggtttttgggtaatttgtattagggtggggatgaggagggtggaggaaagggacgtatatagttttaaaaaaatatttggttttttttaaagtatatataatatatatgattttattaagttaaatttgtagggtatttggttagtttatttttaagatttggagttttttaatttacggtttataggagattaatatataggaggtaaagaggggtaggggtaggggtagcggtaggagcgggggcgagaggttagggcggttaggcgggttttattgtttggggggttgggaggtgagggtgggtggcgtagtgttgttagttttattcgtcggtttttcgttttagggtttggttgtagttcggtttgattttttaggtttttttggtaggagattaaagcgttgaagttataaatatagtttagaatttcgaggttttgcggttaatattttttttttcgcggttttttttcgcgttaggagttttttttttttttatttttattcgtcgtgtatcgttttgtagggtttttttttttttttattagttttgtttttttatgttttttttattttcgaatttttaatttagcgggtcgggattttcggggcgggttgttattcggtttttttcgattcgggaaagtgtttttttcgttatcggtcgcgtttttttttatcgggagaagatatttttcgttataattaaagttattaagtttttaaaggttttcgtcggttgtaggttttgagtttcggaacgaagatgatgtattttaagttttagttaagattatgttgatttatttaggagatatgtagtagcgagaatttagcggttaagttagtggttaaggttgtttaagtttaaatagtgttatttatttttaaaatatgtagtagttttatttaattttttttaattaaaggtattcgattttagaggttggagttcgcggtcgggtcgcggcgttattgtataggttggtattttttttataattagaaattagtgggtgttaaacggaaatgtatttttttagattttaattttaaatatagacgtttaggttagttttaagaaatataatgattttttttgttttaatatttgataaggagtattaaaaatttaggaaagtttgtttatatttttttgttttatcgatattgtggggtgaaagatgttatggaaaaaatcgtagttgggttgttttattatttgtttatgtttggaagataagtttttggaagaatttggaagtcgttattttggttgagtttttagaagttttattttaggttaaattttatatagttagtaattagaaattttaaaaaggattatttttttttaatgtatatggtaattaattaatataaataagtgttaattaggtggtagtattaggtttaacgaggaataatagtgtttgtaaagtttggatattttatagtttttttggaggatgagaggcggcgggtaggttttttttgaaggttgagttttttataggggtagttatgttttttaattttcgtttacggaggaggtaattggggagattaaaaaatataaaaataaaaataaaaaaattcgagtttaggatttatttttagagatgatttgatttatatagataaaattttagtagtaatatattttttagaagtttcgtagttattttaaaatttagatagggtagagaattattgatttaatttaaaattgtatacggtttttggtatgattgtttagtgtattttttggagttttttttttgatttagttggattgatgtagatttagaggttatttaattagtatgtattgggattatttataatgaggtaaatgaaggtgttagaaaattgttgaattaggtggtaaatttattgagaaggtagaagattattttgattatatgatttttttatttttatgaagaggaaggtaatttggatgaaagtatttttgtttgtttttaatattcgtgggataggggat

SEQ ID NO: 1470 - DNA, 2491 bp, Artificial Sequence
  chemically treated genomic DNA (Homo sapiens)
aatgtaaaaatgttttgaagaaagagatattgagtattggaattaagtattttacgtttttttttttgtaatattggggattaaggattattatttgtatttttggtgaagaaattgaggtatagagaagataaattatggtttttcggttataaagtaagtagtagagtttagagtttgaagttaggtttgatatttaagtttcgtagtaaattttttattgaggtaggtaagtttcgttttgtagagagtggtaaattagggaaaaaagaattaaatgtgtttgagtttaatagaatatatatattatatttaaagagaaagatattttttttataaaaagtttgaggataaatgagattttatgtgatgcgttttgtattaaaaaaaaaaagttagattatataagttagattggcgttgattaaagaagagtaaggtaataaatacgtataagaagaaggaagtggttggttttattttgggtattatttaagttataggtaggggaggggataggttttgtatggggatagttttttgatttgtttttttttttttttatttttttttttttattatttttttttttaaaatttaaaaaattttaagtaggaaaaaagggagttaattaaaaaagagaaaaatatttttgagattaatgaagtttttataatttatagtgatagatagggatttgtagaatagtaatttgattaaataaggatataagggatttaaaaggattttttagttgtgtaaagtgtgtttatacgtttgaaaaatatcgtatttatttggtttttaaatttgaaaattttttgacgggggagattgtttttatttggaaattaggaagaaattataaggtaaggttatggggttttggtagggttggggattttatgttgggtggaaattttaagaagttagttaagggtttgtaggaggggttttggtagagagaagtattagaatgtaagggtaggtaaagttatttttatagaaggtgattgtgggttgagtttgaggttttttttagatggggaagagagaatagtatattttttttgtttacgtttcggtattttatttaagaattagttgttcgttagttatttgttatcggagatagttttgttggcggtttttagaaaaagcgaagtagttagaggatgaatcgttattcggggaatatatttgtatataggataggaatggatgggagtggggagcgttttggggttattgtttaaacgttatttttatggtttttaagatttgtattagtagtttagtcgttgatgaattataattttcggataagttgtagaggtttttttcgttttatgtgtttatttttgtcgtttatattgggggatttatgttttttggggttaggaggagaaaataatgagttattggggataagagaaaaataaaaatgttttgtatgtgtaaaattatttaaaatggaggtttttagaggatatttaaattttagttaattagttagaaagggttttgttgggggtatattttatgtgtttttgttatttttggatgtagtaaagttagaaatgtttatattttttggagggattatttgtgtaaataggataggtttttttgagaaggttgtttgtttttttgggatttcgaatttgagaagaaatggttttggtttggcgcggtggttcgcgtttgtaattttagtattttgggaggtcgaggtaggtagattataaggttaggagatcgagattattttggttaatacggtgaaattttatttttattaaaaatataaaaaattagtcgggcgtggtggtaggcgtttgtagttttagttatttaggaggttgaggtaggagaatagtatgaattcgggagttggagtttgtagtgagtggagattttgttattgtattttagtttgggggatagagtgagatttcgttttaaaaaaaaaaaaaaaaaaaaagaaatggttttgtatttttgatttgggaggtttaattaagtagaggaattgttggttgtaaattttttaaagtagaggattttttgggaggttgaggtaggtgattatttgaggttaggagtttaagattagtttggttagtatggcgaaattttatttttattaaaaatataaaaattagcggatcgtggtgggttgtatttgtaattttagttattcgggaagttgaggtatgagaattgtttgagtttgggaggtggaggttgtagtgagttgagattgtgttattgttttttagtttgggtgatagggtaattttattttaaagtaaataagtaaagtagaggattttgatggttatttttaagtttatagttatttgtatattttatgtggtgaagtattggtggggggtttaggaagttttgtatgagttggttgtagttgttatgattttaatttttacgttattttttgtatttagttatagagtcgtatttttagaga

SEQ ID NO: 1471 - DNA, 2491 bp, Artificial Sequence
  chemically treated genomic DNA (Homo sapiens)
tttttggagatgcggttttgtggttaggtgtagagggtggcgtgggagttggaattatggtagttataattaatttatgtagggttttttgggttttttattagtgttttattatataaagtgtgtaggtagttatgaatttgggggtggttattagggttttttgttttatttatttattttgagatggagttgttttgttatttaggttggagggtagtggtataattttagtttattgtaatttttattttttaggtttaagtaatttttatgttttagtttttcgagtagttgagattataggtatagtttattacggttcgttaatttttatatttttagtagagatggggtttcgttatgttggttaggttggttttgaatttttgattttagatgattatttgttttagttttttaaaggattttttgttttagaaggtttatagttaatagtttttttgtttaattggattttttaagttagagatgtaggattatttttttttttttttttttttttttgagacggagttttattttgttttttaggttggagtgtagtggtaagatttttatttattgtaagttttagttttcgggtttatgttatttttttgttttagttttttgagtagttgggattataggcgtttgttattacgttcggttaattttttgtatttttagtagagatggggttttatcgtgttggttaggatggtttcgattttttgattttgtgatttgtttgtttcggttttttaaagtgttgggattataggcgcgagttatcgcgttaggttaggattatttttttttaggttcgagattttaggagaataaatagtttttttaagaggatttgttttgtttgtataggtgatttttttaagagatataaatatttttggttttattgtatttaaagatagtaaagatatataaaatatatttttagtaaaattttttttggttagttggttgggatttgagtgttttttaaaagtttttattttaggtggttttgtatatatagggtatttttgttttttttttgtttttagtgatttattattttttttttttagttttaggaagtataaattttttagtatgagcggtaggggtgaatatatggaacgaggggggtttttgtagtttgttcgagaattataatttattagcggttgagttgttgatgtaagttttggagattatgaggatggcgtttgaatagtagttttagggcgttttttatttttatttatttttgttttgtgtgtaggtgtgtttttcgaataacgatttattttttggttgtttcgttttttttgaaagtcgttaatagagttgttttcgatgataggtgattaacgggtagttgatttttgagtgagatatcgaggcgtgggtaggagaggtgtgttgtttttttttttttatttgggaagggttttaggtttagtttatagttattttttgtgagggtggttttatttgtttttgtattttaatgtttttttttgttagggttttttttgtagatttttggttggttttttggggtttttatttaatatgggatttttagttttgttagaattttatggttttgttttgtgatttttttttagtttttaaatgggaataatttttttcgttagaaggtttttaggtttgggagttaaataaatacggtattttttagacgtatggatatattttatataattggagagtttttttaaattttttatatttttatttaattaaattgttgttttgtaggtttttgtttgttattgtggattatggagattttattggttttaaggatgttttttttttttttaattagttttttttttttttgtttaaggttttttgggttttggagggaggggtagtgaagggagggaagtagagaaggaagaagataagttaggagattgtttttatgtagggtttatttttttttttgtttgtaatttgggtgatgtttaaggtagagttagttatttttttttttttatgcgtatttattattttgtttttttttaattaacgttagtttggtttatataatttaattttttttttttagtgtaagacgtattatatgaagttttatttgtttttaaattttttgtaagaaaagtatttttttttttaagtataatgtatatgttttgttaaatttaagtatatttgatttttttttttttaatttgttattttttgtaaggcgaggtttgtttattttagtgggaggtttattacgggatttaggtgttagatttggttttaaattttaggttttgttgtttattttgtagtcggagaattatagtttattttttttgtgttttagtttttttattagaaatgtagataataatttttagtttttagtgttgtagggaagaggacgtagaatatttggttttaatgtttaatgtttttttttttaaagtatttttgtatt

SEQ ID NO: 1472 - DNA, 2478 bp, Artificial Sequence
  chemically treated genomic DNA (Homo sapiens)
tttttgtagttaggtatgttttggtttgagaagttaagtaagaatgttatgtagaatatttaggaagttttttttaaaggagaggggtatgttttttttttttttgtttttttatttgttgtttggaatatggttgtgatgttggggttttagtagttattttggattatgaggtggtttagaggaaggaagttaggagttgagaatagtagagtaaaaatgtggtttttgatgattgtttagttattatattagttttgatttttttatttttggattttttttatgtgggagtgaaataaatttttattttaagttgttatttttttcgttttattatgtgaagttgaaataaattttgatagatttttatagtatataaagatgaggttatatattttttatttatatttgcgttataatttgtttttaggaggagattggaaagtagggttagatggtttagaggttttatggggttgaggttagtaggtttggttattgggttttatgggatgaaggtagaaaaggaagttgagtttggtgtttgagacggttttttaattacgttatttgatttgtgattttgtggagggtaaggttttttttgttatttttttagtattacgttcgaatttttgggaagttgtcggaagggaataatagaatttgttttattttttttttttttttgtatgagggatagggagaatttttgattgagatttatatttaatttcgaaggaaagaggaacgtgaatgtggattggaaaattattgcggggtgtttgttaggttttgggggtgggatatggagggtatttagggatattagggtagatgtttaatggtggagtttcgttgtgtattgtaggggtagggtttattttgtaggttttttggaaggtttaatataggttagagatgttttttagagtttgtaggagagtttaggtgtggggagagggttcggagtagtagtagtagtgatggtagtgttttaaggaatttgggtttaggtattgattttgaggagttggcgatgtaggtatggggtatttacgtagggttttagtaatttttgggaaggagaattcggggtttgaaggtgaggcgagtggatttaggattggataatttgggggttttagggaagtgagatttgaagtagttaggttatatcgggttttcggtagtaggtagagggtttttcgtgggaagtttttggtcgttggtatttggtagttgttttttgtagaggtattgggcgtagagttgtgtttatcgttttgaaatttgcgacgtttagtagttttgttttagttttattatagtttttgaacgtgcgtcgtattggtttttagtagtgtataattttgggttgaatacgtagtagagtagagtaaaaagatggcgttttcgcgtcggtttttttttagatataagataagaaggggtgaggagggagtttttgaatacgagggttggggtgggttttttttcgtttcgttttcgtttcgtttagttttgtttcggttttattttttaatttgtttcgttggttttgaatcgaggagggagtttgttagaattcgttataaagatgcgtattcgttttttgattattgtgtgggttgtttaaaaacgtgtattatattagttattttatttatatttttttattggtaattcggaaagaaggtaggtttttatttttattttatagattaggaagtggagattcggggaggtaaagtgatttgggttttgattttaatatattttaggttatattattttttagggaatgtaacgagatggtcgggtagatatgggttaatttgaaaatagtttgaggaaaaaaagagattttagtttgtgttttttagtaagttattataatgaatagtgttaaaaaaaatttataaggttgtaattatatttagtaattagaatattatattgtgattattttatttaggtgttattagattgaaaataagatatttgaatatgatttagttttaatgtgtttgaatattataaaggtgaacggtaggtaataatgcgtaatatattttgggaaagttgaattttaatataatattatgtaagatagatgagtatagggttaagttgtttttattttttttttatattatttggtacgtatgatgtgtgttttttaggtatttaagattttatgagttgttaatttgtttaattagttgatttataggtggggaagagagggtgtggggtttatatgattttttatattatatattatagggtaggattattagttcggttagagtttttatttttgatttattttgtagggaggggcggtatttaagttgttttttttcgaggatatttttttgttgtttaatggggtggagaaagtttttaaattattagaaaatgaagttttttttttagtttttttgtagggagatatttgatttgattttt

SEQ ID NO: 1473 - DNA, 2478 bp, Artificial Sequence
  chemically treated genomic DNA (Homo sapiens)
ggaggttaggttaaatgtttttttgtagaggagttaaaaaggggattttattttttggtgatttgggagttttttttattttattaggtagtagaaagatgttttcgggggaaggtagtttgggtgtcgtttttttttgtaaggtgggttagaggtgggggttttggtcgggttggtggttttgttttgtgatgtgtggtgtgggaggttatgtgagttttatatttttttttttttatttgtggattagttgattgggtaaattggtagtttatgaagttttgggtatttggggagtatatattatacgtgttaaatgatgtaaaaaaaaaatgaaagtagtttaattttgtgtttatttgttttatatagtgttatgttaaaatttaatttttttaagatgtgttacgtattgttgtttatcgtttatttttgtgatatttaaatatattggggttaaattatgtttaaatgttttgtttttaatttaatagtatttaaatgaagtaattatagtgtagtgttttaattattagatataattataattttgtgaattttttttaatattgtttattataataatttattagaaaatatagattgaaatttttttttttttttaaattatttttaaattggtttatatttgttcggttatttcgttgtattttttgggaggtggtgtggtttgaagtgtgttggggttaaagtttaagttattttattttttcgagtttttattttttaatttgtgaagtggggatagagatttgtttttttttcgggttgttagtggggaggtgtaaatgagatggttgatgtaatatacgtttttaaatagtttatataatggttagggggcgggtgcgtatttttgtgacgagttttggtaggtttttttttcgatttagagttagcggagtaggttgggaggtgaagtcggagtagggttgggcgaggcgggggcgaggcgaggaggagtttattttaattttcgtgtttaaaagttttttttttatttttttttgttttgtgtttagaaagaagtcggcgcggagacgttatttttttattttgttttgttgcgtatttagtttaaaattgtgtattgttggaggttaatgcggcgtacgtttaaaagttatgatgaggttggaatagggttgttaagcgtcgtagattttaggacggtgagtatagttttgcgtttagtgtttttgtagggagtagttgttaaatgttagcggttagaaattttttacggggagttttttatttgttgtcgaaggttcggtgtgatttggttgttttagattttatttttttgggatttttaagttatttagttttgggtttattcgttttatttttagatttcgggtttttttttttaaaggttgttggagttttgcgtggatgttttatatttgtatcgttagttttttagggttagtgtttgagtttaggttttttaaggtattgttattattgttgttgttgtttcgagttttttttttatatttgggtttttttgtaggttttgaagagtatttttgatttatgttggattttttaaggggtttgtaaagtgagttttgtttttgtagtatatagcggggttttattattgggtatttgttttgatgtttttgggtgttttttatgttttatttttagagtttaataaatatttcgtagtggttttttaatttatatttacgtttttttttttttcggggttaagtataaattttagttagggattttttttattttttatgtaaagaaaggaaggaagtagggtaggttttgttattttttttcggtaattttttaggaattcgggcgtggtgttgggaaggtggtaaaagaaattttgttttttatagagttatagattagatggcgtaattgaggggtcgttttagatattaggtttagtttttttttttgtttttattttatggggtttaatggttaggtttgttgattttagttttataggatttttgggttatttagttttgttttttagtttttttttagaaataagttataacgtaaatgtggataggaaatgtatggttttatttttatatattatgagggtttgttaggatttgttttagttttatataatggggcggggaaaatagtagtttaaggtgaaagtttattttatttttatataaaagaagtttagaggtaggaaggttagagttggtgtggtggttggataattattagggattatatttttgttttgttgtttttaatttttggttttttttttttaggttattttatgatttaaggtggttgttggagttttagtattatagttatattttaggtagtaggtggaaaaataggagagaaaagggtatgttttttttttttaaaggaggttttttggatgttttatataatatttttatttagttttttaggttagaatatatttagttgtaagag

SEQ ID NO: 1474 - DNA, 2292 bp, Artificial Sequence
  chemically treated genomic DNA (Homo sapiens)
aaggggttgtagttttggtttttggtgagaggattgtagtgtcggggttggttaataagtattttttattttgtaggaggtcggcgtagtatttgtgagtatttgtgttgaattttttcgtggattagatattgtgtttttttgtttagagttaggttggaaaaggaaaatttgtcgtcggtgtgtatgtgttttaaatttttagtttgggtaagggtacgggcgtcgtgaataaaggagttatttttgttggttttttttagaaattgtttatagtttgtaaaaaggttgtgttttttggtttcggttgcggttgtgtaggagtttgaatattattttttttagaagttgaggtttttaggttaggtttattttgttttaaatgggtagtattggttttgttttatgtataggttttaggcggatagagttgttgtaggtatgttgttagggggataggttgttttttagttgtgtatggtagtgtgtcggaaagaataaggtttgtgggtgtttttgagtcgggtttggagttttgttttgttattttttagtcgtgtgattggagtttttttgtttttttttgaaaatgggtttggtggtttgtttttaggtttttaattattgtgtggagttatatttgtagaaggttagtttataatagatatggtaattaatgtgatttttgtattttttttttttggggttaggagtaggtttaagaggtggttaggttaaatttttgtagggttgtgggtattgttggttttttaagtttcgggattttttgggggtcgggcggattttaagttttgtttatttgttttttttttatttttattatttattttgttttttcggttttttttttttttgtttcgttttttatcggttttttgtttttttcgttcggagaggggaacgtgaaggaggtgaggagggagtagtgtaggaggatttgggttttttttttttttttttttttatttttcgagggtttaattagttggtgaaggtttttaattagtaaaggaggaagtagtcggggtcggtgagggtgaggtcggtagttaggtaggaaggtagtaggaggaggaggaagcggaggcggtattttttgagaggcgtatgtttagtgagtcgtgaagatggtagggttggcggagcggtcgtcgtatttgattttttttttttttttaggatatgtgatggcgtttagtttggagttgggataaggtttttgtagtcgatatttttataggagaagttttgggattggggtagtagtaaggcgtttatgttatatatcgtttttcgaggaaacgcggtttagcgattttttgattgcggattttgtgggaaatttcgttaataaatgttaaagatatatttcgaggtagcgtggatgtggtttgtttttatttaatagtatggttcgcgtggttttttttcgggattattcgtgtttttatatattcgtttagtgtttgcgagttttcgtgtttggttttcgtgtattagatatgatgtatttagagttaggtagtaggagggagttttgttttagaggaagtttagttatgttgttacggagagggcgcgtttttttcgatgtattagtcgttgttagaggaggtttacggtagcgggcgtttggagttatagtgttcgagttatttgagtgtgtgagtggtaagggagaaatatttaaatcgtgtaatattagggatattgaagtaaagacggagtttggtgtttatagacgaatggtagtatgaatgagtgtgcgttttttggggttgttttaagttattataaacgtgggggtttaaaataatatatattaatttttttgtagtttggagattagagtttagaatgggttttgttgggttgcgtttttttggaggcgttaaggggaaattttttttttttgttagtagtgagaggtattatattttttggtcgacgttatttgtatttttaaagttagttatgtggtgttttttattttttttttttgttttttttgcgtttttgttgtttttgaaggatttttgtggtgatttcggatttgttcggggaatttaggggttttatttttaggttagtagatgagcgtttttaatttcgtttgtagatttagcgtttttttgttatgttatcgttacgtttatacgatttagggattaggaggtgtgcgttttcggttgggtgggagtgcgggatattattttgttttatataattagtatttttttaatatttgggggataattttaaattggttat

SEQ ID NO: 1475 - DNA, 2292 bp, Artificial Sequence
  chemically treated genomic DNA (Homo sapiens)
gtgattaatttaagattattttttaaatattagagagatattagttgtgtgagatagaataatgtttcgtatttttatttagtcgaagacgtatattttttaatttttggatcgtgtaaacgtgacgataatatgataagggggcgttaagtttgtagacggaattaaggacgtttatttgttgatttagaaataagatttttggatttttcgggtagattcgaggttattataggggttttttaaagatagtagagacgtagaggaggtaagagggagagatgggggatattatatggttggttttaaagatgtaggtgacgtcggttaaggaatgtggtgttttttattgttggtaaaggagggggatttttttttagcgtttttaggaggacgtagtttagtaagatttattttggattttgatttttagattataagaggattaatgtgtgttgttttaagtttttacgtttgtggtgatttagagtagttttagaaaacgtatatttatttatgttgttattcgtttgtagatattaggtttcgtttttgttttagtgtttttaatgttatacggtttgggtattttttttttgttatttatatatttaaatggttcgagtattgtggttttaagcgttcgttgtcgtgggttttttttgataacggttggtgtatcgaggggagcgcgtttttttcgtaatagtatggttgagttttttttggggtaaagtttttttttgttgtttggttttgaatatattatgtttggtatacgggaattaaatacggagattcgtagatattgggcgggtgtgtgagaatacgggtggtttcggggaaaggttacgcgggttatattgttgagtgaaagtaaattatatttacgttgtttcggagtgtgtttttaatatttattgacggggttttttatagggttcgtagttaaagaatcgttgaatcgcgttttttcgagagacggtgtgtggtatgggcgttttgttgttgttttagttttagagttttttttgtaggggtgtcggttataggaattttattttagttttaaattggacgttattatatattttaaaaaaaggggagagattagatgcggcggtcgtttcgttagttttgttatttttacgatttattgagtatgcgttttttagaaggtgtcgttttcgtttttttttttttttgttgtttttttgtttggttgtcggttttatttttatcggtttcggttgtttttttttttgttggttaagaatttttattagttggttaagttttcggagaatggaaaagggaaagaaggagagatttaaatttttttgtattattttttttttattttttttacgttttttttttcggacggagaggatagagggtcgatgagaggcggagtagggagggaaggagtcggaaggataaggtgggtagtgaggatggaggagaggtaggtggatagaatttaaggttcgttcggtttttagaaggtttcggggtttaggaaattagtagtatttatagttttataggggtttagtttgattattttttagatttgtttttgattttaggaaggaaggatgtaaaggttatattggttgttatatttgttatgagttgattttttgtaggtgtgattttatatagtggttaagaatttgggaataaattattagatttatttttagagaggagtaaagaggttttagttatacggttgagaagtggtaggataggattttagattcggtttaggggtatttataggttttgtttttttcgatatattgttatgtatagttggggggtagtttgtttttttgatagtatgtttgtagtagttttgttcgtttggagtttgtgtatggggtaaggttaatgttgtttatttgggataaggtgggtttaatttagggattttaatttttggggaaaatgatatttagatttttatatagtcgtagtcggggttagggaatatagtttttttgtaagttgtgggtaatttttagaaaaggttagtaagaatggtttttttatttacgacgttcgtgtttttgtttaagttgaggatttggagtatatgtatatcggcggtaagttttttttttttaatttgattttgagtaagaagatataatatttgatttacgaagagatttaatatagatatttataaatgttgcgtcggttttttgtaggatgaagggtgtttattaattagtttcggtattgtagtttttttattagaagttaggattgtagtttttt

SEQ ID NO: 1476 - DNA, 3056 bp, Artificial Sequence
  chemically treated genomic DNA (Homo sapiens)
gaagcgtatatatggggttatttttattttatagggttgtttttttgttatttagtagtcgtgatgaggatatcgtgatttttgcggataagtttggtaaaggttttcgaggtatttacgttttgagttattttagttttttcgttttcggtacgttttgaaggtttgattatgggggtgatagtttttgagaaggtggtttttgtggtatttggtagtggatcgtaatagtgttcgttattttattcgtttaataagtggttattaggaagttttggaataaagtttagaagaattgggataggggtcgttagggttgttagtggggatagggtggggtataggaagttgtaggatagatttagaatacggggttttgttgggtaagagggcgataggtagtagttttagtaaatcgaggaattttttatgggatttgaaagttgaagacgggtagggagttttgttttgatttttaagaggtcggtattttcgtatttatatcgcggttttgtgtttttcgcgtttttatcgcgtttttgtgtttttcgcgtttttatcgcggttttgagtttttcgcgtttttatcgcggttttgagtttttcgcgtttttatcgttgttttgagtttttcgtagttatatcgcggttttgtgtttttcgcgtttttatcgcgtttttgtgtttttcgcgtttttatcgcggttttgagttttttacgtttttatcgcggttttgagtttttcgcgtttttatcgttgttttgagtttttcgtagttatatcgcggttttgagtttttcgcgtttttatcgcgtttttgtgtttttcgcgtttttatcgcgtttttgtgtttttcgcgtttttatcgcggttttgagtttttcgcgtttttatcgcggttttgagtttttcgcgtttttatcgttgttttgagtttttcgtatttatatcgcgtttttgtgtttttcgcgtttttatcgcgtttttgtgtttttcgcgtttttatcgcggttttgagtttttcgcgtttttatcgttgttttgagtttttcgtagttatatcgcggttttgagtttttcgcgtttttatcgcgtttttgtgtttttcgcgtttttatcgcgtttttgtgtttttcgcgtttttatcgcggttttgagtttttcgcgtttttatcgcggttttgagtttttcgcgtttttatcgttgttttgagtttttcgtatttatatcgcggttttgtgtttttcgcgtttttatcgcgtttttgtgtttttcgcgtttttatcgcggttttgagtttttcgcgtttttatcgttgttttgagtttttcgtagttatatcgtagttttgagtttttcgcgtttttatcgtagttttgagttttttgcgtggtttgcgttgttttagagtttttggtgtggggtggggtatataggtagggattaatttatggagtttttagtttgttttgtagtgttttttataaaagttatggatttttttttgtttgttatatgtcgtgtttattattgtgacggttttttttacggggatttttatacgatagagagtaaggcgttagttaaggattattgggtagtcgggggttggcggtgttaagtagtaggaagtagtttagttggatgaggagcgttggttgtagagatttttttgttgggttttgttattcggtaggatttttacggaggagttgtatttatattttattaaaatttttaatttttgtagaataaagttgagttttagagaagggaagagatttgtttaagttattaataggttaataattatgggggtttagatagggaagtttaagtggttcgattgtagtttattatcggtagttaagtttaagtagatgagtttttggggtagaaggaagagttaaatggttttgtgaatacggaaggtaaagaaaaattttattttattttaaggaagtatgtagtaagatgttaaaaatagatatttcggtgatatggagttgtagggggaaatagtgtgaggattttggaaggagtaaggtatgaaggattgtacgtgtggttttgcgttgatgtgaggagtaagtgtacggagtttttatagtaggaggggggacgggaatgagttgtaggttgttgggtggagagtttttttatcggaatgtttgagaggaggcgaggacgtcgggtttttttacgtttttttttgggttttacgttgttttgtgaaagggaagggaattatttatttggaatatgaaggaagaataataaaattttattgtttattttagagaagatacggttatagaggttgtatgttatattgcgggtgttatagggagtttgtttatatagcgtttttatattgtaggtgttatagggattttgtttatatagcgtttttcgattgtaggtgttatagggattttgtttatatagcgttttttaattgtaggtgttatagggagtttgtttatatagcgttttttaattgtaggtgttatagggattttgtttatatagcgtttttatattgtaggtgttatagggattttgtttatatagcgttttttaattgtaggtgttatagggattttgtttatatagcgtttttatattgtaggtgttatagggattttgtttatatagcgtttttatattgtaggtgttatagggattttgtttatatagcgttttttaattgtaggtgttatagggagtttgtttatatagcgtttttatattgtaggtgttatagggattttgtttatatagcgttttttaattgtaggtgttatagggattttgtttatatagcgtttttatattgtaggtgttatagggattttgtttatatagcgttttttaattgtaggtgttatagggagtttgtttatatattaaattgaaggttttatagggatttagtttatatagtatttttatattgtaggtgttatagggattttgtttatatagcgtttttatattgtaggtgttatagggatttagtttatatagcgtttttatattgtaggtgttat

SEQ ID NO: 1477 - DNA, 3056 bp, Artificial Sequence
  chemically treated genomic DNA (Homo sapiens)
gtggtatttgtagtgtgaggacgttgtgtagattgggtttttgtggtatttgtagtgtgaggacgttgtgtagatagggtttttgtggtatttgtagtgtgaggatgttgtgtagattgggtttttgtggagtttttagtttgatgtgtagataggttttttgtggtatttgtagttggaggacgttgtgtagataggatttttgtggtatttgtagtgtgaggacgttgtgtagatagggtttttgtggtatttgtagttggaggacgttgtgtagataggatttttgtggtatttgtagtgtgaggacgttgtgtaggtaggttttttgtggtatttgtagttggaggacgttgtgtagataggatttttgtggtatttgtagtgtgaggacgttgtgtagatagggtttttgtggtatttgtagtgtgaggacgttgtgtagatagggtttttgtggtatttgtagttggaggacgttgtgtagatagggtttttgtggtatttgtagtgtgaggacgttgtgtagatagggtttttgtggtatttgtagttggaggacgttgtgtagataggttttttgtggtatttgtagttggaggacgttgtgtggatagggtttttgtggtatttgtagtcggaggacgttgtgtagatagggtttttgtggtatttgtagtgtgaggacgttgtgtagataggttttttgtggtattcgtagtgtggtatgtagtttttgtgatcgtgttttttttggggtggatagtgaggttttgttattttttttttatattttagatggatgattttttttttttttatagagtagcgtggagtttagggaaaagcgtggaggggttcggcgttttcgtttttttttaggtatttcggtgggaaggttttttatttagtaatttatagtttattttcgtttttttttttgttgtggggatttcgtgtatttgttttttatattagcgtaggattatacgtgtagttttttatgttttgttttttttagagtttttatattatttttttttgtaattttatgttatcgggatgtttgtttttgatattttgttatatgtttttttggaatgaagtggggtttttttttatttttcgtgtttatagggttatttgatttttttttttgttttagggatttatttgtttggatttagttatcgatgatgggttgtagtcgggttatttgggtttttttgtttgggtttttatgattattgatttgttggtgatttgggtaagtttttttttttttttgggatttagttttattttgtagaaattggaggttttggtgggatgtgggtgtagttttttcgtgggaattttgtcgggtggtagggtttagtagaggagtttttatagttagcgttttttatttagttgggttgttttttgttgtttagtatcgttagttttcgattgtttagtgatttttaattgacgttttgttttttgtcgtatggaggttttcgtggaagaaatcgttatagtggtgggtacggtatgtggtaggtaggggaggatttatagtttttataaagaatattgtaaagtaggttggagattttatgagttggtttttgtttgtgtgttttattttatattaagggttttgaggtagcgtaggttacgtaggaagtttagggttgcggtgggggcgcgggaagtttagggttgcggtgtggttgcgggaagtttagggtagcggtgggggcgcgggaagtttagggtcgcggtgggggcgcgggaagtatagggacgcggtgggggcgcgggaagtatagggtcgcggtgtgggtgcgggaagtttagggtagcggtgggggcgcgggaagtttagggtcgcggtgggggcgcgggaagtttagggtcgcggtgggggcgcgggaagtatagggacgcggtgggggcgcgggaagtatagggacgcggtgggggcgcgggaagtttagggtcgcggtgtggttgcgggaagtttagggtagcggtgggggcgcgggaagtttagggtcgcggtgggggcgcgggaagtatagggacgcggtgggggcgcgggaagtatagggacgcggtgtgggtgcgggaagtttagggtagcggtgggggcgcgggaagtttagggtcgcggtgggggcgcgggaagtttagggtcgcggtgggggcgcgggaagtatagggacgcggtgggggcgcgggaagtatagggacgcggtgggggcgcgggaagtttagggtcgcggtgtggttgcgggaagtttagggtagcggtgggggcgcgggaagtttagggtcgcggtgggggcgtgggaagtttagggtcgcggtgggggcgcgggaagtatagggacgcggtgggggcgcgggaagtatagggtcgcggtgtggttgcgggaagtttagggtagcggtgggggcgcgggaagtttagggtcgcggtgggggcgcgggaagtttagggtcgcggtgggggcgcgggaagtatagggacgcggtgggggcgcgggaagtatagggtcgcggtgtgggtgcgggagtgtcggttttttggaggttaggataggattttttgttcgtttttagtttttaggttttatggagagtttttcgatttattgaggttattgtttgtcgtttttttgtttagtagggtttcgtgttttggatttgttttatagttttttatattttattttgtttttattagtaattttagcggtttttgttttagtttttttgggttttgttttagggttttttggtgattatttgttaagcggataaagtaacgggtattgttgcggtttattgttaggtattatagggattatttttttagaggttgttatttttatggttaggtttttaaggcgtgtcgaaggcgggagggttgggatggtttaagacgtgagtgtttcgggggtttttgttagatttgttcgtagggattacgatgtttttattacggttgttgggtggtaggagggtagttttgtggggtggggatggttttatgtgtgcgtttt

SEQ ID NO: 1478 - DNA, 2500 bp, Artificial Sequence
  chemically treated genomic DNA (Homo sapiens)
ttgaggtaatttatgttgttaatgtagagtgaaggttagatattttataagaaatatgtaaatgtttttagatttagaaattttttttttattttatttgtttttttattttaagggaagttaatattttggaattttgtgtagatgttattaagaagaagaagaggggtttagaggtatgtagaatttagttgaaaaagaataatttatttatgtttgaagttttaaattagttttaattatttttgttaagagttgaggaagggatttaggagaaaggggattaaatttattttttttttttttacgaattttagtataatttgttttaagttaatttttattgaatgttgtgggttgattgttattttaagttatttgttttttttaaatattttaagaagtgttttgatttattttatagatgaagaaattgagatttaaagaggttaagtaattttttaagtggcgaatataggtggtagagaagattgaagatttaaattttggttgttagtttttaaaatttgaatttattattgatttttatggtattggtttggattagattatttttaatattttttttaattttgagattttaggattttttgatgttaggatattataaatttattataatttttttaaatttgttaaattaattttagatttttatgattatagatatgatatttttagaattaatatttaaattaaggtaggattattatatagaaaatataattgagtagaatttatttttgttatgttgttttttttagaattgattttaaaatatagcgttatgtttgttagagttagttatttgtaatgtgttagaatttcgattttaggtaagtgttaggagttaaaatgtaggtttttttaaatttttaagtagttgcggtgttaagttgatttcgatgagttgagtttttattgagtagtttaaatgattagattgtaattaggggttttatttttttatttacgaagtattagggtagttaaggggaaagattgacgtagaaggaatgaggtttttatgggttgggtttaaaagatttagagcgagtgtttagttgaaatatttgttaaaattttaaggaatatttatataaaaataagaagttgttcggtatagaagttagggtaggggatgtttttcgaaggttatattttatggtaggtatatagtagtacgtttaaatatggtttttgttaaggttagagaggtattatttatatagaagaagttattatcgtgattttatttatttcgcgtttttatcgcgtaattgaatgttgagtgtggacggtattttttttagtatttggttgcgttatcgtgtttagttggtaagttttgggggagaagagaggtttagaaggaagattatttgagtttattagaataatgtgtgtttttaataaggtaggggcgtttaaatttagtaggtttaatagattaagttatgttatgaaggttttgtggattatttattttcgttaattagttattatttaaaagatgagaaaacgttagtttataggttaaatgggaggtatttagaagagatattaatgaagagatgtttggttttgtattaattattgtaggtaaattaatattaaatgttaggaagtaaagtagaggtatttttttattataaatttttgggataagtttagagattattagtagtttagggtttgtgtacgttgagaattgaggggataatagaattgtgtaatattttggtgttttatcgttttcgttattaaattttatagtttatagtatcgttttggtatattgggtttgtgtaatatttatggatttgatttggaattataaagcggatttagtttttgttatatttatttattttagtgattttgggtatatattgtgtttttgaaggaggtatagtggttataaatggaaatagtatttgtttgtttttggggattttggttatagatttttgaggtttttttgggagttagtttaagataatgggtaagagtatggattttgaaggtagagttttttgtttggaattttagttttgttattttttaattgtgtggttttaataagttatttagtttgtttgtgatttaggttttttatttataaaatgggtataatagtttttattttatagggttgttatggtgattcgtgggttaatattaaaggagattttttaattttagtattattgatatttggggtcggataattttttgttttgggggttgttttgagtattatgggatgtttagtaatttttttattttttacgaattgttgtgataattaaaattgtttttagatattgttatatgttttaaatattttttaggggggtaaaattgtttttagttgagaattattgtattagattatgtcgtagatataaatagttaaatattagtaattttacgtggtttaatttaataattataaagtatttaatagttaaaattt

SEQ ID NO: 1479 - DNA, 2500 bp, Artificial Sequence
  chemically treated genomic DNA (Homo sapiens)
gagttttaattgttaaatattttataattgttagattgaattacgtgaaattgttgatatttggttatttgtatttacgatataatttaatatagtggtttttaattggaggtaattttgtttttttaggaaatatttgggatatgtggtaatgtttggagataattttggttgttataatagttcgtagagggtagggaggttgttaaatattttataatatttaggatagtttttagaataaagaattattcggttttaaatgttaatggtattgaggttgagaaattttttttaatattagtttacgaattattatgataattttatgaggtaggaattattatgtttattttatagatgaggagtttgagttataggtaggttaagtagtttgttaaggttatatagttgggaaatggtagggttaggattttaagtagaggattttgtttttagagtttatatttttatttattattttagattggtttttaggaaagttttagaagtttatgattaaggtttttagaagtaggtaaatgttatttttatttatggttattgtgttttttttagaggtatagtgtgtgtttagagttattggggtgaatgaatgtaatagaagttgagttcgttttgtgattttaggttaagtttatgagtattatataagtttagtgtgttaaggcgatattgtgaattgtgagatttggtaacgggggcggtggggtattaaggtgttgtataattttgttatttttttagtttttagcgtatataagttttggattgttggtggtttttgggtttgttttaagggtttataataggaaaatgtttttattttattttttggtatttggtattaatttatttatagtaattaatataaagttagatatttttttattggtgttttttttaaatgttttttatttggtttgtgagttggcgtttttttattttttaagtggtgattggttggcgggggtaggtggtttataagatttttatagtataatttggtttgttggatttattgagtttgggcgtttttgttttgttaaaagtatatattgttttgatggatttagatggttttttttttgaatttttttttttttttaaggtttgttaattgagtacggtaacgtagttaagtgttggaagaagtgtcgtttatatttagtatttaattacgcggtgggggcgcggggtgggtagagttacgatgatgattttttttatgtgaatggtgtttttttagttttaataggaattatgtttaagcgtgttgttgtatgtttgttatggagtgtggttttcgaagaatattttttattttgatttttgtgtcgagtaattttttatttttgtgtgggtgttttttgaggttttggtaaatgttttaattaagtattcgttttaggttttttggatttagtttatgggaattttattttttttgcgttagtttttttttttgattgttttagtgtttcgtgggtgagagaatgaagtttttggttatagtttggttatttgaattgtttagtaagaatttaatttatcgaaattagtttggtatcgtagttatttggaagtttgaaggaatttgtattttagtttttagtatttgtttagagtcgaaattttgatatattataaatgattggttttgataaatatagcgttgtgttttagggttaattttgaaaagaataatatggtaaaggtagattttatttagttgtgttttttgtgtaataattttattttgatttaaatattgattttaaaagtattatgtttgtaattatagagatttagaattggtttgataaatttaggagagttataataggtttataatgttttgatattagagaattttagaattttagagttggaaaagatgttaaaggtaatttaatttaaattaatgttatggagattagtggtaaatttaggttttggaggttgatagttagagtttgaatttttaattttttttgttatttgtgttcgttatttggaaagttatttaatttttttgggttttagtttttttatttgtaaaatgggttaaagtattttttagggtgtttgagagaagtaaatgatttagaatagtagttagtttataatatttaataaaagttagtttagaataagttatattgaaattcgtaaggagaggaggaatgagtttggtttttttttttttaagttttttttttagtttttaataagagtagttaaagttggtttagaattttagatataagtgggttgtttttttttagttgggttttgtatgtttttgggtttttttttttttttttggtagtatttatataaagttttaagatgttagttttttttggagtgaagggataaataaagtaaaaaagaagtttttgagtttggggatatttgtatattttttatgaaatgtttggtttttattttatattgatagtatgagttgttttaa

SEQ ID NO: 1480 - DNA, 2780 bp, Artificial Sequence
  chemically treated genomic DNA (Homo sapiens)
tacgtagtttaagattgttagtaattttttcgcgaaaggttttcgggattgtgattttgaggattggtgagtgttttttttcgagagagtgagcgtcgggcgtttggcgtaggcgtcgttttgattcgtttttcgttcgtaggtttcggaattatcggttcggcgtattgtcgtttatgagcgttttcgcgcgttcgcggaatttcgtggttttttcgacgtagtttagcggtacggagaaaggtagggtcggggtcgtgggattcgggtttcggttttgtgcgcgttttatttcgggtcggcggtttcgttcgatttcgtttgcgttttcggggcgttttaggttttcgcgtcggttgtataacggtcgcggcggcgggtaagcgcgtattcgttcgttcggttcgacggttgcgtttcgttcgtcgtcgtcgtcgttcgtagaggggcgcgggtttcggggagggttcggggcgtcggcgatttggggtttcgggtacgttggtatcgattggtcggggaatatcgagggcggttaagagtttttttttcgttagggtttcgtatggggcgtcggagtttttcggcggtttcggtcggtcgcgtttatttttcggtttttttcgtagacgcggttgaggttcggcgagaattttagcgcgacgcgggcgggttagtagtgttcggggattcggcgtatttttcgtagttgttggttcgggtgttaagtttttcgttgttcggggtcggcggcgtcggcggtttagtttcgttgttcggcgcgttcggaggtcggtttagtttttcgaatttcgagttgcgtttggaggcgttcggcgtatcggagtcgttgtattattatttttataaatattcggtcgtcgtttacgattattatttcggggttaagagtcggtcggcgttttattcgttgttcggtttgcgtggttacggttattattcgtacgcgtattcgtattattattattatttcgtgagtttagtcgtcgcggtcgtcgtcgtcgttgtcgtagttgtcgcggtcgttaatatgtattcgtcggtcggagtcgcgtcgttcggtttttacgattattgttttagataatacgggttttgtcgcgttttcgtttcggttttgtatagtttcgaagttcgtcgggttcggttattttgttttaagggtaagtaaggaatacgtttttttagttttaggggttatcgcggttttttttttttttagtttcgaagttatgggggttttttcgttatttttagttttttgggttatcgaagtattcggttttttagtttttggagttatcgcgggttttttttcggtttcgagggttaagggggttttcgttcgttagtgttaaagcgttcggtcggaggcggaaggaagtgatatttattgtttttttcgagatcgcgtcgttcgcggttcggtcggtagttgtagtgtagatagttcgagagtttcgtttgtaggcggtgtagatatatgtagatattgtagatattgtagatatcgtttcggcgtcgatttgataaacggtttcgttttttttggaagtcgtttgcgtgtttatttatttgtgtttagttagatcgcgttgggaattttcgggatagcgagttcggggtagtttagggtttttagggtttttttagttttaatttttgtcgattgtaggtcggtttcggttttatagcgttttgttcgttacgttttttgttttttgttcgttttataggggtttttattgtttttttttttttcgaggttttttttgttaggtttgtgtattttttttatttttttatcgtttcgttttattttaatttttttagggttggtggtatcgtttaggtgtgtattttgtttttttatttaaattttttttatttgtagttgtttttattttgggatttgggtttgcgttttggtttgttttcgggatagatgtttgtgtttttttatggaagttgggaagaagggttatgatagatattgtcggtcggtgttgggagggggagaagtttttgatcgggatggggttatggaaagataaaaataggtagtattgttttgttagtattttttttgtcggtttagtttaggttcgtatgttttttttttagtgattttatttgttgtgagtgtttttacggagtgatttggttagggggtataatgatagtagttatgagttattttgagatttgtgtatgaagtattttttttaggttaggtggttaagggattttttttcgttaatttaatattagggatggggcgagaggaattttttgatttttttttttttgagcgtaagtaggaagggttgatagtcggttagcgttaaggttgttgatttggatataagatgaacgggaagtgtacgtggtcgaggttttgttttttatttttcgtgtttgttttagtgtgtttgtggtaattgttgttttttaggttattcggtttattattttacgtggtagcggtagtttgagtgttattttttcgagggtatagttaggagtttttagatgtttattttcgcggatttgtttttcgtatatatgtttgttttggcggcgtgaagtgagtggggttttagtaattgaatggtaggaattatttttagaggttagtttagggtgggagggggtttttaggggttatttaaagttttaaagggtatttagtattagagagtgaggatttttgtagtatttgtttaggtttcgtgagtacggttttggagatgtatttg

SEQ ID NO: 1481 - DNA, 2780 bp, Artificial Sequence
  chemically treated genomic DNA (Homo sapiens)
taaatgtatttttaaagtcgtgtttacggagtttgggtagatgttgtagaggtttttattttttggtgttagatgttttttgaggttttggatggtttttggagatttttttttattttagattggtttttgggaatggtttttgttatttaattattaagattttatttattttacgtcgttagagtaaatatgtatacgaaaaataggttcgcgagggtggatatttggaaatttttggttgtgttttcggagaggtggtatttaggttgtcgttattacgtggggtgatgagtcgagtggtttagaaggtagtagttgttataaatatattgggataggtacgggaggtgggggatagagtttcggttacgtgtatttttcgtttattttgtgtttaagttagtagttttggcgttgatcggttgttagttttttttgtttgcgtttaggaagggagggattaaagagtttttttcgttttatttttggtgttgagttaacggggagaggttttttagttatttggtttgggaaaaatgttttatatataggttttaagatgatttatggttattgttattgtgttttttggttaggttatttcgtagggatatttatagtaaataaagttattaaggagggaatatgcgggtttgggttaggtcggtaggggaaatgttagtagaatagtgttgtttgtttttgtttttttatgattttatttcggttaggggttttttttttttttagtatcgatcggtagtgtttgttatgatttttttttttagtttttatggaaaagtataagtatttgtttcgaaaataggttagggcgtaggtttaagttttagaatagggataattgtaggtgggaggaatttaagtaaaaaggtaggatgtatatttgggcggtattattagttttggggaggttgggatgagacgggacggtgggaaggtggggggagtgtataggtttggtaggaggggtttcggagaggggaggggtagtgggagtttttatggggcgggtagagggtaggaggcgtggcggatagggcgttgtgggatcgggatcgatttatagtcggtagggattggggttggggaggttttgagggttttgagttatttcgggttcgttgtttcgaagatttttaacgcgatttaattgggtataaataaatggatacgtaggcggtttttaaaagaggcgaaatcgtttattaagtcggcgtcggggcggtatttatagtatttatagtatttatatgtatttatatcgtttgtaggcggggttttcgggttgtttatattgtaattgtcggtcgggtcgcgggcgacgcggtttcggggagaataataaatattattttttttcgttttcgatcgggcgttttggtattggcgggcggggatttttttggttttcggggtcggggaaggattcgcggtggttttagggattggggaatcggatatttcgatagtttaaggggttgggggtggcgagggggtttttatggtttcgaggttggggaaggggagagtcgcggtggtttttggggttgggggaacgtattttttgtttgtttttggggtagggtggtcgggttcggcgaatttcggggttgtgtaggatcggggcgggagcgcgatagggttcgtgttatttggggtaatagtcgtaggagtcgggcggcgcggtttcggtcgacgagtatatgttggcggtcgcggtagttgcggtagcggcggcggcggtcgcggcggttggatttacggggtggtggtggtggtgcggatgcgcgtgcgggtggtagtcgtggttacgtaggtcgggtagcgggtagggcgtcggtcggtttttggtttcgagatagtggtcgtaggcggcggtcggatatttgtaggggtggtggtgtagcggtttcgatgcgtcgggcgtttttaggcgtagttcggggttcgggggattgggtcggttttcgggcgcgtcgggtagcgggattaagtcgtcggcgtcgtcggtttcgggtagcgaggggtttagtattcgggttagtagttgcggaggatgcgtcgggttttcgagtattgttggttcgttcgcgtcgcgttggaattttcgtcgggttttagtcgcgtttgcggagagggtcgaggagtgagcgcggtcggtcggggtcgtcgaggagtttcgacgttttatgcgaggttttggcggagagaaggtttttggtcgttttcggtgtttttcgattagtcggtgttagcgtgttcgagattttaagtcgtcggcgtttcgagtttttttcggggttcgcgtttttttgcgggcggcggcggcggcgggcggggcgtagtcgtcgggtcgggcgggcgagtgcgcgtttgttcgtcgtcgcggtcgttgtgtaatcggcgcgaaagtttggagcgtttcgggggcgtaggcgaggtcgggcgaggtcgtcggttcggggtagagcgcgtatagggtcggaattcggattttacgatttcggttttattttttttcgtgtcgttgggttgcgtcggggaagttacggggtttcgcgagcgcgcgaaggcgtttatgagcggtagtgcgtcgggtcggtggtttcggggtttgcgggcgggaggcggattagggcggcgtttgcgttaggcgttcggcgtttattttttcgggggaggatatttattagtttttagggttatagtttcggaagtttttcgcgaagggattgttggtaattttgagttgcgtg

SEQ ID NO: 1482 - DNA, 2333 bp, Artificial Sequence
  chemically treated genomic DNA (Homo sapiens)
gcgtaaaaggaatcgttggagggttttaatgatttaaattgaaaataacgataaaaagtttttaaggtattttttatttatatagtttaaaaaataattatgaaaaggaataagataatttaatggtttgattaacgaggcgtcggttattgtgttgtgtgttggggtaggatggggttttatttggggtttgtatttttaagtttttatagagttttatattgattttaaggtggggtcggttggagggatatttaagtttagtaaatataaatgtaaattgtattttttcgtgaaaaagatttgaaaaatattgtagtatttttaagttgtaatttaaagattgacggggtatattagggttttcgagatttttacgagagagatggtagtgaggtatcggaggaggtttttgtaaaaggtttttttttttttattatttttgtttttatttgtattattatttttgagttagtgggtatgtgattatttatgtttgggaaaatttttttttagggtattattaaaagatatttttagatgaaatcgatgtcgagggaggaattttcgttcgtgttgtttttatttgtttaggtttgtaggggtgtgggcgtggggttatgtgggtgtgtttgggggtttgtggaggatgggggagggttgtaggagaattttttttgttttttaattttgaaaagtaaaatttaatttatttgtttataaaatattagttattgttttattttagtttattgttattttgtaggttcgggaggattttgttgaaggaaaaaaaaaatgttttaagtatttaaatacgttgagttatgtatgtattcgtttatagtgttgtgggttgttttttttttttttttttttttgttttttttttttttttttttttttttttattaaagtatatttattaaattgttgagttggaaagatttgtaatgagtttttgagttgtacgattgtgtttttttttttttttttttcgttttttttttttttttaaatttttatttgatattaaataaagtaaattttaaatagattaattgtcgtacggttttgtttcgtttttttagtttgtttttaggtttggcggggggtcgggttgcggtggcggtagcggtgggagatgtcggggcggtcggcggaggtttatgtggcgttttaggtgggatgttagcgttttgaaggcggaggttttggttttttttttttgcggtttgggtatggtatttttttagttttacgtgatggtcgttcggcggtattagtatagtcggtttattatcgaggtggacgagtatagttttaattttatttaggtttttattttttataatattaattagggtcgtttttagttatcgtatgtgtagatgtaagtgggatcggtggggtgggggtgggggcggtgacggttttttggggtgggtgtatggtttcgggtgttttttggttttgggggtattgtaataagtattgaatgtttgttgattgtaataattttggaattttaggattatcggggttttgagttgggagggatcggtaagaagttgtagatggatggtttgtgggtcgattttggtcgtagttttgttttatttggttaggagtatgttttataaatatttaaagatgaggtggatgtatagaaaattttagatttttggttttattttataaaatttaaaggtttggaaattttaggtttatatgtttttttggtagcgtttggcgggggttatattttcgattttttttttggtatttgggtggcgatttttggtttgatttacgttttttattgtatatatggggagatcgagttttagagaggggaaggggttcgttataagttttatggtaggttaggatattagttttgggttttttgttttttttttttgtttttttttttgtttagattttgtgttttttttgtgaaagtagagatgtttttttaaaaggattgggggattttgttgtttgtttttcggggtattgggggtgtttaagtagtgaggttttggggagtatatagatttaaggttttcgtgagtagtaggaggatttgttttgatgtttgtgtgcggggttagtttttttttttttggatttttcgaggatttggaaagttgtgggtagtttggggtggttttagaggtggtcgagtttttggttttgttttgggtggttttttgagtttttggagtttttttttttttttatttttattgttttttttatgagttttgtacgatagagtttatttggtgaggaattaggggtttaggttcgtgaggtgttttattttg

SEQ ID NO: 1483 - DNA, 2333 bp, Artificial Sequence
  chemically treated genomic DNA (Homo sapiens)
tagggtggggtattttacgggtttgggtttttggttttttattaggtaagttttgtcgtgtagggtttatgggagaagtaatggggataaaggaggaggggggttttaggaatttagggaattatttagagtagggttaggagttcgattatttttggagttattttaagttatttatagttttttaggttttcgggaaatttagagagggaaaggttggtttcgtatataggtattaggataagtttttttgttgtttacgggggttttgagtttgtgtgttttttagggttttattgtttgagtatttttaatgtttcgaggggtagataatagaattttttagtttttttggaaaagtatttttgtttttataagagaagtatagggtttggataaaaggaagggtagggaggggaaataaagagtttaagattggtgttttaatttgttatggggtttgtggcgagtttttttttttttttggggttcggtttttttatgtgtataatgaggagcgtaaattagattaggggtcgttatttaaatgttaagaaagggatcgggaatgtggttttcgttagacgttgttaggaggatatgtgggtttggggtttttaggtttttgggttttataaagtgaagttagaagtttggagttttttgtgtatttattttatttttaaatatttgtaaaatatgtttttggttaagtgaaataggattgcggttagaatcggtttataggttatttatttgtaattttttgtcggttttttttaatttagagtttcgatgattttagaattttagaattgttgtagttaataaatatttaatgtttgttatagtgtttttagaattaggaggtattcgagattatgtatttattttagggggtcgttatcgtttttatttttattttatcggttttatttatatttgtatatgcggtggttggaagcggttttggttgatgttgtagaaggtgaaggtttgggtggggttggagttgtattcgtttatttcgatgatgagtcggttgtgttggtgtcgtcgagcggttattacgtgggattgggagaatgttatgtttaggtcgtaggggaggagggttagggttttcgtttttaggacgttggtattttatttagagcgttatatggattttcgtcggtcgtttcggtattttttatcgttgtcgttatcgtagttcggtttttcgttagatttggaaatagattgaggagacggagtagaatcgtgcgatagttaatttgtttgggatttgttttatttaatgttagatgaagatttagaaagagggagagggcggggggagaggaaaaaaaaatatagtcgtatagtttaaaaatttattataaatttttttaatttagtagtttgatgaatatattttggtaaaaagaaaagggaagggagggaggggataagaaaaaaaagaaaaaaaaaataatttatagtattgtggacggatgtatgtatggtttaacgtgtttaaatatttaagatatttttttttttttttaataaaattttttcgagtttatagggtgatagtgagttggggtaagataatggttggtattttgtaaataggtgagttaagttttattttttagaattggggaataggaaggatttttttataatttttttttattttttatagatttttaaatatatttatatggttttacgtttatatttttgtaagtttgagtaggtggagatagtacgggcgaaaatttttttttcgatatcgattttatttaaagatattttttagtggtgttttgagaagggatttttttagatatagatggttatatatttattggtttaggggtggtagtgtaggtaggggtagagatggtgagggaggaggaattttttgtaaaaatttttttcgatgttttattattatttttttcgtaaggatttcgggaattttaatgtgtttcgttaatttttgaattgtagtttgagaatgttgtaatattttttaaattttttttacggggaagtgtagtttgtatttatatttattggatttaaatatttttttaatcgattttattttggggttagtgtagaattttgtagaaatttggaaatgtaggttttaggtgaggttttattttattttaatatatagtataatggtcgacgtttcgttagttagattattgagttgttttgtttttttttataattattttttaaattgtgtaaatgggaaatgttttgaagattttttgtcgttgtttttagtttgggttattaagattttttaacgattttttttgcgt

SEQ ID NO: 1484 - DNA, 2567 bp, Artificial Sequence
  chemically treated genomic DNA (Homo sapiens)
attatttttgtgttaaaatgtttttgtaattagtagttttggaagataaattgaaatatgtgattttttagggtttagtcggtttcgggattgaattttagtgtgtgtgtgttttagggtataagtatgtgtgttttaggatacgcggggtgtaagtgtttcggggtatacgcgtgtgttttagggtatatcgggtgtaggtgtttcggggtatacgtgttttaggatatacggaatgtaggtatttcggggtatatgtgtgtgttttagggtatatcgggtgtaggtgttttggggtatacgtgtattttaggatatatagtgtgtaggtgttttggggtatacgcgtgttttagggtacgtcgggtgtaggtgttttagggtatatatgtgttttaggatatacggagtgtaggtattttagggtatatacgtgtgttttagggtacgtcgggtgtaggtgtttcggggtatacgtattttaggatatatagcgtgtaggtgttttggggtatacgcgttttagggtacgtcgggtgtaggtgttttggggtatatatgtgttttaggatatacggaatgtaggtatttcggggtatacgcgtgtgttttagggtacgtcgggtgtaggtgttttggggtatatacgtattttaggatatatagcgtgtaggtgttttggggtatacgtatgtttcggggtacgtcgggtgtaggtgtttcggggtatacgtgttttaggatatacggagtgtaggtattttagggtatacgcgtgttttagggtacgttaggtgtaggtgttttggggtatacgcgtgtttcggggtatattaggatgtagattttttattgggtgtaaagtttttaatttttttttcgagttattagagtacggtttttagatcggagtagttttttttcgggttaggtagggtgtggattttgttttgaatgtatttagtttttagtcgattttgtttttttttttatttattgtataggtaggcgttgtaggtcgtagggagggcgtgcgtttcggttttttcgtttcgtgtttagtttgggaagtgttttaagattattttgggagaggtttgggttgcggcgttttcgtttttttgtttcgcgtaaggtcggggattttgttttttcggagcgagggtgttcggtaggtattagcggttagtagtagtcggggtcgggttttattcgaggatcgaggtgtcgatgaacgtttatgttcggaagatattggttttttggtttatgtatttatttaattttaagttaggttttttagatttttaaattaatagtggattttgtaaattgttgcgttagaggaaaatttaagcgagttcgatcgcgggaagtatcgtcgttatgaaaggcggtggtttagcgttatttgtcgggacgcggtagttaagggagtcggtgtcgggggaggtttgaggtttcgggttttcgggaggaaatagagttgtttgtaggaataaaggaggaaaggagggttacggttgttcgaagaatttttatacgaaaggtatgaaattagttggaattattttaaggaaaaaatttttttttaaataggcgtttttgcgtttagtagaagtgggttttattgttattgagtacggtttggggtttgcggggttgtttttagaatcggagggaagtaatttagttgtatataagaggttttggggagaggaattttttagggtttggagttttcgttcgagttgcgttatatttgttgggttggaagtttttatttagcgggagaaatataatttttggttttggtgtttgtggtagtaaaatttttatttttgtaaagttattgggcggaggttaggttttgtaagaggtttttttttgttggaggaagttttgggttttcggggatttcgtaggaggtagacgttggggatagggttcggtttacgggtagttgcgtttttttttagttttggtttttttgttttttttgttttttttgatttttttatcggtttttattgtttatagggcgttgagttagtagtagaaattgaggtggagatagttttcggtttttaaaatttgtgaaggagtttggattttgggaaggtatcgaggattgtttaggattttagaaaaggatgatagttaggttttttttttttttttttcgttttttaagttgttgggttttttggggggggggggttttgttgttgttttgagatagagtttcgttttgttttttaggttggcgtgtagtggtgcgatttcggtttattgtaatttttattttttagttttaagcgatttttttgttttagttttttgagtagttgggattataggcgttcgttattacgtttggttaatttttgtatttttagtagatttaggttttattatgttggttagtttggttttaaatttttgattttaagtgatttatttattttagttttttaaagtgttgggattataggtatgagttattgcgttttatcgtgttttttaaatgttgatggtagtttagttgttttttattttaataaatg

SEQ ID NO: 1485 - DNA, 2567 bp, Artificial Sequence
  chemically treated genomic DNA (Homo sapiens)
tatttattgaaatggggggtaattgagttgttattaatatttgaaaaatacggtggggcgtagtggtttatgtttgtaattttagtattttgggaggttgaggtgggtgggttatttgaggttaggagtttgagattagattggttaatatggtgaaatttgaatttattgaaaatataaaaattagttaggcgtgatggcgggcgtttgtaattttagttatttaggaggttgaggtaggaggatcgtttgaaattaggagatggaggttgtagtgagtcgagatcgtattattgtacgttagtttgggagatagagcgagattttgttttaaaatagtaataaaattttttttttttaaaaaatttaataatttgaaaaacgaaggaaggaaggaagggatttggttgttatttttttttgagattttgggtagttttcggtgtttttttagggtttagatttttttatagattttgagggtcgaaggttgtttttattttagtttttgttgttggtttagcgttttgtgggtagtgggagtcggtggggggattagaaagagtagaggaggtagggaggttaggattggggagggacgtagttgttcgtgggtcggattttgtttttagcgtttgttttttgcggggttttcgagggtttagggttttttttagtaaagggaggttttttgtaaggtttggttttcgtttagtggttttgtagggatggggattttattgttataaatattagagttagggattgtgtttttttcgttgagtggaggtttttaatttagtaggtgtgacgtagttcgagcggggattttaggttttggaggatttttttttttaggattttttgtgtgtagttggattgttttttttcggttttgaaaatagtttcgtagattttaggtcgtgtttaatggtaatgaaatttatttttgttaaacgtaggagcgtttatttggaggaagattttttttttgaaatgattttaattaattttatgtttttcgtgtaagaatttttcgaatagtcgtggtttttttttttttttttgtttttgtaaatagttttgttttttttcgaggattcgaggttttaggtttttttcgatatcggtttttttggttgtcgcgtttcggtaggtggcgttgagttatcgttttttatggcgacggtgtttttcgcgatcgggttcgtttagatttttttttgacgtaataatttatagaatttattgttgatttagggatttggggagtttaatttaaaattaagtaaatatataaattagggagttagtgtttttcgaatatgagcgtttatcggtatttcggttttcgggtgaggttcggtttcggttgttgttggtcgttggtgtttgtcggatattttcgtttcgggagagtaggattttcggttttgcgcggagtagagggacgaaggcgtcgtagtttaggttttttttagggtggttttgagatattttttagattggatacggagcgggaggatcgagacgtacgttttttttacggtttgtagcgtttgtttgtgtagtgaatggagggaggggtagaatcggttggaagttgagtgtatttagggtagggtttatattttgtttggttcgaggaggggttgtttcgatttgggagtcgtattttggtggttcggggaaggagttgggggttttgtatttagtaagagatttgtattttggtgtgtttcgaaatacgcgtgtgttttaaaatatttgtatttggcgtgttttgaaatacgcgtgtgttttgaaatatttgtatttcgtgtgttttgaaatacgtgtgtttcgaaatatttgtattcggcgtgtttcgaaatatgcgtgtgttttaaaatatttgtacgttgtgtgttttgaaatacgtgtgtgttttaaaatatttgtattcggcgtgttttgaaatatacgcgtgtgtttcgaaatatttgtatttcgtgtgttttgaaatatatgtgtgttttaaaatatttgtattcggcgtgttttgaaacgcgtgtgttttaaaatatttgtacgttgtgtgttttgaaatacgtgtgtttcgaaatatttgtattcggcgtgttttgaaatatacgtgtgtgttttgaaatatttgtatttcgtgtgttttgaaatatatgtgtgttttgaaatatttgtattcggcgtgttttgaaatacgcgtgtgttttaaaatatttgtatattgtgtgttttgaaatatacgtgtgttttaaaatatttgtattcggtgtgttttgaagtatatatatgtgtttcgaaatatttgtatttcgtgtgttttgaaatacgtgtgtttcgaaatatttgtattcggtgtgttttgaaatatacgcgtatgtttcgaaatatttgtatttcgcgtgttttgaaatatatatgtttgtgttttgaaatatatatatattggggtttagtttcgaggtcggttggattttgaaaaattatatattttaatttattttttagaattgttaattataaggatattttggtataagagtaat

SEQ ID NO: 1486 - DNA, 2312 bp, Artificial Sequence
  chemically treated genomic DNA (Homo sapiens)
agtgaatgagtgtttttatttttttttgatatatggtttaagtgtatagtttaatgaattatttgttttttatttagttagtatttgtttagaggttgttattattttgattgttaatagtattaattggttttgtttgttattgaatttttttgtttttttttttttttttttttttttttttgagacggaatgttgtttttgttgtcgaggttggagtgtcgtgatgtgattttggtttattgtaatttttgtttttaaggtttaagtgatttttttgttatagttttttgggtagttgggattataggtgcgtattattacgttcggttaagttttgtatttttagtagagacggggtttttttatgttggttaggttggtttcgaatttttgattttaggtgagttatttattttaatttttcgaagtgttgggattattagtatgagttatcgtattcggttgtgtttttgaattttttatatatagatttatttgggttttcgtgtgtttagtttttgtttcgcgttagttggaggtttttattcgtgtagttgggtgtgattatttattttttttagttgttaatgtttggatttcggatttttttttttgtcgcgggtttgtcgttatcgtttattttgttttttttttaggtttttatttttgggtaggagagttgtcgattatttcgggggtgttttttttgcgtttgaatatttatagttgtttttgaggggttgggagtcgggtttttgggagagacgagttatgaattttttatagtttttgtatttggggattttattttaggagagtgttatttatagttttcgttagggtaaaggagttgagtagttattttaagtttagtttatttttttttttcggtttttggtaggtatggattagtagttgtgagtagttagagttgatgttcggtttttaggggggtagaggcgtcgttattatgagtttgggtaagttttcgtttgtgggttgggtgtttagtttatagggaaagaggcggttgattgtagatatgattagttatttattcggggattttcgttatattatgtatgtgggtcgtggcggggatgttttcggggatacgtttttttttagtaattacggtggtagtttcgggagtatttatcgtttatttcgtagttttttggttaagaagttgtagttggtgcggagggtgggggcgttttttcggaggatggtatttttttttgtatttttttcggttttatcggttattttttttattattaagaacgttatttttttgttttagtttaattaggtcgtttacgatagtttcgtggttggtaagtttagtttcgatagtagttttattagttttacggacggttattttagttacggtgagggtttgggttattttggtttattttttagaggttgaggttgaggtttagaggggtttagtggtttttttaagttttaagtgagttttaagtgattatagaggttaggtttagattttatattatggatggggagggggtgtagtggtgggaataagttgattttttaaaatatttgaggttgagagtgaggaggtggagtttgaattttagttgttttttatttgttgtgtgatttgggtaagtatatttttttttttgggttttagttgaattagttatttatttatttttgttttttttaattaaagttttttttttatgtcggaatgatattatggagaggtgaagggtttgggttttagattttaatttagttttgtttgaattttaggaagttagttgatttttataagtttaagttttcgtttggataatgagtttttcggggttattgttaagatttagtgttaggagaggcgtaggggggttgatatttagtaggtgtttaggatattggagttgttgttatttgaatttggttttttgtaattcgataaatttgggaaattatttataggaatcgtaagttataggtttttttgtttagttagaagtgttattttggtcgttcggttagagtttatttgagaattatgggtttttgttgttatttggtggttattttttgttttgcgggagtggttttaatatttttgttttaggcggttgtttagaatcgtattgaggattggtttatagaaattcgattttgttttaggtttgtagttttggaagtaggggttggatatgtttgttttttatttttatatagttagattttgattgttggttttattttgtgtttataaattagtttacgtgttatgggtttatttgtagttatcg

SEQ ID NO: 1487 - DNA, 2312 bp, Artificial Sequence
  chemically treated genomic DNA (Homo sapiens)
cgatggttgtaggtgaatttatagtacgtgagttggtttgtggatataggatgggattagtaattagggtttgattgtatagaaatgaaggatagatatgtttagtttttgtttttaggattatagatttgagatagaatcgggtttttgtggattagtttttagtgcggttttgagtagtcgtttggggtaggggtgttagagttattttcgtaaggtagggagtggttattaggtggtagtaggggtttatggtttttaggtgagttttgatcgaacggttaaggtggtatttttggttgggtaggaaggtttgtggtttgcggtttttgtgagtggttttttaaatttgtcgagttataggaaattaagtttagataataatagttttagtgttttgagtatttattaagtattagtttttttgcgttttttttggtattgaattttagtaatgatttcgagagatttattatttaggcgaggatttgaatttatagaggttaattgattttttgaaatttaggtagaattggattggaatttagagtttaggttttttatttttttatgatattatttcgatatgaggggaaggttttggttgaagggggtaagaatgggtgggtgattggtttagttaaggtttagagagggggatgtgtttgtttaggttatatagtaagtgaggggtagttagaatttaaattttatttttttatttttaattttaggtgttttggggagttagtttgtttttattattgtattttttttttatttatgatgtggggtttgggtttgatttttgtggttatttggagtttatttggagtttggaggagttattgaatttttttgggttttagttttagtttttgaaaagtgggttaagatggtttaggtttttatcgtagttggagtggtcgttcgtggagttggtggggttgttgtcgaagttgagtttgttaattacgaggttgtcgtaggcggtttggttgagttggggtagggagatggcgtttttgatgatgggggagatggtcggtggagtcggggagggtgtagggggagatgttatttttcgggggggcgtttttatttttcgtattagttgtagttttttggttaggaagttgcggggtgagcgatgggtgttttcggagttgttatcgtggttgttgaggaaggacgtgttttcgaagatattttcgttacggtttatatgtatggtgtggcggaagttttcgagtgggtggttgattatgtttgtagttagtcgtttttttttttgtgaattggatatttagtttataggcgagagtttgtttaggtttatggtggcggcgtttttgtttttttgggggtcgggtattagttttggttgtttatagttgttagtttatgtttattaggggtcgggggagggaggtgggttgggtttgggatggttgtttagtttttttgttttggcggaagttgtaaatggtatttttttaaggtgaggtttttaaatgtagaggttgtggggggtttatggttcgttttttttaggggttcggtttttagttttttagaagtagttatagatgtttaagcgtagagaaagtattttcgaggtggtcggtaatttttttgtttagaggtggagatttggaaggaagatagaatgggcggtgacggtaggttcgcgatagaggaggaaattcggggtttaaatattagtagttgaagaggatagatgattatatttaattatacggatggaggtttttaattgacgcggggtagaagttaggtatacggggatttaagtgagtttgtgtatagaaagtttaagaatatagtcgggtgcggtggtttatgttggtaattttagtatttcgggaggttgaggtgggtggtttatttgaggttaggagttcgagattagtttggttaatatagagaaatttcgtttttattaaaaatataaaatttagtcggacgtggtggtgcgtatttgtaattttagttatttaggaagttgtggtaggagaattatttgaattttggaggtagaggttgtagtgagttaagattatattacggtattttagtttcggtaataagagtaatatttcgttttaaaaaaaaaaaaaaaaaaaaaaaaaaaaataaggaagtttagtaataggtaaaattaattgatgttattagtaattagaatgatggtagtttttgagtaggtattgattgaataggggataaataatttattgagttatatatttaagttatgtattaggaaaaaatagaagtatttatttatt

SEQ ID NO: 1488 - DNA, 2439 bp, Artificial Sequence
  chemically treated genomic DNA (Homo sapiens)
tattatttattagagggttgatgtttttgttagataggttatagttagtggaggtattgtttttgattagtttgtcgtttttgataaggtagttttggttaattttataaatttgaatgaataagaagggtgtaaggttggggtattagggataaataatttagatatgttagtgtgttgatttgtaaagtacgttagaaggtagttgaggttttagttttagttatagcgtattttaaggttagagtaaaaagttggttggttttttaggtttttttttgtaaggcggttgggttaaaattaaagattttgttgtataatataggtttgttatttttttggtggtggtattagggattaataagattagtatttttagttatattagttagttttattatagttattttataggatggtattttataaattattaagatgggttagaattgattatgagaagtaagttattgatgtttacgtgatgtataagttatagttagtgaagtagtattgataggtatagaaattttattttttattacgggggtttttttttatttttagggagttatttttagaattttatttttttgttgattttagtgcggtgatggtagtttttttgtttagcgcgtgttatagagaaggttatacgagtaggatgttatgttttaatataggttattttgcgtaggtttcggtgggttttgcggggtagttttttggtgtgttaacgattggtgatttttggaatggatatatattattttattttagcgtttagtattttttattgatttttttttgttatttagtaattattaattatggttgggttatttgagggagtgataagattattttatgtgtattatttataggttttttttgttaagttggataggttttgggggtgttattttgaatttaattttgaatgggtgttttttaaggtatttattagtttaagtttttttatttatagggattgattaatataattttaagtttttttttgtagttattagtaggttataaagagtaaagggtttaggaacgtgttaagaagttgttttttggtttttcgttattttagttatttttgattataaggttgtttttagaaggaaggtagtagagaatggttttatattgttcgattcgggcgttgtatttagcgtttattttgagttttattaacgaatagttgggtttgaaattattttttttttaggtttgtatagtaatttaagttatcgtaaagtttatttttgtagtttttgtttttggttatttcgatgacgtcgattattttattttgtttaaatatttggtttataggtatttgttgtttaagtttttcgcgggtttagtttagtttttcggttatagtgttttcgtttatttggatttttattaggtgggtttttttttggcgtagaggaagtaggcgtatttaggagaaggtagatatagtttagttttagttgttagcgttttttttatagtagaggaattgtagttttatgcggtttgattgatgttaagtatacggtaaaaagttagtaattttgaataagttattgaattttattaagaggaaggaatttttatttttgttaatagtaataatttaattttggatattggtgtttgagttattgttaggatgagcggataagatttatattataggtaaataattagattttagtttttattagtttaatgtttttgtggttgttttttgggttagttttttttggggtattgtagtggttttattttagttatttatatttgttttagtgataagtttgtttttgagagagtataagttttaagtaagaaaatgtattatcgggagcggtggtttatatttgtaattttagtattttgggaggtcgaggtaggtggattatttgaggttaggagtttaaaattagtttgattaatatggagaaatttcgtttttattaaaaatataaaattagtagggcgtggtggcgtatgtttgtaattttagttatttaggaggttgaggtaggagaatagtttgaatttagaaagtggaggttgtagtgagttgagatagggttattgtattttagtttgggtaataagaacgaaattttgtttttaaaaaaaaaaaaatgtatttaagtataaagtttttatttaaggatagtttggtaatgttttgataaaattttaacggtggatatgtatttttattcgtggtggtttttattatatggggttgtatttagtatttgagattagttaggataattagtaataggatagtaagaggtatttattttaattaagttaataaaaagtttgtttagtttattaattaggtttttaggagagtagttagtattttataatcgatttttaggtaggtattttagtgttattggtgagttatta

SEQ ID NO: 1489 - DNA, 2439 bp, Artificial Sequence
  chemically treated genomic DNA (Homo sapiens)
tggtgatttattagtaatattgaaatgtttgtttgaaagtcggttgtgaggtattggttgtttttttggaaatttagttgatgagttgagtaggttttttattgatttggttagagtgggtgttttttgttgttttgttattggttattttggttgattttaagtgttgagtgtaattttatgtggtgagggttattacggatgagagtgtatgtttatcgttgaaattttgttaggatattgttaggttgtttttgagtgaaagttttatgtttaaatgtatttttttttttttagagatagaatttcgtttttgttgtttaggttagagtgtaatagttttattttagtttattgtaatttttattttttaggtttaagttatttttttgttttagttttttgagtagttgggattataggtatgcgttattacgttttattaattttgtatttttagtagagacggggtttttttatgttggttaggttggttttgaatttttgattttaggtgatttatttgtttcggttttttaaagtgttgggattataggtgtgagttatcgttttcggtgatgtatttttttatttagagtttgtgtttttttaaaagtaggtttgttattagggtaagtgtaggtggttgaggtaaaattattgtagtattttaaaaggaattgatttaaaggatagttataggaatattgggttggtaggggttgggatttggttgtttgtttgtggtgtgggttttgttcgtttattttgatagtaatttaggtattagtatttaaagttaagttgttgttgttggtaaaaatgaaagttttttttttttggtgaggtttagtgatttgtttagagttattggttttttgtcgtgtgtttgatattaattaggtcgtatggagttgtagtttttttgttgtgggaggagcgttggtagttggagttgagttgtgtttatttttttttagatgcgtttgttttttttgcgttagaagaaggtttatttgatggagatttaggtgaacggaggtattgtggtcgagaagttggattgggttcgcgagaggtttgagtagtaggtatttgtgaattaagtgtttgggtaggatgagatgatcgacgttatcggggtgattaagggtaaaggttataaaggtgagttttgcggtggtttgagttgttgtgtaaatttgggggagaagtggttttaggtttagttgttcgttgatgaggtttagagtgagcgttgggtatagcgttcgaatcggatagtgtagaattattttttattgttttttttttgagaatagttttgtggttagaagtggttgggatagcggagggttaggggataattttttaatacgtttttggattttttgttttttgtagtttattgataattgtaaaggggagtttggaattatgttagttagtttttgtgaatgggggagtttaaattaatggatgttttaaaaagtatttatttagaattgagtttagggtgatatttttagagtttatttagtttgataggggagatttgtgggtaatgtatatgaaataattttattatttttttagatgatttagttatggttggtaattgttgagtagtaggaaggggttagtgggaggtgttgggcgttgaggtgaagtaatgtgtatttattttaggggttattagtcgttggtatattaagaagttgtttcgtaagatttatcgaggtttgcgtaaggtggtttgtattggggtatggtattttgttcgtgtagttttttttgtggtacgcgttgggtagaaaggttattattatcgtattgagattaataagaaggtgaggttttgagagtggttttttgggggtgggaagaggttttcgtgatggggagtggggtttttgtgtttgttagtgttgttttattgattgtagtttatgtattacgtggatattagtggtttgttttttatggttagttttggtttattttgatgatttgtaaggtgttattttgtagagtggttgtggtggggttgattggtgtggttggggatattagttttattggtttttgatgttattattaggggggtgataggtttgtgttgtatagtaggatttttagttttagtttagtcgttttatagaaaggaatttggagggttagttagttttttgttttgattttgggatacgttgtgattgggattgaggttttagttgttttttagcgtgttttgtaggttagtatattggtatgtttgggttatttgtttttaatgttttagttttatattttttttgtttatttagatttataagattggttagggttattttattaaggacggtaagttgattaagaataatgtttttattgattatgatttatttgataagagtattaattttttggtaagtaatg

SEQ ID NO: 1490 - DNA, 2453 bp, Artificial Sequence
  chemically treated genomic DNA (Homo sapiens)
atatatttttagaaggataagggagagtggatgttggaaagatagagcgagagattattattagggaaagattttatttttggaaggatattaaatttgggggggggtcggtagtggagttgttgtttttttttttgtatttaatagttttaattttggttttttttatttttagttttttttttttttggtttttttattgttggtttttgtaagttttttttttatttttcgtttaatatattttttagtttaaagtaaattatttttttttattttttatattttttagttttttttttttttttattgtaggttttagtgtttttgttttttttttggtgtatttgttatttgtattaattttttttttgttgtgtttagttatataaatgttaaagttattaatatttagttttataagttttattttgttttttttatttttttaataaaatgtttgtattttggttaggcgcggtggtttacgtttgtaattttagtattttgggaggtcgaggtgggtagattacgaggttaggagatggagattatcgtggttaatatagtgaaatttcgtttttagtgaaaatataaaaaaattagtcgggcgtggtggtaggtgtttgtagttttagttattcgggagattgaggtcggagaatggtgtgaattcgggaggcggagtttgtagtgagtcgagattgagttattgtattttattttgggcgatagagcgagattttattttaaaaaaaaaaaaaaaaaaaaaaaaaagtttgtattttgttttggtttgtgttcggtatttttgttttggtggttgtattgttttggggttattggttttggtttggttgtagtattttatggattttggtgagaaagttgagttttttttttagtttttgagttcgtttttttagttttttagttgattttgattttgtttttttaagtaagtgttttgatttatatgtaaggttgattatatttagtagaagtaagatgtttttagtggttgtatttacgattatggtttttttgtttattgtttgggcggggtttttaataatttttttaatttgtttatcgtttttagttgagattcgtttaatgatatgcgggggtggggtatacgtttttaattgagggttggttttggttcgtttgatggtacggatgttttttttaattttttgtgtgatttggtattaattgttaattaaggtaagaatattgggtgtgtttttatttataaatttttttattatttttgttatattggtgtcgttttggtttaagttgcgggtttgggttcgtgttcgtaatttgtttattagttttattatattgtaggtaattttagttatagtagttgttgtttttagatttatgttagtgtttaagagtataaaattgattttttttgtgaagggtgttagatttaggtcgaggagggttaggatgttagaggtagtgttaatagagttggatattatattggtaatggtggtgtttttgtggatttgtttaattttttttgtaagggtacggagtttttttatgtgatttttaagttttttttttaatcgaggaaatttttttaaaaattattgtttgtgttgttggtttttatcgtggcggtttttgttttttatgattatgtgatttgtaagtttgtttagagttttacggagtttatttgttttatttttgtataaggaaaggttaaaggattaagaaatgtagtttttttatttgtgaaatgagttttatgcgatttttattttgtgtaaattgtagagtttttattattaattaaatagaaataaattttataaatggaattaattattttttaaatttaaatatattttgtttattatagatattttttagtatttattttatatggaaataaatattttaaaggtattttagatgtttttttatggtaggtgtttgataaagatgtttttttatttaagggtaggttaatatcgtgattgttaaagtgtttggagagggaaaattttgtagatgaataaagagtagtgagagtgagataaagagattttattattaggatggtaggaaagtgaagtatgaattttatttaaagagaggttttttttttgtttttagtttttgggaagtgatttttaggtttttggaatgttttgtttggtaggaatatttttttttgtttggtgatttggttacgggatagtatagcgatgtgatggatgatagggtttggggttatttggtgttttttttgatttttagaggatttggggattaaaggtgtgagattttagggaagggttggagattttagttatgagggtagtttgtgatttagttttagtagatattttggatattaaggtatgggttgagaaagaaggattttttttttgattaattttagttgggttttttagagt

SEQ ID NO: 1491 - DNA, 2453 bp, Artificial Sequence
  chemically treated genomic DNA (Homo sapiens)
gttttgaagagtttagttggagttggttaaggagaaagttttttttttttaatttatgttttagtgtttagagtatttgttggggttggattataagttgtttttatggttagagtttttagtttttttttgagattttatatttttagtttttaagttttttggaagttaggaaagatattaaatagttttaaattttattatttattatatcgttatattgtttcgtggttaaattattaggtaaagaaagatgtttttattaggtaggatattttaggggtttggagattattttttaggagttgaggataaagggaaggtttttttttgggtaaagtttatgttttatttttttgttattttggtaataaggtttttttgttttatttttattgttttttgtttatttgtagagttttttttttttaaatattttggtagttacggtgttgatttgtttttgagtgaggaggtatttttattaaatatttattatgaaagagtatttgaggtgtttttaagatatttatttttatatggaataagtattgaggaatatttatgatgaataaaatgtgtttgagtttgaaagataattaattttatttgtaaaatttgtttttatttgattgatagtgaaagttttgtaatttatataggatagagatcgtatggagtttattttatagatagggaaattgtattttttaattttttaatttttttttgtgtagggatgaggtagatgagtttcgtaaagttttgaataagtttgtaagttatatggttatgaaggataaaaatcgttacgataaagattagtagtataggtagtggtttttgaaagagttttttcggttgaaaagggagtttgaggattatataaggaagtttcgtgtttttgtagaggaggttgagtaggtttatagaggtattattattgttaatgtggtgtttaattttgttggtattatttttggtattttgatttttttcggtttgggtttggtattttttatagaaggaattagttttgtgtttttggatattggtatgggtttgggagtagtagttgttgtggttgggattatttgtagtgtggtagaattagtaaataaattgcgggtacgagtttaagttcgtaatttggattaaagcggtattaatgtagtaaaggtgatgaaggagtttgtgggtgggaatatatttaatgtttttattttagttgataattggtattaagttatataagggattgggaggaatattcgtgttattagacgagttagagttaatttttagttaggagcgtatgttttattttcgtatattattgggcgaattttagttgaaggcggtgaataggttgagagggttgttgaaggtttcgtttaggtaatgagtagaggaattatgatcgtgggtgtagttattggaggtattttgtttttgttggatgtggttagttttgtatatgagttaaagtatttgtttgagggggtaaagttagagttagttgaggagttgaagaagcgggtttaggagttggaggggaagtttaatttttttattaagatttatgagatgttgtagttaggttaagattaatgattttagagtagtgtagttattagggtagaaatgtcgggtataggttaggataaaatgtagatttttttttttttttttttttttttttgagatggagtttcgttttatcgtttaggatggagtgtagtggtttaatttcggtttattgtaaatttcgtttttcgggtttatattatttttcggttttagtttttcgagtagttgggattataggtatttgttattacgttcggttaatttttttgtatttttattggagacggggttttattgtgttagttacgatggtttttattttttgatttcgtgatttgtttatttcggttttttaaagtgttgggattataggcgtgagttatcgcgtttggttaaaatgtagatattttattagggggataaggagggtaaggtaaagtttatggaattgagtgttagtgattttggtatttgtgtagttgagtatagtaagggaggggttaatgtagatggtaagtgtattaaggagaaggtaggaatattggagtttgtaataagggaggagagaggattggagagtgtggggaatgggaagaagtagtttattttggattaaagaatatattgggcgaagaatagagggggagtttgtaggaattagtaatgagaaggttaggaaaagaaagagttgaaaatggagaaaattagagttagaattgttggatataggagaagaaatagtagttttattatcgatttttttttaggtttgatgtttttttaagaataaagtttttttttggtgatggtttttcgttttgtttttttagtatttatttttttttgtttttttgggggtgtat

SEQ ID NO: 1492 - DNA, 2305 bp, Artificial Sequence
  chemically treated genomic DNA (Homo sapiens)
aggtagttttattgggttggaggttgtgggtgtttatatagggtttggtttataggaagtgtttgaaaggggggtcgatttggtgacggttttttttttttttttattattttatatatttttaggaatttatacggtggggatgtatttttcgggaaaggcgttggtggtgtagttgatgagaaggtaggttttgtttacggttttgaaagataggaagtgtaagagggcggcggttatgggttttgtcggagacgtggggaggtttttgtttggttttttgtaaagattttagtatttatttagtttagttttttgggttttcgtttttttatgtgagatgttttttgtttgtgtttttatattcgagagtttgtaagttatgtggatgtttgttaaagtggagattttagggtttagttttagagattttgatttataggtgtgcgtagagttggtaattcgttttttttataggtttttttaggggttagtgatgtgggatagagggtgtttagtagatttaggtaatgtcgaggggttttcgacgtttgatttgggttttaaattttagttgtattatttattagtggtatgattttggataagttatttaatttgtttttgttttagtttttttatttagaaaatagagatgagtttatttttataggagtgtgttgaggagtaaatttaacgaggtttattaaagtattgagtatagggtttgatgtatggtagtagtcgatggttgttagggaagatttgattttgttttttttttttatttttttcgtggagtagagtagttattaggttagggtttgagttagagtggtttgggtttaaattttgtgaggttttgggtaaattatttagtttttttgaatttttatttttttatttgtaaaatggatttattaggtttggtgagaggataaatagagaaggttagattaattttagagttggtatataggaaggaagtgataacgcgcgttttttttatttttagtatgcgaggttgggagcgggtgtaggtagtttagtcgaagtttagaggttaagggatagttttgggtttttttttgttttgcgtggttttgttattttttgtttagagaagatagtttattttttttttttattatcgtttttttttgggtttgttatcgaggtaattttgaatgattggaacgttaatttttgattttcgttcgtttttttttcgattagatataaagtagaagtgaatagggttggggtaggcgagggtagataaggagttatgtattagaattagttgaggttggtggataaatgggttcgtttttatttagatgggttatagttaaagtcggggttatagggtttaggttaggagagttgagttttttaaagttttgggttgtttttttgtagaatgggaaggttggataggaggtttttttttagttagaatatgttttagggtgagtttgtaggttggattttaagatgtggttgttggtaggtatgatagattgataaattggatttgtttttttattttgtgtttttttaagagatagcgttttgttttgttatttaggttgattgtagtggtattattatagtttattgtagttttaaattttcgggtttaggcgatttttttattttagtttttttagtagttgggattgtaggcgtatatgttattatttttggtttaaaaaaatttttttatagatataggttttcgttatgatgtttaggttggttttaagtttttggttttaagtaatttttttattttggttttttaaaatgttaggattataggtatgagttattgtatttggtttggatttgttattttatagatgaggaaattgaggtttttaggggataagatagtttgaagttattgggatttgataattgagaagggttttagtttagtttgttttttttttgtcgattttataattatttttttattttttagttttttttttttttttttgttttttaatgtttttttgttttttttgttttttatttatattttttatatattttttttaattcggtaggttgaggggaggggagagaaagtggagggggtgttagaaggtatatattataagtaagatagttatttagtttattttaagcgattttatagtatttttagggtataggtttttttttagatgaataagttgaggtttagagaggtgttgtgatttgtttaaggttatatagcggtattaagttagtgacgatagtttaggttagtttggggataaaggttgaattt

SEQ ID NO: 1493 - DNA, 2305 bp, Artificial Sequence
  chemically treated genomic DNA (Homo sapiens)
aaatttagtttttgtttttaggttgatttgggttgtcgttattggtttggtgtcgttgtgtggttttgggtaagttatagtatttttttgaattttagtttatttatttgggaggaggtttatgttttggggatgttgtggggtcgtttgagataagttgagtggttgttttgtttgtagtatgtgttttttagtattttttttatttttttttttttttttttagtttatcgggttggggaggatgtgtgggggatgtgggtgaggagtagaagaggtaaggggatattgagagatagagagggaaggaggaggttaaaggatgggagggtgattgtggggtcggtaggggaggggtaggttgggttgagattttttttagttgttagattttagtgattttaggttgttttgttttttgggggttttagtttttttatttgtaaaatgataggtttaggttaggtgtagtggtttatgtttgtagttttagtattttgagaggttaagatgggaggattgtttgaggttaggagtttgagattagtttaagtattatagcgagaatttatgtttataaaaaaatttttttaagttaggagtggtggtatatgcgtttgtagttttagttattggggaggttgaggtgggagaatcgtttgagttcgggagtttgaggttgtagtgagttataatggtgttattgtagttagtttgggtgatagagtaagacgttgttttttaaaaaaatataaaataaaaggataggtttaatttgttaatttgttatgtttgttagtagttatattttagggtttagtttataggtttattttggagtatgttttagttggaagggggttttttgtttagtttttttattttatagaggagtagtttaaggttttgagagatttagtttttttggtttgggttttgtggtttcgattttggttgtgatttatttaggtgggggcgggtttatttgtttattagttttagttgattttgatgtatggttttttatttgttttcgtttgttttagttttgtttatttttgttttgtatttgatcggaggaggggcgggcggaagttaagggttaacgttttagttatttaaaattatttcggtggtaggtttaggggagggcgatggtaggaggagaggatgagttgttttttttgagtaggaagtgataaaattacgtagggtaggggaaggtttagagttgttttttggtttttgggtttcggttgagttatttgtattcgtttttagtttcgtatgttgagggtggaggaggcgcgcgttattattttttttttatgtattagttttggggttaatttagttttttttatttatttttttattaaatttaataggtttattttataggtgggaaaatgaaagtttagggaagttaagtaatttgtttaaagttttataggatttgaatttagattattttgatttaaattttgatttggtaattgttttgttttacgggggaggtgagagggaagagtagggttaggttttttttagtagttatcggttgttgttatgtattaggttttgtgtttagtgttttgataggtttcgttggatttattttttagtatatttttatgaggatgggtttatttttattttttagatggagaaattgaggtagaggtaggttaagtgatttgtttaagattatattattggtaggtggtatagttgggatttgaagtttaggttaggcgtcgggggtttttcggtattgtttgggtttgttgggtattttttgttttatattattggtttttggagaagtttgtgggaaaagcggattgttagttttgcgtatatttgtggattagaatttttggggttggattttgaagtttttattttaataaatatttatatgatttgtaggttttcgggtgtgagaatatagatagggggtattttatatggggagacggaggtttagagggttaggttgggtggatgttgaggtttttgtagaggattaggtagaaatttttttacgttttcggtagagtttatgatcgtcgtttttttgtattttttgttttttagggtcgtgggtaagatttgtttttttattagttatattattaacgtttttttcggagagtatatttttatcgtgtgagtttttggggatatgtggggtggtgggaggaggggagagatcgttattaagtcgattttttttttaggtattttttgtgggttagattttgtgtgggtatttatagtttttagtttagtggagttgttt

SEQ ID NO: 1494 - DNA, 3096 bp, Artificial Sequence
  chemically treated genomic DNA (Homo sapiens)
tttaggttattgttgtttaggaagaggtgttgtagcgatttgtttataggttggaaggtttcgttacgtaaggttttgagtgggttgttcgagagttgtagttttaggagggtaggtagtttttttaaggttttagtgggtatttttcgtagttgatttttgtttaggtgtagtttttttagttttcgagttgggtttagcgttttaagggatatttcggtgatgcggtttttatttaggtagatttagcgtaaggttcgtgttttttttaggtttttaggtgttaggcggtttatagcgttgttttgtaggtgtagggagaagaggttgggtagggcgcgtagggtagtttttggtatttgtaggaaacggttgcgttttaggtataggtagtcgaggcggggagtttttttaagggtagtagcgttgaggtttgcgagttggttgtcggagaggtataggtagattaggcggtttagttcggttagggcgttcgtttttagtttcgcgatgtcgtagtgttgtaggtgtagcgatattaggtggtttaggtcggggaaggtcgttcggggtatcgaggggaagtggtttcgttttaggtttaggagttgggtgtcgttggggaagtcgcggggtatcgtttgtaggtcgtagttttcgtagttgttgtgtcgggattcggggacgtatacgtaggcgcgagggtaaggcgcgattgttcgttttttttcggggtcgcgcggagggtcgcgcggaggggcgcggggttcggttatagttcgtttttttagttttttttttttttgcgtcgcgtttttagggtagcgtaggttttagggtcgtagggcgtttagagtttcgtttcgtaggcgtcgcggtttttggtacgcgtcgttcgagcgtacgcgcgttcgcgttagttattcgagtaggggtcgcgtttggtagtcgtattatagcggatttttttgtagtcgtagtcggcgtagttggttcgggttttgtagcgggggtagggtgtttagttggttttcgcggaggtcgagggtgtgtaggcgcggatagtgtgcgaaggttttgggatttagggtttgtagggtttcgtcgtttagtagtagttttcgtaggtcgggtagcgttagttcgtttttttcgttcgcgtaggtgagcgggttgtggtttagttttagacgggttaggtcgcgggtttgggataagataggttcgggtagagtttggagttcgttgtggtgtaggttgagtcgttttagggcgggtaggttagttagggtttcgggggttagtacgttgagcgcgttgtgcgatagtcgtagttagcggacgcgtagtagtttttggaaggttatggcgggtaggtaaattagggcgttgtgggttaggtttagcgtggttagcgtatttagtgtttcgaacgttttcggtcgtagtttttttagtgcgtttttttttagttttagtcgtcgtaacgagtttagttcgtttagcgttttttggggtagtttacgtaggtggttggaggttaggttgagtaggagtaggcggtttaggttacggaaggcgttttcggttattagttttatttcgtagtggcgtaggtttaggtgtgtgaggtgaggtacgttttggaaggcggttgcggggattatttttagtaaattgttttgtaggtttagtcgttgggttagttggggatagcgaggagaaagtggggttgagttaggtagggatttcgtttttgtaagtgttgtttttttttcggaatattttttttttttgttattttttttatatttttttttattcgatttttgatattttttttaggaagtttttttttttagtgttttgggtattatttattgtggtattttttatattgtgttgtttttgttttttcgtttttttttttttattagttgatgattttgtagagtagagattatattttattttgttatagttcgtttttttattatagggtttgtagtgaatttagtatcgatttatgggttatttatttattttatttatatagtaaggattttaaatagattatttttttgttattggtttttattatttttattttatagaagtgtaaattgaggtttaaagagaagtaatttgttaaggtttttcgggtaggcggtggtagattaattggtgtttagtttaggtttttttttttgggtttttattttgttttattgttattttgtgtttgtgtttttgttttgttgattttagggatggcgtttggtattttagtgaggttttggtatcggtaggtaacgtgtcgtttggagttgttatagatgtaggtttgtgggtagcgttgggcggcggtttgtttagtcggggttagtagtagaagtataagaagcggtagtattaaggggatatgggtggagtttcggggtttgggacggggagggagagtttgttgtgtataagggtcgaggttatatgttgttttttatttagttttagttatggtgtagtttttgttttaaaaattttttagagtttttttttttgggtttaggaaagtgttaattattttgagtttttttgttttttattttttacgtagtggaggttttatgattagttttgttttatatgggaggaaatcgaggtttagaaaagtgatttggttagtttttttgtttttgtttaatggtttagtgaggatttgttgattgtgagaatgattttagtttagagtatgtttttaggttgtggtgaggttttggtttagggtaggttcggaagtagtttgtttttagattgatatgatgttagtttttaggtggtaggagtataatggtattttttagaaaggagggaggtatttagttcgggtttttgagtttttttttgtttgtttgtttaaatagagataagttttgttttgttgtttaggttggagtttggagtgtagtggaatgattatggtttattgtagtttttattttttgggttaaagtgatttttttattttagttttttgagtagttgggattataggtatatattattacgtttggttaattttttaattatttttggtag

SEQ ID NO: 1495 - DNA, 3096 bp, Artificial Sequence
  chemically treated genomic DNA (Homo sapiens)
ttattagaagtaattaaaaaattagttaggcgtggtggtgtgtgtttgtagttttagttatttaagaggttgaggtgagaggattattttagtttaggaggtgaaggttgtagtaagttatagttattttattgtattttagattttagtttgggtaatagagtaaggtttgtttttatttaaataaataaataaaaaaagatttaaggattcggattggatgttttttttttttttggggggtattattatgtttttgttatttgggagttggtattatattagtttgaggataggttgttttcgagtttattttggattagagttttattatagtttgagaatatgttttgaattggagttatttttatagttagtaagtttttattgagttattgggtagaggtaaagggattaattaggttatttttttgagtttcggtttttttttatgtaaaataggattaattataggatttttattgcgtggggggtggggggtagggaggtttagggtgattggtatttttttgggtttaaaggaggaggttttgaggggtttttggggtaggagttgtattatggttgggattaagtgagggatagtatgtggtttcggtttttgtgtataatagatttttttttttcgttttaggtttcggagttttatttatgtttttttggtgttgtcgttttttgtatttttgttgttggtttcggttaggtaggtcgtcgtttagcgttgtttataggtttgtatttgtgataattttaggcgatacgttgtttgtcggtattagaattttattgaggtgttagacgttatttttgaggttagtagggtaggagtataggtatagagtggtagtggggtaaggtggggatttagagggaggagtttgggttgggtattagttgatttgttatcgtttgttcgggagattttggtaaattatttttttttgagttttagtttatatttttgtaaaatgggaataataaaaattagtaatagggagatgatttatttaaaatttttattgtgtgaatggaataagtaggtgatttatagatcgatattgaatttattgtagattttgtggtggagaggcgggttgtggtagggtgaggtgtggtttttgttttgtagagttattagttagtggaggagagagagcgaggaggtagggatagtatagtgtgaaaaatgttatagtgggtgatgtttagggtattggagaggaaggttttttggaggaggtgttaggggtcggatgaagagaaatatgggaaaggtgataggagaaaagagtgtttcggggaagaagtagtatttgtaaaggcggggtttttgtttggtttagttttatttttttttcgttgtttttagttgatttagcggttggatttgtagggtaatttgttgaaggtgattttcgtagtcgttttttagggcgtgttttattttatatatttggatttgcgttattgcgaggtggagttggtggtcgagggcgtttttcgtggtttgggtcgtttgtttttgtttaatttggtttttaattatttgcgtgagttgttttaggaggcgttggacgggttgggttcgttgcggcggttggagttggaggggaacgtattggaggagttgcggtcggggacgttcggggtattgggtgcgttggttacgttaaatttggtttataacgttttggtttatttgttcgttatggttttttaggggttattgcgcgttcgttggttgcggttgtcgtataacgcgtttagcgtgttggttttcgaggttttggttggtttgttcgttttgagacggtttagtttatattataacgagttttaggttttgttcgggtttgttttgttttaggttcgcggtttggttcgtttggagttgggttataattcgtttatttacgcgggcgaggaggacgggttggcgttgttcggtttgcgggagttgttgttggacggcggggttttgtaggttttgggttttagggttttcgtatattgttcgcgtttgtatattttcgattttcgcgggaattagttagatattttgttttcgttgtagggttcgggttagttgcgtcggttgcggttgtaggggaattcgttgtggtgcggttgttaggcgcggtttttattcgagtggttggcgcgggcgcgcgtgcgttcggacggcgcgtgttaggggtcgcggcgtttgcggggcgaggttttggacgttttgcggttttgggatttgcgttgttttggggacgcggcgtaggaagaggaagagttggaagagcgggttgtggtcgggtttcgcgttttttcgcgcggtttttcgcgcggtttcggggaggagcgggtagtcgcgttttgttttcgcgtttgcgtgtgcgttttcgagtttcggtatagtagttgcgagggttgcggtttgtaggcggtgtttcgcggtttttttagcgatatttagtttttggatttgaggcggaattattttttttcggtgtttcgagcggtttttttcggtttgggttatttggtgtcgttgtatttgtagtattgcggtatcgcggagttggaagcgggcgttttggtcgggttgggtcgtttgatttatttgtattttttcgataattagttcgtaggttttagcgttgttgtttttgaaggggtttttcgtttcggttatttgtatttagaacgtaatcgttttttgtaggtgttaggggttgttttgcgcgttttgtttagttttttttttttgtatttgtaggataacgttgtggatcgtttggtatttggggatttggggagaatacgggttttgcgttgggtttatttgagtggaaatcgtattatcgaagtgttttttggggcgttgggtttagttcgggagttggagaagttgtatttggataggaattagttgcgagaggtgtttattggggttttggaggggttgtttgtttttttggagttgtagttttcgggtaatttatttagggttttgcgtgacggagttttttagtttgtgggtaggtcgttgtagtatttttttttgaatagtagtggtttgga

SEQ ID NO: 1496 - DNA, 2400 bp, Artificial Sequence
  chemically treated genomic DNA (Homo sapiens)
gtttcgttgtaatgaaaattatagtaataatgatgatatttaattttgatgggtatttggtatatgtttggtgttgttttaaggattttgtatgtatttatttatttaatttttatataattttacgagggagaggttattattgtttttattttattaatgattatttggagttaggtttgtttaaagttatttagttggtgataggtagagttgggattcgattttaggagtttttggttttttaaatattttttaggttgtttttatatgatagtttttttcgggttttgtatttttagtttttttcggataaagtttttcgattttattttattttgttgtttttatgggattttttgtagggttttgggtgtttttggagttttagtatttaaagttaatttttagtgtttttagatttgtgcgtttggagtttggtgagatgatttcgttaggttttgggtgttcgcgtttttatagttttaaagtttttgtatcgtggtgggtgtaattagtttggatgaaataaggatattagggtttaagttcgggttttgttatttagttcggtttttttgggttaggtattttttttttttaagtattagtttttttaattatgatatgagataaagtattaggaagtattttgtaggttataatgttattaattgttgttaatttgggttattttgggagttttttattttcgttaattgttgttttattttaagttttgggtagtttttagtggtagatggttttgggtgttttagttttgttttttgttaggttttgtggttttgagtatatttttttatttttttgattttaatttaagggatgttatgagatggagtaagggcgcgtatgtgatatttatttggtaaagttatcgtcgggttatgttagttgttattattattattgttgtttttggagaattttaagttttttttaaatggattttttttaagtttttggttttttttttgattttggatttaggagtagagtttgtgaagtgttatttttagtatgttgagtttttttatttttttaaataacgtatttttgttattaggtattatgtattagtaaagagaggagggttgatgttagggttcggggacgggatatttaggttggggtgtttagatttttttgttgattattttatcggttttgttgttttatttatatagagtttgtttagtttgtcggtttgggtgttgatggatgaggacgttcggatttttttttattagtcgttttatgatttagagtaggtgttttaggtatttcgtcggtttcgttcgcgtattcggaaagtgtaagtgattagtttttgggtttttatatggttagagttttgggtttttgttggaaaagtattttttttttttgaaaggagagaaggaaaatatagattagttatatttttggatattttaggatgatttgatttattagatgggtttagaaagttatgtttaggtttggagggatagagggtgtgtgttttttaatgtgataataaggattggaagacgaggattgggatattgattttagagagtttggtgttatagtaattattggggatagtttagaagttttgggtgtttggaaagaattgggggtagagaggagggaaaagttgttttatttataaatattttttgagtatttttgggaatgttttttttttggtgtgttggagttttatggggttagttatggttttagttgtattatgttggtttttagagtatattgttttttttttattttaaaaagtttattttttttattaaaaatttaagttattcgtagattgttgggtttttaaagtttaggttgttgttattaagaattttgggaaaagtaggacggagtttttgagttttttattagtttttttttttgtttttttttattaatgtttttaagggttttttttatgtttggtattttttttgtgtatataggtaggtgtgttttaattttagttgtgttatgtggtagtcgtaggttttagagtaaggtattttatttttttaatttttagttttttttagttgaaaaattagaaatagttatatttatattagagtttggttgtagggagtagaggaataaatatatttgaatattttggtaagtgaaaggtatcgaatgagcgtgtatttttttttttatttgttttttgagtttggttttttggtttataaagaagggagaataattttatttttaaagaggttgtgaggatttggggataagtgtgttcgtttagaggagtaattgtagttatattttagtattttttgttttttttgttttttttgttttttgtaaggggtttttttggatataggagtaggaagttgggtt

SEQ ID NO: 1497 - DNA, 2400 bp, Artificial Sequence
  chemically treated genomic DNA (Homo sapiens)
ggtttagttttttgtttttgtgtttagaggagttttttgtaaggagtagggaaggtagaggagatagaagatgttgaaatgtggttgtaattgtttttttgggcgggtatatttgtttttaaatttttataatttttttggaggtgggattgtttttttttttttatggattaggaagttaggtttagaaagtaggtggggaaggggatatacgtttattcggtgttttttatttgttaaagtgtttagatgtgtttgtttttttgttttttataattaagttttgatgtaaatgtgattgtttttaattttttagttgagggaaattgaaggttggagaggtgaagtgttttgttttggggtttgcggttgttatatggtatagttggaattaagatatatttgtttgtgtgtataggggagatgttaggtatggagaggatttttggagatattggtgggaggaagtagagggaggagttggtggggagtttaggagtttcgttttgttttttttagaatttttagtagtagtaatttgggttttggaagtttagtagtttacgagtggtttgaatttttggtgggaaggatgggttttttggaataagggaggaatagtgtgttttggaggttagtatgatataattagagttatagttggttttatggagttttaatatattagggagaaggtatttttagagatgtttagagaatgtttgtggatggggtagttttttttttttttttgtttttaattttttttaggtatttagagtttttgggttatttttagtagttgttgtggtattaaattttttggagttaatattttagttttcgttttttaatttttattattatattgaaaggtatatattttttgtttttttaagtttgaatatgattttttaaatttatttaataaattaaattattttggagtgtttagggatatggttgatttgtattttttttttttttttttagggaaaagagatgtttttttagtagggatttagggttttggttatgtggaagtttaggggttggttatttatatttttcgggtgcgcgggcggagtcggcggagtgtttggggtatttgttttgagttatagggcgattggtaaaagaagattcggacgtttttatttattagtatttagatcggtaggttgagtaggttttgtgtgggtgagatagtagaatcggtggggtagttagtagaaagatttggatattttagtttagatgtttcgttttcgagttttgatattagtttttttttttttattaatgtatgatgtttgataatagaaatgcgttgtttaaaagaataagaaaatttagtatgttgaaggtaatattttataagttttgtttttgggtttaaggttaggagagggattaggggtttgagaagagtttatttggaaaagatttaaagttttttagaaatagtagtaatggtgatgataattaatatgattcggcggtgattttattaggtgggtattatatgcgcgtttttgttttattttatgatattttttgagttaggattagagaggtgaagggatatgtttaaggttataaagtttagtaagggatagagttggggtatttagagttatttgttattaaaggttatttaaagtttaaggtgagataatagttggcgggggtggggggtttttaaaataatttaaattaataatagttggtggtattatagtttataaaatgttttttgatattttattttatattatagttgaggaaattgatgtttggagagggaaagtatttggtttagaggagtcgagttaagtgatagggttcggatttgagttttagtgtttttgttttatttaagttggttatatttattacgatgtaaagattttgaagttgtgaggacgcgagtatttagagtttggcggggttattttattaaattttaagcgtataggtttggggatattgagggttggttttgggtgttgaggttttagaggtatttagagttttgtagaggattttatgggggtagtaggatgaggtggggtcggggaattttgttcgagaggaattggggatgtagagttcggaaaaggttgttatatggggatagtttgggaggtgtttaaggagttaggggtttttgggatcgaattttagttttgtttgttattagttgggtggttttgggtaaatttggttttagatggttattaataaaatggggataataatagtttttttttcgtgggattgtgtgagaattaaatgagtaaatatatgtagaatttttagaataatattaggtatatattaggtgtttattaaagttagatgttattattgttattgtgatttttattataacgaggt

SEQ ID NO: 1498 - DNA, 2495 bp, Artificial Sequence
  chemically treated genomic DNA (Homo sapiens)
atatatttgtgaatgtttgttgggtttatatttaagaggggaattgttgtattattaggtatgtatatattaagttttaaaagatattgttaaagttttttaaagtaattttattaatttatatttaatgaaaattttaattttgtatattttttataatatttagtattgttaatttgtaaaattttaagtatttttataggtggttagttggagttttttgtggtattaatttgtatttttttaatggttgttgatgttgagtaattttttatattatatgtttgttggttatggaggtatttttttttaaaatgtgttagtttgagttttttgtttatttttaattgatttttttttatttgtaggaaatttttaaataaattttggatgttagttttttgtttgatatttataatgtaaatatttttttttgtttaatgtaaatatttttttttgttgtttgttattttattttttttaaagtaagaaaagatttttggtcgggtatagtggtttatatttgtaattttagtattttgggaggttaaggtaggtggattatttgaggttaggagttcgtaattattttagttaataaggtgaaattttgtttttattaaaattataaaaattagttaggtgtggtggtaggtatttgtaatttgtatttgggaggttgaggtaggagaattatttgaattcgggaggaggaggttgtagtgagttaagatcgtgttattgtattttattttggtttataggagtgaaattttgttttaaaaaaaaaaaaagagtttgttgtttttatcgagttttgaagaacgttagtagttcgttgtttaaaattaaattatagggttttatgatgggttaatttgatgggaaagttattattttgatagtcgttgtttaggggattggttaagtagttgttttagtttttgtaagagaaggtgttaaagttatagttatagatattaatgtgtttaaattttaggaattggaaaagtatttgggtatttaaattcgtgtttttgatgttataaagaagaaataaattgattagttcgttaatgaagttgagagatttgatgttttttttaatgttgttggttttgtttattatggaattgttttggattgtgaggagaaagattgggatttttcgatgaattttaatgtgcgtagtacgtatttgatgattaaggtatttttttttaaaatgtttgtttaaaaatttggtaatattattattatgttttttgtggtttttagtattaaaggagttgtgaatagatgtgtgtatagtataattaaggtagtcgtgattggttttataaaatttgtggttgtagattttatttagtagggtattaggtgtaattgtgtgtgtttaggaacggttgatacgttatttttataagaaagaatataagttagaggaaattttgaagaggtacggaatgattttttgaagagataaaagatgggacgatttgtaattgtagaagaaatagttatgttttgcgtgtatgtggtttttgatgaatttgtttatgtaattggtaattttgttattattgatggaggatggagtttgtgattttaggatttttatggtgggaaggaaggtaggttttttttatttatagtgaatttggttatgaagaaaatttattaattattttttttttgttaattatatgttaatgaaattaagttttttttaataatgttattgtttgtaagagtttgattttttaagtatattaatttttttgtaattttttttgaaattattgtaaagaaataaaaatattgaatttatagtaagagaatagtttttaaaataaattttaatttgtaagtatttgtgttagttattttgggttgttataataaattattatagatggagtgttatagataataaatatttattttttagtttggaggttaggaagtgtaagattaaggtgttagtagatatggtatttggttagggtttattttttagtttgtagatggttttttttttgttatatttttatatagtaagagtagagaaaaaaagtaagtttttatgtgtttttttataaggatattaattttgtttatgggggtattatttttatgatttaattattttttaaaggttttattttttaatgtattatattgggggttaggatgttaatatatgattttggggtgatataaatagtttattgtagtatatataattaaaatgtaaatatgaagaaaaaaggaagtttttgttttttttgtggggggtggggttaaggaagaagatagtaattttaggattaggtattgtagtttatgtttataatttttgtattttgggaggttaaggtaagaggattatttgttgttaggagtttaggattagtttagttaatagagagaggttaaggtaggaggattatttgagtttaagagtttgaggttgtagtgagttgtaattatgt

SEQ ID NO: 1499 - DNA, 2495 bp, Artificial Sequence
  chemically treated genomic DNA (Homo sapiens)
gtatgattatagtttattgtagttttaaatttttgggtttaaataatttttttattttagtttttttttattaattaggttggttttgaatttttggtagtaagtgatttttttgttttggttttttaaagtgtaggaattataggtatgagttataatgtttagttttgaaattattatttttttttttaattttattttttataaaaaaaataaaaatttttttttttttttatatttatattttaattgtatatgttgtaatgggttatttgtattattttaaagttatgtgttgatattttaatttttaatatgatatattaggaggtggggtttttgggaggtaattaggttataagggtagtgtttttatgaataggattagtgtttttataaaaagatatataagagtttgttttttttttttgtttttgttatgtgaggatgtagtaagaagaggattatttgtaaattaggaagtgggttttaattagatattatatttgttggtattttgattttgtattttttagtttttagattgaaaaataaatgtttgttgtttatgatattttatttatggtaatttgttatagtagtttaaagtgattaatatagatgtttataaattgagatttattttaaaaattatttttttgttgtgagtttaatatttttatttttttataatgattttagaagagattataaagagattaatatatttaaagaattagatttttgtaaatagtgatattgttaaaaagggtttagttttattaatatgtgattagtaggaaggagatgattggtgagttttttttatagttaggtttattgtggataggaagagtttgtttttttttttattatggagattttaaaattataagttttattttttattaatgatgatagggttattagttatataagtagatttattagaagttatatatacgtagagtatggttattttttttgtagttgtaaatcgttttattttttgtttttttaggaaattatttcgtgtttttttaggattttttttggtttgtatttttttttgtagagatggcgtattaatcgtttttgggtatatatagttgtatttgatgttttgttggatgaaatttgtagttatagattttgtgaggttaattacggttgttttggttgtgttgtatatatatttgtttataatttttttgatgttggaaattatagaaaatatggtgataatattgttagatttttgagtaagtattttaggaaggaatgttttgattattaggtacgtgttgcgtatattgagatttatcgagaagttttagtttttttttttataatttaggatagttttatgatggataaaattagtaatattaaagagaatattaagttttttaattttattggcgaattgattaatttgttttttttttgtgatattaaggatacgagtttgaatatttaggtatttttttagtttttgaagtttggatatattaatgtttgtggttatgattttggtatttttttttataaaagttaaggtagttgtttggttaattttttgagtagcggttgttaggatgatgatttttttattaagttgatttattatggaattttgtggtttaattttaagtagcgagttgttggcgttttttagaattcggtgggagtaataaattttttttttttttttgaaatagagttttatttttgtgggttaggatggagtgtaatggtacggttttggtttattgtaatttttttttttcgggtttaagtgatttttttgttttagttttttaagtataaattataggtgtttgttattatatttggttaatttttgtagttttagtagagatagggttttattttgttggttaggatggttgcgaatttttgattttaggtgatttatttgttttggttttttaaagtgttgggattataggtgtgagttattgtgttcggttaagaatttttttttattttaaggagaataaaatggtaagtaatagaggaagatatttatattagatagaagaaaatatttatattataaatattagataaaggattagtatttagaatttatttaaaaattttttataaataagaaaaaattagttaaaagtggataagagatttaaattggtatattttaaaagggagtatttttatagttaataggtatataatataaaaagttgtttaatattaatagttattagggaaatgtaaattaatattataaggagttttagttaattatttatgagaatgtttaaaattttataaattgataatattaaatgttgtagaggatgtgtagaattgaaatttttattgagtgtaaattggtaaaattattttggaaaattttgatagtattttttaaagtttaatatatgtatatttgatgatgtagtaattttttttttaggtataaatttaatagatatttataggtgtgt

SEQ ID NO: 1500 - DNA, 2452 bp, Artificial Sequence
  chemically treated genomic DNA (Homo sapiens)
tattagttaagtgagaatagtattatattttttataggttgttgtgagaattttgttttaggttagtgttttgtatatagtgtatgtttaatttatgttttttttttttatatgttggggttttttagtttttttaatggaatttagagttgtgatagttaagggtttagaatttaggatatttgttttattagaatttaggatattcgttttaagttttagttagtagttattagagttgaggttttgtgtgaagtagtattttttttaagtatttttttgttttttgtaaattaaatagaatgatttaattttattatttggtggatgagtttaggattttttagtataagagagatttttttttgttttggtagtgggaagttgtttttttattttttgggaggtgtagagttgggtgattttgggatgggtttttagggtaatgtttttatgtgtgtttatattttttattttttttataggtagtggtgagttttgttaatttttattatgtttagaattgaataggaagtggtaatttggttgttatggtagcgagaggggtaggaatgggtgaggttttttaaggagtattggtatttgtgaggtgggaaaggtatttatatattggtttttttaggatagaggtagggataggatgtggtattagtattttaagaaaaatgtttaaatttagtttaaaatatatatgatgtaatgattgttgttataattaagtagggttttttgatagaggttaagtagagaaagttatttgtgtgaggaaattgagggttttgttttaaagtttgaggaagtttagtagataaaggagttaatgtagagagggtttagagttttattttggtttgggaggtttgggttagtttcgtttggggtttgatattagggtaaagagttaagttagttttaattttttttttttttaatttataaaatattaaataagaaaattgttggtaaggagggtaagaaaaaggttttgagtttttgtttttgtatttatttttttttttataagttagttttttttttttttatttgagacgtaattttgtggttatagtagtagtagtagtaggaaggttggggttatggttttatttagttgggtagtgttaggtttggagatttaaggtgagggtttattcgatataggatgtgttatttgggtttgttagggaaggattcggggttttaaaagtgaagttgtttatttagggaagtgaggtagtgtgggatttattgtttttagttaatcgtagggatttattgagtttattatgagggcggtgttggtagttgttttcgttttttttttcggaattttaggtaggtgtggttgttttatttagtttggggttttaagtcgggaggatttatagttagagggtttttcgttttttttaattttttttagaaattggtttttaggatttagtaagggggttggggtgaggtttttggaacgttaggtatagatttttttggaattttttgggtttagagatttaggggtgcgggtttttaggttgagatggagtattttagattttagttttttatatatatatatttatagggaagtttttataaatttttatttatttatttattgtagattttttttgttttttttttttttttttttttaggtttttggttgtttagaatagttatttgtgtttattgttgtaaataattttttataggtttatttgaaattttatttttgttaagcgggaaaaatgtaaattgttaagatttagggtataaattttgggttgagggaggggtttttgtatttttatatataggtgtgtatgtatatgtatttatatttatagttttattttgttttttatttatttttatatatatatatatacgtttatgtatatagttttatatatattttagtagtttttttttttttttatttatacgttttttttttttgtttttttttttgtttttttttttgtcgattttatttattattagttttttttagatttttagtttttcgtgtaggttttttatagttttcgtagtatttttttttatttattttattttaagatttttttttttttttgtttttagtttacgttagtacgtaggtaagtgttttttatttttttttgtttaatgttatttcgtttgtatagttattagttttagtggaaatgatttagtattaggtttaagattatattttttatttattttaaggtttagaattagaagtattaatttttgatgttcggtatttgtgttatttgtttttttagtgtgtggggatttagttggattttcgtgattatgtatgttttttttatttattagtgttatgtttttattttttagatgggattgttaaaaggtaaattgaggtataataaaattttaaatagattattttagt

SEQ ID NO: 1501 - DNA, 2452 bp, Artificial Sequence
  chemically treated genomic DNA (Homo sapiens)
gttgaaataatttgtttaaaattttattgtgttttagtttattttttgatagttttatttaaggagtagaaatatggtattagtgagtagggggagtatatataattacgggagtttagttgggtttttatatattgaaggagtagatgatataggtatcggatattaaaaattgatgtttttgattttaggttttggggtaagtgaagggtgtggttttgggtttagtgttgggttatttttattggagttggtggttgtataggcgagatagtattgagtaggaggaagtggagggtatttgtttgcgtgttgacgtaggttggaggtaggggaggaagggggttttgagatgaggtgggtgaggggaagtattgcggaggttgtaggaagtttgtacgagggattaggagtttagagggagttgatggtgagtagagtcgataggaggagaggtagggagagggatagagagaggagacgtatggatagggaaaaggagaggttgttggggtgtgtgtgagattgtgtgtatgggcgtgtgtgtgtgtgtgtgaaagtgaataaaagataaagtgagattgtgagtgtgagtgtatgtgtatgtatatttgtgtgtgagagtataggaattttttttttaatttaaaatttatgttttgagttttaataatttgtatttttttcgtttgataaaagtaagattttaagtgagtttgtaagaggttatttgtaatagtgaatataagtgattgttttgagtagttaggagtttgggagagagagagaggaaggaatagaaagaatttgtaatgaatgaatgaatgagagtttataagaatttttttgtgaatgtatatatgtaagaaattagggtttgagatgttttattttagtttaagagttcgtatttttgggtttttgagtttagaagattttaggaaggtttatatttgacgttttagaagttttattttagtttttttgttggattttagggattagtttttgggggaggttggggagggcggggagttttttgattgtgagttttttcggtttggggttttagattgggtggagtagttatatttgtttgaagtttcgaggaaaagggcggaaatagttgttagtatcgtttttataataggtttaatgaatttttgcggttggttgggggtagtgggttttatattgttttatttttttaaatgggtagttttatttttagaatttcgggtttttttttggtaggtttaggtggtatattttgtgtcgggtgggtttttattttggatttttaggtttgatattgtttagttggatggaattatggttttagtttttttgttgttgttgttgttgtggttatagggttgcgttttaggtgaggggagaaggggttgatttgtggaggagggagtgggtatagaggtaggagtttagggttttttttttattttttttattagtagtttttttgtttagtgttttgtgggttggggaaggaggagattagggttgatttagttttttattttaatattaggttttaggcgaagttaatttaggttttttaagttaagataaagttttggattttttttgtattggtttttttatttgttaggtttttttaggttttaaagtagagtttttaatttttttatataaatagttttttttgtttggtttttgttaggaagttttgtttagttatgatagtaattattgtattatgtgtgttttgaattgaatttgaatattttttttgaaatgttgatgttatattttgtttttgtttttgttttgaagggattagtgtgtgaatgttttttttattttatagatattaatgttttttgaggaattttatttatttttgtttttttcgttgttatggtaattaagttattattttttgtttagttttgggtatggtgggggttggtaaaatttattattgtttgtgagaggggtgggaggtgtaggtatatatgaagatattgttttggagatttattttaaggttatttaattttgtattttttagagggtagagaaatagttttttattgttagggtagaaaggggttttttttgtgttaagaaattttgggtttatttattaaataatgaagttggattattttgtttagtttgtaagggatagagggatgtttagagagggtgttgttttatatagagttttagttttagtggttgttggttgggatttgggacggatattttggattttggtgggatagatgttttggattttgggtttttgattgttatagttttgggttttattgggggaattgggaggttttagtatgtgggaaaaggaagtatgagttgagtatgtattgtgtgtaaagtattgatttggggtagaatttttatagtaatttgtgaggggtgtggtgttatttttatttgattgata

SEQ ID NO: 1502 - DNA, 2374 bp, Artificial Sequence
  chemically treated genomic DNA (Homo sapiens)
aagattagtttggttaatatgataaaatttcgtttttattaaaaatataaaaattagttgggtatggtggtgggtatttgtagttttagttatttgggaggttgagatataagaattatttgaattcgagaggttaaggttgtagtgagtcgatagtgttattgtattttagtttgagtaatagagtgagattttgttttaaataaaataaaaaataagggaagggaaaatgttttatttaattttattatttgggggttgggtataaaatatgagaaaaggaagatttaaaggtgaaaaaatggttagtatttataaaagaaaaggagtggttgtttgtgttttaggtagttgattattttttatttttagaatattttattttttttaaaaaaaaaaatttaagtttttaatattttaaaatttttttttaataaatgtttatatattagaaaagttatgggttgtgggaatgaaatttgtaaaaatagtgtttttaatattgaaaatagggttaagaatattggtttaaaatattaatgatatttttttatttttaaaacgaaaggagttgaagttgtttaggtattgaatgtatttatttgtaggtgagatatattagatggtttgtgaagatttataaaattaattaaggtatgaattttataatttttaagttattaagttcgttattataggaataaaatattggaagttataaaaattaattttggttttatatatttagatttaatattgtttaaaatatttttaattaaaaaataagttagtattaagtatgttgaaaatgttggaagaagaggttaagtttttggagtgggaaggatatgtttttttgtggggaagcgtagtagtgtggaagggggaaagggatggtttttagttgatttattttagattttttatttagtttggttttcgttttttgtagagttgttaagaggatatttttttggaatgttttttttttaggggtttttattttttaagaatttatgagttttggtaataggcgggggtggggagggtaggtttaaggggtggtagttggtttaggataatttatttgggggtagtatgtttagagagattttgtgtaaaatttggggttttttggttttatttattatgtagttatattcgttagtattttttttttgtagggtaattatttttatttgtagtaggtttttatttaggtttgtgagaaacgtacgtttgttcgttggagttttgcgatttatagttgaggatattaggggttggtattttttcggtaagaatcggtattatattttttgagttttgatattttggagtttgtagtggtattgtattagaatggagttttttacgggtgtttgtagtattttagggaggttgttaattatgttttgatttggggaaggaaaggaggtgggaattttgggtaggagttgggagtattttttagtttagttgttggtatgggtgtggtatttataataatacgttatttttggatatggggttgagtatatggggtttagagttgtagttttttttgaattttattttttagttttaggagtagtagtaagagtagggtgaggtttatggttgggtagagaaatgttaatttttgggtttgtttgggtattgatgtagtattcgtttgagggtaggaaatatttgttttagaaagttatttggggtgggagaaaggaaatgatgggtatttttaggggtggggaaagggagtttttttaagttttggttggtttagtgtttaggaattgttttgagggtaagggtgggtaagataggatgagaagattcgaagaaagttagaagtttgtaggggttggggttcggttaaggggtgagatgggaggattgtgataattggaggataggagaggaagaggaaagatgatttttaggatttttttaatatagaatttgagggtgtatagttatgaaggaggaaggtagagtgttttgtattttatttaatgttatttttgtttttaattttttgggagtgttttacgattatttaagtttttaggaggttgtatgtagtataattttaaataggaagttttattttgattttgtgttttggattgggtttttttttatttattgttttggatattatagaatttttttatttggatttatattttttagttttgggaaataaatttttattttgataattatatgtttatttttttttttttttttatttttttgtaattttttaattagttggttattgaatgtcgtgtgtttattttatttttatattttttttattttattttttatttttttgttttttttgttttgtttttaaggagatttt

SEQ ID NO: 1503 - DNA, 2374 bp, Artificial Sequence
  chemically treated genomic DNA (Homo sapiens)
gaaatttttttgaaggtagaataaaagagataaaaagatggaaaatgagatagaaaagatatgaaaatgagatgaatatacgatatttaataattaattagttaaggaattgtagaaaaatggaaggggagaagaaaatggatatgtaattattaaagtaagaatttgttttttagaattgaagaatgtggatttagatggaagggttttatagtgtttaggataataaatgaagaaagatttagtttagggtataggattaaggtgaaattttttgtttgaggttgtattgtatataattttttaaaagtttgggtggtcgtggggtatttttaaagaattgagagtaagaatggtattgagtgaggtgtagggtattttattttttttttttatagttgtgtatttttagattttgtattaggaagattttgaagattatttttttttttttttttttgttttttaattgttataatttttttattttattttttagtcgggttttagtttttgtaggtttttagtttttttcgggtttttttattttgttttgtttatttttatttttagggtagtttttgagtattgagttaattagggtttggaagaattttttttttttatttttggaggtgtttattatttttttttttttattttaagtgattttttgaggtagatgttttttgtttttaggcgaatgttgtattagtgtttaggtaagtttaggagttgatatttttttgtttagttatgggttttattttgtttttgttgttgtttttgggattagaaggtaaggtttaggaggagttgtagttttgggttttatatgtttagttttatgtttaggagtaacgtgttattgtgaatgttatatttatattagtagttgggttgggagatgtttttagtttttgtttaaaatttttattttttttttttttttaggttagggtatagttggtagtttttttgaggtgttgtaggtattcgtgggaagttttattttggtgtagtgttattataggttttaggatgttaaagtttagaaggtgtggtgtcggtttttgtcggaggggtgttagtttttggtgtttttagttgtggatcgtagagttttagcgggtaggcgtacgttttttatagatttgggtgggggtttgttgtaggtggaaatggttattttgtaggaagaggatgttggcgagtatggttgtatggtggatggggttagggggttttagattttgtatagagtttttttgaatatattgtttttaggtgagttattttaggttagttattattttttagatttattttttttattttcgtttattgttagggtttatgggtttttgaggagtgggggtttttggggaggaggtattttaaggagatatttttttgatagttttgtagggagcggaaattaaattgggtgggaagtttgagataaattagttgaaaattattttttttttttttttatattattgcgtttttttataggaaggtatgttttttttattttagggatttggtttttttttttagtatttttaatatatttgatgttaatttattttttaattagaaatattttaaataatgttgaatttgagtgtataaaattagaattaatttttgtagtttttagtgttttatttttgtaatagcgggtttgatggtttaagaattatggaatttatattttaattaattttataagtttttataggttatttagtatgttttatttataagtaggtatatttagtgtttgaataattttaatttttttcgttttaaaaatggaaaaatgttattaatattttaagttaatatttttgattttatttttagtattaaagatattgtttttgtaggttttatttttatagtttataatttttttagtatataagtatttgttaaaagaaaattttaaaatattaaaaatttgggtttttttttttaagaaagataggatgttttaaaaataaaaaatggttagttatttgaagtatagatagttatttttttttttttatggatattggttatttttttatttttaggtttttttttttttatattttatgtttaatttttaaataataaaattaagtagagtattttttttttttttgttttttgttttgtttgagatagggttttattttgttgtttaagttggagtgtagtggtattatcggtttattgtaattttggtttttcgggtttaagtgatttttgtgttttagttttttaagtaattgggattataggtgtttattattatgtttagttaatttttgtatttttagtagagacggggttttattatgttggttaggttggtttt

SEQ ID NO: 1504 - DNA, 2465 bp, Artificial Sequence
  chemically treated genomic DNA (Homo sapiens)
ttttaataaatatgatgattttaggtagtttttaggagtggaattgtatagtatttgtttttttgttatcggtttattttgtttagtattatatttttaatataaattttcgggtttaagtaatttttttattttagttttttgagtagttggaattataggtatatatttttatggttggtagggttttttttattttttgtagagatgggggttttattaagttgtttaggttggttttaaatttttggttttaagggattttttttttttggttttataaagtgttgggattataggtgtgagttattatttttagttaatttttttcgtttttaaggcgaaataatatttttttgtatgtatatattatattacgtttatttatttattttttagtggatatttgggttgtttttgtttttgggtttttgtgaacgatgttgttgtgaatataagtgtgtcggtttggttttttttttttttaaatttgttttttgtttttttgtattgtgatggtttttttaaggcggatatataagtatttaagtttcgatttatatttcggagtaattttattgtagtttatattttagtttgtttacgagttagggatgggtattttacgattggtattgtttggttttagagaaaagtttataattttgggggttatagttgaggttttttatggttgtagggaatttgtttttattgtagttagattaatatttagtttagtttttttattagtttttgggaagtttatagaggtattttttataagagatgttattaaaagtttttgattgtatttagtttggaaattaggttttttatagatgataattagtttagaagatgtttttatgagtatggtgatagggtttaaatgtgtttgggagttttattttttttgattttttaatacgtaaatatttttaaaggttatagtaggaggttttattgaaattgaagagttttttttggttaattttttttttaaaaatgttatttggaaattaagtataattttgttaaaatgagtaaggattttatttaaatgaaattaaagagggttattttattttttttatttagtatttaaaataatttagagtgtgagaaattagattgtttagggttatacgtttttaaggattgttttttaatagttttttttttgtttttgtttcggggttttagttttttttttttatttttggatttaagtttgcgtggtgttggttatattgattgatagttaggggatatgtatttattagtagggtgtgttttttcggtttttataatgaatgttggtttagtcgttagtagtttttacgttaatgttttttcgttagtgaggttaggtttttaggtgttattggagttagaggagggtagttggcgtgcgttaagtagttattaggagttattttatgttaatgttttattttttgtacgttatagttacgtttagttgtaaaagtagttatgttttgggtttttttggtttttttttttttaagaaaaaaaaaaaggaaaggaagaaagtaattaaaggggcgggggggatttaaagtttgtattttagtatgagttatcgaattaaagtttagtaattatatgtaaaataaatttttcgtgagggtagtaagttttcgtgaggacggttgggattggttgtatagtaaagttaggagaggttttatgaggagaatagtatttagagtttaagggggagaatttttgttttaagtgggaatttggaatagaagtttttttgtttttagttgagaagatgattagattttagttgtttttggggaaagtcggtatttatagttggatataaatatagtttgtaggaggaagagtgttagagtaagagatagagtagagatggttacggagatatgggtgtatatggggatatggtatagggaggattttgtttttgtttttacgaaggggaattttaaacgagttacgaagtttttttgattagggattaaggtattagtttgtgttagagataatatggttttgtggttttttattgtcgttttgcgtggcgtgggtggtggttttttttttattgtggtaggggaagtttgaatttatttgattatagtattttgtagattgtttggtttttagttttattaggtataggtaatagatttagaattttgaaattattttttaaatttggtgatgtttattaggggttagaagaagaggaaagaatataattaatttatatagtagtttattttttaataaatttttttgttttaggtagtaatttgttttaggatatatagttaattagttggttaaggtgggtttagaatttaggtgttggtgttagggaggtaagaatggtatatggtaattggaatgtgtagttttttttatttatttattatcggttttttaaagaaaatgtgaagtagtgt

SEQ ID NO: 1505 - DNA, 2465 bp, Artificial Sequence
  chemically treated genomic DNA (Homo sapiens)
atattgttttatattttttttgggagatcggtggtgaataaataaaaagagttatatattttagttattatgtgttatttttatttttttagtattaatatttgggttttaaatttattttggttaattggttgattgtgtgttttggagtaagttgttgtttgagatagggaggtttgttgggaggtgggttattgtgtgggttgattgtgtttttttttttttttttgatttttgatgggtattattaaatttaggaaataattttagagttttgggtttgttgtttgtatttggtgaggttggagattaggtagtttgtagaatgttgtggttaggtgggtttagattttttttgttatagtgggagagaagttattatttacgttacgtagggcggtagtagggagttatagggttatgttatttttgatataggttagtgttttggtttttagttagaaggatttcgtgattcgtttggaattttttttcgtgaaggtagggatagagttttttttgtgttatgtttttatatgtatttatattttcgtagttatttttgttttgttttttgttttgatatttttttttttgtaagttatgtttgtgtttagttgtgagtatcgattttttttaggagtagttagaatttgattatttttttagttggaggtaggagaatttttgttttaagtttttatttggaataggggtttttttttttggattttgaatgttgttttttttatggagttttttttggttttgttgtgtagttaattttagtcgtttttacggagatttgttgtttttacggagggtttgttttgtatgtggttgttgaattttgattcggtgatttatgttgaggtgtaaattttaagtttttttcgtttttttaattgttttttttttttttttttttttttttttaaaaaaaaaaaaattaaaaaaatttaaagtataattatttttgtagttgaacgtgattgtggcgtgtaggaagtggagtattggtatgaagtggtttttagtggttgtttggcgtacgttagttgtttttttttgattttagtggtatttgggggtttggttttattgacgggagaatattggcgtgaaggttgttggcgattgggttagtatttattgtgaagatcggagggatatattttgttggtgagtgtatgttttttggttgttagttagtgtggttaatattacgtagatttgagtttaggggtggaggagagagattggaatttcggggtagaggtaggaggagggttgttagagagtagtttttgggggcgtgtgattttgaataatttgattttttatattttaaattattttaagtgttaaataaaaaaaataagataattttttttaattttatttaggtgaaatttttgtttattttagtaaaattgtgtttaatttttagatgatatttttgggggaaagattaattagagggagttttttagttttagtaaaattttttgttgtggtttttgaagatatttacgtattaggaaattagaaagagtagaatttttaggtatatttgagttttgttattatgtttatgagagtattttttagattagttattatttatgggaagtttagtttttaggttgaatgtagttaggaatttttggtagtattttttatagaggatgtttttgtgggttttttaaaggttaatgaggaaattgaattaaatgttaatttgattgtagtgaagataaattttttgtagttataagaaattttagttatggtttttaagattatgagtttttttttaaggttaggtaatgttaatcgtggggtgtttatttttgattcgtgaataggttggggtgtggattatagtagagttgtttcgggatgtggatcggggtttaaatgtttgtgtgttcgttttagagaaattattataatgtagaagagtaggggataagtttgagaaaggaaaaggttaggtcggtatatttatgtttatagtaatatcgtttatagaggtttagaggtagaggtaatttaagtgtttattgaagggtgaatagataaacgtgatgtggtgtatatatatagaggaatgttatttcgttttaaaaacgagagaaattggttgggagtggtggtttatatttgtaattttagtattttgtggggttagggagggaggattttttgaggttaggagtttgagattagtttgggtaatttagtgagatttttatttttataaaaaataaaaaaaattttgttagttatgggagtgtgtgtttgtagttttagttgtttaggaggttgaggtaggaggattgtttgagttcgggagtttgtattgaagatataatgttgagtaaaataagtcggtgataaaaggataaatattgtatagttttatttttaagagttgtttagaattattatatttattgaga

SEQ ID NO: 1506 - DNA, 2459 bp, Artificial Sequence
  chemically treated genomic DNA (Homo sapiens)
ttcggttaaggcggggtttaggtgtttgtttttttcgagtttgtttaaggtttttatgttgtaagtattagatgttgaatttaggtggttttttattgttttggaggagaaggttgttaggattggtttttttttttcgtttttttttttttttataaaaagaatgggcggtgtttcgggaaaaagttcgttttaggatattttagtgtgtttattgttgttttatggttatatgtacggttgtttataaattgtatttttattgaggaagaaggtaaaaaatttagagagggtaaggaattatttattttgtatatgtgattatttggatcgtttaaatttttttttaaaaaataagaattataatttaaagaaaatgttattttgattattgttagaaatttaaggtgtttaagtaaaatttaaaagtaaaattagagtttattttgttggaatgaatgtaatataaatataattttattatttttaattagaaattttggtttgttattattttggttggtggttttgtaatgtacgtttaaggggaaaaatattagatttttatatgttttttttttattttttttattttttagtttagagtataatttttagaagataatagaaggaagttagttttggggaaatttggtattttatttattgtaggaaggagaagaaatagtagaaacgggttagagagttttattagattaaatgttaaattatttttttttaaagatgtggtagttttttttaagtttttagagagagagagtgagaggagtagattttagagtagttaattgaagtaaacggatataagcgaggagggtttttcgcgggagaattttcgagaggtagagggcgagtttttcgagagcggtggtttcgtagttttttttgacgtcgagttgttatttcgttggagtagtagtgtagcggttgtggttgtgtagtagtgttatgaaaatgatttattttaattagaatttttggaggtagagggagagttttttttagatgttattattattgttaagtagttgtatttttcgtcgggaaatttttttaggtaagagaacgtagagacgttcgttcgtagttcgggggaggacgttttattaggtgttggttacgaataggaggtttttttgggtgtgaggggtgcgttagggtcgtttatttaggagcggttcgcgggaggattaggcgaggtttttaacggagtttttagtgtgtgtgtcgaagaaggttttttggggtttcgtaacgttcgtagttagttttttaagggcgcgtttgatttgttaggtgagttttcggtcgagggcgtagcgtatacggttagtttcgcgtaggtagattgtatagttcgttttaagggttacgtttattttgttaaggtgttaattttggatatttatttgagtaagattgagggggtataagtggacgagtcggtcgtgattatttttagagcggaagattgcggtgattgggacgatatggagaagaggtttagcggtcgtaggtcggggaggcggagggggtcgtagaaatttatcgattttttcggcgcggacgtcgagttttttgagagcgttgttagggacgacgcggtgttcgacgacgaggtggcgttaaacgcggttagcgataacgtttcggcggaaaagaaagtgaaattttcgcgggtagttttcgacgggggcgttgttttcgttgcgagtttagagtttaagtttagtttcggtattaaagggtagtttcgaggggagtcggatcggagtaaatagttattttcggtttcgttttttacgaagaggaagggtaggagtcgtgttttcgaggtcgtgttcgtttcgttcgttagcggttttcgggttttcgttaaggagtttttatttaagagggtgttcgattttagtttagttattaagggtattgcggtcgagagcggggaggaggcggcgcgggttatttttcgcgagttttcggttaagagtagttcgttgttgtcggagattaagttcgagtataagaggggttcgttttttaattattttaacggtcgggtagagggaggtcgaagtagagagttgggtagagcggtcggagcgtttggagtttttgacgtcgacggtttgaagtttaggaattatttcggcgtgggtaggtcgatagtgattattaaagtgattttgtaagtagtcgcgtaagtttcggtcgagttgttgttcgtatacgtgttgggggttcgttttgagaggttcggggtatttgtattgtggaagaaacgtttggttattgaatttttttttttatgttgaatttaagatagtgaagggttagtttatatagttaagatttaagatgatatttgtggtagtttttttagttaattttttttttaatataagatttaagtttaacgaatgtaaaaataggatatt

SEQ ID NO: 1507 - DNA, 2459 bp, Artificial Sequence
  chemically treated genomic DNA (Homo sapiens)
gatattttatttttatattcgttaaatttaaattttgtgttaaaaagggaattaattgaggaggttgttataggtgttattttaaattttgattgtgtaaattggttttttattattttaagtttagtatggaggggaaagtttagtgattagacgttttttttataatgtagatatttcgagttttttagagcggatttttagtacgtgtgcggatagtaattcggtcgggatttgcgcggttatttatagggttattttagtggttattgtcgatttgtttacgtcgaaatggtttttgggttttaagtcgtcggcgttagaagttttaggcgtttcggtcgttttgtttagttttttgtttcgatttttttttgttcggtcgttgaagtggttggggagcgggttttttttgtgttcgggtttgattttcggtagtagcgagttgtttttgatcgggagttcgcgggggatggttcgcgtcgtttttttttcgttttcggtcgtagtgtttttggtgattgggttgggatcgggtatttttttgggtggggattttttggcgggagttcgggggtcgttggcgggcggggcgggtacggtttcgagggtacggtttttgtttttttttttcgtgggggacgaagtcgggggtggttgtttgtttcggttcgatttttttcggagttgttttttggtatcggggttgggtttggattttgggttcgtagcggaggtaacgttttcgtcgagggttgttcgcggagattttattttttttttcgtcgaggcgttatcgttggtcgcgtttggcgttatttcgtcgtcgaatatcgcgtcgtttttggtagcgtttttagggagttcggcgttcgcgtcgggggagtcggtggatttttgcgatttttttcgttttttcgatttacggtcgttggattttttttttatgtcgttttagttatcgtaatttttcgttttgggagtaattacgatcggttcgtttatttgtgtttttttagttttatttaagtagatgtttaaagttagtattttagtagggtgggcgtgatttttggggcgggttgtgtagtttgtttgcgcggagttggtcgtgtgcgttgcgttttcggtcggaggtttatttggtaaattagacgcgtttttggggggttggttgcgggcgttgcggggttttagggagtttttttcggtatatatattgggggtttcgttaggggtttcgtttagttttttcgcgggtcgtttttgggtgggcgattttggcgtattttttatatttaggaaagttttttgttcgtggttagtatttggtgaagcgttttttttcggattgcgggcgggcgtttttgcgtttttttgtttggaggaatttttcggcgaggaatgtagttgtttggtagtggtggtggtatttgggaaaggttttttttttgtttttagaggttttaattggggtgaattatttttatggtattgttgtatagttatagtcgttgtattgttgttttagcgaggtgatagttcggcgttagggggggttgcggggttatcgttttcggggagttcgttttttgtttttcggggattttttcgcggggagtttttttcgtttgtgttcgtttgttttagttggttgttttgagatttgttttttttattttttttttttgggagtttaggagaggttattatatttttgggagagagtggtttggtatttgatttggtgggattttttaattcgtttttattgtttttttttttttttgtagtgaatagagtgttaagtttttttaaaattggtttttttttgttgttttttggaggttgtgttttggattgaaaaataaaagggatgaggagggaatatatgagaatttggtgtttttttttttagacgtatattatagaattattagttaaaatgataatagattagagtttttaattgaaaatgataaagttatgtttatgttatatttattttaataaaataaattttggttttatttttgaattttgtttaaatattttaagtttttggtagtagttagaatagtattttttttgaattataatttttgttttttaaaggaaaatttgaacggtttaaataattatatatataaaataaatagttttttgttttttttaggttttttatttttttttttaataaagatgtaatttataaatagtcgtgtatgtgattatggggtagtagtaaatatattaaagtattttaaggcggattttttttcgaaatatcgtttattttttttgtaggagggaaggaggacgaagaaaaaaaattagttttagtagtttttttttttagaatagtaagaagttatttgggtttaatatttagtatttgtaatatgaaaattttaagtaagttcggaggaagtaagtatttgggtttcgttttagtcgga

SEQ ID NO: 1508 - DNA, 2382 bp, Artificial Sequence
  chemically treated genomic DNA (Homo sapiens)
ataaagttattattttttattttttgagaagtttattattttttaataggttaagtgtttttttgtatatttaggggtttgtattttttttgtttagatttgtttttttttgtttattgggttttatgtgtttttatggttgggttaatgattaatatatagatatatttaaagtttttttttatttgtgtttttttttttttttttttattgtttgtttttgtttgtttattttattttatatttattattggtttttatttggggtttgatgttataaaggagtattttgaggtttcgttttattttttttagcgtttgggttaattttttttaagtgttggtggtatatatttttttttttaggaggtttagaggtttgattatgttgttgttattgttgtattgaaggaaaagatttttatttaagaagatttgcgttttatattagggttgtttaggtttggataatgattttatagtgaagttgaagtaaagagagtgattatttgtgagataaagatgtaggtgaggtttaggataggggaagaggtttattagaatttgcgtttttgtgatttaagattttttggattgggttaggttagtagaggcggggtagttttattttagatttttttaattttttggatttttgtttttatttttttttgattgtttgggatgagatatttgatggtattagggatttttggggtgtatttagtgttaatggtgttaataggaggatttatgttataagtatttttagtaatatttattaagttttgaggtataaaatagataagttagtgtatgattttttgagatttaaattttagttgaatatatatgatatttaatagaaaggaaaaagaggtatttattataggatatacgttgaatttttgtggggttttagatgtttaggaaagtgatttggagtagaaggcggggggtagtattgtagaattgttttttgtgagttagtgttttgtttagggttttaggttgtggttttttatgaattgggtgtaatattttagggatttttttttttacgttatttttaagagtaggtatttatttgtttgaagtttgtatgaagttttattcgtttattttttattttttttttttttttttgtttttagttagtttttgtgtttaggatatttattaattatgatttttaaggttattagtagtaatagtagaaataaaagaaggcgtatagggttagaagttagggatatttttcgtatattgtggagagtaataggtaggaagttgggcgtgtatatatttatttttattggtatggtgaagaaatgttatttaatagcgtgggtgtgggtattgtttaaattttttattttggaataattgaggttaggtttgtagagatttaattaaagaataattttgtgaagagagtgttttttaagtatttagaatataattatttattgaaaaataaaagaagatatttaaaaataaaattaattttgaataaattttttttttttttttgtttttgttgtttttgtaaaaaaaattttttttggtgtgagtaggatggttggaggttatgtgagttttttttttttttttttagtttttttttttttttttttttttgttttttttgtttttttttttttttttggtattttttgtttatttttgtatttttttttatcgttattttttttttttttattgtttttaattcgtttaaattttttttttttaaatggttgagatttttttttattaagtatattttagtattaattaaattagttgtaaataggtagtaagtggtttattatgatagatgggttttgtgtgtgtgtgtgtgtgtgtaattgtaataaaatatattgagttatttaataaatatagagtgtttattatatgtattaggtattattatagatgttaattaacgaaattgaaatggttaggtttttatagtggtttatgtttataattttagtattttgggaggatgaggtaggaggattatttgaggtcgggagtttaagattagtttgggtaatatagtaagattttatttttataaaaaaaaatttttttttattatattttaagttttgggttatatgtgtagaacgtgtagttttgttatataggtatatacgtgttttggtagtttgttgtatttattaatttattatttatattaggtattttttttaatgttattttttttttagttttttatttcgtgataggttttggtgtgtgatgtttttttttttgtgtttatgtgtttttattggttaatttttatttatgagtgagaatatgtggtatttggttttttgattttgtgatagtttgttgagaatgttg

(The sequence listing continues in the following parts.)

1. Method for diagnosing a proliferative disease in a subject comprising:
a) providing a biological sample from a subject,
b) detecting the presence, absence, abundance and/or expression of one or more markers and determining therefrom upon the presence or absence of a proliferative disease; and
c) detecting the presence, absence, abundance and/or expression of one or more cell- and/or tissue-markers and determining therefrom if said one or more cell- and/or tissue-markers are atypically present, absent or present at above normal levels within said sample; and
d) determining the presence or absence of a cell proliferative disorder and location thereof based on the presence, absence, abundance and/or expression as detected in step b) and c).

2. The method according to claim 1, further comprising detecting the presence, absence, abundance and/or expression of one or more markers and determining therefrom characteristics of said cell proliferative disorder.

3. The method according to claim 1 or 2, wherein said marker in step b) is indicative of more than one proliferative disease.

4. The method according to any of claims 1 to 3, wherein said proliferative disease is cancer.

5. The method according to any of claims 1 to 4, wherein said detecting the presence, absence, abundance and/or expression of one or more markers comprises detecting physiological, genetic, and/or cellular presence, absence, abundance and/or expression, and cell count.

6. The method according to claim 5, wherein said detecting the expression comprises detecting the expression of protein, mRNA expression and/or the presence or absence of DNA methylation in one or more of said markers.

7. The method according to any of claims 1 to 6, comprising the steps of:
a) providing a biological sample from a subject, said biological sample comprising genomic DNA;
b) detecting the level of DNA methylation in one or more markers and determining therefrom upon the presence or absence of a proliferative disease; and
c) detecting the level of methylation of one or more markers and determining therefrom if said one or more cell- and/or tissue-markers are atypically present, absent or present at above normal levels within said sample; and
d) determining the presence or absence of a cell proliferative disorder and location thereof, based on the level of DNA methylation as detected in step b) and c).

8. The method according to claim 7, wherein the determining the presence or absence of a cell proliferative disorder of step b) further comprises comparing said methylation profile to one or more standard methylation profiles, wherein said standard methylation profiles are selected from the group consisting of methylation profiles of non cell proliferative disorder samples and methylation profiles of cell proliferative disorder samples.

9. The method according to any of claims 1 to 8, wherein the markers of step b) are selected from the group consisting of nucleic acid sequences according to any of SEQ ID NO: 100 to SEQ ID NO: 161.

10. The method according to any of claims 1 to 9, wherein the markers of step c) are selected from the group consisting of nucleic acid sequences according to any of SEQ ID NO: 1 to SEQ ID NO: 99 and SEQ ID NO: 844 to SEQ ID NO: 1255.

11. The method according to any of claims 1 to 10, wherein said characterizing cancer comprises determining the likelihood of disease-free survival, and/or monitoring disease progression in said subject.

12. The method according to any of claims 1 to 10, wherein said characterizing cancer comprises determining metastatic disease.

13. The method according to any of claims 1 to 10, wherein said characterizing cancer comprises determining relapse of the disease after complete resection of the tumor in said subject by identifying tissue markers and cancer markers in said sample that are identical to the removed tumor.

14. The method according to any of claims 1 to 13, wherein said biological sample is a biopsy sample or a blood sample.

15. The method according to any of claims 1 to 14, wherein said proliferative disease is in the early pre-clinical stage exhibiting no clinical symptoms.

16. The method according to any of claims 7 to 15, wherein said detecting the presence or absence of DNA methylation comprises treatment of said genomic DNA with one or more reagents suitable to convert 5-position unmethylated cytosine bases to uracil or to another base that is detectably dissimilar to cytosine in terms of hybridization properties.

17. The method according to claim 16, wherein the markers of step b) are selected from the group consisting of nucleic acid sequences according to any of SEQ ID NO: 100 to SEQ ID NO: 161, and SEQ ID NO: 360 to SEQ ID NO: 483, and SEQ ID NO: 682 to SEQ ID NO: 805.

18. The method according to claim 16 or 17, wherein said the markers of step c) are selected from the group consisting of nucleic acid sequences according to any of SEQ ID NO: 1 to SEQ ID NO: 99, and SEQ ID NO: 162 to SEQ ID NO: 359, and SEQ ID NO: 484 to SEQ ID NO: 681 and SEQ ID NO: 844 to SEQ ID NO: 2903.

19. Method for generating a pan-cancer marker panel for the improved diagnosis and/or monitoring of a proliferative disease in a subject, comprising
a) providing a biological sample from said subject suspected of or previously being diagnosed as having a proliferative disease,
b) providing a first set of one or more markers indicative for proliferative disease,
c) determining the presence, absence, abundance and/or expression of said one or more markers of step b);
d) providing a first set of cell- and/or tissue markers,
e) determining the expression of said one or more markers of step d), and
f) generating a pan-cancer marker panel that is specific for said proliferative disease in said subject by selecting those markers that are differently expressed in said subject when compared to an expression profile of a healthy sample.

20. The method according to claim 19, wherein said detecting the presence, absence, abundance and/or expression of one or more markers comprises detecting physiological, genetic, and/or cellular presence, absence, abundance and/or expression, and cell count, measuring the expression of protein, mRNA expression and/or the presence or absence of DNA methylation in one or more of said markers.

21. The method according to claim 19 or 20, wherein said marker is indicative of more than one proliferative disease.

22. The method according to any of claims 19 to 21, wherein the markers of step b) are selected from the group consisting of nucleic acid sequences according to any of SEQ ID NO: 100 to SEQ ID NO: 161.

23. The method according to any of claims 19 to 22, wherein the markers of step c) are selected from the group consisting of nucleic acid sequences according to any of SEQ ID NO: 1 to SEQ ID NO: 99 SEQ ID NO: 844 to SEQ ID NO: 1255.

24. The method according to any of claims 19 to 23, wherein said proliferative disease is selected from cancer, such as soft tissue, skin, leukemia, renal, prostate, brain, bone, blood, lymphoid, stomach, head and neck, colon or breast cancer.

25. The method according to any of claims 19 to 24, wherein said proliferative disease is in the early pre-clinical stage exhibiting no clinical symptoms.

26. The method according to any of claims 1 to 25, wherein said detecting of the expression is qualitative or additionally quantitative.

27. An improved method for treatment of a proliferative disease, comprising a method according to any of claims 1 to 26 and selecting a suitable treatment regimen for said proliferative disease to be treated.

28. The method according to claim 27, wherein said proliferative disease is cancer.

29. A kit for diagnosing a proliferative disease in a subject, comprising reagents for detecting the expression of one or more marker indicative for more than one proliferative disease; and reagents for localizing the proliferative disease and/or characterizing the type of proliferative disease by detecting specific tissue markers based on nucleic acid-analysis.

30. Kit according to claim 29, wherein the markers are selected from the group consisting of nucleic acid sequences according to any of SEQ ID NO: 1 to SEQ ID NO: 161 and SEQ ID NO: 844 to SEQ ID NO: 1255, and chemically pretreated sequences thereof.

31. Kit according to claim 29 or 30, further containing instructions for using said kit for detecting of a proliferative disease, in particular cancer, in said subject.
